United States Patent Application Publication US 2011/0183924 A1 - sequence listing, part 248

SEQ ID NO: 697864 - DNA, 1126 bp, Homo sapiens
cccgcggagtgttatctctactgatcaatataaaaagctacacgtcgtgtttaatgaagccggccctcctccttctcagggggtttgttgtggttcaacacgcgggtctttgtgttgcccacaaaagtggttgtccccgacaaatactgctctcgtactgtgcacagagatgtttggatacaaccgtcacacgcggggcgcggggggggcgacacaaaattgcctcctcttcttgtaggaagacaattgatctcttcatcatcacacgcgggggggccggcatattatcctttctctcccccgacgcagcagaggtgtgttttggcgcggcagataataagtattatcctacagagcagccctgtttgttctcaagcacgcgcggagtcatcatcgtagaggcgccgcgcggggatgatattatatagcggtgttctcttgttcagagcgcacacacagatacctctcgctctctcacgaggggcgtttccactaggtagttgtgtgtgttagagaccccccggcgcctcttctcgtggaaagagaggcgccgcgcccaccacctggggagaaagcgcccacacagatgtgttacacaggtgtctcacttatcttctggggagggggaaatgtgggagacaccaggggcgtcgtttataaagacccgtgttttctctcctgagataatttgtttcaccacgtgggggcgcacccccgcggagagaaaatggggggagataaacgtggatgtaaatgtggtgttttcacacaccgcgaaaataatgagacgtggctatctgtgttgtttaagacgccaacacactggagatttgtggtggacgcttcttatttgtgggccaaggaggggaaaagagaaagttttagcggcacttttgtctggtcccaaaatgtatacacaggggcttttgtttagaagaattatttgggttgttaaatggggcaaaagagctttttgttgaagccaccagaggggtgttgttaaaaatacagtggggcacttatcacgcacaagggtttttttgcgcccccttttttttataaaagggtttttttgtttttttgggaaaaggggagggaacaaaaaaagggaaattaaaagggtgga

SEQ ID NO: 697865 - DNA, 126 bp, Homo sapiens
gactcatagagatacctgcaggatttggactcagctgcaggagcgttaggagggtcggagaaataggctctcgaaggggaaaattcaacgtgaggagcagtacaaggacgcccgaagcacagtgga

SEQ ID NO: 697866 - DNA, 551 bp, Homo sapiens
tttgtggttctggctcactggcgatcccactctccgtacatctcttcatcccatgctcctcgcgtcttcttagtcatcgaggctcatggatatgctcgggcttgtccattcctcaggctagcgagtctgtatcgatctatcgagtcttggcccgcccatcccagtcttccggttttgaagcatcaggatcctttatcttcttggctggcaggacgtcccaatcgtcttccaaggagccgcacatccacctggctgttgtcaatcttcacctcataggtgttgtctggccgactcaatcggtgtgatacaggtttgtaaactcatcatccttgacaacggatgtccttcttgatcagcacgttcttgcccttgtacttgaagatgacatgaaccttctttggtgccagaaccagaaatttccgatatttgtggtcctggccatagataaatacacgggtataacttctacaggcacggtatatgtcagagtacccggatttcaatgacaattgtccaatagctgtcctcgaaaaagatgcagtatgaatttc

SEQ ID NO: 697867 - DNA, 1410 bp, Homo sapiens
tgattatctgtttgcaggactgcggtgagacggttcgtgtgttgtagtttttgtgtctctgtcgatttgtgtgtaatattgcatgtgcgcatgtttggcttgtgtgtctggtctgtgtgtgtctcgctgttgtttttgtttcgtgtttgttcatgattgtcacggtcgtctctctacatattctttggtcgtgtgttatgtcgatcgacgcagggcagtagtctctttgttgaggagggagcgaggctggggtcttgttttttttataaggggatggggcctcttcttttttgggggggccaccctcttttttgtaccagatgggggtctctacagatggcgtctccaagaatattcataatcgcaagccgcgactccaacgaggggggggcccacaagaggacccggggacgcccggccgggggctctaccacagagagaccatactatgcgcacaatttgacccgctcttccaccccacaccggggttgaaaaacccccttccgcggcgtccaaggatgtccgtcgcgttcccccaaaggctcggtgtggtcttaaaagaaaattatggggggagaatttctcctctgtgaaccgttcaaaagtgtgagataaaaagggcgccctctccccggtgaagtcccccccccttccggtaaattcaacttcgcggtttctggatgctcttgtgtcaaaaacccacggcctgggaccgccttttcttgaaacctcccgcgggatgggcccctcgcttaactagaagcttctttcttctttaaaaggggaatgctcggttttttttttgaagggtgtttccaaaacaagtttgagaaagcactgtaaacctttttgagcgccccgaggccaacatgagagtgtttcacaaaaaaattcgcggggttgtttttgggttttttggtgttttgggtttaattctttggtgtgccttgccctctttttgttttaaatggggttgggccccacatcgagaagtggggtgccccacactccaactttcttctgaggattcggaccggagctcgtgaaatcccccttctttgtctggaagactggagccagactgtggcttttttccgaacatccgctgtgacagtttttggagatgttagatgtggttagggaccccgcgcgggtttggccagaccaactgccctgggagacccccagacccctgcgtccaatctgtgctgtgcgccccaccacgtagaacgtgcacgaacgtccctgagagggtttttgaagatagtttaatttatattgtccttttttaactggagaagaacgtaacgcactaactccactcgaatgttgtatttgccgtggctgaggaatttttgtacgcagttttttttggctttacgaaaccgatttaaagaccgtgtgaaatga

SEQ ID NO: 697868 - DNA, 1301 bp, Homo sapiens
  misc_feature (342)..(342): n is a, c, g, or t
ggcagcaggaggcaatggaagcgacggggaccggggatgatggtgccaggtgcctggggtcggggcgagagactgccgggactgtagggcagcggccctgggtcgcagggtatccggagcggccgacgggatcggatcccgggccgggcgggcgggcaaggatgcgtgagcaggttgatgagcggaagacagtcaggagcctgtgagcgtcgaggtacgggcatggcacccggtgcggctgcgtggtgacgaccgggcgatgtgagcaaccatggagccactaccatgagaaagacatgggcaaagcggccaggtaaccttgttatgaatcctatcctttgnccacccaggtctgacacctctaagctttgacgaccactactctactattgtggtgatatgccagcgtttggatatcacccccatgagttaactgcaaagtccgcgccttggcgctcgcggacattttaccagatacagtcttgtgagggtagaagaactagttgggaccgaatcacccagggtctcttcccattacaggcgaagtggtgcgattcctgtgggtgcaattgtttgttagttccttgggcaagcaaccccatgccctgctgtccgtgcaaaacgtaaagaagactaaacccgtggtgccacgatccggtcaaacaggcaaggtgaggacatgctctttcctttgcagacgaagttgtgtggcacattgacgtaactcctacttgggaaagaatggggtgcgacatcttcccccaaaggtggcttcggggtagctaaactaaaatcccagacacgcggtctgttggcctctttgacccctgagtgaattgttccgctcgactggggggtaccactgttctgggacgaagaggctaatgattgacatggcttaatttcgggaaggggttggcaaattaggaatttcaagtgggagtctaatgggggcatataactttgggaaagaaagtggcacaaaggtggtcattaaccagttggatacacgaataaagattggagagaaataagagtagaaatctaatacaatacacacacggggcgaaaacctccaggagggaagcagagcggcgaactcaacggaaatgagagcacgccccagcgcggaagcccaaacgggagactctaacaaagggggcgagaaccctggtaaaacacgaaaacggaaacgagactggtcaggagacggcgcaagcagcgtcccacgccagacaataggcgagcaacaccgacacgagcagcaccgtgcaaatagttaacaagcatgagcacacaga

SEQ ID NO: 697869 - DNA, 376 bp, Homo sapiens
actcgaccttcaatgcgccgtcagagccgggaagaaaattcccgtccgcccatatccggccaatgcgcgcgatcggtatgctcgacacggcgaccgcaagattggaagaatagctatacgtacgttgtcgcgagccgggttttggtacccccgttgacagtccgcctttcgatcaaatcgctcgcccatataaccgtgccggcaaacatcatcgtaccaaatatcgctggaattgcagtgccataactcgacgtttgcagttccagttcctgcaggcgcgggcccgtcgcgacgggggccatttccaactatagcgcgatcgagctgctagccaagcatggccccaacagcaccgccgacgggcccgccaatcgcc

SEQ ID NO: 697870 - DNA, 975 bp, Homo sapiens
catatcatactagcgtttagcgagtctcacgttcgtcggagtactagtatatcggtcacacctcatatcctccctactatgcctagaaggaatagtactatcgcggtcatgtatagcgtacgtctcataaccctcaacagccactccctcttagccaatatgtgcctattgccatactagtctttgccgccgtgcgaaaggagcggtgggcctagccctactagtctcaatctccaagccacatagtggcctagactacgtagcataaccgtaaacctactccaatgctaaaactaatcgtcccaacaagtatatattactacccactgacatgacgtttgccaaaagacacataggatttgaatcaacacaagccacccacagcctaattattagcatcatccctctactatttcttaagccaaatcaacaacaacctattccagctgtcccccaaccttctcgctccgatgccctaggaacccccgtcctaatactaactacctgactcctacccctcacaatcatggcaagcgaaagccatttatccagtgaagcactatcaggagaaaaactctacctctctatactactctcctacaaatctcctgattataaccttcacagcccacaggaactaatcatatttgatatcttccttcgagaccgacacttgatccgcgatcttggctatcagtccacccgatgaggaacagcacagatctgctgaatcgcatgcggcatacttcctattgtaacaccctaggtagggtccttaccctattcatcggctaaatttcaagttcacaacacctaggctcactaaatactactagtcgtctactgccgagagtatcaaactactggccaaaattaaatgactactaacaaagtataagacaccacttggggccactttgatcctaagcagggagccatccggtacaagtatgcggactaacagggaggtaagcc

SEQ ID NO: 697871 - DNA, 117 bp, Homo sapiens
acatgtctgacaacgctctgggggtctgggggggacgaagtacgaccaactacccctagattgtgggggggggaatgggtcactcgtaccccagatctcagacctgggtgctccccc

SEQ ID NO: 697872 - DNA, 1338 bp, Homo sapiens
tgggggggggggaaaggttaaaaaattttgggcttcttgaaaccaaagtttatattagtggctcctttatacactgtggaaaacaagacacacagaaaacagctgtgtgtccaaaagaagtaacattaaacctcaagcgaggggctcgtggtttctcaagaagcctttcgtggagtgttttacacagccgtgaatttggggaggggatatcacgagactctgtggtgtggcgccttttggcggagcccagtgtggtttaccgcccaaaatgttaatatagtatcattgtgtgagagaggatatacactctccactctctgtggggcgagaatattctccgtgaaaataagtcccaattcttcaaaagagtgtggggagatattctccctctccttcttataacttctctcttataatatattgtggggaccatgtgcagtgtgtgcgtcccacaaacgttgggggtatatctccaggtgaaatttttctatagtataacatgtagaacatatcctctatatatcactctgtgggaaaatcagcgtgtaaaagacagtgtgcgcacaattcacctgatggggaaatttttctcttcttctttataaaaaaacacgagttaaagtgaaaaaaactatattattctctccttttctcgcccaggcaagtgtgaagagtggttttaactatagacccaggtgggggggtggctcccctgagtgccacgtgtgaaaaaaaaacatggggggggaaaccttccaagagggggctcagggaaccagacacttctccaaaagccactttgtgccacatgtggtgtgttcccgggtgggcctttacaatttttttcaaatatttgccccccctttttttggggggtcaattgttctcccacaagaagacaacggttgtatcacaaacattacttcgtgcctcggtgcgcccacctttttttgtaactaacgcgttttacaaaaacgggagtttttctcctcggggccgttggaaaaattttgtggggctctcacggaaaaaaggaggcgcgcctcttttttccccctggaaaaagatgttttgagaagcaccttatagaaaacccgggcgttttacgcggttgttatacccccggtttttttgtgtaaatcccccccgtggtgggacacccaccacgtgggggtctttttaacacaaaaacatttcggctctgtgacccgccgagagggcttctaaacaacatatcattttgtcatcatataaagagagaatcataccacggtgcccaccaaaagttcttctctggcataaccacaaactgtgggcaataactagtaacgcgttgta

SEQ ID NO: 697873 - DNA, 368 bp, Homo sapiens
agtcacttgatacttctgattgtttcctccactttaagttaagcctgggcaacatgttgagatcctgatctggtttggctgtgtccccaaccaaatctcacttgaattgtaattcccacaattcccacgtgtcatgggtggtgactgaattatgggggtgggtctttccggtgctgttcttatgatagtgaatgagtcttacgagatctgatggttttaaaaaccatcagtgcagggagttgccctgcacaagctctctgcctgctgccctccacataagatgtgtcttgctcctctcgccttctgccatgattgtgaggcttcctcagccatgtggaactgtaagtccaattaaacctgtttcttgc

SEQ ID NO: 697874 - DNA, 897 bp, Homo sapiens
tggcctttatgaaacctaaatatttatatattttacattaaatggttacaatacaacttcaggcaaatgccaactggaacaccaagcccagaaattcagaggaaatactcttccaaacaaggaacaccaaggtaggatcttgcttccattccagccacaatactggtgatcataatggtgcctagtcagttatccagattatcgatgtgttcaccacatcatctattctcagaatgctccgaacagtttcagtcgcaagagtcagagcactgactgataccaccagaggtgtggacaaccagttcctccaaaatgttggaaataccaccctttcggacattaatgcctgcagatttttctccctgggcatgccggtttcttagttctgtcactgtaaaagatgggattcaggccggcattaacagtctagtgtatgataggaatgacctcgcatagaatttgcaaaagcaacgaacgcagtaggataccataccattcagtgtcgtgaatatcagttaatcgtagggccaactctattctgggcaccaacctcctgtaataagagccctctttttcactaaagacgaataacacatagggcatcatgaatggagcgccaggtgtttcaatcaccagtttgtaacccctgacacattggcactgtttcccgggctgcagcctgggaatctgaaccgttgcaaaaccttaatggcccccagtaacagaaacccacctgtggggaattgtcccataaacacggtgcgtcactgtccaaaaaacaacgtgtgcaaaacaacacaaggcttttaaagaggggacaacaccaaaaaaataaagaacctctgtcgcagaaaaagttcccgaaggaaaaatttgaaaaagtaataaccagaacca

SEQ ID NO: 697875 - DNA, 517 bp, Homo sapiens
  misc_feature (17)..(17): n is a, c, g, or t
  misc_feature (88)..(88): n is a, c, g, or t
cgggatcctcatccttngctccatcaaaaaactgcagaggtttccctcatcggcaagggggtattgggtgtcttccattatttctccngggttataatgaaattcaaatgatcacatccacctgattcacatttgaaaagaagagtacagtatatggtactgtggtaggataccagggtacatgtggtaggaagactaacaggagaacatggtctacccagttcagaaggctggacatgtcccacagtcaggtaggaattgaagaggaaggctgatggcccactaatggtggatgagagaattgctttgcatttacaaaggacatacgacatgctccttatttacttatttattttatcctttggcgtgttaatgagtacattttaaatgagacaacagctctcaatgatgtttaagacaataatttttaaaaactacttaaggtatttttacttattgtttcccgatatggcttttgcgccttctttacaagacattttaggtcatttttaaacca

SEQ ID NO: 697876 - DNA, 143 bp, Homo sapiens
tagaagaggctgcagaatatgctaaacttttggcacgagaatgaaggaggctaaggagaagcgccagtgaacaaattgcgaagcagacgctagactttcctctctgcgcagcttctcacttctaagtctcaaatgcaatcagt

SEQ ID NO: 697877 - DNA, 727 bp, Homo sapiens
gcaggcacagcccctccgtgtcctttgtctctcctgtctgaaggccagagcaggctgctaggcctggggccaccactgcccctgggtgctacacccagtgtgctgggtcactgggaacttcctgaagtggtgtcacctgaactgggcccccaaggatggggtgcgggcagtaccgcaggaagaggagcagcccctgtgaagattgagaggtctgggaagcccctgcggcttgggagagtgggggtcgccaggcagggggaaagcccctgtgccacctgctttttgccacgagactcacggctccagcagagtgcagtgagtggcatggtggggtgaggctggggccctgggcctgacctccacacgcctgcctggcctctctgtttgccatgggcatgacgagagcacagctgctggcgactcagaagcgggcgctggcagagttgacgagtgcgagcaaacggggcctggggctgcgggcttgtgacccctgggagcggagctttcttggagagccccctctacgatggtgcctctacgtgcggtgacgcgggtgcgggcgcttctgcacaaccttggtcagggcaacgtggagcgtggctcgagtgcgaacgagaccacccggctcagtcggggatgtgggagtggactgggctggctgcagactgggggtcgagcgccttctgacagtgaccggtgccgggaccgcgcatcggcacgcggccca

SEQ ID NO: 697878 - DNA, 468 bp, Homo sapiens
ggacagagcaggactctgtgaggacacaggcagaagacagcatctccaaggtacaggagagagacctcaggaggaatcaggcttgcccataccctgagtctcagacatccagcctccaggactgtgggatgaataaatgtcttgtgtgtaagtcatccagcctatggtattctgtgacagcagcctgaaatagactaagacatttcataagaagagatgagggcactagtacacacacagaggaaggactctgtgaggacacagggagaagacggcgtctacaagccagagagaaagcaagcctagcgacacggtgacctcagacatgtagcctctacagctgtgagagaataagtatcttttgtttaaaccacctggtctgtggatctctgtaacactcggcaaagctacaagacgaatacacggaccagagcattagaagcgccgcaggtggtccctggcagtcac

SEQ ID NO: 697879 - DNA, 1626 bp, Homo sapiens
tccacttctgtgattaagtaaatggatcttgctacataggttttctcaatgtcttcattcttcagattctccaggcttacgaatgaagacatgagaaaactaggtagcaagatccattttgtgattaataaatggacagacctcgacgatgcggtccacagttagtttactagagacacagatacgtggatctccgcttcacgcgctgtctccgcacacataccgtccgacagacttgcaccgaaccgctccagccaatacgcttggcacaagatccacggctgacactggactataattacgacaactacccagtgtagcaacaggaacaagcacgatactacgagacaggaaatcaaaagataacaaaggagcaccgcccacaccgaacgaacgcgacacgaaacaaggaaaacgcaaagggacagagcagacaaggcaacatcaagaacacacacggacacacgcggcagccagaccgcgaactaaacatcaaaaacaccaacacgcaaaaagagaccacagaacacgaaccacagaaagtaggacagacatacacaaacatagacgaacaaaacaaaacaaaaaaggaacagagcggaacgggacggaaagccagaagaagagagggggaagacgcagcataaaggaacgaatgcaacacgaaacgaggacaagaacgacgcagcgaggacggggacggaacgcccgagcagacccagagacaagacgaagagaaaggcgagcagagacagcgacacacgcaagaaaggcaccagaacgacagtaacgacaacacggaaagacaaaaagtgcaaagaggcacgccacacaccaggcgcagcacacaccaggaacagcaaagacatacgaagaacgacactccaaaaggacaggggcaggccagcgaaccgacagcacaaacagcacaacgagtacgcaaagagacaacggcaggagacagaggagagaagcagccaggaactagacggagaaagaacgagagaacgtacaacgaaacacagaaacagaagacaaacacctgcacagcccacaaccaatcagacggacccgtacctacaccgacgagcaccgaggcacaaggagaaagaaaaacaagagacaaggacacgacacgacacgactagcgaaagacgcaacgcgcgaccagacaagcacagccgagagggggagaaaacatagagacaacgacagacgacgagagacaagcaaacaccaaacgagacagaacacacgagagcgcacgcacagcccagcaacaagcaagcaagacccccacgacagaggccacggacagccgccgcccgagacaggagcgcgcgcacgaccggaggagacggaccagcgcgccgcaggccacccgccgcgcggagccacacacggcggacgctgcgagaagcgcagcacggcccgccagccacagacgacgaccacagagccagcaccgcaggagcgagccgcacgataggtccgccggccgagcccacgtgacgcgagacgcggagcgcgccagcgcgcgccgaccacgcgccgccacggacgacagaccacggacacgagcaccagacacgcaaccacacagcaacccagaggcgaccgagacgc

SEQ ID NO: 697880 - DNA, 385 bp, Homo sapiens
cgagaggataacgaccggcaggtgtactcccaccaagtcatccatgtccctgagaagggacatgatctcattcctttttatggctacatagtatttcatggcatatatgtaccacattttcgttctccagccggtaatcgacaggaatttaggttgattccatgtctttgttattgtactgtaatgaacatatagctgcatgtgtctttataatagaacaatttatattccttggggtatatacccagtaatggtatcactgggccgaatgatagttctgcttttagctctttgaggaatggccatactgtcttccacaatgaactaatttacactcccaccgacagtgtaaaaccattcctttttcagtacaacctgccggtgg

SEQ ID NO: 697881 - DNA, 272 bp, Homo sapiens
  misc_feature (103)..(103): n is a, c, g, or t
aagcatcgagtctcatgagatctgatggttttataagcatctggcatttcccctgctgcatttctctctccgcaacctgtgaagaaggtgccgcttccccttngccttccaccataatcataagtttcctgaggcctccccagccacgtggaactgcaagtctattaaacctcttttctttataaattacccagcctcaaatattctcttttttttttttttttttggggttatgaaaactcgggatgctccggggggactcctctagagtc

SEQ ID NO: 697882 - DNA, 867 bp, Homo sapiens
ggggagcggagcccagagctcctgtgaggtgccgctgacttatggctggtgggcccagccgggagacatgctctcatattcagaaaggccagacgtgaccatctatcaacggagcagatgcgagacgaggaagggaaaacggccccaggttgggggattccagggtcgccgggtaactgttaacctggcacgccttgactcatgtcctctagaccgatcgcatcctctccgtcccactagacaagcatgttctcgatccagtggtctgcaccatggcagcgggagcgaaccccattcaacaacgccaacaatcatgctagcatggtgcacagatgggtctcaggtcggaccaatccgacacgaatgcatccaccaaagggactcagcaagacgagagcacaagcacacacagaccagccacctatcagcaaatccgtgagctacgcacagtccagaacaagagagatacgaagtaccatggtatgggctggaacatttagtgggcgccattccacgatacggaacacgctcaattattcatttggcccaacatagcaacggttagagcactttacaaggaagtacatgagaggatcctttaaacagatacagatagagattacctaggcacacaacaaacaaactaagcattggctcaggagtcacacccccttgcggcatttatacagcttggacacactaggcccctagtacaactggcaagcagttcgggaaagacccacccaagcaaccggtacacaaccggggtggcaaattaattcttaacacggaggaattctccttcaacgagttaccccacttttaaaaacagaagggaatcgcggtcggtacccagatcgggttctc

SEQ ID NO: 697883 - DNA, 356 bp, Homo sapiens
actcacaggatcttctgctccctccctcttcagcaatggtgatacggatacctttcctcgggaagagaaatccatggtttgttgccttgccaataacaaaaatgttggaagtcgagttggcaaagctgttgccattgggatctttcacgtgaaccacgtccaaaagatccaggggtgcctctcttcttgttgggtgataccaaaccaattctttccttaggttaagcacctcccagtcacacatacacaggttacccagtgttccgaaacttgtatgaaaatcagtaactctttgccagctctctataatcaatcgtgaatggtatcattccaccttgaaagagggaggccagcag

SEQ ID NO: 697884 - DNA, 459 bp, Homo sapiens
ggagagtggaggttggagtgagccaacgatcacaccactacactccagcctagagtacagagcaagactctgtctcaacccaagcaaacagacaaacaaaggagaaaagtattatcaaagaacattaccctcaaaaaagacttacacttggccaccaagcccataacaagctgcccatacctcatcataagggaattgcaagttcaaacccacagggagatgacccaaggccacactcatgggttttgtcataaccttttttaaaacaaacagggacacgcgggcggggcccagtggctcccgcctgtaatccccagccctttgggaacggccgaggccacggcggttccccgacgtccgggagattggagcccccccgggctcccatggtgaacctcccgtctctactaaactttccaacactttacggtgggtgtgctagtgcttgcctgttttccc

SEQ ID NO: 697885 - DNA, 289 bp, Homo sapiens
  misc_feature (29)..(29): n is a, c, g, or t
  misc_feature (36)..(36): n is a, c, g, or t
  misc_feature (39)..(39): n is a, c, g, or t
  misc_feature (45)..(45): n is a, c, g, or t
  misc_feature (52)..(52): n is a, c, g, or t
  misc_feature (84)..(84): n is a, c, g, or t
  misc_feature (88)..(88): n is a, c, g, or t
  misc_feature (97)..(98): n is a, c, g, or t
  misc_feature (100)..(101): n is a, c, g, or t
  misc_feature (106)..(106): n is a, c, g, or t
  misc_feature (117)..(117): n is a, c, g, or t
  misc_feature (121)..(121): n is a, c, g, or t
  misc_feature (123)..(123): n is a, c, g, or t
  misc_feature (131)..(131): n is a, c, g, or t
  misc_feature (137)..(137): n is a, c, g, or t
  misc_feature (140)..(140): n is a, c, g, or t
  misc_feature (142)..(142): n is a, c, g, or t
  misc_feature (145)..(146): n is a, c, g, or t
  misc_feature (148)..(148): n is a, c, g, or t
  misc_feature (150)..(150): n is a, c, g, or t
  misc_feature (179)..(179): n is a, c, g, or t
  misc_feature (182)..(182): n is a, c, g, or t
  misc_feature (193)..(193): n is a, c, g, or t
gttggaccaagacgaggttccttccttanccccacnatnggggcnatggtcnatttattctccccaactcaccctcaacaaganactntcctgggtnnannctccncccttccctcncttntncttccttntccccnttntnatnnantnggcagggggagggggagggcacaggcaanaanagattcacatntcctggggtaagggggggttcacagtaatcatggtctactcctcttggccgtggctgggggtagacttaatttagagaggaattccaaaaaaaaaa

SEQ ID NO: 697886 - DNA, 357 bp, Homo sapiens
tatgtctgagtgtcgtgctcaagtttgaagatggccagtgtgagagcgaggaacctggactatgataccctcccggtcctgattcatgtgcaacgggccaaccaggctgcagatgcactacctggtgcccctacatcccgcgcttctggaccttcgaaacaggctgtaccgatgtgtgacgaaatggttgcgagcctcaggggcactaggaggatgacagctctagccaggggcctggtcggggtgttcactcgaacatgccgcaagcctgtcagtgtccctgttctaccagtggctcctgggattccactatccccagaaacatatgcgaattttcatccacaaccgcatcatccg

SEQ ID NO: 697887 - DNA, 436 bp, Homo sapiens
  misc_feature (28)..(28): n is a, c, g, or t
  misc_feature (37)..(37): n is a, c, g, or t
gcctcgctgtctaaagagttcaccaacntgcctgacnacagctggggtcagagagaaggcagatgttcttaatccagtcatcactgcagtgtttctagaggcctcaaacagcgcctcttacattcaagatgccttccaactcctcctgcctgtgctgcagatctctctcatcgagagcaagacagagtcatccacgtgtgagccacagtccagagacctctgacagaaccctgaggagcagagaagagtcctactgagatggtgatagccaagaaatctgactttgctcagggagccctgcagccagagcgaggcatagtactacgtgtgtgaaaggccagcagggcgcaggctcacaggggtgcttgcttctctgcgtagctgattgcctctgctgctcacactgctcttccagccttataagtaataaattatt

SEQ ID NO: 697888 - DNA, 362 bp, Homo sapiens
  misc_feature (29)..(29): n is a, c, g, or t
gtccgcttcccgggttcatgccattctcntgcctcagcctcccgagtagctgggactaccagcgccccgccaccacgcccggctaatcttttcgtatttctagtagagacgccacttcaccatcctacccagcatcctctccatctcctcacctcgtgatccgcccacctcggcctcccaaagtcctgggattacaggcttgagccaccgccactcagcctgagggagtgtaatttcgtctagctctgagttctcttcgtttgtttgttttgttttgttttgtttttttgagatggagtctctccgctctgctcgcccaggctggagtgcagtggcccgatctcggctcactcgcaacgtcc

SEQ ID NO: 697889 - DNA, 306 bp, Homo sapiens
  misc_feature (306)..(306): n is a, c, g, or t
ggatcctcgacggcgccggcagtacccaagtcagaagagagacaatagcagcgataggtaacttccaatgtccgaactaggtaggctggtatgggcccctcaaagccggtgtcatctccttccctgtcaaggctggcttaggtgaggattcccacaacactgttctgggcaccatttgagcagtgacagaggggggatgtgagagtgtcaaagagtgctccaaggccccccccccactttcctccctcctggcttcacaggcacctgaccaccaacaaaaagacaaggggggttagggaagatatn

SEQ ID NO: 697890 - DNA, 366 bp, Homo sapiens
agaaatatcagttgacgtcgaagcacatggaggatgaggacagcgactcaagagggggggagaagcgctttgggccatttgcagcagcacccctcctgctgctgaaccgtttccaaaagctcctggaactgcgacggggaggtcctgcacaggcctgccatcgaggtcagagtccactgccagctggttcgactctttgcacgaggcattggagagaatccgaagcccgactcacacagctgagaagccggggatctgctctcgaactgggaaagtgtgaaaagtatttaagataattattacagaccaattatgttgatatatacatttacatgtcgaagtttatttttgataggtaaatcttga

SEQ ID NO: 697891 - DNA, 362 bp, Homo sapiens
gaacatgcgagctcctctacaggtctgcagctgcaccagcctcaaactagaacatcagctcctccccgagtcttcagctgcatgaccctcaatctagaacatcagctcctctccgggtctgcagctgcaagaacctaaaactagaacattaccttctctccagggctccagttctatgaccctaattctagaacatcagctcctccctgagtctccaactgaaagaccctcaacgcgaacaacatcagctcctccccaagtcttcagctgcaagaccctcaaactagaacatcagctcctctacaggtcttcagctgcacgaccctcaaactagaacatcagctcctccccgggtctgcagg

SEQ ID NO: 697892 - DNA, 242 bp, Homo sapiens
agtgatcgatcaaaagagggactgaatgggagtgggtgaatggatcggtgcaaatccattaccactgctggagaaaccaccctggaaccctaaacatggttcactctcatgttatttttcctttgatcagcttttgtggaaaaacaggacagagatgtttttgtgtccttgatttttgatgtgatttttttttcagcactaaagaagaatttaaatacaaaatagaatgttaaaaaaaaaaa

SEQ ID NO: 697893 - DNA, 140 bp, Homo sapiens
ctttggtttactggaagtagagtgaggaagcatctttccttcactaagttgtctttctgtcttctggatagattgattttaagagactaagggaatttacaaactaaagattttagtcatctggtgggtcagaacataag

SEQ ID NO: 697894 - DNA, 535 bp, Homo sapiens
cgtcgtcatggcgacggtgaagggcgatgtgcacgacatcggcaagaacatcgtcggcgtggtgctcggctgcaacggctacgacgtgatcgatctcggcgtcatggtgtcgtgcgaccgcatcctgcagaccgcgcgcgaacacaaggccgacatcatcggcctgtcgggcctgatcacgccatcgctggaagagatgagccacgtcgcgtccgaaatgacgcgcgagggcttcgacattccgctgctgatcggcggcgccaccacttcgcgtgcgcacaccgcgatcaagatcgcgccgcattacgcgtcgccagtggtgtatgtgccggacgcctcgcgcgcggtcggcgtcgccaccagcctgctgtcgaaggaccagcgcgcggcctatgccgaagaagtggcggccgactacgcgaagatccgcgaacagcacgccgcgaagaagggccagaagctggtgtcgctgaacgacgcgcgcgacaacgcatactgctgcggctggggcagcgaagtgattcccgagcggccg

SEQ ID NO: 697895 - DNA, 495 bp, Homo sapiens
  misc_feature (162)..(162): n is a, c, g, or t
  misc_feature (165)..(165): n is a, c, g, or t
aagctcttctcagggagcgcccggaagtggtcccccagattgccccattctggagtgcccgtagcccctgccccctccccaagggggcccgggggccctcccttttttgtggccagccaatttggtggtaatggggggttgtgcctgggggcccattaaaanttncctttgttaaaggccctccaagaaaaaaaacccggccccggggccggccgggggagttttccccttggccccaaccctttttttttttttttttaaaaaaaaaaacttttaaaaaacccccctttaaaaccaaacctttttttgtttttgaccaagggattttccaaattttgttggggttttgttttcaaggctagggaatttttccccccataaaaccccccggtttttgccccttttatttttatgttttgggattggggggggggccggggttttttttttttttaaggggggggggaccaatgggaattaaaccggggctgttga

SEQ ID NO: 697896 - DNA, 126 bp, Homo sapiens
gtgcatgcattgggtcggttgtatagtcctaggcagtgggtgtgggtgatatcactagcagtggtgggatgaccctcttggactcaggtgatctgtgctggtgttggtggtaactacagctggcta

SEQ ID NO: 697897 - DNA, 271 bp, Homo sapiens
cccctttactctctctctctccctgtttatcttcttactctgcctcctactccctttccctctattctgttctctctctttagtcgtcaaccccctttactctctctctctccctgtttatcttcttactctgcctcctactccctttccctctattctgttctctctctttagtcgtcaaccccctttactctctctctccctgtttatcttcctactctgcctcctactccctttccctctattcgtcgacgcggccgcgaatttagta

SEQ ID NO: 697898 - DNA, 364 bp, Homo sapiens
  misc_feature (12)..(12): n is a, c, g, or t
caacgatggtcnctcagcttcacaagtagctgggattataggcacgcagcaccatgcccggctaattttgtgttttcagtagagacggggtttcaccatgttggccaggatggtctcgatctcttgagctcaggtgatcggctggctcgggctcccaaagtggtgggattacaggcgatagacactgggcccaggcgagatttatgtattatttaatgtgtgggggtatactcaagaatagctcttgtatagagtcacgagatttggccttggggagttactattggaggggttgtagtatcacttggagatagtctcatggtggtatgtgtgtactttaagtatgactattgggaataacaag

SEQ ID NO: 697899 - DNA, 148 bp, Homo sapiens
tcgcccaacacagaaagatccaagcctgtgataaactctctcacacctaaaaccaagtaaaaactcttagtccataggaggcaagcaactccctaaccgaaacaaaaaaaaaacaaaattggtcccagaagccccttctcaaggttca

SEQ ID NO: 697900 - DNA, 1120 bp, Homo sapiens
gtgtcgccgtgttcttttgtgtgtgcttttctttgcttgtgttccttttttggttgtcttttgctcttggaacccctttgctttttctttggtggttctactgcgtctgtttgttccctggtgcgtgaacctttctgggtccttttgtctgtgttctgtatgctggcttttctctgtgtgtcattctgggatgtccttgcagtgccttgacggtatatccatggctgcaagtttatggcaccattgtgttggacctcatgttgttcactgttgcaagttgttatgcctaggtatattgttagggtaaagtaggaagaatgggtcaacttgtgtctagcccttgtggtcttgagtacttcctgcaagggctggaggtacaggttcttagacgtatgattcaaccttggtaggaacctggggataagtggttatgtggaggttagaggaggtagactgagtaatctctgctatccccaggagctcatgcatacccagctcttttgatcatgaggagaggtatgccatgttgatctcatgaacagtgtggatggtaatggggttgcaggtgaccagcatcttcaatctagttaccaccagcttggctagaattttattgaacgcaacttgctagttatgacagagaaggatccagggtgagaactaatgctcaagagtagcaagattctgtaatcctcttgccctctcacatcactaattctgatatgccaaacatttggcccaatgagaatgactgatagacttgactgatgtgcatgtggggggatgaggtgtgtatatgcctttctcctgatctggccattcagtgttcaggctgtcattcaaattggataggagaaagttggtgaggaaggaatggagagagcaggatacctggactcactggtccccaaactccttgactgtcactatgtaattgtatataatttgtgtgtttcttgctccagttcctcatgctgtcatcctgtaagtctatctgggaagggtaaatgctgacacctattagataatagtgttctttcaactgtcccataccatgattgtatcatagatatgtcatgttataaactatagtgatatatatataatgttagctgtcggc

SEQ ID NO: 697901 - DNA, 226 bp, Homo sapiens
aatccgtctctagtataaatagaaaaatgagctgggcgtggtggcgggcactattatcccagctaacgcgaggaggctagaagcacaagaatcgcttgaacccaggaggcagaggttgcattgagccgagattgtgccactgcacctccagcttgggtgatatagcgagactcagtctcaaaaacaaaacaaaacaatcttcatatgtacccatatcctttctcga

SEQ ID NO: 697902 - DNA, 256 bp, Homo sapiens
gtgatggagtctcactctgtcacccaggctggagtgcagcagtggcgtgatctctgctcagtgcaacctcagcctcccaagtagctgggactatgtgcgtgtgccactatgcccagctaattttgtattttagtagagacggggttcaccatgttgccagactgtctgactccgacctcagtgatgccccgcctggcctccaaagtgctggatacagtgtagcactgccctcgccaaaacattttaaagcatgtgt

SEQ ID NO: 697903 - DNA, 358 bp, Homo sapiens
  misc_feature (64)..(64): n is a, c, g, or t
  misc_feature (109)..(109): n is a, c, g, or t
  misc_feature (191)..(191): n is a, c, g, or t
  misc_feature (351)..(355): n is a, c, g, or t
aaattccaggacacccccctaaatggattggtgaatgcctttggaaaaatttgtccatcccaanccccacagcccccacaaaagtaggcccccggccctgtgtgataanccctaaatggggatatgcccttcctaatggcaaagatttctgtaggaccccagagtcttgtaagttatagtgaaaatattgnggataaaataaaaaatcacccatcataccaaaaccaagaaaatcacaacttgaataagaaaaaggaatgacaacactaagatgaatcagatttggaattatctggcaaggatttttaaagcaaacatcataaaaatgctctaacaaataattacaaagtnnnnngaa

SEQ ID NO: 697904 - DNA, 253 bp, Homo sapiens
aaccaggcatcagtaccagcctcattttgacattgggagcggggggactcattcccagcctggggagtgaaatctcccagggtttggcccagagtcttaggctcggacagagctccttccttcgtctcagcaacaacctggttctaagagactggccttcatctctggtatggcatctggtctaagaccgggtctgggctttgggtgtggcctggtcttgggtacaggctaacaaagacagtagcctcctctg

SEQ ID NO: 697905 - DNA, 262 bp, Homo sapiens
agcggcgcacagctctcctgtggtggtttggaatccctgcggctgtgccggtcatgtcgtttggtgctgtgtgttggtgcaaagatagtcagggctcctatgtcccagatgtctgtcttgtagagcttctgttcctagaggagtcacagtcaagaacccgagcttagacgaaaaagtctagaggggtgacacattatgcacggggaagattatgcattgggagacgaagatttgtgtcctgcctacgttatcgctgaaaatc

SEQ ID NO: 697906 - DNA, 276 bp, Homo sapiens
cgtactcagcggctctcgggtcccagcgtccagccgcggcccgcgctcctccgccccggtcctcctcctcctctttctccgtcctcctcctctctaggcacccccgtgccttccttccagaggactgctgcccaccgaccgacagtcgtccgcgcttacttcgtatggagatcgaccgcagtggtcaccaccatcgtattgcgggatacagtctcgtgtcactgtgctgtacgtctcgcgtgtcctcctcgaggggtactacgtcttatcacgcct

SEQ ID NO: 697907 - DNA, 703 bp, Homo sapiens
gttccacatctaccacatgggccaggcctggcttccccgaagcgctgggccgtcttctacgccgcacgagatcttgctgtggcctaggaggacctgccactcgggagcgcatcagtgtaacagggacctgaagcccgagaacatcttgctggatgaccacggccacatctcgcatctctgacactgggactaagctgtgcatggtgccgcgagggccagaccaatcaaagggtcgagtgggcaccgtgggttacatggctccggaggtggtgaagaatgagacggtacacgttcagccctgactggtgggcgctcggctgcctccgtgtacgagatgagtcgcaggaccagtcgccctgtccagcagaggaagaagaagatcaagacgggaggaggtggagcggctggtgaaggaggtccccgaggagtagtccgagcgctgttgtccccgcaggccgcgctcactttgctgcacagctgcctcatgcaaggaccgtgctcgaacgcaactggggtgttcgtgggggcagtgcccgcgaggtgtaaggagcaccccctctttaagaagctgaacttcaagcggctgggagctggcatgctggagccgccctatcaagccttaacgtgagtgcagccacactcactgctagagggcggggccctagcgagggctaggggctcaggggctcattgtagtatcagg

SEQ ID NO: 697908 - DNA, 122 bp, Homo sapiens
gtttttgcggtgccgggggggagtatggttgccacgctcaaacttagtggatttgacgcacgtgcaccaccaggagtgtatcctgctgattaatttgacctagcacggtctccctcaccctg

SEQ ID NO: 697909 - DNA, 98 bp, Homo sapiens
tttatttttgggggggggggggggggacatttttaaagggttggggccccctccccctccgggccccggggggggggggcccccccttccccctttta

SEQ ID NO: 697910 - DNA, 445 bp, Homo sapiens
agtctagaggatctccgtcaggttgtgggatagtgggaaaacaggtgtgggacagtgaacgaaaccatctttctccctctactcacggaactttctgtctattaaggtgacaagaactgaagggcctggctcaaccatatgcgtttgatgagcagatgtgtcctgctgtagaccacaggacctgtttgccgccttgtccccaggttcgttgactgtgaaatactctggaggctggtaccatcaagctcagcctggaagtcacatggagccccttcgacaaggatgaccagccctcagctgcttcttctgtcaacaaggcctccacagtcaccaagcgcttctccacctatagccagagcccaccggacacaccctcacttcgggaacaggctttctataacatgctgcgacggccggaggagctggagaatgggcacagcatggt

SEQ ID NO: 697911 - DNA, 94 bp, Homo sapiens
ctatcaactgaggcgattccgaagctgactttctataggcaattttgtacctttgtggagaaatgtgtcacctccctcatccggttatccaatg

SEQ ID NO: 697912 - DNA, 318 bp, Homo sapiens
ctgattttatgcagcgatatggaccacccccatcgggcccatcctgaaaatccctgggctgaactcgcccatccctgagagctgttccttagggcaccatgctgctggctggagcacacctccagtggatgagactggtaaaccgctctatgaagacgtgtttgaaaccaatgctgctgaatttcagaccaagactgaggaagaagagattgatcggaccccttggggggaactggaaccatctgatgaagaatcctcagaagaagaggaggagggagaaagtgatgaagacaaaccagatgagacaggctttactac

SEQ ID NO: 697913 - DNA, 663 bp, Homo sapiens
  misc_feature (210)..(210): n is a, c, g, or t
  misc_feature (357)..(357): n is a, c, g, or t
  misc_feature (373)..(373): n is a, c, g, or t
ctaactcatgcccccatgtctaacaacatggctttctcagcaaaaaaaaaaaaaaaaaaaaaaaaaaaaagttgtggtgggcggccctgcggccccttatagaaagctttcatgagaacaattccgctggggcggccgggggccccagttgaggttatgttgacccgtgtgtcacataggcgtgtctccctaagagaagaactcggtggnccagtgcagcatagtggcctgtggatttctcctcaccacacatataaaacaacacgcgccgcgcgggcggcacacacgaggcagcgcgtcttctgagaaccaacatctctcctagagagtgagagaggttctctgcgagagaggggnctcatatcagagcggngtgatgtctattatctaaaccaggcgagcgagagtcggcccgagacggcgcgacgagtcactcgcggacaatatatctcaaacataatttatagcgacccccgcggctgcctggctgtggttatttaccaacagccgtagaacgagatcgaccactacacaacaacaactacccaaacatagatccaccacatagaacccatgccagccaagacgagaccaccgaccaactaaactccaacacaatagtaaaatcgaacaacgacgcaaagcgaacgacaacacacggct

SEQ ID NO: 697914 - DNA, 616 bp, Homo sapiens
gtcaccaccccagttgaagccacgcactgtcactcgcatgggagaaaaaacccacttattccccgaattccccaccacgagtccacgccacgaagagaggacccccctgagaaaaggctgagaatttgagggctaccactgaagtaatatgcctcgtggaatgtttctcgtcacgctcacggagagggccaggcccaggatgcacggaccacgaggaacccacctatttacccaacgaggagcccctctataaccacgtatggagctgaaaatgagaaaacttcaccgtggccttcttcacgtgaggtggaaaaggcgttttgaatgccactgccgtttactcttaagagcactttgaagatgagaagaaggctcggatgggtgtggtggaggtgcgcccaacactgaactgctgcacaccactttaatgttctctatgagaaggagggtgaatttgttgccccgtttaaatttaccacgttctgctcatgccccatggccccatgcggataacccgtggtcccttcgagcctgacctctacaagtctgagatggaggtcccggatgcagagctaaaggccctcctccagagttctgccagtcgaaaaaccccaga

SEQ ID NO: 697915 - DNA, 132 bp, Homo sapiens
ctggaggaagaatcgagattcttatcactctccacacttgtttcaaaagagtggatgtcgaagtgcgcccagaatgtgttgatgatgaaagggtattctgctgcgtagataacgtgctgctgtgttgtgtgg

SEQ ID NO: 697916 - DNA, 161 bp, Homo sapiens
tcatcttgagagcagcacgagctgcccatgtgaaccggcgctgttgagcatgtcatggccaccttaaacccatctccgacctctccaaggatgttttcacacaggtatcttggtgttttcaaaatggacttcacaagtgttggagccccgaatgcctaatt

SEQ ID NO: 697917 - DNA, 512 bp, Homo sapiens
  misc_feature (117)..(117): n is a, c, g, or t
tactcaaaacaccaccccccccccccaattttaccccctgtttcaccgcacacaaaaaacaccgccgaacaccggaaaaaaaattaaaaagccccaccacccccccccactaccaanacaaactactccacattcccccccgacaaccccgactcacccccatacccgcctccaatcacgagcttcaccccaccactcccccacaacacccacaggacccacaaataaccaaccccaccccacccccaccccccccacccacccctccctccccgcactccttcaacatcaccacccacacacacaacgaccacctccctcccccacgcacaccaaacacccccaccacccaccactcccctcacacccacgcgcccccccaaccacccgcctccacaacccacccccacaacccgcacccccctcccccccacaccacaccaaacaaaccaccacaccgacgacacacacacactccacgcccccaacaacaccacaccccatccccccca

SEQ ID NO: 697918 - DNA, 1024 bp, Homo sapiens
  misc_feature (854)..(854): n is a, c, g, or t
  misc_feature (856)..(856): n is a, c, g, or t
  misc_feature (866)..(866): n is a, c, g, or t
gggagaaaaaccaaacttaggctaggtacgaggctgggtgtgaatcggccgagggatgcgggtcacggcgccccgaaccctcctcctgctgctctggggggcagtggccctgaccgagacctgggccggctcccactccatgaggtatttctacaccgccatgtcccggcccggccgcggggagccccgcttcatcgccgtgggctacgtggacgacacccagttcgtgaggttcgacagcgacgccgcgagtccgaggacggagccgcgggcgccatggatagagcaggaggggccggagtattgggaccgggagacacagatctgcaagaccaacacacagacttaccgagagaacctgcggatccgctccgctactacaaccagagcgaggccgggtctcacaccctccagaggatgtatggctgcgacgtggggccggacgggcgcctcctccgcgggtatgaccagtacgcctacgacggcaaggattacatcgccctgaacgaggacctgagctcctggaccgcggcggacacggcggctcagatcacccagcgcaagtgggaggcggcccgtgtggcggagcagctgagagcctacctggagggcctgtgcgtggagtggctccgcagatacctggagaacgggaaggagacgctgcagcgcgcggacccccaaagacacatgtgacccaacacctgacccaccaccccgtctctgaccatgaggccaccctgaggtgctgggccctgggcttctaccctgcggagatcacactgacctggcagcgggatggcgaggaccaaactcaggacaccgagcttgtggagacagaccccggagataaactncngaagtggccntgtgggggctctgggcgagccggttccctgcccgtccgcttggggctgccagcctccccgggtgggccttccgcccgccccgggttggtgccggcgccaccggaccccgcgcttttcaacctcggggggtacttcggccccgctttccggacgtgcgc

SEQ ID NO: 697919 - DNA, 143 bp, Homo sapiens
aagtagacagcctgctgacgtgccctctctttcagctctgacatcatgggacgcatgttggctgtggatctgggtcttggtctcgggaaagcttctgctccgagatgagaccagccccgtcttcatctacactagagaggctg

SEQ ID NO: 697920 - DNA, 295 bp, Homo sapiens
tgccggtacctataagagaagagacgagatgcaggatttcttcacgcctcccctttgtgacttcaagagcctctggcatctctttctgcaaaggcatctgaatgtgtctgcgttcctgttagcataatgtgaggaggtggagagacagcccaccccggtgttcaatggtaaccctggttcccattgttgactggttttccttcccaattcttcttcctcgtgttcccagaaaagggttggggctgggatggtctccatccttcgttcttctcattctggttccattcttcgttct

SEQ ID NO: 697921 - DNA, 214 bp, Homo sapiens
ggaagtggaagctgcagtgagccgggatctcaccactgcatttcagcctgggtgacaaaatgagaccctctctcaaaaaaaaaaaaaatctacagtacaccaggtatagtggctcatgcctataatcccaacactgggaggtcaaggcaggaggatctgcttgaggtcaggaattctaaactgacttggtcaacatagtaagatccccgtctct

SEQ ID NO: 697922 - DNA, 718 bp, Homo sapiens
aacccaaaaaaatcagggttttggctcccaaaaaatttggggagatattttttggccaaaggttctccttataaaaagaaaaacacgtgggggaatgttcgggcccgttttctcaaccaagtgggtggctaaaaaaagtgggggcccttttttttatgtgggggaaaaaactctttggtggaaaaaagggggggactttttttgggggtggttccaaaaaaaaaggtccaggggtttttatttgttttttctccccgtttaaaaaaccttaaaaacctttttttttttaggggggtattaaaaaacggggaattctcccccccccccccttttgggagattaaaagagcctttgggggatctttttttttaaaagggcacaccaaaatggtttgggtgtctcttgtaacaaaaaagttggggggttggaaaaccaacccaccctgtgggtccccttgtaacccttgttccccaggtgcacctggggttccctccccaggtaatctttctgtttcaaaagaggtggggcttgaatgtctcaatctctgtctcacttttaatgggcattaaggtgcaactttcttacctcccctactgaaaataagaatctgaataaacatttgtttctcaaaaatttgctatgaagggttgatggattaattaaataagtcaattcctggaagttgagagagcaaataaagacctgagaaccttccaga

SEQ ID NO: 697923 - DNA, 285 bp, Homo sapiens
ccccctaaggccaaattgaggttaaggggggtttcccaggattggttttaaaggcccaattgtgttagcttatcttctcccccttggggattgaccccttccgaattgaagttcaattgggcccttccgggaaaaggttgcgcttgggcttttgtcccttgatcacccccacgcacttgaaaactgtgcccaattgacttgcttgggagctttgccacccgacccttttgatttcattgggaaccttgtattaaattcttggaggggaaattcgtgtttaaaaaa

SEQ ID NO: 697924 - DNA, 569 bp, Homo sapiens
  misc_feature (228)..(229): n is a, c, g, or t
  misc_feature (236)..(236): n is a, c, g, or t
  misc_feature (249)..(249): n is a, c, g, or t
  misc_feature (261)..(262): n is a, c, g, or t
  misc_feature (271)..(271): n is a, c, g, or t
  misc_feature (277)..(277): n is a, c, g, or t
  misc_feature (292)..(292): n is a, c, g, or t
  misc_feature (300)..(300): n is a, c, g, or t
  misc_feature (305)..(305): n is a, c, g, or t
  misc_feature (334)..(334): n is a, c, g, or t
  misc_feature (336)..(336): n is a, c, g, or t
  misc_feature (340)..(341): n is a, c, g, or t
  misc_feature (345)..(345): n is a, c, g, or t
  misc_feature (353)..(355): n is a, c, g, or t
  misc_feature (357)..(357): n is a, c, g, or t
  misc_feature (367)..(367): n is a, c, g, or t
  misc_feature (372)..(372): n is a, c, g, or t
  misc_feature (375)..(375): n is a, c, g, or t
  misc_feature (392)..(392): n is a, c, g, or t
  misc_feature (398)..(399): n is a, c, g, or t
  misc_feature (406)..(406): n is a, c, g, or t
  misc_feature (408)..(408): n is a, c, g, or t
  misc_feature (417)..(417): n is a, c, g, or t
  misc_feature (419)..(419): n is a, c, g, or t
  misc_feature (423)..(423): n is a, c, g, or t
  misc_feature (425)..(425): n is a, c, g, or t
  misc_feature (445)..(445): n is a, c, g, or t
  misc_feature (448)..(448): n is a, c, g, or t
  misc_feature (452)..(454): n is a, c, g, or t
  misc_feature (463)..(463): n is a, c, g, or t
  misc_feature (567)..(567): n is a, c, g, or t
cgggcagtaactactacggtttaaggtgcgaggcctgggtggcgccgaggatggccgtcatggcgccccgaaccctcgtcctgctactctcgggggccctggccctgacccagacctgggcgggctctcactccatgaggtatttcttcacatccgtgtcccggcccggccgcggggagccccgcttcatcgccgtgggctgcgtgggcggcgcgcggttcgtgcggnncggcggnggggccgcgggcngggggggggggnngcgggcgcngggggnggggcggggggggcngggggggnggggngggggggcggggggggggggggcccgcgngngggnngggngggggggnnngnggggggcgcnccgcnggngcggccgggggggggcngggtcnngggcccncnggggggggngngggngnggggtggggtgcgggggggngcntgcnnngcgggggcngccgggtgcgcctgcggcggcgggggttgcatcgccctggggggggcctgcgctcttgggccgcggcgggcgatggcggctcgaggtcgccaggcgcgggtggnga

SEQ ID NO: 697925 - DNA, 293 bp, Homo sapiens
  misc_feature (190)..(193): n is a, c, g, or t
  misc_feature (198)..(198): n is a, c, g, or t
  misc_feature (201)..(201): n is a, c, g, or t
  misc_feature (204)..(204): n is a, c, g, or t
  misc_feature (207)..(207): n is a, c, g, or t
  misc_feature (209)..(209): n is a, c, g, or t
  misc_feature (212)..(215): n is a, c, g, or t
  misc_feature (218)..(218): n is a, c, g, or t
  misc_feature (221)..(221): n is a, c, g, or t
  misc_feature (227)..(227): n is a, c, g, or t
  misc_feature (233)..(233): n is a, c, g, or t
gccggccaggattccatcctctctggaacaggaaagatgattggggagggagcacaggtcagcgtgggaagagggtcatggtgcactgagctgtaacttcttccttccctattaaaattagaacctgagtataaatttactttctcaaattctctgccatgagaggttgatgagttaattaaaggagaannnncctanaanttnagngncannnnaantgnaacacntgaaanaacacactatattacgggggccagaacgcttcccccccccctgggcgcacggtaaccccc

SEQ ID NO: 697926 - DNA, 1582 bp, Homo sapiens
aaaaaaaaaaaaacccaagtttcttttacaaagttgtgcggccgctcgcgatgaactagcgaggatggccgtcatggcgccccgaaccctcctcctgctgctctggggggcagtggccctgaccgagacctgggccggctcccactccatgaggtatttctacaccgccatgtcccggcccggccgcggggagccccgcttcatcgccgtgggctacgtggacgacacccagttcgtgaggttcgacagcgacgccgcgagtccgaggacggagccgcgggcgccatggatagagcaggaggggccggagtattgggaccgggagacacagatctgcaagaccaacacacagacttaccgagagaacctgcggatccgctccgctactacaaccagagcgaggccgggtctcacaccctccagaggatgtatggctgcgacgtggggccggacgggcgcctcctccgcgggtatgaccagtacgcctacgacggcaaggattacatcgccctgaacgaggacctgagctcctggaccgcggcggacacggcggctcagatcacccagcgcaagtgggaggcggcccgtgtggcggagcagctgagagcctacctggagggcctgtgcgtggagtggctccgcagatacctggagaacgggaaggagacgctgcagcgcgcggaccccccaaagacacacgtgacccaccaccccgtctctgaccatgaggccaccctgaggtgctgggccctgggcttctaccctgcggagatcacactgacctggcagcgggatggcgaggaccaaactcaggacaccgagcttgtggagaccaggccagcaggagatggaaccttccagaagtgggcagctgtggtggtgccttctggagaagagcagagatacacgtgccatgtgcagcacgaggggctgccggagcccctcaccctgagatgggagccatcttcccagcccaccatccccatcgtgggcatcgttgctggcctggctgtcctggctgtcctagctgtcctaggagctgtggtggctgttgtgatgtgtaggaggaagagctcaggtggaaaaggagggagctgctctcaggctgcgtccagcaacagtgcccagggctctgatgagtctctcatcgcttgtaaagcctgagacagctgcctgtgtgggactgagatgcaggatttcttcacacctctcctttgtgacttcaagagcctctggcatctctttctgcaaaggcatctgaatgtgtctgcgttcctgttagcataatgtgaggaggtggagagacagcccacccccgtgtccaccgtgacccctgtccccacactgacctgtgttccctccccgatcatctttcctgttccagagaagtgggctggatgtctccatctctgtctcaacttcatggtgcactgagctgcaacttcttacttccctaatgaagttaagaacctgaatataaatttgttttctcaaatatttgctatgaagggttgatggattaattaaataagtcaattcctggaagttgagagagcaaataaagacctgagaaccttccaga

SEQ ID NO: 697927 - DNA, 120 bp, Homo sapiens
  misc_feature (15)..(15): n is a, c, g, or t
actagtcacggttgngctcaggagtcataggaacaataaaggcgagatgaaaggttctgccattacaggaccagtagcaaaggagtgtgcagacttgtggccccggaatgcatccaatgc

SEQ ID NO: 697928 - DNA, 415 bp, Homo sapiens
caccgctagatgatgaagttcttaatactattctcctgttcttattccctgacgctgatcctgagaaaccattagatgggactacttcaacagataatagtaatcctccatcagagagtgaagactataatctctacaatcaggtcaagtctgcaccatctgacagtttaacatacatactggctttgcgtctctggatgatcaatttttaccatggagggttgaaaggagtggcacacctttggcaggaatttgttcttgaaatgcgtttccgacgggaaaacgactttctgattccaggattagcaagtggacccccagatctgaggtgttgtttactgcattagaactacagatgttaaattgttgtattgaaagaaagaagcacgtgatgaggggaaaaagacaagtgctt

SEQ ID NO: 697929 - DNA, 424 bp, Homo sapiens
  misc_feature (32)..(32): n is a, c, g, or t
  misc_feature (63)..(63): n is a, c, g, or t
  misc_feature (103)..(103): n is a, c, g, or t
  misc_feature (174)..(174): n is a, c, g, or t
  misc_feature (179)..(179): n is a, c, g, or t
ccggccgccgacacgctgcgagaagacgacanaggggagtataactggctggcattatatcanattcagtgagtgaaatacaactgaaatcacttcaggtcantgataccatcttccctatgttttctcttcttttgaaaatactttcaccgccccgtgccagtggctcacgcntgtantccaacatttgggaggccaaggtgggaggatggcttgagccccagagttcagaccagcctgggcaatgtagggtgaccccatctctacaataaaaaaattagctggtgtgatggcatgtacctgtagtcccagctactcaggaggctgaggtaggaggatagcttgaacccaagaggtcgaggctgcagtgagccaagattacacactgcactctggcctgggcaacaaagcaagaccctgtctc

SEQ ID NO: 697930 - DNA, 1951 bp, Homo sapiens
  misc_feature (1590)..(1590): n is a, c, g, or t
aaaaaaaaaaaaacccaagtttcttttacaaagttgtgcggccgctcgcgatgaactagcgaggatggccgtcatggcgccccgaaccctcctcctgctgctctggggggcagtggccctgaccgagacctgggccggctcccactccatgaggtatttctacaccgccatgtcccggcccggccgcggggagccccgcttcatcgccgtgggctacgtggacgacacccagttcgtgaggttcgacagcgacgccgcgagtccgaggacggagccgcgggcgccatggatagagcaggaggggccggagtattgggaccgggagacacagatctgcaagaccaacacacagacttaccgagagaacctgcggatccgctccgctactacaaccagagcgaggccgggtctcacaccctccagaggatgtatggctgcgacgtggggccggacgggcgcctcctccgcgggtatgaccagtacgcctacgacggcaaggattacatcgccctgaacgaggacctgagctcctggaccgcggcggacacggcggctcagatcacccagcgcaagtgggaggcggcccgtgtggcggagcagctgagagcctacctggagggcctgtgcgtggagtggctccgcagatacctggagaacgggaaggagacgctgcagcgcgcggaccccccaaagacacacgtgacccaccaccccgtctctgaccatgaggccaccctgaggtgctgggccctgggcttctaccctgcggagatcacactgacctggcagcgggatggcgaggaccaaactcaggacaccgagcttgtggagaccaggccagcaggagatggaaccttccagaagtgggcagctgtggtggtgccttctggagaagagcagagatacacgtgccatgtgcagcacgaggggctgccggagcccctcaccctgagatgggagccatcttcccagcccaccatccccatcgtgggcatcgttgctggcctggctgtcctggctgtcctagctgtcctaggagctgtggtggctgttgtgatgtgtaggaggaagagctcaggtggaaaaggagggagctgctctcaggctgcgtccagcaacagtgcccagggctctgatgagtctctcatcgcttgtaaagcctgagacagctgcctgtgtgggactgagatgcaggatttcttcacacctctcctttgtgacttcaagagcctctggcatctctttctgcaaaggcatctgaatgtgtctgcgttcctgttagcataatgtgaggaggtggagagacagcccacccccgtgtccaccgtgacccctgtccccacactgacctgtgttccctccccgatcatctttcctgttccagagaagtgggctggatgtctccatctctgtctcaacttcatggtgcactgagctgcaacttcttacttccctaatgaagttaagaacctgaatataaatttgttttctcaaatatttgctatgaagggttgatggattaattaaataagtcaattcctggaagttgagagagcaaataaagacctgagaaccttccagaaaaaaaanaaaaaaaaaaaaaaaaaaaaaaaaggaaaaaaaaaaaaaaaaaaaaaaaaaaaaaaaaaaaaaaaaaaaaaaaaaaaaaaaaaaaaaaaaaaaaaaaaaaaaaaaaaaaaaaaaaaaaaaaaatgggggcccctttggccaaaaggattttaaaattgggaaagtttaaaaatggggcccaaattgggggcaatttggcaaaattcccctaaaggggggcgtttaaaaaataaaggggcggggtttaaaaaaggtggaatgggaaaaaaccgggggttcccaaaataaaaccctttggaaaaaaacccctttttgcaaaggggggaaaaagcaaaaaggccccaaccgaaggccttttaaa

SEQ ID NO: 697931 - DNA, 1583 bp, Homo sapiens
aaaaaaaaaaaaacccaagtttcttttacaaagttgtgcggccgctcgcgatgaactagcgaggatggccgtcatggcgccccgaaccctcctcctgctgctctggggggcagtggccctgaccgagacctgggccggctcccactccatgaggtatttctacaccgccatgtcccggcccggccgcggggagccccgcttcatcgccgtgggctacgtggacgacacccagttcgtgaggttcgacagcgacgccgcgagtccgaggacggagccgcgggcgccatggatagagcaggaggggccggagtattgggaccgggagacacagatctgcaagaccaacacacagacttaccgagagaacctgcggatccgctccgctactacaaccagagcgaggccgggtctcacaccctccagaggatgtatggctgcgacgtggggccggacgggcgcctcctccgcgggtatgaccagtacgcctacgacggcaaggattacatcgccctgaacgaggacctgagctcctggaccgcggcggacacggcggctcagatcacccagcgcaagtgggaggcggcccgtgtggcggagcagctgagagcctacctggagggcctgtgcgtggagtggctccgcagatacctggagaacgggaaggagacgctgcagcgcgcggaccccccaaagacacacgtgacccaccaccccgtctctgaccatgaggccaccctgaggtgctgggccctgggcttctaccctgcggagatcacactgacctggcagcgggatggcgaggaccaaactcaggacaccgagcttgtggagaccaggccagcaggagatggaaccttccagaagtgggcagctgtggtggtgccttctggagaagagcagagatacacgtgccatgtgcagcacgaggggctgccggagcccctcaccctgagatgggagccatcttcccagcccaccatccccatcgtgggcatcgttgctggcctggctgtcctggctgtcctagctgtcctaggagctgtggtggctgttgtgatgtgtaggaggaagagctcaggtggaaaaggagggagctgctctcaggctgcgtccagcaacagtgcccagggctctgatgtgtctctcacagcttgaaaagcctgagacagctgtcttgtgagggactgagatgcaggatttcttcacacctctcctttgtgacttcaagagcctctggcatctctttctgcaaaggcatctgaatgtgtctgcgttcctgttagcataatgtgaggaggtggagagacagcccacccccgtgtccaccgtgacccctgtccccacactgacctgtgttccctccccgatcatctttcctgttccagagaagtgggctggatgtctccatctctgtctcaacttcatggtgcactgagctgcaacttcttacttccctaatgaagttaagaacctgaatataaatttgttttctcaaatatttgctatgaagggttgatggattaattaaataagtcaattcctggaagttgagagagcaaataaagacctgagaaccttccaga

SEQ ID NO: 697932 - DNA, 558 bp, Homo sapiens
  misc_feature (483)..(483): n is a, c, g, or t
  misc_feature (516)..(517): n is a, c, g, or t
  misc_feature (529)..(529): n is a, c, g, or t
  misc_feature (541)..(541): n is a, c, g, or t
gagctatctgggtatgattgcagtcgactgatgtcccgcgtccctttagcctgattagctcaaaatcgcttgaagcgagtccgcgcggaacgaaaaaactttcattgagaccttcaatttgaaggtcatggaaggatggagccgatgactacatgagccaaggcgcagatcggaaacccagcgcccagacccactaggaaaccggattgaaccagccttggctaggcccaggcgtcacgtcgatatcactacccaaacgcagcctcatagccgaaagtgcccattcggctccagcacaattgctgtgccgtacacctaagaggagcgacagcggctacgtagagaaaccacaatcagaggcccatgaggtgcaatgtgcaaaatttgcacattgcgaacaccccactagaagcaacccagcgcctcagcgctcaaactcatagctgtagtcagtcgttacagacaaatccgctagcagatcgnccagcgatagcgaaagccgtggctcatcaaagnnttcaaactcagnaaagctcacagncaccgcgatccgcagct

SEQ ID NO: 697933 - DNA, 1411 bp, Homo sapiens
  misc_feature (1410)..(1410): n is a, c, g, or t
ccaagattgtgccactgcactccagcctgggcaacagcatgggactctgtctcaaaaaaaaaaaaaaaaaaaggaaggaaagcatcaatatcttctttcctcaagccaggctccggggggctcatgactggtggggaggccgaggcgggcgggactccacttgaggtcggggagttcgagaaccagcctgggccacacgtgatgaaactccggtttctcctggaaatatggctataaactgggctaaagcggtgggtgggctgtgacgcctggtaaatcccaaggtaacttgggcgaagctagaggctggagagaattggtttggggcccggggaggcggagtgttggcaagtggtacctggagatatgggccgcctattggcgactccaaagcctgggggctacacagatgtggagatctccaatctcaagaaacaacaaacaataaaaacaacagaaatatatctaatcttatatactatatctatattctattgatgtcttatatctcatattctgtctccactcttatcttataacactcttctcatttttccccccattttccaggtgacaagatgtttccaacaaaccacacaccgtgtctcattagaggggataggagaactacaggacagagagataacgatgtgtaaaccgaaatcgggtggcgaagggggaacaacagcgtgcgctggagaattgtgcgccaaaaatgcgtcagggggcccccccagagaaagacactaaggtcggcagaacttggcccataaacacaggtgtgcggcagggcggaggcacacacagaggaccactatagaaccaacgggggcgcacaacacaaagcactccaggaaagggggaaccccaaaggaaaggcgcaagcgaattaaaaacacaaaaacaacgaaagcccgggccaactgcacaaatccggaacaccccttggacaccgcggaggatacaaacgaacgcatacacacccacagggagaggccaagaaaggggaggagggaaacaaccaagagggcgacacacagaggataaggcttaagaaaagacgacacaatggcccctaaatgcggacacgcacctgtggatcgcacggctcaccgcagtgcacaacacacaaaggagcaaggcccacgaaaacccaccacgggaacaacagaacgcccccctttgctaacaaaaacaacaagggacggccaaaaaacgccgagggcgacgacacgcacactcctgtacaggaccccacagcgagcaaacaacgccggcgcaaacgcacgagacaagaaagcgactgtaacacactctgaatccgatgccacgaccagcacaaatgcattcgacgccgtaacacaattagacacgagcagcacgcacgcacagagcacacccagcccgagnt

SEQ ID NO: 697934 - DNA, 1580 bp, Homo sapiens
aaaaaaaaaaaaacccaagtttcttttacaaagttgtgcggccgctcgcgatgaactagcgaggatggccgtcatggcgccccgaaccctcctcctgctgctctggggggcagtggccctgaccgagacctgggccggctcccactccatgaggtatttctacaccgccatgtcccggcccggccgcggggagccccgcttcatcgccgtgggctacgtggacgacacccagttcgtgaggttcgacagcgacgccgcgagtccgaggacggagccgcgggcgccatggatagagcaggaggggccggagtattgggaccgggagacacagatctgcaagaccaacacacagacttaccgagagaacctgcggatccgctccgctactacaaccagagcgaggccgggtctcacaccctccagaggatgtatggctgcgacgtggggccggacgggcgcctcctccgcgggtatgaccagtacgcctacgacggcaaggattacatcgccctgaacgaggacctgagctcctggaccgcggcggacacggcggctcagatcacccagcgcaagtgggaggcggcccgtgtggcggagcagctgagagcctacctggagggcctgtgcgtggagtggctccgcagatacctggagaacgggaaggagacgctgcagcgcgcggaccccccaaagacacacgtgacccaccaccccgtctctgaccatgaggccaccctgaggtgctgggccctgggcttctaccctgcggagatcacactgacctggcagcgggatggcgaggaccaaactcaggacaccgagcttgtggagaccaggccagcaggagatggaaccttccagaagtgggcagctgtggtggtgccttctggagaagagcagagatacacgtgccatgtgcagcacgaggggctgccggagcccctcaccctgagatgggagccatcttcccagcccaccatccccatcgtgggcatcgttgctggcctggctgtcctagcagttgtggtcatcggagctgtggtcgctactgtgatgtgtaggaggaagagctcaggtggaaaaggagggagctgctctcaggctgcgtccagcaacagtgcccagggctctgatgtgtctctcacagcttgaaaagcctgagacagctgtcttgtgagggactgagatgcaggatttcttcacacctctcctttgtgacttcaagagcctctggcatctctttctgcaaaggcatctgaatgtgtctgcgttcctgttagcataatgtgaggaggtggagagacagcccacccccgtgtccaccgtgacccctgtccccacactgacctgtgttccctccccgatcatctttcctgttccagagaagtgggctggatgtctccatctctgtctcaacttcatggtgcactgagctgcaacttcttacttccctaatgaagttaagaacctgaatataaatttgttttctcaaatatttgctatgaagggttgatggattaattaaataagtcaattcctggaagttgagagagcaaataaagacctgagaaccttccaga

SEQ ID NO: 697935 - DNA, 493 bp, Homo sapiens
gacccacaggcaggtgtactggtagagggctcttcccatggggatcttaatccttcagcacttccagcagaaagagctgctctagcagccagagaaagtccaagggcagacaattgcaggtgctggcagttggaagccaggttggtgtgcgtggaaatgctaagtgtgggaaatacgggtggggtgcagacagtggtgctactcctgtgacacgcaatgtcttctagcttgttggttccacagtttgacattgtcttggtcatgtaatggatttacttgctgattgacactcgaaaacttctcatgcctcccctgctcctggttccatttattgttccccttcttccttgtcttttcacttcactcagttcatcaccatttgccttggctttggcatcaaagacctgtgggaagctatttccttttttgagcctcaatttttctaatctcaaggtaagaataatagtatatttttagggtttttgtgtggatt

SEQ ID NO: 697936 - DNA, 207 bp, Homo sapiens
cacatacacttgtgtcctgtggataatgtcccccatgctcgtagactgtgattatactcagacgttctccgatgtgtgtcagacagagcatgtaagcataaggtgatcgtgtctgatcgaccgaggagacacgctgcacagaagagatatgcgctgcttggttggttaacacacgagggctcagagatgctagtcgtgtatggtggt

SEQ ID NO: 697937 - DNA, 260 bp, Homo sapiens
gcagggaagagtttgattgagcatgaatggtagcacgtggaaattaggtatgcagttacgaattttgtcactgtccgatcagcggacatagtagagaagatggcacagaactcaaacatgagaaatagtaaacaaaataacgaagcagcgagtatatgctttacatgttaagaattaatccaaacaaaatagtgtgaagcacttctccgatttggaagtcttaaaatgtgatctcatgttttatttgagattttgtcgac

SEQ ID NO: 697938 - DNA, 1579 bp, Homo sapiens
aaaaaaaaaaaaacccaagtttcttttacaaagttgtgcggccgctcgcgatgaactagcgaggatggccgtcatggcgccccgaaccctcctcctgctgctctggggggcagtggccctgaccgagacctgggccggctcccactccatgaggtatttctacaccgccatgtcccggcccggccgcggggagccccgcttcatcgccgtgggctacgtggacgacacccagttcgtgaggttcgacagcgacgccgcgagtccgaggacggagccgcgggcgccatggatagagcaggaggggccggagtattgggaccgggagacacagatctgcaagaccaacacacagacttaccgagagaacctgcggatccgctccgctactacaaccagagcgaggccgggtctcacaccctccagaggatgtatggctgcgacgtggggccggacgggcgcctcctccgcgggtatgaccagtacgcctacgacggcaaggattacatcgccctgaacgaggacctgagctcctggaccgcggcggacacggcggctcagatcacccagcgcaagtgggaggcggcccgtgtggcggagcagctgagagcctacctggagggcctgtgcgtggagtggctccgcagatacctggagaacgggaaggagacgctgcagcgcgcggaccccccaaagacacacgtgacccaccaccccgtctctgaccatgaggccaccctgaggtgctgggccctgggcttctaccctgcggagatcacactgacctggcagcgggatggcgaggaccaaactcaggacaccgagcttgtggagaccaggccagcaggagatggaaccttccagaagtgggcagctgtggtggtgccttctggagaagagcagagatacacgtgccatgtgcagcacgaggggctgccggagcccctcaccctgagatgggagccatcttcccagcccaccatccccatcgtgggcatcgttgctggcctggctgtcctagcagttgtggtcatcggagctgtggtcgctactgtgatgtgtaggaggaagagctcaggtggaaaaggagggagctgctctcaggctgcgtccagcaacagtgcccagggctctgatgagtctctcatcgcttgtaaagcctgagacagctgcctgtgtgggactgagatgcaggatttcttcacacctctcctttgtgacttcaagagcctctggcatctctttctgcaaaggcatctgaatgtgtctgcgttcctgttagcataatgtgaggaggtggagagacagcccacccccgtgtccaccgtgacccctgtccccacactgacctgtgttccctccccgatcatctttcctgttccagagaagtgggctggatgtctccatctctgtctcaacttcatggtgcactgagctgcaacttcttacttccctaatgaagttaagaacctgaatataaatttgttttctcaaatatttgctatgaagggttgatggattaattaaataagtcaattcctggaagttgagagagcaaataaagacctgagaaccttccaga

SEQ ID NO: 697939 - DNA, 655 bp, Homo sapiens
  misc_feature (3)..(3): n is a, c, g, or t
  misc_feature (103)..(103): n is a, c, g, or t
  misc_feature (131)..(131): n is a, c, g, or t
  misc_feature (158)..(158): n is a, c, g, or t
  misc_feature (230)..(230): n is a, c, g, or t
  misc_feature (267)..(267): n is a, c, g, or t
  misc_feature (288)..(288): n is a, c, g, or t
  misc_feature (382)..(382): n is a, c, g, or t
  misc_feature (389)..(389): n is a, c, g, or t
  misc_feature (435)..(435): n is a, c, g, or t
  misc_feature (470)..(470): n is a, c, g, or t
  misc_feature (499)..(499): n is a, c, g, or t
  misc_feature (654)..(654): n is a, c, g, or t
ccntccccgattctaaacgaaaaggaatgggaatgacagtcacaaacaagatttcaccactaaatattgtgaagtgacttcagccgttttatatatgaaactnaaggaatcaactgcgttccaaaacagcnaaatatgcaggtccaaacaatgaagtnattttttaaactgccacattaactccgaagcccactcatctccttaagcatcccacagatgaagcacatgtnccgcttagctagaaaataatgaggtggcaaaaacgcngcaccgctgaaataacagganacctgcttataaaactagaattctgaagctgggctccagcttaattttaaaaggttatcatcctcatccgggagagcagttgtttgagcaaccnctaagtngtgctcatactgtgctgccaaagctgggtccatgaaaacttctggnggggcgagagcggggatgggaacaaattccaagtnagggtttccaatgagcttcctagcaagcnagaggaagggcttttcaaagtggtggttacttttggcagaaatgtggtagtactgaagattcttctttcggtggaagataatggatttcgccttcactttcctgtgcttaatatccactttgttgccacaaaacaaaatggggatgttttcacana

SEQ ID NO: 697940 - DNA, 113 bp, Homo sapiens
cgtgctgtatgaagtgacttttggctggtgactgtggacggtcatcttatcgaaagagctgcggccccagactggcgcagggtgcccgctgtgggagcacttccagagcctgc

SEQ ID NO: 697941 - DNA, 1010 bp, Homo sapiens
tacgagcaatttaccatctcacttctaggaatactaggtatatcgctcacacctcatatcctccctactatgcctaggaaggaataatactatcgctgtgcatgtataggctactctgcataaccctcaacatccactccctcttagccaatatgtgcctatgccatactagtcttgccgccgtgcgaacgcacggtgggcctaagccctagctagtcgtcaatctccaaggacatatggcctagacttacggtacataagctagacctgactcacaatgctaaaaactaatcggtcgccaacaattatattactagccactgacagtgactttccaaaaaggaggacatagattgagatcaacgagaacaggcacagcgtaattattagcgtcatccctctactattttttagccaaatcaacaagaactattaaggctgttgccccaagctgttttccgtccgagccgccgtaagaaccaccgcctcctaatagtaactaccgtgactcgctagccctcacaatcatggcagaggcaaggccaagttatcccagtgaaacactagtcacgaagaaaaactctgactctctatataatcgtcccctaggaatttccttaattataagcattcacaggcaagagaacctaatcatatttgaatatcttcttcgaagacagacaggttatcccagcggggtataatcaggcggagaaggacagcagaacaggctgaacgaggcaatactgccaatatgccctaggaaggtccctcgccaatcatggcggtaacagcacaaaacctaggtcaggaaacttctatagtacgctcacgggcagaaaataacgccgggcacaactaataggagctacacgaagtgagaaaagccctgcggaacataggcagcgagagccccagggagaaagcaggaaaacgggggagacgcatcacgaaacactggacagaaaacgcaaaagagagcgaagcgcgccaacaccacactctccgga

SEQ ID NO: 697942 - DNA, 287 bp, Homo sapiens
agccgatccctgcctttggtcggtcggcgtgctggataatcacctcgagaagatgtgcgtgtgatacctctcagtgaaaatccccccggggctggaaagatggtttacacgcgtggcagaaattaccgccctctgacggggcagctacccgtaagaatactgcaacgccctggaaaaaagtcgacaaaattgggcggtgcgcacgttaatgtcggcttggtgatagcggcgttcgcaaatcaattgtttaaacaggacacctttctcaaagttacctccacgaaagg

SEQ ID NO: 697943 - DNA, 935 bp, Homo sapiens
ggtctgcactgtcggctgactctcgtggttagcaccctatgatggctactctctgtgatccctgagctaacctgtctcttccttgtcctcaacactccagggtgagccgacagcaaaatgcagatctgagtgaatacgcttacggggaaggaatatgagcctcgaggttgcacagctgtcggtatgactgagtacgaaagaatgtaaggagatgatccgaggattaaggaaaggacattcctcctgatagagcagagagtgatcttggttgtaaagcagatgagataagtgagagcatgaacttaggtctggaatactatatagttactaactgaatgtacattaattcattagatgtttgtgtctgagagtttaagttggatgagggcgtaagaaataggatgactaagtttgacatccagtccaaaagaagaatatggtatataagaaagagggttgagactggtgtagtccgtgacttattctagatggagggtggaagaatggtgaatctaatgtcgacgtttcggtaagataagtgactgtgtgagagcaatgttggtgcaggggggtggtatggtgaagtaattttgaagacaatatggtggacgagttgttgtctaggttatgttattagaacaactgaagactagtactgggtttgagtattgaagtctgtcctgaatagaacttatgtggaagccaacaaaatttcttctgccgcatgaacagaagattacatcgaatgtccgtagaacgtgggccacaaaggtagggaatgagaagcgagaccaagggggaaacctgtggcgggattgacaaaaaggggggagctcttgttccagcggggttggaactagcttcagggaacaaaaaaacccgcgggggagaacactgggcgagaaagtaagataagactaaacaggaaagattcc

SEQ ID NO: 697944 - DNA, 124 bp, Homo sapiens
ggttaataagcatggtggaccatgacatgaaggacagatcttgatctaggcccacctgtagatccagatgaagactctgacagcagtgcaatttcatgtacaatggattaaatgacacctgtga

SEQ ID NO: 697945 - DNA, 1289 bp, Homo sapiens
ggtgcgcccttgagacgctcagcgggctatatacttcgtcggttggggccggcggtcagatctgcggcaatggcagccgagacggtgcagtgaaggagagtgggcgtctggcggggtccgtcagctttcgagcagagccgctgccagcccatggtcccaatcgaaggtgggagatgccagtcccagtcatgtggaggtgttgtgaaggggagccatgggaacagaggtgaagcctggtcgatcagtctgttcgaatggcgtcgaagaatgggtgtgctgctatggagtatcctgggtgccttcacccgctggatgtgccaatgacagcaccgtgccaggggcttatcgtgggacgttcgaggcttgaggcatctagaaaggccaaaggtggacgtccagtgtgtgttggcctagtcttgagtgtgtagtgactgcctttgtgacttggctgaggtggtggccgagctccaataaggccggaaggcctgggttcggctcctgggctgatcccactggggcccttgtggtgccacgcgaggacagactttcttgctggatgattcgcgtggttgtccatcttttgagtgcaatcgaccgtctcgagaggttctcccattgggtggtaccacgggtgggcatgacgttgaatggccctgaatggtggtgaactcgcgattggcacagggcctcacgtaggcggcctgggcacccaagtatcctcgttcacaagtcctgcagggccggggccgaaaattgttcttcgaacccgtcctattttaacctgggccaggccttgtttctgtgcgcctggggcttgtggatgtgtgcccgcaatgtggtggaaaagacccgttgtggttgcggcgcccccaaagaaaaaacactggcgtgaaaccgcacggagatatgtggtccgctcagtgaaacactccgtgtggtcgtctacatgaacgtcacatgttgtccacgaacaagaaaaccacagtcgccaactacatctggggagatagtaaatcagcgttcattcggcttggtcccgtcgtgtgttacatttccataacacaccgacatcaacaaccagactcaacataccaacaactatacacccaaaaacacaaagaccgacatactaacacacatacaccaacacacacatcaactcaagtccacagtacacttacaaaactaaaataacacaaacacaacctcataaaactaacaacgcacctgaacatcaaaccaatagctatgacaatcacacaacgacacaacatgtaaaacaccaacca

SEQ ID NO: 697946 - DNA, 554 bp, Homo sapiens
taggctagatggaagctccatatgggttgtggccacatctgtgtggttcttgtctgtgattactcagcacgtaagaggtgcttggtaatactatatttgtaaatggatggtagggagatatttagactagactgaggtcattggagggtagagacagtgtcccaccatgtatgggacaaaggccagattccattgtctcccaccatcattttttcccagccttatctcctgctcctctgaactttttcacttagacaggtggatttcaaacagctctacccttttccgaattctgccagtagttgcttggcctcctttctacctgtctaatgaatgttcccacctcatgggccacctttgaacttaggaaacttgtgaggaacacttatttgacacttagccatgtatatactatgagaatgttttcaagagcatccattgagacacctggtgtaagaaataatttttctatttttgtgagtttaggggacttttcctttgaacagaaattaaaaccttatttactagaagaataaagtgatgttaaattgaaa

SEQ ID NO: 697947 - DNA, 268 bp, Homo sapiens
ccaggcactgaagctggggcgacagagtgagactctgtctccaaaaaaaaagttttcctgtggtttaaaaaaaatctttcatgaaaagaatggtcaatcaacgtgacaaatttcattatggtcttattttaagaaactgcaacagccaccccaactttcaagcaccaccttgatcaacagccatcaacattgaggcaaaaccctccaccagcaaaaagattatgactcatggaaggcttaggctgaccaggctgtcagtgccttgacc

SEQ ID NO: 697948 - DNA, 1049 bp, Homo sapiens
agcggggtcgggactccgtttcagatctcaggtgcggcgagcaccaagatgtccgggaacttaatgcatttacggttctagggttgttacgattattgcatggacgcgagatgcgacggtggactgcaccgggatgttgattggtcgagatgagtctccgtgtgagtcgtgcagagtgctttagccagaggtgatggggacggcacgaacattcagatagtgatggcgctcaggtcttgggtgcaaatggtgcttgtccaatagacaacgtcgctaacatggtataaggaccgtcgtgggacttatattcaggtgccgtagtgtgtacgaagtggatagggattgcgcatggtatgtacatcgtgaaagcatgggtaagatcactagtatcggggcgcaatggaagcttttaggttattcgtgcgctggaagttatgtacgatagtagacgttgtaaacggtaaaacgcatattgagggtaaatccgttatatgggacacgggatgtgaacgactattcacttgggaaggagacaaagtttgggtggcgttaagtgcgaatatggaaggcttattattccgattgttgtgtaagcagattcacgaataacggggagaaatgtgagatccagtggagtgcaagcgcaggtttcgagttctaataaggttaacgagaaaaatgggcaaacatggttgtttccctataggaagtgtttcggatatttcgcccaacaacacattggatgtgtggggtgtggacaaaaaaaaaggtgctctgggcccacgacgcacagtttttttgggatttgagcacccagccggccaccgaagagtttaatacctattagatgttacgcccccccgaataatatggcttctaacgtaagatgacattatcggtcaaaaagagacgcatcgcaaaaaatgaggaccaccaaatatttgggtgatttacactggatgtggagggcgacatattaccattgtgaggagagacgcccacgattttatcaatgagtaatgctcataaatattaatttggggagatta

SEQ ID NO: 697949 - DNA, 435 bp, Homo sapiens
gaagaatcctctgctcaacctgttttggcccgaggtggatgagggtgctgttttgggcatcagccccctcagcaggcctttgccttttgcctgcagcaatggggagaactggtggtgggtgccagtggtggcaccacttttgggggcctatttagggggcatcatttacctggttttcattgggtcccccatcccacgggggcccctaaaattgggggattttggggggtataaagaccccgggaaaaccgtattgcccaagaggggattttatgaacccaggatttttcccctcacccccgtttttgtgagccctgccaacagattttcagtcccccctgcggcatttttacatgaatccagggccctagagcacttttaagcagagattatttgtgatcccatccattccccaataaagcaggggttgtccga

SEQ ID NO: 697950 - DNA, 415 bp, Homo sapiens
  misc_feature (146)..(146): n is a, c, g, or t
  misc_feature (189)..(189): n is a, c, g, or t
  misc_feature (230)..(230): n is a, c, g, or t
  misc_feature (248)..(248): n is a, c, g, or t
  misc_feature (261)..(261): n is a, c, g, or t
  misc_feature (263)..(263): n is a, c, g, or t
  misc_feature (297)..(297): n is a, c, g, or t
  misc_feature (302)..(302): n is a, c, g, or t
  misc_feature (307)..(307): n is a, c, g, or t
  misc_feature (309)..(309): n is a, c, g, or t
tatatctgtgatttgaatgagggagccctttggggcaaattcaggtgcccccattgcctcaggctggccctggtcccaggtggcagcggttgaggaggggtacagggctctcaagcctgaggttttcttctctgggcttaattttntccccccgcacccgcctcacaccccccacggtgtccgttgaanccacccccccccttttcaatacatgaccccttcagatcatntgtgcctacctcctgccnatcaggcgtctanantgtcactcagacacctgtggcatgtggaggagantgccntgtcntnagcctggcaaatgtgcaactgtctcctgcaacctgctgggcatgtgggcctggctgtgttcaattgcaacaacaatttttatgaaatggattaaagcttgtttttt

SEQ ID NO: 697951 - DNA, 273 bp, Homo sapiens
  misc_feature (218)..(218): n is a, c, g, or t
taccccattatgtgacatgttgatgcagacatgcaatacataataatcacatcatggtaaatggggtatccatcccctcaagcatttatcctttgagttacaaacaatccaattacattctttaagttatttaaaatatacaattaagttattgactatagtcaccctattgtgctatcaagtagtaggtcttagtcattctttctaactagtttttngtacccattagcagtccccgcctcgcccctactctctccctgccacgggtaccga

SEQ ID NO: 697952 - DNA, 156 bp, Homo sapiens
gcctgtcactcatccagaattcgagatctgctggtttaacaggtcatgcagtgtgatttgacagcgtgaactcttagagtccagccatttgacacctggcgctgtaatcctgaactttactcgcatattccgcgcggccacgtagcttagttaatt

SEQ ID NO: 697953 - DNA, 763 bp, Homo sapiens
gctgagacccgaaactcaccctagtgtgctccccgttgccccttgcattgagtccgcaaacctgggctgtgacggatctggagaagatgagttcacgtgctacgccgactaaattgctcaacggtcccatatccagtctaagcacatgcaggatatgcaggatctgaactcaggatcatgcattgtagtatgctgctgtggaccctttgctgtccatgtctgactgctgctgcttctaacattggacacatggctcagagctacgtcacgtcgagttctcacatggatgtccagtgcatgtccttgtgcattgactggttctcgcagacatccgacgtggcataggtgagggccctaggtctggtgcagtcacctggtcagtcggcggatgtgctggtagcagagcactgctccatgatgcaccaagagtccagcagcaatgccctgaggtggtgtctacagtggagcccagcgacccccactgttccctcagaaggagcacagacataagcaccttccggaatcatctccctctgaccaaggctcagccagacccagcaggaatgacagtggaagagcagccactgcccccgacctcaaaccaggaccttggggaggcctctctgcaggccaccttgctgggtctggcagccctaaaacaaggcctacccagaagtgctggctcagggacgcactgcccgtgtgacgcttacatcccctttggcccgacccctgcttggctgggaataccctgggccaggtg

SEQ ID NO: 697954 - DNA, 953 bp, Homo sapiens
  misc_feature (777)..(777): n is a, c, g, or t
gcaaaatcatggcggtcgaggctggtgtaattcggcactgaggcttgctctcgccgcccgaggccgcgcgctcgccatgtccggccaccgccaccgtgtgtcgcctcggtgctgggcaccatggagatgggtgcgccgcttggcacgcgcccgccatgtgtccgctgccgtgcgctcctttctggagcgcggcacaccgaactggactcggtgcttcatgtcagcgacggccagtccgagaccatcctggggcggtctggggctcggcgcatggtcggatggtgacctgcaaatgttgaacacattgtcaccaaggccaaccctttggcgcatgcgacaacatcactaacagcctgactattgtccggctcccagctggagacttcattgaagaggctgcagttgttccctcaagtggaccttcttcttaccgtacacgtcaccttgaccacgtgtaccccggtgcaatgagacagctggcattgcttgccatactgggtgccaccagagaggggaccaacgtccgtgtgagcttggtccttctccaaaatatgctagcttggagaagttggccgaaatctgtaccctctgcaacgaggcaatgggatggactcctgcccacgtgtgtaccagggcctttgtacaaggctatcacccggaaggtgggaaatgtagcttttcctgtgcctcaggcactttgccactgaggtactattgcctcacgaagccttcttgggttgggggcctgtttgacgtgggctgttcaccgacgttttnagggactaggacgggaaatacagcctgtggggccggttctgtgcggaatagctggggtttgagaccctacacggaatcgcttctgggaaggagcgaccagttcgaggacatttgcgttggttgcgaaagccctgaggccgcttattgggccagggcccccattgtgacctcggttc

SEQ ID NO: 697955 - DNA, 680 bp, Homo sapiens
ggaggcggtggggaccgcggggcgacgggagcgagtatgtccgctctgactcggtgggtcttcgctcgcgtgggaggccgcctttcagaagcggtgcgcacggactgtggagatggtggagtccggtcatgccgggtggtggtgtgcactatttgagcccgggtatagacagttcccccagtgaccagatcccaggtgttccagagcgagtcttcagcggactcatgtggttctgattctctggcgcttttgcatgatcagaagaggtgctgggtcactttccggtatcctgatccttcccagtgacagatgaagaattaggtatccctcctgatgatgaagactgaggtgtagactcagcctcactctgtacaagacgccaggtgagaatttcaaggattatcgacttcatatgggcacatttaaagttacaaatttacatgtggtgggcccaaaaaaaaaaaaaaaaaaaaaaaaaaaaatttgttgcggccggctgggggcccaggggagagtcttctaacaccattcctgtggcccccgggcccagagtgtagggaccgggcacagcgtggaccagagaactcggccagcgcagtggggggtcccaccaaaaaaccccggggacggggttcggcaccaaggtcgggcaacgtcacagggcaggcgtacccgggggg

SEQ ID NO: 697956 - DNA, 279 bp, Homo sapiens
ctgcggtggatgttgtacctgtgtgccggtgtcgtgatgctggggagcgctgagactcgcaggtgaacttctgaactgctggggagtcggggggcatggcagacagcgcggacggtgggcacctggccggccgacaccatctcgctcacaatctggccacttgggaagaaaacgtctatttattccccttctctgcatcactttttgggttactgtccttcatattctttaattttttaaacccatgatctttatccctgtgtccaagttgactgtgtt

SEQ ID NO: 697957 - DNA, 107 bp, Homo sapiens
  misc_feature (3)..(3): n is a, c, g, or t
ctntcaggacccccaccgctccagacatacatggttgggacacctagggctaaaataacttcaggtgctctataatgtcttgtagatgccaatgtactgtgatgttc

SEQ ID NO: 697958 - DNA, 134 bp, Homo sapiens
tttttacattgaatattatatggctcaatgattccgtagcacatgttgtaaaagacagggttcaaatgatgttcaaaacacgtcatctttgtttcatagctgatttctctattaatggtgtctcgaagaacact

SEQ ID NO: 697959 - DNA, 297 bp, Homo sapiens
ccgatttgacgcgtccctcctggaagcaggccaggacaagtccaggctcttaatcagctttgaatagcaaacacctatcattttttaagcagtgaagaaaaaggcaagggtaaaagccaaatgttattctgaggtctgaaatgaaacaagctgaaaatgagccagtttcacaagctctggccttttagagataaaaatcagaaaaaggaaagaaatgccttctaagaggcacatgaagggaaaacattctggactaacagtgaagagtattgagggcatattgctccctccctagaa

SEQ ID NO: 697960 - DNA, 138 bp, Homo sapiens
aggactagcattaattgacagctgaccgaggtgcaacacagaagtggatacagtgaatcaaggaagacagcagaagacaggataccaggaaccagtgtatgatgaagcaaggactgaggcacggtggagcactcatgt

SEQ ID NO: 697961 - DNA, 177 bp, Homo sapiens
gcttgagttaagcgagtttgcaaatgcgcgatgaggcgatattacacgttattcgttactatacgcgcgaagcagggtgcgcgaattagagcggcaattggcgtccatttgccgcaaagcggctcgtttgatcgtgtcagaagagaaaaaacgcgtcgtcgtgacggaaaaaaattt

SEQ ID NO: 697962 - DNA, 188 bp, Homo sapiens
cgtgagactgaggtgtttataaattttggagattaatcccttgtcagtcacttcatttacaaatactttctcccattctgtgggttgtcttttcgtttgtttagggtttcttttgctgtgcagaaacttttaaatttaattaagtcccatttgtttatttttgtttttattttcattactctaggaag

SEQ ID NO: 697963 - DNA, 305 bp, Homo sapiens
tccagcggttaccgattaggattgtgtgacgtatagtatggatgctacttgtcaaaatgatggtaaaagggtagcttactggttgtcctccgattcaggttagaatgaggaggtctgcggctaggagtcaataaagtgattggcttagtgggcgaaatattatgctttgttgtttggatatatggaggatggggacttattgctaggactgacggactggactacgtaactacggggcaacggaccgcctcctagtttgttacgggaccggagcgacgactctgtgcgggatcctctacgagtcg

SEQ ID NO: 697964 - DNA, 826 bp, Homo sapiens
gccttcacttcgccctccagctgctgcagctgcagcccgacgcgagcgtgccaagcggttcagcagctagcggagcggtggggcggcccccctcaggacaccaacagattcccctcttcccgcggctcgcatggggaccacggacagacttgcgcgcgtcaatgtgtatcctccatcatatgctgactgtggaaaagctgcagagatattttcaacaaaggattccggtttcgggttggtgaaactggatgtgaaacacaaagtcttgcagtggcgtgaattttcaacgtccggtccatctaatacaagaacagtggtaaagttatgggacctgtggagaccaaatacaagtggtgtgagtatggtctgactttcacacgaaaagtgaacatgataacactctggaacagaactcgcaattgaagaccagattttgtccaaggttttgaaactgacattgatactaccttctcaccaaaacaccaggaacgaaagtgctaacaatcaagtcttcttaccaagaggggagtgtataaacctggttggttattgttcgactttgatttggtggactggaatccatggttcaggtgtcttgggtatgagggtggtttgtggtaccagatgaactttggaagtgcaatcaaggtgacaggataacttgcaggggtaacgatgggatttcaattaacactaagtcatgtgggcgcattgggggtcattttccaaagttgggaaatttggcttccgaaacttgtggcatcggtacacgctcgttggtggggaaataatggccggcccttggagcacctctttggggggtccc

SEQ ID NO: 697965 - DNA, 1434 bp, Homo sapiens
  misc_feature (189)..(189): n is a, c, g, or t
gcacatagaccttccatgtacagtgactgcgggcacagacttggaagggactgctgtctgggccacctaaactcacgatatctggggcgtgtccagtagggctgagagagctcaatatcctacctttgacacacaaggtctgcgagaagctcgaagaacaatcgttcgaatcacgcgagatcactgtcntaagataatgctcgcgtcacgacccgtcaccgcctgaacaagagttacaggccatcggaactgctagtgtcgttagttcatcgcggcttcagcgtcccatgccgacctaaacatatcgtgagtgccagacagagtctacatctccgataggaaagctgagaagtgctatagtagtccatgtggtcattagactcgacatcaaggtagccataatttggaacctagcgtcgtgttgaatgaaagactttggtgctgaccagtatgaccgtggggaacgtttttgcacatgatgcactcgaatgctggctctagactttgcgcatgaaggacatgtgcggtagtgatagctgacgatgagccgtcctgtgatgtgtatccgaatcgccgtatttggaacctcgttggggctaaacagaaaagactttgaaggaaatctcttcgtacacaacttaaccacgcagttcataggcttaccgtgtcctttgctgtaataagtcctagttctaagtattcactccctaattcacccattaccttgcagagccccccccatatatttggtcaaacacaagggaaggaacagatcgttctggggttcgagaaaaccgggtaacttagcacaggaaggaaggtatgttaggcgctttgattgttcacatgtgttaacccaagagcagtgagcaaggggaaattttccccctggtataggcacgtatgaaaacacaggggaaagcacaataggcgactgtgaccataggggggaaagttccagagcagattgcctacctccttgtaaacgaaagttggacgtacaatatataggataagcgcaacttaagaccatatcagaaaggctccgcgaagtttgcacaaagaacgctcgtataccacaccccccagtggagaaataagacgcaacatacacctttgggatatccaaagggggattatggccaaacacgtgggcgcatatgggtaccctaccagaaggatccaaatggagaaggggacgccacgattatgacaaaggcaaatgggcccggggaacacattcctttgattgaaccaacatacccattgggatggcatgtggcacagtagacccaagttcctttaccacgcattcattaggaccccagccgtggcgaacattgggggtaggcctatggcttcagagatttgcgtattaggggcaacatatgtagtcaggaggcaggtcaagcacatatcagaattggcaccccc

SEQ ID NO: 697966 - DNA, 116 bp, Homo sapiens
tcccatggtttccatttaaaccccctggggacccaagggttccgggggcccttttttaatcgcttggccaaaaaaaggtccccgggggtaaatttttcccaaaaaagggttgccca

SEQ ID NO: 697967 - DNA, 895 bp, Homo sapiens
ggcagttcggcggcccgcgggtctgtctcttggctttcaaccagtgtgtggacggaacagatcggggactctcttccaagcctccgacgccctccgatttcctctcggtttgaacctctgggaccatcttctcggccatctcctgcttctggacctgccagcaaccgttttgtgtggtagctccttctgtgccaaccaaccatgagctcccagattcgtcagaattatcccaccgaacgttgaaggcaagccgtcaacagcctgtcaaattttgtacccttgaagggcttccataaacaatacctctctctgggctacctattttcggaacccgcgattgattgtggggctcctagggaagggcgtgagcacacttctcttcccgggagaaacgtgggccggaggaagaaaggcgcagagggacaaaacagaagggcggtctcccgtgaatgatggcaaaaacccccaaggggttgggggcacggcgacatcttctttcacagggacaatccaacgaacgcccggttgaaagatagactgtgggggaaaacaccccaaaggaggctaatgaaacatggttgccaagtggcccttgcaagaacaatcggtttgaagccaagggcctttgtggaatcttcaatggcacgttggggtgtctggcccgggaggggaccccccatattcgtttggtgacttcccgtggagactcattccataggttgaggagaggtgacgctttcatcaagcaggttgggtgcccattgacaaccctcaaaggggtgggtgcccgagatgtggggcgagtatattcagagaggtcacttcaagacgataagacatttggcaggatttggagggcctggaaaaaaggtccgaaagctccccgaaggggttt

SEQ ID NO: 697968 - DNA, 729 bp, Homo sapiens
  misc_feature (439)..(439): n is a, c, g, or t
  misc_feature (590)..(590): n is a, c, g, or t
cggcacgaggtttttccacaatttcagctctttctctacaggagataagactctcacttagggcaatcttagcagattttaggttcaatatctgcttctgaagcctggagctagaatccctgagttcatcattttctttcatgactttgtccactgaacttaggagcaaccaactagcttcattatgttccttggttttccacgtatggtcaattgtattatgtatagtcactgaactccttgcctctcacgagcgatgattcaggtgtgtcaaatgcatttattttgcataactctctaaacagttcacaccaaggactatcagtgttccctatactattagaagtacagtccttagcatttttgggtctaatcatattaaatagccaacttcagaaaccccaaaaccaatgaaagaacttcatccttaatattctgntcctctagaacaactcctggtaccaaaatctgtatcagtcaggattctctagagggacagaactaatggaaaatatatatatatatatgagtttattaagtattaactcacatgatcacaagggtccacaataggccatttgcaggctgangagcaaggacagccagtctgagttctgaaagacgtaggcctggaggctagggctggctctcttttttacatttttctggttgcaccctggcaacttggtagattgtgccacccagattaagaccggcttgcttttcaac

SEQ ID NO: 697969 - DNA, 216 bp, Homo sapiens
ctggaagaactagacttactggacgacttggatctggtggaagacacagattctttctggaacgacatggattagctggaagatctgtatttgatggaagaccttgaaacttattaggaagacatgcgctttcctggcaagacgtggcattttcctgcgaagatctggactttgcgtggaacgaccagctaacttgcatggacagactggactttg

SEQ ID NO: 697970 - DNA, 238 bp, Homo sapiens
attttaagtcaaggtagaagacaattatgaaggaaagacagccttttcaacaaatggtactataacaattagatatccataggcaaaaaaaaaaaaaaggattctggttcaagggcccaccctttttttaaattattttaaacctctgggccgggcccggggttcctggcttttattccccaatacacgggaaggttgataacaggcgtaatcccccgcgcccgggcttgcctttctt

SEQ ID NO: 697971 - DNA, 301 bp, Homo sapiens
  misc_feature (34)..(34): n is a, c, g, or t
ttttaagataaatcacctgtgtgataatattttnaatctgagacgaatacaacttttaaaaattgtttttaaaaatagacttttttttttagagcagttgtaggttaacagaaaaattgagaggaagatagagatttcctttctcccctgacaaagccctcaacagcctcccaggctatcagtatcctgcaccacaatggtacatttgttacaatcaatgaacctactctgaaacatcattatcatccaaagttcatggtttacattagagtcccctcttggtgttatacatgctagaggg

SEQ ID NO: 697972 - DNA, 285 bp, Homo sapiens
gcagactttgcagtgagccaagattgtgtcattgcactccagcctgggcgagaagagcaaaactccgcctcaaaaaaaaaaaaaaaattgtcactggagacatgatgggtggagactctacataccttctttgaatacagaaacggatgcaaacacatgcaaattactttttttttttttttttggtgatgcatgaaaaaactttgacttgtggattacattaattattagtaacagttagattctgccgacttgtattacagtagggtcttatttccttaaaga

SEQ ID NO: 697973 - DNA, 112 bp, Homo sapiens
gcggtggcgacctcggccttcagtgtttccgacggagtgaatgcgcggcggcggctgggatgctgctgctgggcttgctgcaggcgggttggtcggttcttggccaagcgat

SEQ ID NO: 697974 - DNA, 198 bp, Homo sapiens
ctgacgttctctgtggcatgctggtctggctctccaggtggtcagagcggcccagtggtgccccagcacggtggtgcccgttccaggcctgtgattgacttgtacgattcactcctttgagtttttggatgtcaactcagccctctgatctggagcgcagcctgccgaggcctctagggacgagctccccactgcaga

SEQ ID NO: 697975 - DNA, 677 bp, Homo sapiens
gagaccgtaggaatgtggaattgtttggcacccatgtggactggtgagaagaagccgagggtgtctgtttttgttctaggcatccccagacaaaagacagaagtccggaatcgtctttctgaagaggacagtcatcaagctgagaagaaactgggcatccccaagatttcctctagcttagtcctgctggtcctctgaggaccgggatggctgacctgacttttcctgggtactgcaagaaagccagggacggcagatcttaccagttggctggattagtgtcacaatgttggatgttccggtatggatttggcaaagggcctcctggactgcagcacgcacgagggagagagagagaggaacgacaaaaaacagggaggatgagggaaaaggtgaagtgcgaacgaacagatggggcatgtggccagagaccctcaggatccaggaattaactcaagatgagctgctgttgcccaactgctatcctgggttagcaagagagcctctgcaccacagacaatcatcccgggtttgggcaccaaatgtagagttaaaggaacggaaagaaacacaaaacgcggctggcagattacagacaggttaattacagacaaaacctgagaggactcctggccgaatcagaaagaagtgtttacatttaacagaatagactatta

SEQ ID NO: 697976 - DNA, 165 bp, Homo sapiens
gcgtagaggatccccgcgaacaggacatgcaagcccctcactctcccccttcacacctctagacctggggcctccggaaccgccagctggctgcgcttatactagctcctgacttaggaaaagcctcgtgtcacaacacgtgtccctacaggcaaagtgtcctgg

SEQ ID NO: 697977 - DNA, 156 bp, Homo sapiens
cagagttgtgcagtgggtatcattgccgacgcggatgacattgacgctggcctctggtctggtacagcatccggttggccctcattgtgagatgagtagacccttctgggagaatgttgtgacaggagcaggtactttcctgagtttgtccgatgg

SEQ ID NO: 697978 - DNA, 131 bp, Homo sapiens
agcctgggccagcccacagcgttcctagtcaggcagccaccccttggtcctcattttggtcccttccaatttgaaacctcgtgcctggttcgtctgccccctacatttttctttccagctgctgttttgta

SEQ ID NO: 697979 - DNA, 1221 bp, Homo sapiens
  misc_feature (750)..(750): n is a, c, g, or t
  misc_feature (834)..(834): n is a, c, g, or t
  misc_feature (1131)..(1131): n is a, c, g, or t
tgcatgggatgcttgaaatgtgaatagtgcaaaaataatctgtctgatgtctcatcttgtggtatctacgttatatttgcaacggaagtggaatatacaattatatggttctactggacgtgcacttcctatactaccatcacacagaccaatatagtatgtcactctacgtcaaccatgtcctcttcatggactcccgtctaatactacgataggtgccgtgcgaaccaaatccgcctaaagatacctcctcatcattgtgaatctatctccacttcttcgtctcgcatgtggaacatacaattcctaggacatgcgtgaagattgaacatgccagcacctcgatacacatgatgaatatgggttgatcttgacaatattagttagagttattgtcaagaatacttttcacaagacaaaaagcacgtatgacgagtctcacagtgactctctccgattggtgatgcgcattctagggtgagaacccttgacataattagtgatacctctgaaacaccaagagttgaccaacacgttacttctttgagtaatgtcacactagatcgagttggattttcctcaccaaaaggcaataatagtactccatgtggtttcaaccttgatttcgactccggtggagtacgtgggaagtattcttagaacttgaacaacgagtagcgccttaaatataacactttgctcctctgtttgggtcgctgatcctaggctctccagatagatcgtcgatgnttacagcgtctgtaccatttggtaagagagcggagcctttcctagaaagtacttaacaggggtcacctggtaggacgcgtgtantcgagcgaatagtgagctgcgttcgtttcccactaagccaaattaacaggggctctgatcgacctcacgagagcacggtgtttgtaataccactacaaaaagaggtacttgccaccgtgacatataataatttcccaaggggaggtgtgcccggatttgacccaaaggggaaaatcttacactagaagatctacacttgtcgaacctcgcgaggatctcatgtgtctctcacaacacgccgcatcacatgtatgagaaaccctcctcctagcacgcctttttactgccatcagactnacatcagccctcatctctagagcggcgagccgatccatatgtgacaatcgacagaccgccatcgctaccagatatcaatacaccgacccc

SEQ ID NO: 697980 - DNA, 176 bp, Homo sapiens
ggcaatggctcttgagggagcactcggactctgtggaggacctgactgggaacaggtggagcaatgatctggacacctgtcccatgactctgtatgtaccgtcctggctaggacatctggagctgatgcttggacaatgacggtctcttaggtaatgaatggggatcccgcaaccc

SEQ ID NO: 697981 - DNA, 894 bp, Homo sapiens
  misc_feature (1)..(1): n is a, c, g, or t
  misc_feature (76)..(76): n is a, c, g, or t
  misc_feature (82)..(83): n is a, c, g, or t
  misc_feature (162)..(162): n is a, c, g, or t
  misc_feature (195)..(195): n is a, c, g, or t
  misc_feature (204)..(204): n is a, c, g, or t
  misc_feature (225)..(225): n is a, c, g, or t
  misc_feature (229)..(230): n is a, c, g, or t
  misc_feature (237)..(237): n is a, c, g, or t
  misc_feature (257)..(257): n is a, c, g, or t
  misc_feature (263)..(264): n is a, c, g, or t
  misc_feature (268)..(268): n is a, c, g, or t
  misc_feature (276)..(276): n is a, c, g, or t
  misc_feature (290)..(290): n is a, c, g, or t
  misc_feature (301)..(301): n is a, c, g, or t
  misc_feature (330)..(330): n is a, c, g, or t
  misc_feature (350)..(350): n is a, c, g, or t
  misc_feature (387)..(387): n is a, c, g, or t
  misc_feature (439)..(439): n is a, c, g, or t
  misc_feature (487)..(487): n is a, c, g, or t
  misc_feature (508)..(508): n is a, c, g, or t
  misc_feature (561)..(561): n is a, c, g, or t
  misc_feature (566)..(566): n is a, c, g, or t
  misc_feature (745)..(745): n is a, c, g, or t
  misc_feature (763)..(763): n is a, c, g, or t
  misc_feature (814)..(814): n is a, c, g, or t
  misc_feature (832)..(832): n is a, c, g, or t
  misc_feature (893)..(893): n is a, c, g, or t
ncctggctctccctggaactgcttccttgccatggaggactcacatgatctccgagggcctctggttttataagcntttttnntggccccttctacccctcagggattctaagggggggggggtgtgtgcttgggggggttgactgttaactgaatagggcnggggtgggacagagtagttcctggtctggtaangtggcagcnggggaagggggaggcagtggngggnngtctggnttttttttgttttttttggnccgggnntggnctcctggngggtggggccagcncagccccagtnacagtggcagctggggggcttcctatctncttggttgccgtctggccanaggtgtagataggtttccttctgttctgggtctcgcngggcacagcgcccgtggacatggcaccgctggtgactgaaggacatcgctgncctggtcacattgatcacataggggcccaaggtgtccaccaggttgtnatggagatgccagctctcctnctggggcaggtacctcccagatctccggtgtgtgaggtggacataggctaggncaggnaggggatgtcggtgcccaacaagggccacacggaaggcctcctccaggcgatgtcggacaaaggcctggtggtgggcaggtggcagcctgggtgggaggtagatgctggggaagagggcactggaggcggcccagagccaatgcagttgagtgttgcgggcaagggtggctgcatggcncgggccggtatagttggnagccatactatgccagccattgccacaggctggggtagtgatagaagcccngagtccatgggggccgtngtgcctggggccaccgcagcgtatcctccatcagtgcacgggccgcctgctcaagccagtnt

SEQ ID NO: 697982 - DNA, 136 bp, Homo sapiens
atctagtgtccgggcccggtctctggtctgaggctgtcgggtgtctggcatacggggaagcgggagttcggggaaggaggcagcgagcagcgcatcaggagctgtgtggggggatgatcagcgaacaaatgcacag

SEQ ID NO: 697983 - DNA, 173 bp, Homo sapiens
cagcattttttgggagctccaggacatcatcccctttggcaacaacccccccatccagccccctctttggttgaaccccccaagggacctggatttgggggccaagcaggcctttaatttatattgaactgtaaatatgtccctagagaaataaaatatgggcttcccattta

SEQ ID NO: 697984 - DNA, 189 bp, Homo sapiens
cctaattctatcatattcatggtattactgtaatgataggacatcttaacttcattctattcaatactcatgtaaaacgatgaaaggactgatatgtctcttatatcgaaaatcatcattcaatacttactatgatcagtatgatattatggttactctgtactgtacatattttaaaatgggagtaag

SEQ ID NO: 697985 - DNA, 124 bp, Homo sapiens
tgaacactccatatacttactaagtagactaaatacaaaatatatacactatactcattatacatacttcgtagtctaaagaaaggaggctactatatttataatttagtatataaagtagagt

SEQ ID NO: 697986 - DNA, 261 bp, Homo sapiens
  misc_feature (66)..(66): n is a, c, g, or t
  misc_feature (70)..(70): n is a, c, g, or t
  misc_feature (86)..(86): n is a, c, g, or t
  misc_feature (128)..(128): n is a, c, g, or t
  misc_feature (138)..(138): n is a, c, g, or t
  misc_feature (226)..(226): n is a, c, g, or t
ggaactctggctgccgaaatccgggcgctgcgggaggcctacattcgagacgggggccgggacccngttngctgggccagatatgnagtttgcaggtggaggcgtctgcactggagctgcagcggtcncagccgcagnagactaccaccctcatcatcagtatctttggtctgtgagctgcaggtctggcaggggctagcatgggctagggcaccacagccaaagntgtggggtctcacttggactatttgaccaagatca

SEQ ID NO: 697987 - DNA, 875 bp, Homo sapiens
tgagcgagcccgaggaggcggcggactctgtatcgggggcttaggcgcagaccgggctgagcgccgcctgcctgggcccggaggtcaccaccagcatgatacgggcaggtcgaataccggacggtcgctagcactgcagtgagacccagatggagtacctgagaactgcattggaggaaaacattcagacttctgccgccacattaccgtggatgttccactgacggggtatttcagttggtgtttgcaggacctgcaggcgaacatgtgtggagacccggggggaactggtgagcaggagagtctccttcaggcaccattgaaagactgttgcttgggcaaaggctgggagcgcactggggccctgggggaagaagaatgcacgcttccatggagagtcgtaggcgagcaagaacctggtaagtctcaatgagcttcaagccttgtcatgctgctgtggagaaacattggtgcctgtttatgaagagatgactgcttaggactgcctgctcctggtcgcattcggatacacacttgttgtatgtaggcagcagaagcaagctgccaccaatgccgaagtccttctttgcagaccaagagccttggactgtcagttgcctagtcgatgatgagataagcccagggctgacaggaaggtcaagtaccagagtcatcagaggtgggatcagggggtgttacatgaagactggggggagcaaagacggggttcccaaaaggcattcctgttgcctggtgcggatggtcgaaacgggacagtacaagcattagggggcccgtagaagtgtgccccggaggggtttggccccgaaaatgtgttgtttgtggagaggccccccttcgggtcctttcacacg

SEQ ID NO: 697988 - DNA, 439 bp, Homo sapiens
tactgccaggaaaacagagctgagcatgggtgtgggatgtctatgtgtgctgtatatctaaatcattttaatagactaagataggaagagacaacacatatgctgattgaaattatgtttggaattggacttgctattaagatcaaaataacacatgtaagcctcttcaactgtgttatacacagttctacatgttcggaactcatcaacggtgcaaatatttctatcttgaaccttgttttctctgatgattagtgcatttattagaagattaactactccttttaaaaaaaatctttaacaaaaattatctgacagcccaaggaattctcaagttccatttcagtgttcaggcaaaccaaattattatatttccagatttcctcttcttttgctgccattcacaatgaaggaggaaaaagcggactcctttgatgtg

SEQ ID NO: 697989 - DNA, 222 bp, Homo sapiens
ttgctctagaggatctcatgttatcgccaacacagtactaataattgagataatttctgtatacaaggtcttagtggttgtaactgtcttaaagagaccaattaaatgggaatggagtgtttctttggggaaaaggcgggaaaattgggttagattttaattatacagagcttgatacttagggaggaaagtagaagattctacttagtgaaactagaaaat

SEQ ID NO: 697990 - DNA, 246 bp, Homo sapiens
taacaaatgaagaagtgatttcgttttttaaaacaattctgtaggaaccagtctatcactgatgggcatttgggtggttccaagtctttgctattgtgaatagtgctgcaataaatatacatgtgcttgtgtctttatggtagaatgatttataatccttgggtatatacccagtaatgggattgctggaataaaaattattggattatggggggagaaaatacatacaaatggccaacagataga

SEQ ID NO: 697991 - DNA, 929 bp, Homo sapiens
cctccgccgctctgctacggtggagctgaatgcactgagctccgacctggggttgccagctttctctcccttgcgggggcgtcgaactcgcgcgtgcgcagcgcgtgagggaagggggccgggacctccttgctgacccgggcagggccaccggatagccggaggtgaatcgggatgagcttcccagcgctgcagctccactgagaaggaagcccaggcgcagagggtcgccggtcggccgcagtgcgtgaggccatggcattcctgaccgggcctcgtctcctggactgggctagctcgccgccgcacctgcagttcaataagttcgtattaaccggctaccggccggccagcagcggctcgggctgtctgcgcagccttttctacctacacaacgagctgggcaacatctacacacacgggctagccctgctgggcttcctggtgttggtgccaatgaccatgccctggagtcagctgggcaaggatggctggctaggaggttcacactgtgtggcttgcctggtgcccccctgcagcctctgtgctgtatcacctcttcatgtgccaccaaggaggcagtcctgtgtacacccggctccttgccttggatatgtgtggagtctgccttgtcgacacccttggagcctgcccatcatccactggactctggctgagaccgtggcttcgccagtgcctgatggtttcactgcctgtcaggtgtcccggtgagagtctcatgccctcacagtgccgtcggcttggtggaactggccccgtgtttgggctggtgggggcgggccaggtccgccgtcggcggcgttcgttgggcgtgatgtgccccccacggggggccccggccccgctgggggccccccggtggcggggcccacgcggggccacccgggggggcggccccgctcgctccc

SEQ ID NO: 697992 - DNA, 188 bp, Homo sapiens
attataaataaaatcttatttcactgatgtggagcctaacctgttttatttttttttggtttagtttagttggtttttataaaataaaatctcactccgtggcccaggttgaattgccgtggcaaattctcggctcaccgcaacctccacttgcggggtttaagcatttctccggccttagcttcccg

SEQ ID NO: 697993 - DNA, 570 bp, Homo sapiens
  misc_feature (78)..(78): n is a, c, g, or t
  misc_feature (384)..(384): n is a, c, g, or t
gcacgaggcaagatgaatctgagctctaatccctagagcatttaatatgttcttattattaaaagctcagatgcaaanaactctcttaacttttaatgttataaaaaaaatcaagtcttcattacattccccaatccacctcttgatggggctaataacctttccttaatgatagggtgtttctaaaaagatatatctggtcaaggtggcctgatactcctccttctccccacaacctcccaaacaaggaggaataactaccttttagtgatcatataccctaaatataaatatatttaaaataattttatacacatatatttaatgtcaatctatatatttaataacactaacacttctcttcattttcaatgaaaaatatanaatttataatattttcttcccacttccccatggatggtctaatcatacctctcattttacaaagtactgtttcttaaacattgaacaatatattcccaaccttgctaatttacaccaatcacctatagatactaattaaaacacaaattccactgtcacatacattactccatttaatcataatgg

SEQ ID NO: 697994 - DNA, 214 bp, Homo sapiens
gcggagaccccgctcatggcggccgacaccaggtggaggaggtccccgcgggcgggggtgggcagcttgagggagcggaaacagatgtcgtattttgcctcgttgccgatgcatgaggcctcatatcgtattctccaccagctggagcacagacagcgagtcgtgacatggctccaccaccgcgtctgacactttgtgcgagagcaccacgctg

SEQ ID NO: 697995 - DNA, 181 bp, Homo sapiens
aactttcaggaccagggccttcagaagagccactttggaaacaagtctggtttctccttgttttattctgtggtggtgtttggtttttccagacagggtttttctacagccctggctgtcctggaactccctctgtagaccatgctgacctcaaacgcacagggatctgcctgcctctgcc

SEQ ID NO: 697996 - DNA, 348 bp, Homo sapiens
gagtcggtcgtattgtgtgagcctgttggagtaccagtatactcgccctcgtagtctttgatcttagctattttctgtgtgaaatacgagtgtactgtagaggttcgtagactggtatagccctggcgatcagccttctcaatcatctctgtggagagggactatgtggtgtggtggcacacatctgaaatcccagctacttgggaggcttagacacgagaattgcttgaatgcaggaggtggaggttgcagtgagccgagatcgcgccattgcactccatcctgggcaacaagaacaaggctctgtctcaaaacacaacaaacgctgcacgctcggtgtggggcccc

SEQ ID NO: 697997 - DNA, 654 bp, Homo sapiens
atgggagctacaatccacgagaggcggcgccctccgccctccggtcttcagcccggccccgtggccccgcggcatttggccacgaatcttaacgcacagcctcctcccgggaagcgaccatgcccgcccgcccgccttggacggccggctctgcggcacaaaagcactggcagcgcgcgctgtccagcgggtcgcggtgtcccggtgcccagccttctctcagcaccaccctgcggggacggctgcgagcccgcgcgcgagagcctggcgccccaggcagccccgcccaacccagccgccgccacccgcgggacggggcccggggcgccaagcccctgcccaggtctcgcccacggcaggcccctcctgccaacaggaagcaggtccagagagccccccagaccatgcgatcctcgcacctagagcaccctaagggacacaacgcccaggatcggtgacaggaccgaaggagacacagcggaacgattcaaggggacaagcaagacatcacggcaaccatttatccgcaacatgtacggcagggcctggagaagagacgcgcactggacccagagggggacaacacatggaatacactatagaataccagcaggacaacacacggaaacaaagtgacagatccgcggagaggga

SEQ ID NO: 697998 - DNA, 139 bp, Homo sapiens
ctctgaggtattatcataattcctgtgatccacggagtgatagaagggagcatgacaagaaataagtgtgagcagttgtcatatggtgctgaagacatgctacttttcctgaggggggaagacagctgatgacggtggg

SEQ ID NO: 697999 - DNA, 998 bp, Homo sapiens
  misc_feature (812)..(812): n is a, c, g, or t
cacagtggctcacacttgtaatcccaacactctgggaggccgaggagggcaaactgtttgagcccaggaggttcgggacctacctgggcaacacagcaaaactgtctctatgcacaaacaaaaaaaaacccaattttttcaccgtgagaagttgtgcaacacagctttaaaattctcccattattcccagaaaaagctgaactggcctgaaacgcgtcggggtgcattattattcccgcgagcctttcacaagtatacgtatacgatacagatcactataccgggcggggcttcatggaaacgtcttccccatcatacatatattcgcccttcatagaacaagcgtccttctcccactaaacgagaacagtggtgcagggcgtgcaaaactgtctcaccattatgtgcactaactagagaaatttcaagcgctttacaaaagggcgcggagtatctccgtcattatctagccggggaagacaatcattcttcgttccacaacatctctacaagacggcactatactgttggacgccagcggattagcctacaacagtgaactatttgtttcacaaacattactcgccccgtacatgttagctagtttccaacacaacagacatttgagcgcgagcgcggaactggatgacaaagacacacttcgtgggtaacagaacacatcctcataacctttttgtcacgaacaacatgattatgttccccacgcacactgtagggccatcacattagaaacagctctctccactagcggcagtactcgccaccacacacagtaaggaagctgtcctccncatctttctgtcgaacaaaacgactcttctatcacacagagggggagttggcactagacggactgtgtaaagtaaggcatagacacgatctgtcacgcaacgcccgcaacaggtagactctcaactcactagttctttcatcatacaaggggggcgtggacatcacgtatccagtcagaccagacc

SEQ ID NO: 698000 - DNA, 177 bp, Homo sapiens
gactccccagacaacgggcggagcggctgggagaggctgcggagccgcggtcgccgacctcggaggcactggacgccgccactgtcggggcttcctcacagctgtacgtacggtcagcccgcgccgtctcgagaccttaatcccacagcttacacggtcctccggcctgagaacgcc

SEQ ID NO: 698001 - DNA, 689 bp, Homo sapiens
  misc_feature (212)..(212): n is a, c, g, or t
  misc_feature (231)..(231): n is a, c, g, or t
  misc_feature (470)..(470): n is a, c, g, or t
  misc_feature (473)..(473): n is a, c, g, or t
  misc_feature (520)..(520): n is a, c, g, or t
  misc_feature (550)..(550): n is a, c, g, or t
  misc_feature (666)..(666): n is a, c, g, or t
  misc_feature (673)..(673): n is a, c, g, or t
ggctccaaatgtccacttgcacattctacaaaaagagtgtttcaaagctgctcaatgaaaagtaaggttcaactctatgagatgaatgcacaaatcacaaagaagtctgtcagaatgcttctgtctaggttttatgtgaagatatttccttttccatgataggccccaaagcactccacaggtccagttgcagattctacaaaaagagtgtntcaaagctgctcaatcaanagaaacgttcatctctgtgacatgaatgcacacatcacaatgaaatttatcagaatgcttctgtctagtttttttgtgaaaatatttccttttccaccataggcctcaaagtgctccaaatgtccacttgtagattctacaaacagagtgtttaaaaactgctaaatgaaaagaaagattcaactctgtgagatgaatacacacatcaagaagaagtttgtcagaatgcttctgtctanttnttatatgatgatatgtccttttccacaataggccagaaagtgctccnaatgtccacttgcagattcaacaaaaagantgtttcaaagctgctcaatgttaaagaaaggttcaacactgtgagctgaatgcccacatctcaaagaagtttgtaagaatgcttctgtctagtttttatgtgaacatattcctttncccccantaggcctccaaaaggg

SEQ ID NO: 698002 - DNA, 218 bp, Homo sapiens
agaggatcccgtgctgcctgcgtatgcagaatgtcggtggtgtgcatcacttcaaccgaaaaactcggcaccagctcggctcgaataaggaggcttagagctgtgcttaggactccagcccatgcgccgaatagtaggtatagtgttccaatgtcttggtggtttgtagagaatagtcaacggtcggcgaacatcagcaacaaattagtcatgcagca

SEQ ID NO: 698003 - DNA, 1379 bp, Homo sapiens
gggcgctctggccaggaagctggaggacaaccccaagtccctgaagtctggagacgcggcatcgtggagattgtgcctgggaaagcccatgtgtgtggatgagcttctcccagtacccgcctctcgtgccgcttctgcctgtgcgcgacatgaggcagactggtggcctgtagtgcgtcatcaagaactgtggaatgacagaagagctggctgtgcgccggcaaggtcaccaatgtcggcgcagaagtgcgcagaattgctgggcaatgtgaagcgctgggcgccctgcgtagcggacctccccgtgggggggaggccgtaggcatcggaaaccccagggggcgcggggaacggagaacagggaggaagaggagagaaggagagagaggaggagagaggaaagaggagagagagagggaaggagcgagagaaggagaagagcggagaaagacgatagaagaaggagaaggaagaagagacgaaggaagagcaagacgaggaagaaagacagaaccgaaagaaacagagcgcgagctgggaagaagaaaggagagagagcaacaagcagaaagagaagacatgggagagagagggaggcaggggcgaggagcagcagaaggagcgagcaagacgaacagcagcaagagagggcgaagggagagagacaacgagaggaagcagagacgagaggcaggaagagagggaaggggaggagggggacggagaggaaggacagagaagacggaggaggacaaacgagagaggaagaagagaagaagagaagagacacgagaagagaaagcaacgcacggaaagagaaaagaggggacgagagaggagagaaggagagagagagagagagggaaaacaggagcagaaggaggacgaggagacgaacggagaaagacaaaggggagagaggggacgacgggacgaagaaggagacagcagaaaaaaaagaagaggggagcacgaaacacaagaaagacgaaggaacgagagggagagagcagaggcgcagaggggggcacaaagcagcgccaagagagggcgaaggacaagaaagagggcaggaaagacaagagaggacaggggaagaaacggaagggggggcaggaggagaagcgagggacaaaaagaggcgagaggggagaggagaagaggagaggaggacaagagcaggcagagagagaaagagaaagggagaggaaaagggcgcgaaccggagagaggaggacgagggggagagggacgagagaagagagagagagaagaaagggacgaaagaagagaggaggaaggggagagaagaggcgaggggagaaggagagagagaggaagggagggagagggagcgggcgaaggaggagaggagaaaa

SEQ ID NO: 698004 - DNA, 753 bp, Homo sapiens
  misc_feature (6)..(6): n is a, c, g, or t
  misc_feature (10)..(10): n is a, c, g, or t
  misc_feature (46)..(46): n is a, c, g, or t
  misc_feature (55)..(55): n is a, c, g, or t
  misc_feature (122)..(122): n is a, c, g, or t
  misc_feature (144)..(144): n is a, c, g, or t
  misc_feature (149)..(149): n is a, c, g, or t
  misc_feature (154)..(154): n is a, c, g, or t
  misc_feature (157)..(157): n is a, c, g, or t
  misc_feature (163)..(163): n is a, c, g, or t
  misc_feature (171)..(171): n is a, c, g, or t
  misc_feature (174)..(174): n is a, c, g, or t
  misc_feature (180)..(180): n is a, c, g, or t
  misc_feature (184)..(184): n is a, c, g, or t
  misc_feature (197)..(197): n is a, c, g, or t
  misc_feature (204)..(204): n is a, c, g, or t
  misc_feature (226)..(226): n is a, c, g, or t
  misc_feature (228)..(228): n is a, c, g, or t
  misc_feature (234)..(234): n is a, c, g, or t
  misc_feature (236)..(236): n is a, c, g, or t
  misc_feature (255)..(255): n is a, c, g, or t
  misc_feature (259)..(259): n is a, c, g, or t
  misc_feature (267)..(267): n is a, c, g, or t
  misc_feature (271)..(271): n is a, c, g, or t
  misc_feature (295)..(295): n is a, c, g, or t
  misc_feature (299)..(299): n is a, c, g, or t
  misc_feature (307)..(307): n is a, c, g, or t
  misc_feature (330)..(330): n is a, c, g, or t
  misc_feature (337)..(337): n is a, c, g, or t
  misc_feature (361)..(361): n is a, c, g, or t
  misc_feature (393)..(393): n is a, c, g, or t
  misc_feature (426)..(426): n is a, c, g, or t
  misc_feature (445)..(445): n is a, c, g, or t
  misc_feature (448)..(448): n is a, c, g, or t
  misc_feature (451)..(451): n is a, c, g, or t
  misc_feature (458)..(458): n is a, c, g, or t
  misc_feature (463)..(463): n is a, c, g, or t
  misc_feature (476)..(476): n is a, c, g, or t
  misc_feature (492)..(492): n is a, c, g, or t
  misc_feature (512)..(512): n is a, c, g, or t
  misc_feature (535)..(535): n is a, c, g, or t
  misc_feature (556)..(556): n is a, c, g, or t
  misc_feature (575)..(576): n is a, c, g, or t
  misc_feature (729)..(729): n is a, c, g, or t
tctttncccncatttaatttttattttgattttttttaatgctgcncaacacaanatttatttcatttgtttcttttatttcattttatttgtttgccgccgccgttttatttatttttacngaaagggagagggaacttttgnggccnttttnccnttttcngtaggccnccntaagcnttcnaaatttggaacanccaagcnagccgaagggaaaagggggttncncaaaancncccgggggaagggaaaggntgcnttgttaancatnccccatggggggggattaactgcntgtncaattacntttcacttttaattaattgtgcntaaggcnttaattaaatttggggggcccccncttaaagcagcccgtaccgacgaaggggcatnccccgaatgatgtcacggcagtcgttgaacacncggcggatgtccccagtgnccncancccaggngaaangagggtagcagtngtgacccccacccccnccggcagtgccgacccccanaaacccaccccgaatgaagtccntggcccgggtcacccgtgggncccccccgggcccgggagnngcacccccaggagtagtgtagcgagccaattctcggaaagtagtcctcaatcttcgatttcccagcaaggactttctcagcgagcagatcttgcttgttgaggaacaggatcacagagatggtgcgcccattctgttgttccagatgctcttnaagaggttcagagcctcctgcagg

SEQ ID NO: 698005 - DNA, 185 bp, Homo sapiens
gctcccccggtgtactgcaaaaacgggtgcttctacctgcgcatccacccctgtacggcctgagttgacgggctccgggagaagcagcgaccctcacatcaagctacaactacaagcataagagagcggagttgtgtctatcaaaggagtgtgtagctacccgttcaccgggctataaacggaag

SEQ ID NO: 698006 - DNA, 157 bp, Homo sapiens
gtaattgtaatggctagtaagcagcactgccagcaagcattcacaacaaaagacatgcagcagcaaaagcccagttagtggtgtgcaaacttccttcctttaaatgtcccatgcatgtaggacagtgccatgtttcaagatgcctgtgcagctcagg

SEQ ID NO: 698007 - DNA, 289 bp, Homo sapiens
ttcaacacatatgtgctgaccttaaggattcaaagaccgacatcattgctgccctgtgggagtttatttacccttacctactgcgatgtggaccatggatatagtaccacattgtgatgaacgtcatgaactaaagaaagcagctgggtgggcaccatggctcatgcctgtaacccctgcacttccagaggcggagagatggaaagatggctcctggtcacgagttcaagagcagcctgcgacacttagcgcgaccctgtctctactcactcaaaccaagagagaagaa

SEQ ID NO: 698008 - DNA, 1160 bp, Homo sapiens
tacagtaaacactgttacaaatcatcaggatcctcacgtcgatccttgtcaataaactctggtgcgccacgtcaggcgtacatgggacttcaatacactgctcacgctttttcgccttgctctctctattacgtctttttccccttgcagcggtgaaacctatggcgggagagtcccgccaacagtggctgttaggaaacatgcaagtgcgaccacctttcatgctaacatccagcgtgtttcatgtaactggggcctttggtctgtggctcccgggcccatctctccggaacctcacttcactctagataggacccattctgttccacaactgtacatggttctggttcacgtagataggtccttacactggtctggctttgaacccgacgtgactccgtaaccaaggctcgaagacagtctcaggagttgttctttctagtggctaaggattccttggccagactcataacggaacttggtggataccagcttactatagtagtagtgtggttccgagaaatcttcagttttaaatagaagtgtttcacgagtgcctttttttgcccccagtattgggttttcaatactctgttgtcatattacatattacagaacctttcaaacctgtattccgtgctttatactacaggaaaatgtcaccaagcaccctcctccccagttcacaaaaggaagaagatgaagattctgtctccctgctccccctccgccagttttccaaagtgtcttgagcatatgcctggctgtgcctcagatcatcaccatgccacagtccctgctccctacttcttggcagccaagaaaagccctttctacatgtctagaaggaaatacatccgagaaagttagcattggagtgttagaaactagcaggtagagcctctcgagccatccgagctgctgtgtcacgcccatcagcgtgctagggagtgacaagcccaagtcattcttgatgccaccccttctccacacccgcgagatcgccagggactcatcctgtgactttgtaaccacactcattcctttcaaacaacagaggaggaactattgcttcatcggactttattcaaatctagttatgtattggccgtaaattaatgttgtgcaaaatgtgaaatgtttttatttaaatatacgcc

SEQ ID NO: 698009 - DNA, 162 bp, Homo sapiens
cattgagccccttgatgccaggtgggatgtgttgatcacgcggcacttgagtgatgtccgtgaatgtaccgtgcacaacgtatctcgaaaggtcatccctggatgtgtgggacggggctgatgcagcggtaccgtccccacacaccatcccgcaggtctctt

SEQ ID NO: 698010 - DNA, 658 bp, Homo sapiens
tgcctggatgaggaccggcacagggaggaatgaggaagacaatcatgttggaagccatgatcaagaagaaagagttccagagggaggctgaacctgagggccagaagacaggggaagttcacgaccatgaagatgttgaaactgctaggaaacaaacgtgatgccaagagcaagtcccccatgagtacaagtagctaactagctacgagaagccaggttggcggactgccccctcctggtagcagacgtcctggcgctgtgcgtctgctttgacacggtgtggctgccgctgcatcccgctcacgtatcatgctcacggagcgcaaggatgactaaggtggagggatcctctgggtgatggcctcttcctcctcagggatcctctgcactgctctgtggcccacagaactctcttgtttcttctccgagccccaggcagcggtgattcagccctgcccaacctgattctgatgactgcggatgctgtgaccggagccaggggcgaatagggtcccagggtccagggaggggcgcctgctgagcacttcctggccctcatcctgtccagccctgccgatgagctctgggcttgggtctcctgctccagggttctgctcttcccaggcaggccagccatgttggcgctgggccacactgg

SEQ ID NO: 698011 - DNA, 208 bp, Homo sapiens
ctcccttatatgtgtaaagctaaatataataattcagttaaaataaaagtgggtgacaggaaaaaattagaaatgttgaaaatttttttaccttcactcgctacataaaaacgttggaggagactccttcatggtcttaatctctttggatctcttgggaacaatgaagctcttctgatatttttcaaatccaaatagaacataacaa

SEQ ID NO: 698012 - DNA, 818 bp, Homo sapiens
  misc_feature (538)..(538): n is a, c, g, or t
  misc_feature (544)..(544): n is a, c, g, or t
  misc_feature (553)..(553): n is a, c, g, or t
  misc_feature (577)..(577): n is a, c, g, or t
agcgggcgtcgagctcgccgcggactcaagatggcggcgtgtggacgtgtacggaggatgttccgcttgtcggcggcgctgcatctgctgctgctattcgcggccggggccgagaaactccccggccagggcgtccacagccagggccagggtcccggggccaactttgtgtccttcgtagggcaggccggaggcggcggcccggcgggtcagcagctgccccagctgcctcagtcatcgcagcttcagcagcaacagcagcagcagcaacagcaacagcagcctcagccgccgcagccgcctttcccggcgggtgggcctccggcccggcggggaggagcgggggctggtgggggctggaagctggcggaggaagagtcctgcagggaggacgtgacccgcgtgtgccctaagcacacctggagcaacaacctggcggtgctcgagtgcctgcaggatgtgagggagcctgaaaatgaaatttcttcagactgcaatcatttgttgtggaattataagctgaacctaactacagatnccaaanttgaatctntggccagagaggtttgcaaatctnctatacagagattaagaatgtgctgatgaaccggtgggacaaggttacatggtttcctgcttgatggatcaccgatggcaacaatcactgcagtatcagatgtcaccagtacattaccaagatgacgggcatcattttaagtgatttaccgattaaaatactggaggtctcatggatgagacgggacaagatggaactcaacattcttgaaatgtgcaagacatcaggcttgggcacaaaa

SEQ ID NO: 698013 - DNA, 369 bp, Homo sapiens
  misc_feature (39)..(39): n is a, c, g, or t
  misc_feature (99)..(99): n is a, c, g, or t
  misc_feature (233)..(233): n is a, c, g, or t
  misc_feature (340)..(340): n is a, c, g, or t
  misc_feature (359)..(359): n is a, c, g, or t
tattaattgaaaaggtcagggtacccacttcccaatgantgtagggaagcaagcagtagtggtgtttagaatatcaaggttagctgctggatgcgggtntcacgcctgtaatcccagcacctctgggaggctgaggtggacggatcacgaggtcaggagatcgagacaatccctggctaacacagtgaaaccctgtctctgctataaaatacaaaaaatcagctgggtgttgnacgcatgcgcctgtagtcccacctgctagggaggctgaggcatgagaatcacttgaacttgggaggcagaggttgcagtgagctgagatcacgtcactgcactctancctgggagacagaaacganctccgtctca

SEQ ID NO: 698014 - DNA, 103 bp, Homo sapiens
agggggaattttttaattttgaaaaaattttttttgtaatgggcaaaattttttttaatgtataatgtataccttgtaataaaaacaaatttccccaattccc

SEQ ID NO: 698015 - DNA, 167 bp, Homo sapiens
atctctgtgaagcgtgtgcgggggaccgcagacatcagagctctcctgtaaatcacctccgcaaaggctctttgtggtcgattcactgatgactcatttataatctggtttcaacattgtgagtcaaaatgcaccactttcattaaaaataacattcactggggtct

SEQ ID NO: 698016 - DNA, 356 bp, Homo sapiens
ccagaggattcgaattcgaaagttgtgcaaactggtaaacgtctgcttcggagcttgctgcttaataaatgtggtggaatgaatgaatgaatagatgctgtggtttgattatttctgttcttatttttttaagacggagtctcgctctagtggcccaggctggagtgcagtggcatgatctcagctcactgcaacctccgccacccgggtccaagctgttctcctgcctcagcctcctgagtagctgggatcaccaggcatctgccatcatgcctggctaattttggtaattttagtagagacggtatttcaccatgttggccaggctggtctcgaactcctgacctcaggtgatc

SEQ ID NO: 698017 - DNA, 134 bp, Homo sapiens
tgagtatcatagggcagctaacaacatgggccagctggttgttcagttccagagcacagggcagcagcagggcctccaaggatggaaaccaagctctttctgtaacttattcttagagtgggagccccatcaca

SEQ ID NO: 698018 - DNA, 201 bp, Homo sapiens
aaaaatgttaacggggagttggtgccagtccttaaaatctcctggacatcggccaggtgcggtggctcaagcctgtactcacagcacttggggaggctgaggcaggagaatcgcatgaacccaggaggcaggcggtggttgcagtgagccaggatcatgccactgtactccagcctgggcaatagagcgagactctgtctc

SEQ ID NO: 698019 - DNA, 261 bp, Homo sapiens
  misc_feature (52)..(52): n is a, c, g, or t
  misc_feature (66)..(67): n is a, c, g, or t
  misc_feature (84)..(84): n is a, c, g, or t
  misc_feature (105)..(105): n is a, c, g, or t
  misc_feature (117)..(118): n is a, c, g, or t
  misc_feature (143)..(143): n is a, c, g, or t
  misc_feature (158)..(158): n is a, c, g, or t
  misc_feature (168)..(168): n is a, c, g, or t
  misc_feature (171)..(171): n is a, c, g, or t
  misc_feature (173)..(173): n is a, c, g, or t
  misc_feature (190)..(190): n is a, c, g, or t
  misc_feature (204)..(204): n is a, c, g, or t
  misc_feature (216)..(216): n is a, c, g, or t
  misc_feature (229)..(229): n is a, c, g, or t
  misc_feature (235)..(235): n is a, c, g, or t
  misc_feature (252)..(252): n is a, c, g, or t
ggagagagagagagagagagagagagagagagagagagagagagagagaganatagagatctcgtnncgggattataggcgtgnagcacccgcgccccgtctctnatttcttaattnntagacattgcgtactctccggaganggtccctgagaaccnggctgatctnccncnctgcacccctcacgcgnatcctgttagctcncaaactgtcaancctgagcgaaacncagagncaggctctccaggacanagtgatata

SEQ ID NO: 698020 - DNA, 145 bp, Homo sapiens
gtcttgggggactcctgagctcaccttgttaggattgaggattctgtaagagctcggtgataggagggccaccccgcagcctggaacctgttgttcccacctggggggccctccaggcctccagcctgggaggaccttcttaacc

SEQ ID NO: 698021 - DNA, 208 bp, Homo sapiens
  misc_feature (168)..(168): n is a, c, g, or t
agccatatgagttgcttctgagtgctgcttggttagagaagtggcaggaggagctgaggcgctgttgctgggggggtgaagttggctttgcatgcgcagcgatgcgcctccctgtggatggcatcaccctggaaccggagtgcccttgctcactgtgttctgcatggnttggatctgaattaattgtcctttcttctaaatcccaacc

SEQ ID NO: 698022 - DNA, 523 bp, Homo sapiens
  misc_feature (17)..(17): n is a, c, g, or t
atgccattagctgtgcnttctgtgtgtcctcacctgactgccaaagcccaccctgtagttaaaagcatcctgtacgttggactgctagccactcctaactggtgcccacctcaggttcttcagtccacggcctaaaacccacatctggctctcttcatcctgtgccggatggacctgcctggcctctcatggcatatgggataaagccgacactctgttgtctggtatgggaggccctgtagctcggcccagcccaaccttccagccctgcctccagccacttagcccatttccctgaactgcatcccgtgacctcatgcactgaagccacacagcaggcactttcccatctctgttctttgactggacgcacttgttccttccagctgcagtcatatctactgtacttatgtacggtaccacccgcaactgggccaggaactgtgagagcccatggatttttttttttttttttctttttgagaccctgtctcaaaaaaaaataaaataacataaggccctt

SEQ ID NO: 698023 - DNA, 603 bp, Homo sapiens
agcgggagggcgggagggctggccaggtctcgggttgcgcgctgggcctggagggagggggcggccccgaacttggactactagcggccgagtgtattgctgagccgcgctgcacggaagcgaccacactgtgggaagtgcgctacaagggtcggacctgaccaggaaactccgttcagcaggtccggtggcggtcatggctacgcggtgcccaccgactcgtccctcagaatgacgctgaaagtcatggctgagggtgcgcctgtcgcaagatcatagcatgactctttctcctgcgaacggatggcttgggctggtgcgcctgcgtgggctcgtcggagtgatgtgtcggtagtcgctggtggagcagcttcgcgggatttggacctttggggaagtgggctggaggactgctttcagaggctgcatgttggggtgattcgagaagaggagaaggaagaaactgttgagaaaaagcattgagccagatgaacggaccaaaataaggactagttggtaaggtaggtataggtgtattggtgaagaaaatttgcacaaatggaaattggagcaaaaggagaaattccaaagaacattcgtcca

SEQ ID NO: 698024 - DNA, 144 bp, Homo sapiens
gttttttccccctttttttccccatcccccaaaaaaaggctaccccccccgccggggggcccgcttagccccctaaagcccccccgtaaatgggggcccccttttttttcccccccggcctaataaaattttggttggccctca

SEQ ID NO: 698025 - DNA, 310 bp, Homo sapiens
ctcatcactgcctccctcctcacctcttctgggctcctgcagggctcaccttgcaaaggaaccgctggtcttgccaagtctgagggccggtcgtgcaggtgcagaacagctgtggggaagattcaggctgtgagagcagctaagttcatgtgtgtctgggctctctcggccttagcaggcatgagctctccgggacttcagtactatggatttaggctttggaagcggggttttttctttgcatagaatgattcctgtggttggatcctcttgtttccagtctaaactctcgctctggaagagcttgagg

SEQ ID NO: 698026 - DNA, 1596 bp, Homo sapiens
ggggtctcattgaactcgcctgcagctcttgaggatatattttgatggcattccttcgattacttggagccaggcctacaccccagcaaccaatgatccaagggaccatgcaagattggtacttgactcttggacaccacacatacctcattgatagtagaggtagtaatatcccaagccactggcacaacagtcgcagcatcaatttgcccaattgcatccagggcacaacctgcacacccactccccaaagcgtcattgatcgccctttcaccggcacaaatagaaacaggatatgacatacggatagcatagacacgcacaacagccaatcacaagtttggccaaattggcacacccccccacacgcacacacacaaggtaataatagagattgcaccaaaactgtactgggcatttgggcacagcccagacatatttggcatagcaatatggcattatgtatggatcacaacaagatccgttggcattccatcgcaacacacgccattttggtagcgcccgtcatctcaattcgggctcggggtctggcaaaattggcattacgcattaagggacgcgagatgacagccgaaacaaggggatccccgcaaaagcgaatcaaagcaagtattcaaaacaaagggcggcaagccctaggcacacccaacagacaccacggcctataccgtttcaatcacccaaaggacaagtcggacaggcggttgggtacattttcccatacaatttagggggtgttccttgcgggcacctcataagaacggccattgcgcacaacaggcgggccgacaacatgttcttgtgcacataagcaatcagacaccctatacaccacccttaatggacagggcatacagtgcacaatattagtgtgattcaacaccccaacagaattggatcaatggcaactgagtgtaatccaccacccaacgactggtgtacgacccacactagtgatcattttattaatgctagtatgcctatacaacgcactttgtgcacagcctgttaccattataacacagaggcctgcatatctacagtagaatgagtcattatacactcctcagtacagcacagtaacatatctggccgaatgtgagcgatacaaaccaaagttagacatttgtgtgacatgtggagtgactacacatactcaagcaagaaggttgacatatcacatgtagtcaagccaaagcaattcataagcttttagatcaattggtcaagggccaccaatcaccatatggagccacatgactaatgagcacacattagcacttggcgcatcatacacacaacgggagcgactagttagacgacacagcaccaagcacaaacaaggaggaatcaagagaaacacaacacacacaccaagcaaaacacacaggcagattgcacgctacaaacacatatagtgcggcacccacaagagggagaagagagtagcgcaaccccaactaattagcacataggtagcaacacaaaaacacaccagaccaagccaaacatagcaacgagcaccacatagtaagcaacacgcacactcacacaagcccaccacagactaatacc

SEQ ID NO: 698027 - DNA, 137 bp, Homo sapiens
ttcatttacgcaatcatgactgaagaaaaatcaatcagatgtatcttcaaaaatgtgtagtcccagtttttatgaactcagagtatattaaccaatatattctataaactgatcatagaacgaagaatccacgtaat

SEQ ID NO: 698028 - DNA, 948 bp, Homo sapiens
ggaaaccgagtcccagaactccggacgtgtgcggcgcagtgagtcgcagcatgtcctggttaactcgttgttgaagggcgccgggcgggcgcgggggcgagtgcggggccctgggtgggggccttgggttcactggttgcttggatgcgtgctgactcagcgggccgcggtgcgcagggtgtgtgggggcgagcgtcgggcagaacgtgtggcgattgatttggtgaggaggccgtgtggacaggtgggaatgggaccagtgctgcatccctagggcgggcggtctatcaggcggcccattgctgtgggggcggggtggtcgtaatgtccgggtagtgccctcgggcccccgtattgcttggtgattgcattccccgacgattttggagcgccctaccgtataagtaggcggacgtaccggtgcgtccccgggggcgacttctggggccccagtgtggtgtggtcgcgtccttgggggcggttcagggcgcagaatagacctgttcggtgaaccgttccttccaatcgggtcgtcgccccggcacacccctggggtgtgtgaggccatcgtggagggttggcagggcatgggacgccttgtgttgccatcattggtgggctccgatgattgaagtaggcagacgaccaatgaggcagtcgtgggatttgggaggactcccagggtcctcgtgtgggagaagccgggtccacagttgggtgggtcgcgcctgtgatgacgaaacatcgttcaggacagcttggctctgacaggggaccaatttcgcggtgagtggaactcccaggagtgctttgtgaagagagaaaggttcccctggatagagcgtcctaacagtagatccagggaaccaattgaagtggaactggtttggaacccaccaggggtggcaagcgacgccatgcgggtaattggaccgggcggcaactggc

SEQ ID NO: 698029 - DNA, 1122 bp, Homo sapiens
gggctgggcagtgtcccctcccacgctcctgccgctgtctcccagctgtccccagtgtgcgcggacaccatggcgtccagcgacgaggacggcaccaacggcggcgcctcggaggccggcgaggaccgggaggctcccggcaagcggaggcgcctggcggttcttggccaccgcatggctcaccttctacgacatcgccatgaccgacggggtgcgttggttctagctattgccatggtacgttctccatatggcaaaacacggaacacacagaggttctatatacaaagtattcagcaagacacttcacctgtgtccacgacacttcgccttgcttgcgcatagttcactgtttaatcggaattgtacctacttctgtgattgtgcactggggtccaagtgagtccacgactcttcatggtgtggctcattacgtcacagtactcacaacccaatccagaactgacgaggagtgtgcgccgcctacgctcctgcgtcgcgatggcacctgtgaacagcagattcaactcggccagcgcccgttctaacagcattccagagccctccttcggaacccaccttctggcccactaaacgtctcattacacacactgtgcccagcagttcctaacccaacaccaaactcatctcatacatactaccctgctcggcgcaactcaccatcggtgaacacatttcctctaccacactacatagccgcctgtccctatcgcccccgcaacacgttcgaccgcaacacacgccacgggcacactaggttccgcccaacttactccgacccgtttcgccgtagcgccccccagcactaccacaacaactgaatccctcaccattcttccacgacccgtctacccctacttcatacactcaccactatcccttcaacctacaaaccaccagtatgcgcaccacttcacacctaattcactaaccgccccatcacgtcatatcctcccacccgaaccacctctcactacattattctgacgagctacaaccatgtatacacacgataccaacacccacacgaaaaacaagggcatcccacctcctaccttcatccaaccacaacgcctatgcaacaaggctcatcaagacgaa

SEQ ID NO: 698030 - DNA, 192 bp, Homo sapiens
acccgatcgcttattagacccaggctgaggcggccggagtcagtatggtcaggagatcgaaaccatcctggctaacatggtgaaaccccgtctctactgaaaattcagaggattggctgggtgtggtggcgggtgcctgtagtcccagctgctcgggaggctgaggcgggagaatggcgtgaaccccggagg

SEQ ID NO: 698031 - DNA, 385 bp, Homo sapiens
ataatctatgtatcacttcatatgaatcttggttcttacttttcatctatctcattttatcttttcttcgtatcctatggtctctcctcctcaccaccaccaagtctgttcctgcatggtggtaaaggagagagatctagcagccacttctgcagcaaggccagcagtgaaggtaaaatctggtgacagctgtagccgagccagcctctgcttaatggagggctgtaatgagtccctgggagtaggaggggccgtggtcagaccacttccatctgcttgtggttcatcttcactctcacattggtaacacattctttcttctgctccttgggggaagacttcatttgaagaattatctttatttttaccttctagagagttttca

SEQ ID NO: 698032 - DNA, 343 bp, Homo sapiens
gttaaagctacccgctacaggacaaatttacacatataataaacgttcagctttagccgtagaaatatcacactacctctaaatggtcctccatagtttcttccgttctaatatatgtactatccgtgagtatctagaagaaattattccaaattgatcatagtttcccttaagccatacaacatttggctcgagtccagaactcttcactatttgtcagaatttgctaagcattcagcattgcaattctaaaatatatattgaagtcaagggggatatgtctacatgcggaggaggaaatatctgcgtctcaaggagccattccatttgatgacacatgctg

SEQ ID NO: 698033 - DNA, 313 bp, Homo sapiens
gatttctctactggcgaaacctcgtatccgggcccaacctcaaaaacatcccacccaaagaactgggaatagaagctccaagggaaagaaaaacgtcttggctagggagaaactatacaatgctggacaggacaggtttgaaatataatgatagaagggggtgatcttaaccgggaaactggacataccatcttgccttatacatgcgtcttctgaacaacacttgtcctatcagaacatcacctacctctaacggaacggcttacatacctggatagggggcctagccccaaaaggggcaatcaaatccggg

SEQ ID NO: 698034 - DNA, 794 bp, Homo sapiens
agatgatttctgtgatcttgtgtgtataatggtgggccactggcgccctcagtgatgggtgccattgatgctgtgcgacgatcacagaaaggatccttcctggtacgcccatttggtggctcatgcttgcgtgcttccctccgaaatgaaggagtgaggacatggcagagcgaggactgtgtacgtgcgctgtctgttcttacgaatgcctcgtctaatgcagcttccatgcatgtgctaagtcccttccagtctgctgcttcctctgatggttcttgtgcctagcccaggaggggacgccgttgagaaggaagtagaagatggtctgatgctacaggacttggtttcagctaagctgatttcagattacactgttaccgagatccctgataccattaatgatctacaaggttcaactaaggttttgcaagcagtgcaagtggctggtttcccactgcccccattcccttgacctctgctgccagactctcattcagtacgtcgaagacgggattggccatgagtttagtggccgctttttccatgacagaagagagaggcgtctgggcggtcttgcttctcaggagcctggcgccatcattgagctgttaacagtgtgctgcagttcctggcttctgtggtgtcctctgaacagctgtgtgacctgtcctggctgtccctgagtttgctgggcgggggcccggttgttctcactggctggattgcccaagcctggctggttaaccgtggcccggttccattccgatgggctccccttggggccctgtgtcctg

SEQ ID NO: 698035 - DNA, 907 bp, Homo sapiens
gtaaggtgtaccgaagtctatgacatcggagatggctttatatattcccgcacttgtgcctccggtggaactgtctgctcaatggtgcgcccttctaagtgatagaccgttctgttgcgaatccttgctgctcccctaagttacggcccctcctgtaagtaccaggcccaagcgcgttccaagatgttttgggcgtttgacccaccgtctatagactggcggaataataaacttttgtgggcaccagcactaaatcacttgcaaccagggaatcttttttatgggaaatatggcaccacatcgagccgtctactcataattacaccacctttggaccgccttttcacttttaccaccgtaattctaactttctttaaagagaaagaatctaagcttcccaacccgccattataaaaagtatcacttgccaccttgactttggaaataattgtaacacggaacgtctgtaaaaccaaggtcacacaaccaccctttaatggtgcccccgggggtaaaacaagaccccccaacaaaatgaaggttgcacgaccactctccccatttaaacacttgttgtccaccaccctctagcaagaattcaccaccgggatgccgtgtgcgcaaaatttcaaggtgagcatgttccgcctccgaaaagtatgataaaggctgctagcttcgagtgccggtaatcttgacttgcgggggctgcaggcaccccgaagatctcacccggcgaggcttgttcaacgtgtagctgagattttatgagtaccgtggcttattatttctttcaaggagaagcattaacatctctgcttttttatacggcggacatcctctgataccaagacttttctccagagaacccctataagaaaaaccggcaacacctcacaaaaataac

SEQ ID NO: 698036 - DNA, 179 bp, Homo sapiens
tttggtactgctgaggggtcatctttaatacagatcaggagcaggaggtcactgtcacttcaggagatattgcgaggcggttgttgaaaggtcatggtgtgacacatcagactctgcagcgatcaatagtgtcttgcgtgagtcttggatgagtagctcatcaatgtagtggatcaccc

SEQ ID NO: 698037 - DNA, 1313 bp, Homo sapiens
tcgaaccacgctgtcggtagagcttgattgctctttgacttttcgcactctaggccacgaatgccgcagtatcagaactgggaggagttcaagcgcgctgccgagaagctttacctcgctgagcctatgaaggcacgtgtggttctcagaatataggcatactgatgggaacgtgtgtgtgtgtaatagtaacagatgatttagtttgttaggtgtatagaacagaccacgctcaagatgtcatccgaagatcgcgaaattccacaggtcaactgaagtgcgacgttatggtagccaaggagagcccgcaatgtgaccatggaaactgagtgactggtgtgaaatgaagcactttagtccgtagtcacttcaggcatagtcacacatcatctatttgcacattcagcagcacacagtgtacaggagcaccagcacacagtcactctgtcagtgtcacactcatcagtggtggctgtctccagcacagctcttagcagggtccatttaggtaggtgaattttttactatgtattcacattgcactgtgtcagaagcaggcttaggggcatagcacaattgttggttcacagtttagcactaggactttgtcattatcactgtgtgggggcaaaatgtggaaccaaagaagatggcgatcctagtacttggagaacaagctggggaggactatatttggggaatgttgagggtaaaaacaatggtcaatagtaagcctcgtgggcaaaaattggtcattcaagtaacatttgcacacatgaggatacttagggaagaaggtcaaattgcttacttgaaaattttaggttccatcgttgcttttaaacacagaacccatcacacttgtcccccattaaggcccggatccactggtaatttagggaaggcatacacacggtacgtgctggcagtgacacaagtgaaatattaacaagactgggtacaattgggacaattaacggcagaaccaaacaactgcaataggtgaaacagatacgggggactcactaccaatgtagtacgaagctgtagatctaaaaaaaccgaaaggcatgggacaaaccaggaaagcagagcataatcagaataacacgcaaacgggaagaaaagaggagagcacataaaagtgcacgcaacgagataaatagaccagggcaaaaaacgataaaagaataccaaagaaagggatcagagaacgaccagtcagcatacacaagctgaacgagcgagaggcaaacgaaaagaagagaacgagacaacatcaagaatgtgcctccttccgcacttcacgtcga

SEQ ID NO: 698038 - DNA, 190 bp, Homo sapiens
cttctgcttctcagactctattccgacaccctttcaaatggaaggaatacgcaacagaaatgcaactctagtagctgctccgtcatctccgcgtgctgctcattcgaagtcgtggcttggagacccgatgcggttccgtcacgaaggtaatgttcagcctaacaacccctgggttgtactgatcatcctt

SEQ ID NO: 698039 - DNA, 121 bp, Homo sapiens
accgggaagatcaccatattagatgacgaactaaaaagacgagacaaccgatcggaatagcgcactacagcccagaaactcctggactacaagacgatccatccagacctacagcctcccg

SEQ ID NO: 698040 - DNA, 313 bp, Homo sapiens
gtcgaccctcatatgcatatgaggattctgctttctatgtcacatagttttctcctgcacctagttttcatagcaattttaaatggctggatgacattcaatgttattgacaaatcacatttcacaaactatttcatttacaccatttaaaagatgttcaaggttaaaaaacatttcccattattcttaacggtttccaaatattgaaaacctgtctataacttcaaccttctcagaagtatattttaaatttcgttgtaatattgacttgttcttacaaaagaggaggaaaccactagtcatgtcgtcgacg

SEQ ID NO: 698041 - DNA, 104 bp, Homo sapiens
gtcgtgcttctgtctgcttctgcttcctgcttctgcttccgtgcttctgccgcttcctgcttctgctgcttcctgcttctgctgcttcctgcttctgcccctcc

SEQ ID NO: 698042 - DNA, 115 bp, Homo sapiens
tggacctttccaaagcggagatgctggctctccgcttacaaacttaactatagggttagggccccaggttctgggttgacaaatattaagacgttggcagcatctccgcttggaa

SEQ ID NO: 698043 - DNA, 289 bp, Homo sapiens
aaaagggggggggggggggggggggggggggtttttataaaaaaccctttttttttaacccgccggttcgcgggggggcccccccccctgtttttttccccccaaaaaaaaaccgggggggatcccccccccgggttttttatttggggcggggggggagaaatatttttccccaaaaaaaaattttcccctttggccttttttgggggcccaaaaaaaaaatttttttcaaaaaaaaaggggggggcggggggggattttccggggattttttccccccccgggccca

SEQ ID NO: 698044 - DNA, 784 bp, Homo sapiens
cagctaacaggtatggacacggggactgttattcgcaagctggttttccctgctgtagggatgagcggtatagtcattactccccacaccatcatttctaatttagcctgacgtcatcgctcttggctcgttccttgctctgatctcatctcctcctgctatggtcgcagacagaaaaagtagaatcgaattcactaacgcgacacgttgggtacaggtagagatgtacatatcgtagttgtagtagatagcaacattatgtcttgcacgtgcgtgttgacgttgacgttgcagttacaatcaagaactgacattaacatcatgacattgtatagttacgttacatttaaaaccaaaaaacacagcatgcaacgcggcacgtgcaaatttgctacgggtcgtggcgggtcgcggaactgacagtcggtaccgtcgagaattggagacagcgataggcattgagatcacgatctgggtcttgatttggacaatcgcaagcgatatgtatgtttcgtgatttagaaaagggagtgaaggagaggaaatgtgaggccaaggggcaggtagcactacacatagatgagggaagggtacaggagatattgaaccaattatagacataatagagaagtacaaggaggctataggaccagaggcctttaatattttgatatttggcatcgcttcaagagtacacggatattatatgcagattttaatagcatagtttgtattcggtatattatcaagtatatatgatatattgtagtgattctcatatggg

SEQ ID NO: 698045 - DNA, 240 bp, Homo sapiens
  misc_feature (230)..(230): n is a, c, g, or t
gatcacctttattacgtactgagggggcgatccttgaagtcctgatatggagctctgcgcctgtagaggtacgcccagcatggcatgaatggcggacttccataggggcctttcctggcttgttcttttctgggagaaacctgagccgactgccaccttcctcgggtgtgttctgggtaaagtcttgaggccagaaagatcttgcatccctcaagcactcttgagctggngctgaaccag

SEQ ID NO: 698046 - DNA, 375 bp, Homo sapiens
aactgggtagagccacacaggtcagcaagacctactgcctctgtagactccacctctgtgggcagggcatagctgaataaaaggcagcagacagcttctacagacttaaattgtccctgtctaacagcactgaagacaggggtggtactcccagcacggtgtttgagctctgagaaaggacagactgtctcctcaagtgggtccctgacccccatgtagcctaactgggatacacctcccagtaggggccaacagacacctcatattaggcggtctatatggcgatgaagttaccaggggaatgatcaagcaggaatatttgctctacctgaatattcgctgttctccagcctccgaggataaaacccaagaaaa

SEQ ID NO: 698047 - DNA, 585 bp, Homo sapiens
gaattattataggagtaaaattagctcgactttttagctgcattctaacattttgtgaaattgttcttcaatttcaataattttgttagcatatgtattttcagtaatagtaatcataatgcgaattcaaactatattgtgatgcaatttaaaaaaatatagatagctgattctgtagattaaatcaaaccagtagagtaattttcattcgggtcagggaattcctagaatgaaatattcaaagttggtggggtaatatgtatagaacaagtttcgtcacatcactgtagatgtatatatgtatgtcctttgttgactgctgagttcttggcctgctattaagaatcttcgacctctttcggtagattgttgtttaacaagctgtgttgaagggatcacagagtatcaagagtggtatgtcagctaatgagattcttgtatgcactccgtttcggagtaaatgccaagtatacttacatctattcgcatcgcgcctggcggtcatagacaataggtctgaggttcaggatggacatagttatcatgaagccggccgatgtgccggtggactttgttgcatgcctt

SEQ ID NO: 698048 - DNA, 318 bp, Homo sapiens
gctccagccgaaggggtgggaggtgttgcttaaaaagaacaaacaggccaggcgcagtggctcacacctgtaatcccagcactttgtggagtgcctgaggctgtggtggatcacgaggtcaggagttcaagaccagcctggttaacatggtgaaaccccatctctactaaaaatacaaaaattagccgggcttggtggtggtcgtctctaatcccgctcctcggaaggctgaggcagataattgctcgaacctgggaggcggaggtttgcagtgagccactgcactccagcctgggcaacagagcgagactccgtctc

SEQ ID NO: 698049 - DNA, 1740 bp, Homo sapiens
  misc_feature (629)..(629): n is a, c, g, or t
  misc_feature (1740)..(1740): n is a, c, g, or t
taaatttttaattcccttttaaaatttataaaaatttttttaaaaacccacaaaaaagacttatccaattctctctcttttttctctcttttttttagtgtgtgtgtgtctcaaaaaaccacctcttaaagaatatatctctcttgtggtgaaacctcctttataacgcgcggtggtgtgtccactctctctcaagcacacttatggcaaaactctattttcacacaagtagtgtgcacacaaagtagaaaaaatactttaccacctctcttgtgagggtgaggcgcgccttaatatatctctttatctctgtgagaaatctctctgtgtggcgcggagagcgcacgagggttctcaaagagagagcacagtagtgatctctcacacccacgacaaaaaaatttgtagagagagggtgtgctctcttattctctcttatatagagagagtgtgtctctctttatggtctcttatactctctcccacaaaaagcagagtgtgtgtgtctttacacaaatatatctctcttatactcatagagagagagagaggtgtgcgtccacacaagagtgtcgtgtccccacactctatcatcacagaagagtgtgacacacagcagtgtgtctctnttttctctctacactctgctgtgtcacagcgctgtgtgtataccaccgcgtgtgtataaaatcgtgtgtgtcgtctatatatgagagagagaagagtgtgtctctctcacagagagtgtgggtctctctcacaaccactcatgtgtgtctctctcaaaaactatcctagaagagagcagcgcgggggtcataagatgtcctctcgacgagcgcgggccataatataaagcgcggggggggcacggcggaagaaaaaaaaaaaaaacacccccccgcagagacaatatctttttttgccgcgggggggggtgcaccaccacccggggagaaatcatctcatcgaagcaaaagggtggtttgttccaccccccgcgcttgtgggacgagagattgcttgtgttaattaacaccatgtcccacgagaggagagcgccctctttaacaatttttgttccaccccccccacccccaacaaaataaaggcggggtgaaacactctctattacaagcggaaaagcagcaggcacaacaatctctcggtttgtgtggtcgcccccccacctaagaagagaggcggctctttcaataatgactgatgcaagcggggagggaggggggagcaagccaccaacttcttcccttcgttctatcaaccccaacatcttttgttggtgtctcctcatcattatgatggagagggagggaagtcatatatttgccgcctcggcgatgtgtgtgtgtgcacccaccaaggcggtctttattctctccccccgcaaagaaagacgaaaaagaaacacacaacaaacatacacagagaacaacacacaaagaagcaaaacaaacaacaaaacaacaagaatcggcaccagcaaacacaaatatgaaaaacaaagagagacgcggcgcgccgatcataatcaacacaagcggaggagcgagaaagacacaccgccactatacagaaacggcccgcaatgagagtgaataactatgagcgcggatgctcaaaccaaaaggcaagagatcatggtgcactgacagacacaatcgtgagacggcacccacacaccccgcaattatgctcagctatcggacgacacaaacacgn

SEQ ID NO: 698050 - DNA, 339 bp, Homo sapiens
aggatttgggggttttgtttggttcccaaaaggggggggttttgtttttgttccccttgggtaaaggttgggcccttccccttggtttttccaaggagaccaaaaattttaaagggcccaccagggctaagggggtaaaggggcagcttgtttaaaggggattttggggaacttccctgggggggggaatcgaattggggattccccggggggggggggggccactccccctggccctttcccccggggtggggcccaatggttttcccttttaaaaagggggtggggaagggtttttccaaaagaaagaatttcccttttttaaaaaaaaaaggttta

SEQ ID NO: 698051 - DNA, 110 bp, Homo sapiens
actctagagtgatcccgctagatattaagaattttgaaatggatcatttctacttgcttgtgctattttaaccaactaatctgatgaatatagaaaaaaatgatccaaga

SEQ ID NO: 698052 - DNA, 211 bp, Homo sapiens
ttaaatgttcttgccacacacaaaaaatggtaagtatgccaggtgatgactatgttaattagtttgatagtggtgattattaaacaatgtatacatataccaaaacatcacctttatactgtaaatatatatgtttttattgtcaagtatacctcaataaagctggaaaaacatttaattcaaaaataagataaacatgaaaccctaaaaa

SEQ ID NO: 698053 - DNA, 718 bp, Homo sapiens
aattctcttctctctctctctctctctctctctctctctctctctctctctctctctctcggcagtgtggggggaagaggaagaggaattctttccccgtcatacatttacgagagacacaacttcactccatgtctcttcccttctccaaggcgcttccgaagctgctcccggctgcccgactcctgaatccccctgccgagagaggagtctcatgcgcaactcaaactctctcttctcctcttctccgcgtcgtctcttcccctccctctcgtcgttgtctaccctcccactcgtacagcgcgaccacctcccacctccggacaccacacccagcgcgccgcgcggcggcacgcgggagcgcctcccttctgcttctctctctctccctcctcttccttctctgttggggcagccgatggaccgctgcggtatagagggtgacagcggtcgacagtacaaagacaacagcagcccacgacagcgcgccagcgtcgcgctcgccccggggtggtgcttcccagcatatatcaccttatctccagaaaggctgctggaacagtctcaggggagaatagaggaaaagcgtgtagcaaggagggaggaagcggcggagaggaggcaagatgagcgcacgctgagagcgcgacggggcagcgtccaattacagccagcagggactatactggccgcccccagcgactcaaaaagagaaacg

SEQ ID NO: 698054 - DNA, 161 bp, Homo sapiens
gaggcactggttttggggctggttggcaaccttggaggggcagagctggggctacccttccgaagggccggggcaagcgagctggccctcggggcctggtcttcagaagggcaggaggtcactgaggattctctcggtccgggcatcaggtgtagacgtct

SEQ ID NO: 698055 - DNA, 191 bp, Homo sapiens
tcaggcttcggcatgagctgggcgcgacggatcatcttcaaaatctgtctgaaaaatgaggattttacatttggctgtattcgttaaacagtttctgaacagaaaagggaagttattcaacgctgagcttcctctgtcttaacaaaacatgggataacgaaaattccccacaagtgactgggcaaacataa

SEQ ID NO: 698056 - DNA, 1290 bp, Homo sapiens
cggcgcccttttttttttatttattgatcacaataatagcctttataggtgtttctaaaaaaatggggtgaaaaaacaataggatataaaataaccattattacaacgtggaaacagataaagtcccccagaaccacccctttcaagaatggacactccaaagccctcgtggggccaaagcacggggccaccaccgagcaaatacaaaaatccacgctcgtgactccagggtgcggaatggaaggaaacgcgctcaggccatcccgagcgataacatggaaggagcaagatatgacaataaatcccttgagggtcataaaatcttaaagggacgaaataccacatcatacggacacaagacctgcggaaccaaatccccggaaaccactccgagagcgatcccatataaggatatgatagaagggaaataccggagaagatgcaggtgggacttgaacggactacccgggggatcacacacaggacacaagaaaaaggcgaaaggaaacccacaagcaatccgaggagaaaggtgagccacacggggggcagccacgggtggacccccaggaaaaaagaaggcaatcgcccgggccaacgcccacagaagacacaacagcagaaaaatccccagaaagccgcagagcgccacacaagggttagccagacatgaagggggataccccggggcgaccatgaggcccactgcactgagcgaccaaaagagacaaaagggacgccatatgagcgccagaacaagagagatgtgacaagatggggacaacttcccaaaacagcgaggatcccacaaatacgcatccaacgaatctcggcaaacacgggacccgagctcatagaagataatcacccgatgagaggggaggcccccaacaagcatatagccaacgaaacacccaagaaattacgaattggtacccaacaaggggtggaccccccatcaacgggagacagctcggcaataaccagaaggccatagcacactagtggaagcgtacgagttctaccacaagaacgacgcacatgggccacaacacccggcatcaccacgggacaactctaagccgaaaggcaccccataacaacaagtgaagtgggaacaacatcaaccgcccaccacataccactccagccttacaagcacacacgagaaccaatcacacacactagtacgccggaacacactcggacaccagcggcgacactaacccccaccacgaaccaacgcccacacgatacaataacaacatacgacccagcacagctacaacc

SEQ ID NO: 698057 - DNA, 373 bp, Homo sapiens
  misc_feature (279)..(279): n is a, c, g, or t
  misc_feature (301)..(301): n is a, c, g, or t
  misc_feature (315)..(315): n is a, c, g, or t
  misc_feature (321)..(321): n is a, c, g, or t
  misc_feature (328)..(329): n is a, c, g, or t
  misc_feature (336)..(336): n is a, c, g, or t
  misc_feature (340)..(340): n is a, c, g, or t
cacgaggccgatgacgatcgcgacgatcgcgacgagcagccccaccgtgccgccgctcagcacgtgcgacccgatgaggcgcccgaccgggatgtgcacgaccgactcgggctcggcgacgggctcctctgcaccctcgatgatcccggtgatgccgccgctcaccacggccgccgcggccgacgcccgcgacccgggccgggagacggtatccgcccgcgcctcggcgaggcgcgcgcccgacgcgagccgcaggatgtcgggccgcacctcctcggnattcgaggtcgacagatactcnagcttgacgttggngtccangcccgcnncgaccanctcnagcttcgccaacccgacaagccgcgagatcatc

SEQ ID NO: 698058 - DNA, 284 bp, Homo sapiens
ctttctccacgtatgcggtgtgctagctggatgtcttttggcataatatgtacacgtattggcatggatagcacacaggttgtgtgtcttcaacacggccaaccagataggcctcacttgcctcctgcaaaggcactgatagctgcgctctggaagcgcagatctgtattactgtcctgagcaatttctcgcaccagaggcttggaagtggaagttggcgaatcagaatgtccatgtggacttctgataacgtctaaatttcacggagcgccacagtaccaggc

SEQ ID NO: 698059 - DNA, 458 bp, Homo sapiens
gctgaggagcagctgcgagccgaccatgtcttcatgtgcttccactagaaccgcgaggacagagccgaccttgactccgaatccttacagctttcagggtcttatgatgattcgtcgacgaccgcggggcatccccatatgtgccacacaaagagagccccgagctgcttgctattcatgggcctacacagttcggaagaagagtagtcttccgggacgaggacgtgatgcgacgtagcgagtcccgtctctggggctgcgtggcatcctggacccctggaggccagcgccttgtcatgccgggtggttaaggaaccgtgaaattcgactcatctagcctgggttgtggtccgaagatgtaagtatatcaggatgtcagaactaggatcgactgctacttccggatagtatatgtcagtgtgtcatggaaagatacagatagagacagagaagattcc

SEQ ID NO: 698060 - DNA, 103 bp, Homo sapiens
cactaacaggtagaccttcgggttattgtatgattatgggcgttgattagtagtagttactggttgaacacttgtttgttggtgtatatattgtaattgacga

SEQ ID NO: 698061 - DNA, 346 bp, Homo sapiens
actggaaggatacagcttaacagataaaacaaagaagaagaagaaatggcaaagagaaagtttaatcaaatttctttcttttatacatttagattagcagttcatttatttgaacacagactgggccaatgtccacaaagaatcctggtcagcaccaccgatgtccaaaggtgcaatatcaaggaagggcaggcgtgatggcttatttgtattgtattcaatgattgtctttccccattcatttgtctttttagagcagccatctacaagaacagtgtaagtgaacctgctgttgccctcagcaccaagttcaacatcattcgagccctgtagaatgccagccttt

SEQ ID NO: 698062 - DNA, 167 bp, Homo sapiens
gagagaactgttgcggagagtaaacgataagagagtaaggaggctggcgcggtgggtcacacctgtaataccagcactttgtggaagccagggcaggcggatcacctcaggtcaggagtacgagacagccttatcaacatattgaaagccccgctctactaaaaata

SEQ ID NO: 698063 - DNA, 105 bp, Homo sapiens
ggtaggcggactactctcgggcctggtgcatggctagctctagaatctagtctgacagcaggcagaggaattatcttaaaacatcaatcggtcacgatccctccg

SEQ ID NO: 698064 - DNA, 1373 bp, Homo sapiens
ctgccgccgtcgccgtcgccgccaccgccgccaccgctaccgaggccgagcggagccgttagcgccgcgccgccgccgcctcctctgccgccccggagcagcgcccggggcccgaccgccagaatccagatttttgaaaacatacaactgtctaagtgcgcttatgagagaccacatggctcgaatgcgtgcagagggtgacatcggtcagatttgaacttcgaacggtcaactaccattcaatctagaagcatgaccaaggactgagattaaaaaagacatgctttcgagaaagacatatggatagaagtagaaatcatgaaaacacatatactaacgaggaataaaagatagaaacggaacacacgatatggcgcttactgcgccctaacgctcgactccatacggctgacgcccgcgccaagcgcactccactgcacgcagcactcgcaatcaaacacgtctgccaaacgacctcgcacgagcatcccacttcaaataacacactcaacggccgctcgcaactcctacgtccacgagccctccagcaagcgcactcacaacagcaagccacaacacttgcattacactcaaaacacaggaccatccctcgcgcgaaaccaactaaccccccactaacccgcacccatcaacaaagcacagtgatccgaactcgacaattcgtactaccgcattacaattaccctggccagaggaatccctatcaacgctacaatccaagaacccacccaggacttcgatcccagacacaggaaaatgaccaattaactcccaagaaaccagacaccaaaccaagcaacaccacccagcaaaacaacgcaaccccacaagttcatcacacagagcatcaatacatcacacacaaaacacaacataactaaacaaccaaatcacaaatctacaacactacccaacacacataacaccaacatacaacaaacaaatacaacaaaacaactacaattaaaacaaaaaactcactctacacacccaccaacctactacaataacacaaaataccaaatccatagcccacaacaatcacaataatccaacaaacaacaatacaaacaacaaacaccacaacacacacgatcacccacctaccacacacacctcaaactacacattatatattactattaacactccacaatctcacaaccttatcttcatccacctaaccaaatacaccccaatactcaaaaactcaaaaaataacacaccacatccaccgacccccccccccacaatccaccaaaccacctcccatccactatacataccaaacccacaccctacacaaccacacacacaaaacacaccactaacccacacctacactcattaaa

SEQ ID NO: 698065 - DNA, 745 bp, Homo sapiens
aagaactcccctggagcaggaaattttgcaagcctcctccataagaacaagcagctcagtgacagacgctttactgaacccctgtggcaaacaggtcctctctccgagccattgagcctagaagaggcgaatgtatgcgacgagcagagtcttccggagggctcgggctctgcagtcctactatgaggccagagggctcgtacggagagaagaagatagtcaacaagtacaataacgtatcacgaagtcgtgaagaagggaaaggccaagaaagccctagaagtagtttgagcagtctgcggagaggttatccagctgcagcgaactagaaagagactggaaaacatattggaagggccagaatgatggggaagaatgacgccttaagcacgcaaaacagtgggaaattgggccacatgtctaagaggcaattatggcgcaactactgacctgggacggcgtcgaccaagcgtaatgtcaggacacagatagttcttaacggaaacaacggaactgatcatcaggaaagctcccagggtaaggcctgctggagcagtagagcgaagagtgacgggaggcaacagacagaggggggagagatcggccctggtgctctgtattgtaaagtgcaactgaagtcgccagattgaatgcagtacgggcgaaaccgctgcgagcacaaggagggccgagggataccaagatggtgacatcacggagacctgagggcaaggacgagctgagc

SEQ ID NO: 698066 - DNA, 149 bp, Homo sapiens
gttttttttttttccccttttaaatgagggagagctttgcttaagggttgcctccttttattggggtaaatctgaatgttcctcctcctttggggttaaactggtgcttcccggtttcccattgtttttggcttctggttggaatttga

SEQ ID NO: 698067 - DNA, 253 bp, Homo sapiens
  misc_feature (119)..(119): n is a, c, g, or t
  misc_feature (230)..(230): n is a, c, g, or t
taatacattaaaagcatttaacttccacactagaaaactgcacaggctaaggcatagacaaaacaacgagaaatgctgagacttttgacactggcgacaacaaccctgaatgagtgagngcagaagagtactggctatggcacttagagtaaggattcgtaggcgatttcttaccacaaggtagaacttcacccctcatctccggactagatagtatcgagaccatcagnggtactcattcagccaatagacc

SEQ ID NO: 698068 - DNA, 294 bp, Homo sapiens
gaaaggccttcttttcatgacttcatgatctgaatccccccgagtcattcattctccatgaagtcatcgattttccaggtgttggtgaactgcctgtgactcctctcctcccccggcccctacccctcaggagataatgaagttcattgctgggctagaatgttttagccaatgattcctgcctctgtgtttaaacctgcgacacatcccttatctttgtttacaatatgaaaatatctgtgatccccgggtatattgagagaaataaaaaggtgaaagcgatttcccaaatga

SEQ ID NO: 698069 - DNA, 220 bp, Homo sapiens
  misc_feature (92)..(92): n is a, c, g, or t
  misc_feature (210)..(210): n is a, c, g, or t
ttttttttgagactctacggatgtattttacctagaaatagccaatctctactaaatcccttttagtcttcgagatttccgcggtaacaatntcaacagaaaggtattttcaacagcgaaaaaacaagttattctaatttggcctttattttttactcaatagagcttgccatcgtaagggcatttttccatactaacatttgcaattgnagaaaggtcg

SEQ ID NO: 698070 - DNA, 599 bp, Homo sapiens
catacacggcgctgacgttggccaggtccaagccggcggtaaagtgctctccgtgggcaaataccacggcaacacgcgcctcgtcagttcgatcaaattcgccataggccaggctcagctcgttgagcaaatccaggtcgaaagcattgcgcttggccacccgatccaagcccaacagcaggacatggccctgtaactcacggctgacgcgactgctggtggcttcattcatcgggtgtgccctcgggcgcggggaaggatttcggaccaaaggtctcaagggttaggtgaatcgtttaagcgttatgaccaacagggccgggcctttgaaaaatagaccttgccactgttatctgcaaagactgtgatgcagcgcggtttatcggtgctttccgataaaaaaagctccctttttcaggtatgtccggtatagtgcgcgccggcctttaaccgggccgcgtttaggtagcgcaattccccgaagtcagcttcggctgcacgtccgcacagcggactctcccttgacgaatctttttcattcattcgttttcgcaaatccccgccgacaaagcagccagggcgactcttgagtctcaaca

SEQ ID NO: 698071 - DNA, 437 bp, Homo sapiens
  misc_feature (9)..(9): n is a, c, g, or t
  misc_feature (28)..(28): n is a, c, g, or t
  misc_feature (114)..(114): n is a, c, g, or t
  misc_feature (119)..(119): n is a, c, g, or t
  misc_feature (180)..(180): n is a, c, g, or t
gaaagaaangtgccagttccccggattnagttattacaaaataaagtacctataaatatttgtaacaagtgtccccgccatgaaaatcagttttaatttcctctgggatatatnccccnggagcacaattgcctgaattgtatggtgatatggtttgacctcagatctcatcttgaattncccacatgttgtgggagggacccggtgggaggtgactgatttgtgggggcatgtctttcctgcgctgttctcgtgatggtgaataagtctcacgagatctgatggttttaaaaaggggtgtctccctgcacaaactcattctctgtttgcctaccgccatccgcttaagatgtgacctgctcctccttgccttccgccgcgattgtgaggcctcctcagctatgtggaactgtaaatcgaattaaacctctttcttt

SEQ ID NO: 698072 - DNA, 114 bp, Homo sapiens
gagctttgctgtcgaacccacgtgtggtctcctacctctcagctcatggcctttgtccctccacccatgttcctcggggcatcttcgtcctctgtgtgccgccagtctttaggt

SEQ ID NO: 698073 - DNA, 152 bp, Homo sapiens
tgtctctacaaaaagtaaaaaaataaattgagcatagtggtatgtgcctgtagttctagctacttgggaggctgagatgggaggactgcttaagcacaggaatttgaggctgaagggagctatgattgcatcacagattaggacccatctct

SEQ ID NO: 698074 - DNA, 257 bp, Homo sapiens
ggggacgggattttgcttttcccgcctgggccaccgcggggctccctttcaaaaaaaacggaaatttttttcaagaacctggttttcccggggttttttttaattccgatcctccaactggtttttttgaagggttggctttaaaatggttgcaaatgtccttttttttttaaaactggaagaaaaaatattctgttgtgtttccaaccgtgcttagggtgtttttccccgggcttttttaaaaggtggaacctgga

SEQ ID NO: 698075 - DNA, 256 bp, Homo sapiens
gagttccccaggtagacctaacgtctattacgtttgtacttgcgcttactttgtacgccttcatcaggctttgctgaagatggcggtctataggctgagcaagaggtggtgaggttgatcgagggtttatcgattacagaaccggctcctctagagggatatgaagcaccgccaggtcctttgagtaataagctgtggctcgtagtgttctggcgcgcagttttgttgatttaactgttgacgttaggtctacctg

SEQ ID NO: 698076 - DNA, 152 bp, Homo sapiens
ggaaggccattcctttcaagtggacccggggtcaagaatacccacattcccgaagggctgggcacggaggaggcatggggggacgatacctttggactattgactattgctctactgaggcgaagcgtggtccacacaggaatacctggagc

SEQ ID NO: 698077 - DNA, 199 bp, Homo sapiens
tgtagaggcaacaattataagcggaaacgagctctcatggagtcacatgaactattccgagagaatcgcttctgagcctctcctgctgctgacctgatcacctctggctattgtctctatgccgggaccatgcgtttccttattctatcctctcttctctcattcccatccattccctatctctctcttccctactttc

SEQ ID NO: 698078 - DNA, 1400 bp, Homo sapiens
acactggctcaaagaaaagcaataaaaataagagtggcaagaaccagtttaacacgacggtggtggccactacgaggacgctggcacggacttcaactatgcgatggcgcgaacactttcagcagcgacggagcccctggcgaactcgctggcgcgatataactaggacggggcaacaatgccacagacgacggtgcgctgcgcggacgcgcagcgaagctgcgtggcacactcgcgctatcccataccctcgctgcccccctgctctttctccctgccgcccgcctggcctcgcttcacctccacacaccagcagcgcgcaacacctcacacacccacgcagcgctgcgccacactggcctcacaccacagcaggagaaacctcacacacccccagcacacacctctcccagcacgcgcacaccgcacgagaacaaaccacaattcagcttgagaacatcatccacaccacaacacttcacaacctcctcaagcgagactaacaaaactcacgctgcgcccacgacacgcggccctccacacctcatccttgcgcgacgctcacagcacaacgccccaactggcacacgcttccacacccacctctacttcacaccccacaaggcaccttactacactcttgcacaactaaccccccacaaaaccttcaacccaccccgcaccaccctgcaacttaccattaattacttcctcctccaaaaaaacccctttccaacaacgaaaaagctccggaacagttcgttatcactcccatttcaagccctaccgggccctacaccccttctctcttccacccccacctttcccccaccacaccgcacgcggcccccgctggccccttgccccggccgcacctccccctcttcttccgcgacacgacaaggccctttctggctcggcgcgcctacgcgccctctctgtcccgcctccctctctgtcccctctttcgtgccggctcaccactttccctcctccaccctctcgcgccccacctctttcatccacgaccgcttgcaaccttccggtccgcggtccgccacaccccctccccaccccacttcggctgcgcccccgcacccacgccgcgacatggctgcctcccacgcacacctccccacagcgcgccgccctaccccactgaccgctctgaccacaccaccgcgctcccccccaccacccccccaccacacgcaacaccaccacaacacagaccaacaccgacaccaaacaccgcactgcccacatcacacaccaaaaccgcaacgcccaccaccccaccaccagacaaccatacagcccccccccaatctaccccacccacaacacaaagcaacgacgcgaccacaagcccacaccgccacacacacacagccaccccc

SEQ ID NO: 698079 - DNA, 418 bp, Homo sapiens
tcattaagatagcctttagtagaaaaatgggaaaataaatgctaattcccaaaagaagccattcaaataactaataaaatgcttaaaagttttaaccccagacctgggcaagatgacagaataggaacagctctcatctgcagctcccagtgatatcaacacaaaggcgggtgatttctgcatttacaactgaggtacctggctcatctcattgcgactggttaaacagtgggtacggcccatggagggcaagctgaagcaaggtggggctttgcctcacccagggagtgcaaggggtcggggaattccctctcctagccaagggaagctgtgagggactgtgctgtgaaaaatggtacattccggctcagatacttcgcttttcccatggttttcgcaacctgcccgccaacccata

SEQ ID NO: 698080 - DNA, 655 bp, Homo sapiens
  misc_feature (246)..(246): n is a, c, g, or t
ccctagggctagtggaagacttaagatggcggcgttgcacggagtgcatcactgcgtccttacgggggtgtgcaaggcgtccgaagtatgagtccactaacaaatgtccagaaactcgccagttaatagtatggtgtctcttcaaaatatcggagaataatttctttctcgctgatcgcctaattcatactgacgaagctgggaagtgtgcagaagatggagtccgctctgtgtggcccaggctgnaatgcaagggcttggacctgtggctcatggaacctcgtgcctccccagttcagtgtggttctccgtgcctcagcctcccggagtagctgagattacgaggtaggggctccgtgtatcacccagctctgggagtggaaagagctcttcattcctgagtctcctgtaccactgagattagaattcaagcacttggcggtcaaggaaaatgtgaaaccacagaaaacactctaaaattaaaagaagatagcgtcttcagaaaaccaaacctagtgaagtgacgtatttgtggattaccctgacagggacaattacaaaaggagcaaccataaaagagtctcagtgggagcaagtgtgtgaacaaatgagacttttcattagacattaaatgataacaaagagtttaacgtgg

SEQ ID NO: 698081 - DNA, 243 bp, Homo sapiens
ctggtactggccctaacattcttgaagtctggtgcagctaccatagttgatatggtacctggcgagcccatgtgtgtgagagctctcaaactatccacctttgagtcgcttagcagtacgtgatatgagacagacagtcgcggtggatgtcatcaaagcagtggacaagaaggctgctggagctggcaagggtcaccaagtctgcccagaaagctcagaaggctaaatgaatattcatcccta

SEQ ID NO: 698082 - DNA, 170 bp, Homo sapiens
gtattgcggagattggcacgtggtccccaattctttggtggctttcacctgctcattcaggtaatgtgtcgcgcgtgaagtcacacaacatgggggtctatttttgtcagtggccagctttgtgcagttccagctagtgactagattcatactttagtgtgccaaatgta

SEQ ID NO: 698083 - DNA, 182 bp, Homo sapiens
aaccccaaggaggagaaaaaacttgttcacagccccttatttccgcaacccttgtgggaaaagcacagaaagtgtagtccctccataaggaattggtatttaaaaaaaattttataaaaccccttttatgtaatccgatttgaaaggtaaaggtgataaaaaaaaaatcccctacttgggtg

SEQ ID NO: 698084 - DNA, 608 bp, Homo sapiens
  misc_feature (114)..(114): n is a, c, g, or t
  misc_feature (141)..(141): n is a, c, g, or t
  misc_feature (143)..(143): n is a, c, g, or t
gtttctttcctccctgtcttagactttgaatgttgaccctcacagggagggataatttagactctggtatggccaaagatttgagcacaaaggcaaccgtggttactgtatttntatataacttcatttaaaatatattangncctaaatgttcagatatcagcatatggcactaatgcacaaaatatgtgagcttttttttttttcccggttagcagtttgtaacatttggggtattgggctatagtggctatttaaaaaatttatagatggtaattaattttaaatggcagtaatatttgggagaattggaccaaccttggtaaccaaaaggggaaactcactgggttccttaagattttataaattggagctatttttttaaagaggtgctttttaaaattccattagatcccagagatggttccctggggttttctggccagtcatccagttggatacacacctggatgattttaaagaaggccacaaagagctgaatggggcagggtaatcaataattttcaaaggacttgattgtcataaagatcctttataacggtagatcgaagccaaagcagcctcattgtgtgacaacctttccatac

SEQ ID NO: 698085 - DNA, 170 bp, Homo sapiens
gagagatgggttgataccttatcatggagagactttcttgctaggttaagaatgtttacccattgcccagtgccgggcacagtggctcatgcctgtaatcccagcactctgggaggccaagacgggcggatcacgaggccaggagatcgagaccatcctgcccaacatgg

SEQ ID NO: 698086 - DNA, 732 bp, Homo sapiens
  misc_feature (162)..(162): n is a, c, g, or t
gacccgttgactgctgccaggacgcatgggcgtgtggctggctgtcggggcgtccggcggctgtcagggcggtgcaatcccagagaccacggcgaggaataagaacgttgtgaactccacgtgcgtctttcgaactaagtagtcaggacgaagtgttgatancggttgcctagcatttcagtccagatagtactcagatcgacagtcaaggggtataccttgcattgactagtatgggcatttaaccgggtatcaaaggttgtttacaccggtaaacgtttgctactaatgagggctataacacgtagtgcgtgggacctgcacccatgagaatcatatgcataccagctgtcaagcaaacggatggtccagtcaggtgcagtgattaggcgatagggaaggactgacataaactggttgtgtacctagccataggcgaatagaaaccgcggctgcgctccctgcccggcagtccgcataaggccagtattcctttcttgccaagtggggggtcggtcttaagcacggcagaggcaattggctttgaatgtctccagaaaactaagttaagatcagaaatcccgggaggaaaggaagaccaggcgggcagagtccaccagagcagcaaggcccacacgcggcataggattttccaaaatttacacacagagtttaaaacaacagggtgtgcttactctggcgatgtagggccagggagttgctacccgagat

SEQ ID NO: 698087 - DNA, 212 bp, Homo sapiens
tcctcccagggcctttgcttttaaaaggggggggtcttttttttctttctcccccttttttttttttgattaaaaaataaaacccaaccagaatttgctgaaagcagggccctttcagtagctccgatcaaagtaactcagcttaaagatactgtttctcagggccccagtatggtccaaagtttccggaaaaggaaaataaaaccccctga

SEQ ID NO: 698088 - DNA, 463 bp, Homo sapiens
ttaggtttttgacttctctaagtccatggaggaggcctgcctagcaccctggtgctgccctcccaccaatgggaggaaggttatcatgcagaaaaacctgcttgctcccacatcaggcatgccctgctgtcccctgcacctagccccgccttccttccccatggaacaattcggccaaatgattctgcccaaaagttccctttgtccataatgaaaagcaagttggaaaggggtaaagattggtaagagaaggcaaagcatgttttcctaacaagtttgacaatttggaaataaatatatgtacataacaatttttaacacctttaatacttttttcactttccttccagatgactcctttatacatgtgctaattcatcatatgtcttttttcttgaaatatttcaaatggaaactaaaactgatgtttatttacaagaataaacttatgaaaaaaaagcta

SEQ ID NO: 698089 - DNA, 133 bp, Homo sapiens
cgctttctgccctgcatctaccgtgacactacgagaaaccgtgcctacctaactaactggactgtggggaccaatgactggtaacgacacgacggtacgactttggactggacgacgacacacgacaactacg

SEQ ID NO: 698090 - DNA, 107 bp, Homo sapiens
tatacgatcgcaaggcctggcatgcaatgtctactgctctggtagagagacaatagcaacaaaagcttccatcactactagagctaaccttctcctactaacccagg

SEQ ID NO: 698091 - DNA, 392 bp, Homo sapiens
  misc_feature (326)..(326): n is a, c, g, or t
gatagttttcaggtgtctacagtgattttgtaatatttgtgcacatataataattccaaaaatgtaatccagtggggaaatatactctctaaattctagatttataatttagggtttaaattataaaatcattaaataagacacaagtgaaatatagtcaaatatccccttggaaaaaaattaagtggtctctaaagtgaggtattcatatatgtaattttacaatcctctagtgatagaattaattaaatacgccaccaaattgattaattcctacagtatttaaaaggggaagcacttaacaatgccagtggaccatgttaacntggggttttaaggctattaaggtccttaggaaattgtggatgggggaaacctccggcgctgttaaa

SEQ ID NO: 698092 - DNA, 239 bp, Homo sapiens
  misc_feature (128)..(128): n is a, c, g, or t
aaaccttcaaggggtttggaaatggacttggtcacccaaaaactttccccgttgggggaaaaactccgtcacaaccaaagggacaaaatgtgggtgaccctgaaaccccaatttcccaaattgttctncataattcatttcacattgttgtctgggttggacatcctgtgggcctcaatgttaggcttttaatatgtaatatccttgttatcaataataacaattatccatatgggttt

SEQ ID NO: 698093 - DNA, 769 bp, Homo sapiens
  misc_feature (189)..(189): n is a, c, g, or t
  misc_feature (217)..(217): n is a, c, g, or t
  misc_feature (231)..(231): n is a, c, g, or t
  misc_feature (277)..(277): n is a, c, g, or t
  misc_feature (301)..(301): n is a, c, g, or t
cactcactttatcaccaaagtacagaggccaccttcaaacttaattaacagcatataccgcgatgacactcttgcaccaagcgaattaacacagactacctctatctttgtacccttcccggacatcataagggctcgcccctgctccttaccaacgttatacacaattttttttttgagggggggganaaccaacacaccgcccctatccaagccngcaaaatgattctncgttcagggtttccaccctaacagactgcttactcaaaatcggtgngcatacaacatctcctgtgaccangctggaaaatttgccccacttgaatgaaatttgaaaaggcccaggcacttgcaccggtatatttcctatgggccacgcgacccatagacacctccccgactaaaccgctttggctgtttaggaccatgttggtagtacgccatacccacaacctggaatacggcgccggacatcaaaacggccaatttgagagttgatactcggcagggccaaacttctatacctgccttaatttccccgctgcctgcctagtgtacaaaacaccccgaaaccacattctctggggctccgctagaaaaacatttaaaattataaaaataagaaacgcccgcaaaagggctgacccaacataaaaccgccgtaaaattacaaagtggaacaaaaggggggtatatttccaaaaagtcccatagtaaaccaggaaggaatatactctctttttaagccctactcaaacatattgtgaag

SEQ ID NO: 698094 - DNA, 761 bp, Homo sapiens
  misc_feature (323)..(323): n is a, c, g, or t
  misc_feature (332)..(332): n is a, c, g, or t
  misc_feature (343)..(343): n is a, c, g, or t
  misc_feature (556)..(556): n is a, c, g, or t
  misc_feature (559)..(559): n is a, c, g, or t
  misc_feature (562)..(563): n is a, c, g, or t
  misc_feature (565)..(565): n is a, c, g, or t
  misc_feature (568)..(568): n is a, c, g, or t
  misc_feature (571)..(572): n is a, c, g, or t
  misc_feature (574)..(575): n is a, c, g, or t
  misc_feature (584)..(588): n is a, c, g, or t
  misc_feature (591)..(592): n is a, c, g, or t
  misc_feature (594)..(597): n is a, c, g, or t
  misc_feature (599)..(600): n is a, c, g, or t
  misc_feature (609)..(610): n is a, c, g, or t
  misc_feature (615)..(615): n is a, c, g, or t
  misc_feature (617)..(618): n is a, c, g, or t
  misc_feature (625)..(625): n is a, c, g, or t
  misc_feature (630)..(630): n is a, c, g, or t
  misc_feature (632)..(632): n is a, c, g, or t
  misc_feature (634)..(634): n is a, c, g, or t
  misc_feature (636)..(636): n is a, c, g, or t
  misc_feature (677)..(677): n is a, c, g, or t
  misc_feature (745)..(745): n is a, c, g, or t
agcggttgtgcttgtgcttgtggcgcgtggtgcgggtttcggcggcggctgaggaagaagcgcgggcggcgccttcgggaggcgagcaggcagcagttggccgtgccgtagcagcgtcccgcgcgcggcgggcagcggccaggaggcgcgtggcggcgctcggcctcgcggcggcggcggcggcagcggcccagcagttggcggcgagcgcgtctgcgcctgcgcggcgggccccgcgcccctcctccccccctgggcgcccccggggcgtgtgaatggcggcctccgcggcggcagcctcggcagcagcggcctcggccgcntctggcagnccgggcccggncgagggctccgctggcggcgaaaagcgctccaccgccccttcggccgcagcctcggcctctgcctcagccgcggcgtcgtcgcccgcggggggcagcgccgaggcgctggagctgctggagcactgcggcgtgtgcagagagcgcctgcgacccgagagggagccccgcctgctgccctgtttgcactcggcctgtagtgcctgcttagggcncgnggnncncgncgnngnnaacagctcnnnnnacnncnnnncnnctggcgacnncaccntnntttactntcccntntncnagcaacagtgcttctccaaagacatcgtggagaattatttnatgcgtgatagtggcagcaaggctgcaccgacgcccaggatgcgaaccagtgctgcactagctgtgangataatgccccagcca

SEQ ID NO: 698095 - DNA, 1022 bp, Homo sapiens
agcggttcgtgcccacccctctagcgccgctgggcctgcaggtctctgtccagcaacggacgccggtctctgttcctgcaccgatgagggtatcagttaatacagttgtcaaggcaataaaccgcctactcttaatgagataccaaggttgcaaattttcagcagaagacctgcaacgcatgcaggggtaagacactcgcagttcatctcactgcgtcgcgaagaccgacttgtgccgtatcctacatgactcatacatacataagatttactagcaaatcccaagatacagtgactgactacgtccggtgtgcatctgacagaagaaatatcattattgtttcagaatctgctttatatgcccggtgtatcagaaggcgggcatatcgaataggatccctgcgtcgagctgataatgccactactgaaaccatgcctataaagtaatgcgtgtgcaagtgttgggccgtgtactaaatatatgcttgcatgcagtatgttggtgcatggccttagcctgcattgtgtccacaggccattgacctttgcatacaattaagagtctctagagacgaatagagaccaaaggtacttcgtatggagaaggccccagaggatggaacgggttcacctcgcgtgaatgataattacaaatgctggtatcatgacattagagtgtggtatagaccaggatgcctttcacccttgctgatgtatgagtcttgtcgatgtgcacctttggctcgagtaaatcatcaccgaacattgtgctaactaaagaagttggtggtacggtggtgggccccttggaatacgggtgaaggcattgcctgagaattgagatgggcttatggtgcattatccccccattccaacttgcgtcacccgaccatctgaattgctcctttggatttgttcgagtatcctagagccagagccagtgtgaacttttaaagtagtcggaggaaaggttaccacttcgtcgaaggcaactattcgattgtgggcccacgaaaaatcgc

SEQ ID NO: 698096 - DNA, 155 bp, Homo sapiens
taggatctccttctatgctgtctgcccttctaatgtgctcttctaatccctcttctgtgtcatttatgcatatcggggaaggaaggaagagggaggtactacgtgagtaaggtaagacacctcaaaatggcatgtggactttcgggccgtatcta

SEQ ID NO: 698097 - DNA, 590 bp, Homo sapiens
  misc_feature (590)..(590): n is a, c, g, or t
ggactcagtccccagccaaggagcggctggaggacggctgtgtgcacccactgtgagggaagccatgctgatgctgcgacatggatggctcccgtcccacttccccgatgtcccgatagacatgcagccacatcaatgaggcccatgaacgccttcatggtgtgggccaaggatgagcggaggaagatcctgcgaaggccttcccagacatgcacaactccagcatcagcaagatccttggatctcgctggaagtccattgaccaaccaggagaagcatgccctactatcgatggaacaggcggcggcttgagccgtggagcgacctggagaagtatcctgaactacaagtacatagccgcggaccgaagcgcagcctgcgatcgtggcggggcagatgcggcttgcgcgtgggagagtcccatggctcgctgttgatggacccgtgggtcgggatgcccgtcggagctaccgtgatcccgccgcaggctggccaggtgcagatgagctcctcagatgtcctgtcccctcgggcagcaggctatgcctgtggcggcgccactggtgtatgcactatgtccctcggtaggn

SEQ ID NO: 698098 - DNA, 1417 bp, Homo sapiens
  misc_feature (503)..(503): n is a, c, g, or t
tattgaatcagatttaaacatgaagcatgcattgagtgtgccaaggcaactaagtggtccatagcagcagtaatgttcatagcggtgcgagatgcctgctatgaaacagcaactctcaaacatttattatctcaagcaccattatgtttatgctgagcctactactactacttactctactacttacaactacttacacatcttcttaacacatactctctacttctactgcgggccaaggcacggctggcctctacggccctatgcgcccctcccccgaaagcctgcctagcgcactctactcagcgccgctgcacgccctacctgcctgcccctagccctaaatttaacctatacctttactacaaccagcaactgataaacgaagttttagcctgcagcaaaacacggcggccccgcgttctttctctgcggagggcgaacatatttaacctttactcttggctccaccttacacacggacatgcatcttagccactggngcgccttccctcccacttggttccctgtgccttaaccacattctccacgcctcccctgcctcctgcctcggccaccgcctccacctatcctaacttccacctgccttcaaacacaacccctcccttgcggccagcccacaacccaaccgccccttcccttggccttcacctaacccctcgcgccctaggccacatacaacgcaagaccttcgcaccaccacacagacaaaaccccccaacataaacgttaaccactcgaccccccactctgcaaccatctacgctcggcacttctctaattcgtcaacaacacactacccgcttttctcctcgtggaaccctttttcgacaccagggttggccccctccctgcaactacctgggtcgcgctccctattggtgccgcacacttcgttccccgaagcggggcgagttccccacccttccagtgggtccctacccacgcgctcgccgtgggcgcgccatgacccggaagcgctccccttgactgaatctacccctgccgctttggctacttgcgggcttctcccatgccacagccttcggccacgctttcctgctcgggcccagcgccccccctttgtcaagggcgtcgctgccgtgcgtcaagcacgtttccactctactcctgtgtcctgcggtccccaggcgctcgtcgtttctctccccagcatcatacgtactgtgcgtgcccaacgtctgccccccttggtccccaatgccgctgttgacgcccagactcagcatcgggcgagattccgtccgtggtgccttctcccagcgcttggcgtcgctatcccctggcgtcgcacactgagcgtgcgctcccctccgccgcacacctgtcctcccgtggccgctagctatctcgtcgtgcaaacgatctccctccg

SEQ ID NO: 698099 - DNA, 402 bp, Homo sapiens
tgtgctgtgctgtgctgtctgtgctgtgctgtgctgtctgtgctgtgctgtgttgtctgtgctgtgctgtgctgtgctgtctatgctgtgatgtgctgtcctgtctgtcccgtgctgtggtgtctgtgctgtctgtgctgtctgtgctgtgccgtgctgtgctgtgctgtctgtgctgtgctatttgtgctgtgctttgctgtgtgtgctgtctgtgctgtgatgtgctgtctgtgctgtgctgtctgtgctgtgctgtctttgatgtgctgtgttgtctgtgctgtctgtgctgtctgtgctgtctgtgctgtgctgtgctgctgtcatcctgtcactgtgagaagtgggttgtgttctcctttatgtcatcattcatcagactgctgtcacccactattg

SEQ ID NO: 698100 - DNA, 837 bp, Homo sapiens
gaccactgcgcgtgttgctggtgctcagctcgtgtttggatgcaatgtcttaggatcctcctcccgtccttctcatccttcatgtccaggttgctgcagaaggacgcggagcaggattcacagatgagagcggagatcccaggacattgaagcaggagctctccacagtcaccatgatggccgatttggccagatatgccaggtggcacagaaggtctcaccaagatgagggaataagctcaaaacccattgtgaaagctcggacagctccattagccaagatacagtgggtgataagtgtcgtttcaacgtatggcaggctcccctgattgatctcactcattgggacgtatatcctgccctgttgctgtcgtgccggtaattggataaccctttataagaccgcgtgaagcctttccctacaagatgtacgcaggtgtttgtcgcaataccctgtggcatttagtctgtaccaaatttgtcgcctatgggtgctccaatcccggtccaggcttgcacccagggaggcattggaattacaaggcccgcggagtcaaaaacaccagggattttccttcttccatagctaaaaactttgtgattcaacaggtgctgcgctttaaccagccaaccagcgtgcataggtaagactcctcgtcggcgcacatttttggtcttggccttatgcgcatcgtctataagactccggatttcctaccctgtatttggccaaaatcccgtttatgccgtttttttattaacaccgttctcattgtcaactgtcatgtgtaggaccctccgtgttcactgtgtgcccctatattttgtgcaatgtca

SEQ ID NO: 698101 - DNA, 261 bp, Homo sapiens
gacgtcgaccgcaagtagctggacctgcgcgtacgccagttcgacaacaccaccagcaaggatatccagccgttgcccatgccggtggtggtctacgacgacaaggcgtcgagctatctcaaggacgccaacctggacgccgagaagctgaaaaaaagcgtgatcatcagtcagtcggtggacgatgccagcgcggcaaacatcgagttcgaccaccccaagaccttcaacgacgagttgcttggcacgcccaccgccccc

SEQ ID NO: 698102 - DNA, 983 bp, Homo sapiens
ctcaattgtacccattctaatcgcagtggctattcctaatgcttaccgaacgaagaaattctaggctatatacaactacgcaaaggccccaatgcgttgtaggcccctacgggctactagaatgcgcttcgctgacgccataaagagcgcttcacccaaagagcaccctaaaacccgttcagcatctaacattcgaacccgtgctaccatcaagcggcccgccaagcattagctcctctacacaatgcggctcttctactattgaatagcctcccactccgccagtatcctcaatggccacatgagtgcaagactacaacactagagtccttcggtagggatggattcgtagaccagctcgtagtgattaaagcggtggtaaatcaaatcgctcgtggattaccaggggatagaaggcgactccaatagcgtactaagacctagcagacacgcatggaattcggggccgtcgctgtggtcgaacgacatggtagtgaccacgggaaacaccacaacatgctagtggtgggaagaagtcgagctctttagatccaagtcatttactggacttgattaacaaagcaatataacataagttataagatggacggagtcgcttctcgaggcatgcatgcatacacaataccatttctgactccaagaagaggtaccagagacaaagtaagcacgtaactagtcattgtaacatactcgttagtccctaaggctaagtggaacgcacataagcgactcatgtaagtatggcaatttagtaatcttgcactaacttaactcaagtcccaagatgtgaaccttaattctcttggaacccagcacccttttccagtatccctgtgaccacagacaagggtggatcgtgaccccgataactgaacaatgcataaaaggaattcacaaaatcggtcggaatatcaacgccggaaggtcccctctagggtaactgataacttcaatgggacgag

SEQ ID NO: 698103 - DNA, 947 bp, Homo sapiens
gcagcttcctggatgggaaccccacgtttgcccatcaatactttgggaagaagttgagccctgaaaatgtggcaggggcctgtgaagatggttggctggcggactgtggcagcctgcgagagctgtgccaggtggaagagagtgcagcactttttgaactggtgcaggacatgcaggagagtgtcaatatggaacgtgtggtcttcaagatcctgcggcgcctctgcaccatcctgcatgccgaccgctgcagcctctttatgtaccgccagcgcaatggcatagctgaacttgctacgcggctcttcagcgtgcagcctgacagccttctggaggattgcctggtgccccctgactctgagatcgtcttccccctggacattgggattgtgggccatgtggctcagaccaagaagatgataaacgtgcaggatgtggcagagtgtccccacttcagctcattcgccgatgagctcaccgactatgtgacaaagaacattttgtccacaccaatcatgaatggcaaaagatgtcgtggctgtgatcatggcagtgaataaactggatggcccatgcttcacgagtggaaagatgaagatgttttcacgaagtacctgaatttgtaacattaaacctgaagattttcactaagtacctccacaatgtgagaacgcgaggcagtgctcctggtcaggcatagggtgaagactggcggaactgaagacaggtcccaggctctaaatgtcggccattaaaggcagggatcagggccggacgaccggaacgcgcctgagttggccggtcagtgagacacccaaatggcccaacgtggggggacaatgtttcgtaggattataccggaaaaacaagtacacacccgcgagggcgcggtcaccacacagaggattgcctcgagcagtgatcgtcgaccgacagagacataccaa

SEQ ID NO: 698104 - DNA, 126 bp, Homo sapiens
ccgccattaaaggttcgccggtcaagctgaccgcgactggtgccaaggcttttgccggtttttacagggctggtgagccgatgaacccgttgtcgacgaacctcaccttgtcagcggagaaggtct

SEQ ID NO: 698105 - DNA, 492 bp, Homo sapiens
gggtctctccgtggaaggtgaaacgcgatgccgagaagaaagaccattgatgaatggctgacctcactgcgcttttcctgccgcggcagccgcccatgtcgctggccggaggcggagcagcttttggggccacaattgggaggagtgtggaacgaagacctagacggcatggagggttatcgtgctggagggcaagaagtttgcgcggctgccggaagaaggagttgggcacttctacacgcaggactgctacgtttttcctctgcaggtactgggtgcctgtggagtaccgaggcaggagtgcaaaccgaaggcacgaccccggcgtgagacaggcgatgggcaaagaaggcgaggactcaacgctgaggcagaaggagcaagcagccagaggaggacttcagtgcctcggtactctggcagggccgtgagctccaatatgggtgctcaaccttcacctcagctgaaaaaagtcagaagctttcctggaac

SEQ ID NO: 698106 - DNA, 351 bp, Homo sapiens
gctccactggtgctcgatacgtctattgattactctaactctgtactatctttataaaatgcatctcttttatggacacagtactgtatctggttgatcttttgaggctgttcttatctagactgtgagaatcagagaattatgctacttctgagcaaacacattaagctggcaagtttcacaaatatgagctaaagacacaaaactcctggctcaaaggcgaaggacattactatttacagtgtagcaagcaacatgagattcctgtttgcataggtttttcttgcctcccaagtctcaaagcagcaatatggaaaaggccagatggatgctgtgcaaccgagtgggagg

SEQ ID NO: 698107 - DNA, 100 bp, Homo sapiens
  misc_feature (63)..(63): n is a, c, g, or t
gtttgaatgcaggctttttatttctcaggacagccgagatgcctccgaggtttccagcgacgntaacatccaccctgcgctctatgacgggaggagggcg

SEQ ID NO: 698108 - DNA, 212 bp, Homo sapiens
acccttgatgcgaatatacgcacatactgatcagcacggctagttttgaccgtgctccgtttccgacctggagcggttcacccctaccttaggcaacctggtggtcccccgctccctgggaggtcaccatactttgatgccgaacttagtgcggacacccgatacggcacagtgcactaacatgcccagaaactccttgggctacaagcgat

SEQ ID NO: 698109 - DNA, 170 bp, Homo sapiens
cctgctcagccttctgagtagctgggacacagtggtggcaccaacatgcccacctaattttttatatcttgtagagatgaggtctcctgcctcagcctctcaaagtgctgacaaataaagcttctgtgatgctctttatgaaaggaaacaaacaggaagcaaaatgtgga

SEQ ID NO: 698110 - DNA, 332 bp, Homo sapiens
ggccccttttttttcccctggggggtttatccccccccgcccccccccccctttgccccctttttttgtgtggggggaagaaaggggcccccccttctttcccccgggggggggggttttttctggccggcgtccccccgggggggggggggcccccccccaagggggcccttttttttcccttgggggcccggggccccccccccccgggggggtttttttggggggggtttttttgggggggggtttcccccttcggggggggggggggaccccccccgggccccccttttccccccttttgggggaaaaaaagggggggttttccccca

SEQ ID NO: 698111 - DNA, 222 bp, Homo sapiens
aagcgagtcgtatgggaggcagttaattggaacaatatagagaaggggctgctaaagacctgattattatgttgatatttaacaatttaagataaggctgtgtatgtatggtggctcatacctgtaatcccagcactttggcagggcaacggtgggtggatcatctgacggtcgggagagaccagacctgaccagacatgcgagaaaccaccagtgtctacg

SEQ ID NO: 698112 - DNA, 809 bp, Homo sapiens
taggctttagtagggaaagtggaggttaggctagtcagaaatggagctggctcgggttgggttgtgctatggttaggcctttaggtgccccgagtggtgcaatcatagctcactgcagccttaacctcccaagctcaaattcctttcatgttacctggtgcttagtaggaggagcatggtgttgcacactagagggtattctgactcaatcattgccagtgtccacctgtcagccttgaggcctatgggagtacctcagggagggtactacctccatgttctctgccttctccctgcagtgagactgcccttgcttgttactcagtgcgatgccagtcctagggttggggacatggggtagttctctgttgtcttggtcccagccgtcagacttaggtgggtctctgtgttcctgcatctcaggggtggtgctttctcagtgattctggccgtccttcagtggtaggagacctctaactgtttggaccctagatgatttcctgttccctcccttagaatagaaggtttttccttttcccttccccagctgcagtgggtcttcgtctgtaccgggaagcgacggggttttctcccccagctgcatggctgagagcttctggtctgccagtatggttgggcgttgtcttggcaatcttcctctctgggcccccagtggggggcttcgggttggcgccctgcattcattttttggtgtgccgttggtcccagggtctgttcctactgggctttgtccaaatggaccccgtagggcgcagggggccaggggtggttcttccaaggggcgcctg

SEQ ID NO: 698113 - DNA, 147 bp, Homo sapiens
ttgctgctgattttggttgaaaggtaaaggatgtttgaaaaactaatgctgaggcaaaggatgtcttcctgggcatgttttgtatgaatatgcaagaaggcatcctgattactctgtcgtgctgctgctgagacttgccaagacata

SEQ ID NO: 698114 - DNA, 149 bp, Homo sapiens
  misc_feature (35)..(35): n is a, c, g, or t
  misc_feature (75)..(75): n is a, c, g, or t
  misc_feature (112)..(112): n is a, c, g, or t
gtcaaactccaactgcattcgggttcacactcttntgttcacaggtgtaaatattaagatttctccttgtcttgnttgcttttctactatgtcttgctgacttatatatatnctcctgaattctctaatttgacagtatatttctaagt

SEQ ID NO: 698115 - DNA, 331 bp, Homo sapiens
gtgctggcttatggggttaagaagcttcaagatgtgcatttcaggccgggtgcggtggctcacacctgtaatcccagcactttgggaggccggggtgggaggatcacttgaggtcaagagttcgaaactggcctggccaacatggtgaaaccccgtccctgcaaaaaatacaggttggctgggcgtggtggtgcacgcctgttgtcccagctacttgggaggctgaggcaggagaattgtttgaaccggcgggaggcggaggttgcagtgggccgagatcgcaccactgtactccagcctgggtgacagagtgagtaagactccatctcaa

SEQ ID NO: 698116 - DNA, 810 bp, Homo sapiens
  misc_feature (456)..(456): n is a, c, g, or t
  misc_feature (678)..(678): n is a, c, g, or t
gttgagcaggaaatactggtgactggtatcaaggttgtcgatctggctagctccctatgtccaagggtggcaaaatcgggcttcctggtggtggctggatgtatggcaacgactgtactgatcatggagttaatcaacaatgtctgcactaagacaccaatggatggtatactctgtgtatgcatggggtgatcagtgtgacgatggacccgtgaagtgcaagtgagtttatcaccatgacatactgagtatgaatgctggtggttgatcacatcgttacacagatgccactcatctacagggtaagtcgtctggtatactgtgctcaacattggtaattgatgccatctctgtgtcgtcatcgttgactcccgggtgctacgctcgtgtaactcgtgcgctgtactagtggttgagatacttcatgagaggaagcaaggtcaaagattagtactngctattgtgattgtataaactatgcttatcggatgtccgacccagggctggtatcagaagctgtcgtgtcgttattggtgccgaatacccttctgcttgttggagctatacagaactaaccatgtggcagtgacatggcgtactattgcatggagtcggaatctacacaacctagcaaagaaggggatctatcacctcctgtacagggtatcgtatcgttgnctggcggatgactttgactggccatgccccgtggttacataccgttttgcccattgggcttggtacgactgtaccttgttcgggttgcacttggtagagctcgggcatttatgccaggtggtggatctcctg

SEQ ID NO: 698117 - DNA, 132 bp, Homo sapiens
cggtggtctgcagaaacattctggtacaaaatctgtattatgagggtctctagagggacaggaagtttattaagtattaactcacacaatcaccaagtctcacaatagtgcatctggcgggcggagcgaagt

SEQ ID NO: 698118 - DNA, 359 bp, Homo sapiens
agcaattctcatgccttagggattacgggcatgagccaccacgcccagcccctgccctacttttatttttaaaaccgtttatggctgggctcagtttctcatgcctgtaatcctagcactttgggaggccgaggtgagtggattgcctgaggtcacgtgttcgagaccagcctggcccacatggtgaaaccccatctctactaaaaatacaaaaattagctgggcgtggtagagggtgcctgtaataccagctactcaggagactgaggcagcttgaaccagggaggcagaggttgcagtgagcagaggttgcgccactgccctccagcctgggagacagagtgagactccgttgcaaa

SEQ ID NO: 698119 - DNA, 234 bp, Homo sapiens
aacgtggacggggagaagaggatgtcgccatgagcacagcctcccagacagcatccaggagcaaccccaagaatgggcaggagtgctgctgatcccgacccatggcgaggacgggctgcccatgctgcctaaatgggttcagaatgacgaccgccctctttgccatgtgggggtcattaaccatgaatgcaattattaagacaagctcagatgagcaaatggtcaaaaaaaaaa

SEQ ID NO: 698120 - DNA, 542 bp, Homo sapiens
  misc_feature (1)..(1): n is a, c, g, or t
  misc_feature (131)..(131): n is a, c, g, or t
  misc_feature (538)..(538): n is a, c, g, or t
ncccccccttctgtggggggggtggcgccgcccaaaaatttttgtggagaaaaaaaaaaaaaaccgggggggggggaggaaacccccccccctccctggagaggaaaaagaaaaaagggggggggtggctnttttttcttccccccctccaaaagagagggggggtttttttttttttctcccaccccgccccgggttttatattctcccccccccgagagggggggcccccccccccccccttttttttaaaaaaaaaaaccaaaatgggtcccccccccaaaaaaaaaaaaaccccccttttgtttttctcggggggaaaaaacaaaaatctttctttgtgtgagaagggggggttttttttttggggggccccaaaaaattatttaaaaaaaggggcgccccctttcaaaaatgggggccctttgagtgccaaagggttggggggccccgggttcccaccaaaaccctgctcctttgtccaaggggtttaatgtgaaaaagctttccttttgaatggacctaaattggaaaagcntcgg

SEQ ID NO: 698121 - DNA, 143 bp, Homo sapiens
gtagagaggtttcgccatgttgcccagtctggcctccagctcctgggctcaagtgatccacccacttggctcaaaccaccacacccaaccctgaaaagattctaatcttccccacccttctgtcgtcttctaacagccgtata

SEQ ID NO: 698122 - DNA, 256 bp, Homo sapiens
ccccaaagactcttttctccatggtggggtgacaggtccgtagaaggtcgatgtgcattttacgtcgtgcacgaagtggtctattccagaccccaaggctgaagataatgtagaaaactttacttttgtttccagtacagagcatatcatcaacaagaatacaaagctatgttgtcaagagaatatctgatgctgagtcaagaactgatgtagcatgtcctttcaataaattaaatggttgagtgcaatgcgaaaa

SEQ ID NO: 698123 - DNA, 645 bp, Homo sapiens
aaaaaaaaaaaaaaaaaaaaatttttaaaaaaaaaaaaaaaaaaaaatttaaaaaaaaaaaaaaaaaaaaaaaaaaaaaaagggaaaaataaaaataaaaaaaataaaaaaaaaaaaaaaaaaaaataaggggaaaaaataaatttatacagaaaaaaaaaacttttgggtccccttttccccaaccgttttttaattcgggcctcttttttctgggggcccattttggggcttatttggccattttcccttttggggggggttttacaaatttctggggcctgtttttaaacttggtggtttgggcccggggggtccccattttaatccctttgggtcgaataccccttttctccggtttggtctattgccaaggggcccttccctggggggcttttcctttgtggtcatcttttctgggtatgggaacttgtgcgggttaattttttgttctttgggtatctcctttttttttcttaatcttcttctccccttcagggttttgggtgtttttcctttttgttacacgggctccttcttttatagcgcgggtttcttcattcctcgggctgggcccccttttttcttgggggtgggcccctcttctggtgcccctctcctcttttctcttttttgggggggggt

SEQ ID NO: 698124 - DNA, 159 bp, Homo sapiens
actttctgtctgctcctgtgtctaaacagattctctatactggagtcgtggtctacgcccctgctctggctctcaaccaagtgactggttttaatctatgggcctctgtgtttgcaacaggaatcgtttgcacattctactgtagtttggtatgtactg

SEQ ID NO: 698125 - DNA, 174 bp, Homo sapiens
gatggaatctgctggcatccatgaaacaacttacaatagcatcatgaagggggacattgatatccgcaaggcctgtatgcaacaatgtcttatctggaggcaccactatggaccctggattgctgatcgatgcagaggaatcactgctctggctcctagcaccatgaggttaag

SEQ ID NO: 698126 - DNA, 568 bp, Homo sapiens
  misc_feature (45)..(45): n is a, c, g, or t
  misc_feature (563)..(563): n is a, c, g, or t
tagtagagacggggtttcaccgtgttagccaggatagtctcaatntcctgaccttgtgatccgcccgtctcagcctctcatagtgctgggattacacttgtatcctatattttatgggcaagggactaggactattccaaaggtatccataagtgaatatccaatttggaatttcaaaacctaaaagtttaatagataaaagtatttagagtctacttaagtccttttaaatctggaattcagaaggctttgtaattaaaaaaaccctgaaaacctaattacatgaagtcaagatgttaaaatacagaaaaagttaattttgttcatttaaaaatattatttattcggctgggcgcggtggctcacgcctataatgccagcactttgggaggctgaggcaggctgatcacttcaggtcagggtcagacgctcgagaccagcctggccagcacgatgaaaccccgtctccactaaaaataccaaaattaggccgggtgtggtggtgcacgcctggtaatcccagctactcaggaaggctgaggcaggagaatcgcttgaacgtnggaac

SEQ ID NO: 698127 - DNA, 164 bp, Homo sapiens
ggtccatacggcgttgtatctggattcccgtacgtaacttaaagggaaattttcacaatgtccggtagccctttgatgttctgtcaaatgaagggaggaggcatgttcctttaagtttccttgacagacagagagacccagctttaggtggtcaccacatattt

SEQ ID NO: 698128 - DNA, 876 bp, Homo sapiens
ggtcggaggtgggggggggggtgtggagggtggagggagaaggacttcagagctactatcctactattgattctagttccagctggtggaccaactgggtgatccctgccatctctgcaatgggggggggggtgatgtatcgcctatacatggcagaggactgaacacctcctcagaagtcagcgcaggaagagcctgctttggacacgggagaaaagaagccattgctaactacttcaactgacacaaaccttcactcgacaacaatgatcttaatatatggggggctttctcttccgacattcgaaacaagaacacaaagaactcgcctttctcgcgctcaaatttatccaggagcgcctttttattcatctactttatctcgatgatggcttaatggggcaggagcttattattagcacgggcttatgaagtatataggagccgtaagggctcaacagaaaaagacgggccggtttgacccatgcggccagaccccccacccccgtcccctttcgcgcgggttattgcgcggatcctcattccctgaccctgcccgcgctggccactgggccagcccgaaccccaagacactgaccccaatggccgccttccccgcgttcttccatgtatcgacggtaggacccacacacacaacctctggaacaaaacagctcctgcaacgatcagtccccgcctcatcgctcccgtaggcgagcgttatccaacgggcccggctccctctaagacgacggacgaactcgtcctatgtaggaagatggcgacgcgccctgacttgccgaggatcacctgctgtggactgtctgtaaacactgccttatgaggtatctcggtgcgctcgccggcttcccgctt

SEQ ID NO: 698129 - DNA, 1021 bp, Homo sapiens
ttagtcgttcctcctgacatcaagatacttgggtgcttatatcctgatgtatactctgaagaacagatacttatcggttctgagtggcatatacctttcctaccaattattgatcctattttcactcatctctatagatatcccctttatctatcatgactacagcaactattaaatggtacaagacttcagttttaaccgactggtgtggtaccagcagtagttgctacgtaccaccttcccatggctgtttgagggctaatattgctaagacatcttgaatctcccagtgaagatgtctggggaatttgggccagttgtcttccctcttgctcgtttcgttctttcattagattcagctttggcaccatagaccacctccaggatctttgttatgttctggatctccaattgaccaagcatctgcgttttgcaatcaaatcagaagtctcacgaaagcacacagttatgactgcatatctgatgttcatatcctataaaatttcaaggaagattcagagtccatcttctattcgtacatgatgtagacaacattaagctgtccaattcgttagcactaccaaaatcgcctatggattacacgtaagtgtgctcatcttgttgtcgaccaaggttggtatcagcgcggggcctctgtggctcaggcctgtatcccagcatttcgggcaggcccacggtggggggatccacctggagtcctgagtcatcgactgccatgacagcttgtgaggcctgttctagtaaagatacacacgttcatcaggcgctggatgtggtgttactgtgaacccggtatcgaaaggtgggcgggaaatcgatgcaacggccggaagggacagcatgagttcagctggacctcttgttacagcacaagtgtcttccgcccagaatggttgtatctcaaagacgggattatatctttgcactacatatcgtcctccggctacttaatcttctactgacatgagataacatcgtacgtaatatctgttgtctaacg

SEQ ID NO: 698130 - DNA, 130 bp, Homo sapiens
ttgctctgtgtgatcctcctggctggcggtaccaggatgtcaacaggcacgttccccatcaatgaccacctgcttccggtagaaatcctctatagtggggtcgtattcgtccacaaagtggttctggatc

SEQ ID NO: 698131 - DNA, 104 bp, Homo sapiens
tttagaggatccgtgcttaccgtgggcgtatgtgtgtgttagactgggtttcaccatgttgcccaggctgttctcgaatccctgtggctcaagctatctgcccg

SEQ ID NO: 698132 - DNA, 533 bp, Homo sapiens
cagcacgcaagaataagtgggggtctttatactcattcaggaatggtttatctgatgccaggctgtcttcgggggggcctttggatggttggtgaaatactttaattgccctgtctgctcacttctagctatttaagagagaacccagcttggttcttttttgctccaagtgcttaaaaataagttggaaaaaggagacggtggtgtggaaatggctggggagtttgctcttgtatccctatagtccaaggtttctcaatctgcacaattgacatttttggccggagtgttctttgtggtgagggctttcctgtgcattgtaagatgttcagcagtatccactcatggtctctaaccacttgacaccagaaaccccccagctgtgataacgcaaaatgtctctagacatcaccaaatgttccctgggggtggcaaatttgcccttgattgagaaccaccagtttagctagtcaatatgaggatggtggtttattctcagaagaaaaagatatgtcaggtcttttagctcctta

SEQ ID NO: 698133 - DNA, 259 bp, Homo sapiens
tgagtatcccggccatgtggctgctggactgggtggtaacatttccatctgtgctgctcgtctctgacacacacatgcttatccattgatccctgctggttgaggaggctgtgaggccaggaggcccatgaacacatcttgccatttccctcctgtctcccctgtctccctgccctttgggagcaagcacctagtgcggtctggtaggcgcgtttccccacagcgtgcgctcccgtgaactccttgactgggcattggt

SEQ ID NO: 698134 - DNA, 1130 bp, Homo sapiens
  misc_feature (538)..(538): n is a, c, g, or t
  misc_feature (853)..(853): n is a, c, g, or t
atattatatgattctactgatacaacattctagaaggtggaagtctagtgcggtatcagtggttgtttaggggagagggttgggatagtgtacgttatcttgattggtgctggatggttgtcaggggtgtgtgcatattgtgtaaattgtgtgcagatatgtgatattttaaatatgtgcaagaatatgtgtatgtcgagttggtcgcgcggtcaatgagaagtgttttgaaaatagtagtattgcatggatccgatacgcggcacataggtggattattggtcaaagacttgacaacagtgggcgttcgggtctaatgaggacagtggtggggaagggagttgggtagatagtgtatagggagatagtggaggaacgctggacgggatgtaagggaagaccggactactgcgaggcaactcaggcaggaaggacttgacaagacgctatgatgttcgcgagaagtacgagcaagaggaatcgctatcgaggacccaggacgtcggctggtggtgcgaatttggatcaccacacgtgntgtactcctagggcaatgtgcgtggacgcgcacacaggacaagggtgcgtgtcaacactgttggttccagcgagctttagaagaaccaagcctggggcctgttacatttggtgggacaccacgcttgtgcttgaaattaaggggattacgaaagggatttaggcctgaacgaatggcggagtggcacagtgcctgggtaaattttccccgagtgtaacctccgtgggaagggccatggaagacaagacagaaggaagtccatggggggagcgatgagaagggtccttcacagatggaaggcctggaggagtcggntaggccaacttggtaactatccccaaggcctggggagtgggaacagggagaccttgtaatcgtcgtgggtgctccataaacaaggaaaagtcacaagagaaggcaaaagtcccagggccggcggccattgtggtaggggtccccaatcgccgggtgggagtgccccaggccacctcttgcgggactaggctgcccagaggtgtggggatgccactgggaggaaacaggggacgtcacggagaaacacactgctcaagaccaagatatgcgggagaaa

SEQ ID NO: 698135 - DNA, 177 bp, Homo sapiens
gagaggctacagatcatgggcgtgggtctcactatgttgcccagctggtctcaactacagtggctcaaacaatccttccagtactgcctcccgagggtgctggggttataagcgtgaccacagcacctggccacagaggtacattttaaattgtcttacataaacggtgaccaggat

SEQ ID NO: 698136 - DNA, 1275 bp, Homo sapiens
  misc_feature (51)..(51): n is a, c, g, or t
  misc_feature (55)..(55): n is a, c, g, or t
  misc_feature (61)..(61): n is a, c, g, or t
  misc_feature (202)..(202): n is a, c, g, or t
  misc_feature (204)..(207): n is a, c, g, or t
  misc_feature (371)..(371): n is a, c, g, or t
  misc_feature (503)..(503): n is a, c, g, or t
  misc_feature (505)..(506): n is a, c, g, or t
  misc_feature (517)..(517): n is a, c, g, or t
  misc_feature (520)..(520): n is a, c, g, or t
  misc_feature (528)..(528): n is a, c, g, or t
  misc_feature (531)..(531): n is a, c, g, or t
  misc_feature (541)..(541): n is a, c, g, or t
  misc_feature (543)..(543): n is a, c, g, or t
  misc_feature (548)..(549): n is a, c, g, or t
  misc_feature (555)..(555): n is a, c, g, or t
  misc_feature (561)..(562): n is a, c, g, or t
  misc_feature (566)..(566): n is a, c, g, or t
  misc_feature (570)..(570): n is a, c, g, or t
  misc_feature (579)..(579): n is a, c, g, or t
  misc_feature (584)..(584): n is a, c, g, or t
  misc_feature (587)..(587): n is a, c, g, or t
  misc_feature (606)..(607): n is a, c, g, or t
  misc_feature (612)..(612): n is a, c, g, or t
  misc_feature (621)..(621): n is a, c, g, or t
  misc_feature (644)..(644): n is a, c, g, or t
  misc_feature (646)..(646): n is a, c, g, or t
  misc_feature (658)..(658): n is a, c, g, or t
  misc_feature (685)..(685): n is a, c, g, or t
  misc_feature (789)..(789): n is a, c, g, or t
  misc_feature (920)..(920): n is a, c, g, or t
gtcttcttgttagttgattatttgaggcttttaaaacaagtagttcatganagangctgtnggactcaacatagagtagagtaactatctttttagtctggatttctgccctgcttagattttaaaagtataagcatggattgccaattccacttgatgtaaacaaaacttttttttatacataatatatatatatatatanannnnaacttattgtatcagtccaggttcagaaacttgtggtaggccagttccagatagtttcattcacctgtaaactgtatcactttgactgatattgtaattttcaaatgtataatatgtttacagatgtgccctgcatttagtctgccttgttcctattttgattntgttgagtctcctgcctgcttgccaaaagctaggatgcttcaggcccatgtacaattgaaagcagaggcatccttgagctttaaagcattgaacaaactggaaaatgcaacataccacataactgaagtgancnnaagtctgtgtnctncgtgtctnctnacatcaccantnttcanncaagtnaacaanncaangacntataaggtngatcnacngggacacaaggctccagtnngtttnacacgtctncacagttctgctgtgtgttcaantngccttgtgtaancacttgtcgccttagggccagattccnctctctagtcccctttttttaaaattgtcccattttggcttgcctggcaatttttaaacgtttctttcccggtctccaccaagcttcaccacaagaaacaaccnttcctcggggtttggtgaacatctaccagcagggtttgcactccggacgataatactatttctcgcaacaacgcgacaacaacaacaaacacaaacacccaggatacccagacctgaaattgggcgctttnaaaccttttatgaaacagcaaaaacctttgtcattttaacatcattccttctgatagagaacaggctcattatggccttttcacgtaatcttttccccttgtccccaattaatttcccccttcacagggacctacacacgtggttcccacaacagaaagagcccaaacaagacacatgtggttttcccaacatcttccactgtgtctgtggtcccacacagaggcgattactagtgacgagcagctttcaccaccttctttaataagtcctacatcacaacagtgcgagccatttttcacaacgtgcgatatatgcctccacaccggaaaatatcccgtcgtagatcaatattag

SEQ ID NO: 698137 - DNA, 399 bp, Homo sapiens
tcagcatagtttagaaaactcatgaggagaaggaaggcctattttgctgttttctttctttccgatgtcccaaggttccttctttaatcatttcctttccgtctagagaactccccttagcccttcttttagggtagaactgctggtcagagatgtccttagcttttcttaatctgaaactgttttgatcttctccttaatccctgaaagatgtttctgctggagagaggagtctgggctgacaattttcttctgcggcttgaaaagcactgcacaacttctttctgcctccgtggtttctgatgagaaagccatcatcgtcggaattgtttttcctttctaggtaaggtgtcacctttctctgttgctttcaatatattttctttgtctttagtttcc

SEQ ID NO: 698138 - DNA, 680 bp, Homo sapiens
ggagacagatgcggcgctgagccgggagcgggagcgcagctcccagtgagcatggcgagttgcagtggccggctgtgcagagagtggagtctcagtgagcagtggtgctgcgtgcagagtgctgctgtgactgagcagttcgcagtgttgctgtgtggctgctgctgcctgatgtgcctgctgtgtgcatcctgcaggatgcctgtgagcaagctggacgaccccctgcacctgctgctgtaccatgctccccatgactacctggtgatgcagtggcccatgtgaggccttgtgatgcctgtgagcaccctggaggagggccacgcccagtacctgacctccttggcagacgcctccgccctggtggcagctctgaccctgcttctcccaccttggctgctggataccatcatcaatgtgcggtgccacctcgcacctgtgttcccaccgaccctgcctgacctgcctcatagacacctgcaatggagttgcggtggccctggtgctctggagctcatgggtgcagcttgcaggaccatgcaggctctgcgtgcacatgcagtgccagcctgtgttgcggacacccctgcagggcatccttcagctgggccaggaactgaaacccaagagcctagatgtgcggcagtgaggagcatggggccatggtcgaacaaggagat

SEQ ID NO: 698139 - DNA, 103 bp, Homo sapiens
gagctcggatgctggggctacgtggagggcctggatatgaggaggaggatgaggatgaggaggagtatgatgaagatgctcaggtagtggaagacgaggaggg

SEQ ID NO: 698140 - DNA, 1145 bp, Homo sapiens
ttgtggccgtgtttcccagtcggggaaataggtgcttagagttgagggagttgtaaccgcgtggaattgagggccccacgggtttattgttagaacacattgggttagggcccccgggaaagtttttaatgggggcaaaggtattggtccctggtgtctgtggttcgccctggcgtggtgagagaaagtgaaggtgtaaggggtattattccccaccgtgtgtgtgaagagaagggggccaaagccccctgggggcctatgaagattccccgcgccccccttttgggtgttacattaactgggagagggtttaagaatttagtggcccccgaaataggtcccaaccttctctggttatataagatgttaaaagcacccgagagtgggtgtgtgcacccggtggttgaatatgtgcgtgaaatatcccaacccctcttaagttagcagctctttattggtttaaacctcttgggctctatatttaaaaatatggttttataaatttctagagatttatgttttctcttattaaggattttcttataatatttccttatctttaaaatgtgttgtgttgttaaatctcacagatttaaaaatgtgtggttcacatggtaccacggtccccacctcacgctatggcggtattatgagaccacccccaccgtcttccctttatggtataagttggttgaggaaaaaatcgccccctttggttgtgtcacaggctctccccaaaatccccacacacaccggggcctgcacacccctgtggaggttctctgtgagatactcccgagaaagggtctctcctttctcccagagaggttctggctggttgccactccacgaggcgagggagtgacccgctgcttgagaggagggaaagaaatgtggttcacaagagtctactcacatatattgcactcacagagaaggggacgcacctataaatatgagacccccttatacctgttgtaacttgcccacaattgaggaatcacagaagaatgtgtaaaatgcacgccaattatacttattaaatgtaacgttatagaatttgctttttgcccaagttgccaaagttgtaatccaccacatcacggtccctgttaaaatgtattattttgtttaaacttatgtta

SEQ ID NO: 698141 - DNA, 376 bp, Homo sapiens
tcctcatccctagtaactatgtccaggtatacctggaaaaacacacacaggagcacacacacacacacacacacacacgcacacacgcatgcacttatctcccccaaggtcgtgtgccatgtgcttatagctcggggacgtgctgtagaagtgtgccacaagtctgtggcctcttctagcaagctgtatatcaccctggaggagataagagcacgtggacagagtcaaggagacttgtgcatagctacatgatcttggacacaacacttccttatccaggcctaagtgtctagtcttagagctctagcttcttccagttctgaagccctctgatttgatgtctggaaagctttttccacctgtgcccaggtttctg

SEQ ID NO: 698142 - DNA, 97 bp, Homo sapiens
ggttctggcccccctggccctggggggtcttgcttttaacggtttttggaatttaggtgggggccccttaaaaaaaggggcccggttttttggttta

SEQ ID NO: 698143 - DNA, 480 bp, Homo sapiens
ggggcccaatccctcacattctccaagtttgaagaatagaaaaccatcgagaatacccgcaaggtttaccacagtgaatgaaagttcttcagtgcatcttccagggtcggatcatataaggaaattcacgaaacaagatcgctcccattcgttttcatatacccggcactgcaccattgaaacgaatagagtgtctaaggagttcatagaatttctcaagaccttccacaagacaggccaagaaatctataaacagaccaagctgtttttggaaggaatgcattacaaaagggatctaagcattgaagaacagtcagagtgtgctcaggatttctaccacaatgtggccgaaaggatgcaaactcgtgggaaagtgcctccagaaagagtcgagaagataatggatcagattgaaaagtacatcatgactcgtctctataaatatgtattctgtccagaaactactgatgatgagaagaa

SEQ ID NO: 698144 - DNA, 1535 bp, Homo sapiens
tcttgtgttgctcttcgttttgcctctctttcgttgttttgtgttttctctttgtctgtgtgtgtgtgtgttgtcggtgtcgtctagaatacgtccagtgttcgtggttgtttgttctcgttttttcgcgtgggtctgccccactggtgggcccccttggctctttttttgtcccccgccctcggcttgttcctcttgcttcggggccttgagttgcaccgctgggggcccccccgtggtggcccttgtcttggacgtttcccacgtcttctggacccttggtcgatggcgttttataacagggcttaccgcacttttccgtggtatctccgactccgggttcaagtggctgctgtgctgatagtgtgccgctgggaaagttttgtgcggtcttcccacaggatcccccttggtgccatacaaccgggcaattttgtaagccaatatgtggtgttgccccgtggtgtctgttgggaaaattgtggtgcccacgtgccccaaaggtagatgggtctcaaggaaatgtgtaggagggtcccggccccaaattagtccctttattaagggggttctatggggccccccaagttgttggttttgggatttgctctactaagggaccaggaggttcccccagtgaggtcgtgtcccagaccacccagtgtgttttataagggtattgtcctggtcagatagtgtgggttcccattggggtaaacagaggtggtgtccaaacccccagggtagtttcccaataaaggtatagggtactccccaggtgatccacagcgctcacatcttagctcccacacacaagggtcccttcttttgtgaacccctcacaaggggataccgctctccttctttgtgtaagctttgttataggtactccccaggtacgccccccctccctttttgtggggtgggaccacaccatatggggcgttgacccatgtcacccctgtgtttgtgcgctgtgtgtggccccctgcgtgctaacacacacacaatgtgcccacgtgggcgctcttgagtacctcacctaccccatgcgcaacactggtatacgccacacacacgtgtgcccggggactttacactgggccactgagccgcacactagcaaagggctgtttatagggcctcgataattgccacaccacctgtattgccgggccgtgaatacactgctggacattgcactgccaagggtggctgtgaatcccgccgcaccgccccaagatatgcccgaggatataataagagaatggagaaaccaatgccccgggaagacctgtgtttcatgccccctgaatgtcttgggaattaaagaaggaggaaccgcgctgggccactggaaaggctggaaccctctgctgactgggataaatgcgtgagcttgttaatgttggccgcctgtctgtcaggtgttcttaaagggattgtctccccttttggttcccttttgtaccacctttggaaaataatctcccagaaacgagctgtgcttgccaagacttcatagttccccagaa

SEQ ID NO: 698145 - DNA, 1002 bp, Homo sapiens
  misc_feature (967)..(967): n is a, c, g, or t
  misc_feature (1002)..(1002): n is a, c, g, or t
gagcgggaagagcagtccgtgcgtctcgcgcgagcagaggatgtgaaccccgtgaacgttacttgtttcactagttgaatccctgagtgctctgacagagtctgagcctcctcacattcataaaaaggaagccatgcgcagagagagaagagacgttcaagaagcccatggcgctctagaggtgtgttgcgagcagctacaataacttggatctcagtgctgtggaagtccagaagcgatctttcagttaatcgcctaaacaaagaccctgtacagtgggctttccggagatttgggtaactcctttccactttgcggtggcatatatttggttatcttacatgcaataacaagggagaattatcaaagtgacctctagtgacggctaatttgactagtgaagggggccaccagcttactattgacgcgcgggaaaaaccattcccaacagtgggggatcacgatacggtgcctggcattaggtgggccaggactggacccttttatcttacacagggggttcgtgagaattcttttccaaattgaaaagaaccttgtgaaggtgtgtaccagttactcatgttctcttgttccctaagaacccatgctaatgaacagaggaagcaaagattagccaggttggcaaccaagaacccacttgtcgatacaactttggtccctttcccacaagcctgcaagaccccatattcctcatttctttctaccaccagaaggttaagccgtccatatctaatagttcctttgcccattactcctcctttatacactgtgcccatggagactgtacagcttagggttcggttactttatgaacattcgggtttagttacaaggtcaccagtgcgtgccaagatttgccatgatggtctacagatatccacgactgtattactcccgtgaagtgtcgtgacaaggtaccctgagtatgggcacatggcaacggcanagtgtcatgtgtctcccggctatacactatatttn

SEQ ID NO: 698146 - DNA, 1005 bp, Homo sapiens
  misc_feature (6)..(6): n is a, c, g, or t
  misc_feature (12)..(12): n is a, c, g, or t
  misc_feature (14)..(14): n is a, c, g, or t
  misc_feature (20)..(20): n is a, c, g, or t
  misc_feature (209)..(209): n is a, c, g, or t
  misc_feature (745)..(746): n is a, c, g, or t
  misc_feature (752)..(752): n is a, c, g, or t
  misc_feature (754)..(754): n is a, c, g, or t
  misc_feature (764)..(764): n is a, c, g, or t
  misc_feature (768)..(768): n is a, c, g, or t
  misc_feature (772)..(772): n is a, c, g, or t
  misc_feature (774)..(774): n is a, c, g, or t
ggtcgnagcagncngttccnttttccggtcggcgtggtcttgcgagtggagtgtccgctgtgcccgggcctgcaccatgagcgtcccggccttcatcgacatcagtgaagaagatcaggctgctgagcttcgtgcttatctgaaatctaaaggagctgagatttcagaagagaactcggaaggtggacttcatgttgatttagctcaanattaattgaaagcctgtgatgtgtgtctgaaggaggatgataaagatgttgaacagtgtgatgaacagtgtggtatccctactcttgatcctggaaccagacaagcaagaagctttgattgaaagcctatgtgaaaagctggtcaaatttcgcgaaggtgaacgcccgtctctgagactgcagttgttaagcaaccttttccacgggatggataagaatactcctgtaagatacacagtgtattgcagccttattaaagtggcagcatcttgtggggccatccagtacatcccaactgagctggatcaagttacgaaacatggatttctgactggaatctcaccactgaaaaaaaagcacacccttttaagactacttttatgaggccacttgtgggatttgtcagaccaagagtgatgctgcttcaaaaagtcatggtggaattgctcggaagttacacagaggcaccaatgcttcccaaggctcgagttgatgccccacaggtgtattggacgaagcattggcaagatccaagnngcattncnttttgaacancttnttantntaaacagtcagttcggaaagtgagcttttcatgaccttaaaccattttggggagtggtaactggcgtcatatgtcaagttagtcagaactagtaaggactccatggatccctgggctggttccagaaccgagttgggcacactggactgcgtgcacttcaaggcgaaggcgtcgcacacatcggacaaccttggacaatcacgggaacttcactggaccatgaagtgcacc

SEQ ID NO: 698147 - DNA, 147 bp, Homo sapiens
  misc_feature (118)..(118): n is a, c, g, or t
caataaagccctgaaacttcttgcgagagaaaagattaaacttctcgctcacaaccctattctggtcgcaatgtagaaatacggtttatagggcaaagccaccttaaatctagcttcncgtcatctatgaataaaagtagtaatcca

SEQ ID NO: 698148 - DNA, 674 bp, Homo sapiens
  misc_feature (320)..(320): n is a, c, g, or t
gggcacagaacagatccattatcccccaaaatgccacataataccccttataatcagccccctccaactagtaatcactgacttgtttgtgtctctataggttggccttttccgtccagtttctttgactcagcataatacctttgacattcatctgtgttgtgtgtgtataatagttccttccttttgtgcagagtagcattccatggtgtgggagtaccacagtttgtgtttaatgagtcactcattgaaggacattggggttgtttccagtttggggtaattttgactaaagctgttaaacatttgcatatagattnttgtgtgtgttcataagttgtcattttttatttcatcttggataagtaactaggagtgggattactgggtcatatggtaaatgtgtgtttaactttgtagaaaactgcaactgttttccaaagtgatgtactattttgattccagccagcaatatatgagagttctcgtggtcctcatgctttgcaacagttagtcattagaattttttaaaaatattaacattctgataggtatgtaagggggtgtctatcgtaggctaatttacactgccctaatggtgaagaatgttggcatattttcgtgtgtcatccggtcttcttggtgaaagggctttgacttttaacattcctgag

SEQ ID NO: 698149 - DNA, 113 bp, Homo sapiens
cagttccaatcggatgagcacgtgtccacagtcatgcagcttcccaggaacatacatagaactcgtcatggtgggagcgagtaattctttccctgtgaaagcactgaagacaa

SEQ ID NO: 698150 - DNA, 1047 bp, Homo sapiens
  misc_feature (6)..(6): n is a, c, g, or t
  misc_feature (12)..(12): n is a, c, g, or t
  misc_feature (14)..(14): n is a, c, g, or t
  misc_feature (20)..(20): n is a, c, g, or t
  misc_feature (209)..(209): n is a, c, g, or t
  misc_feature (787)..(788): n is a, c, g, or t
  misc_feature (794)..(794): n is a, c, g, or t
  misc_feature (796)..(796): n is a, c, g, or t
  misc_feature (806)..(806): n is a, c, g, or t
  misc_feature (810)..(810): n is a, c, g, or t
  misc_feature (814)..(814): n is a, c, g, or t
  misc_feature (816)..(816): n is a, c, g, or t
ggtcgnagcagncngttccnttttccggtcggcgtggtcttgcgagtggagtgtccgctgtgcccgggcctgcaccatgagcgtcccggccttcatcgacatcagtgaagaagatcaggctgctgagcttcgtgcttatctgaaatctaaaggagctgagatttcagaagagaactcggaaggtggacttcatgttgatttagctcaanattaattgaaagcctgtgatgtgtgtctgaaggaggatgataaagatgttgaacagtgtgatgaacagtgtggtatccctactcttgatcctggaaccagacaagcaagaagctttgatctgacaaacgccctaattgttgacaccacggccttgggttccaacatttttccgccgaacgggtggaccgcgccggctctcgagaaatctgggcgtgtgtgttagcgcaactctttctcacagcgggagatgggataagaatactcctgtaagatacacagtgtattgcagccttattaaagtggcagcatcttgtggggccatccagtacatcccaactgagctggatcaagttacgaaacatggatttctgactggaatctcaccactgaaaaaaaagcacacccttttaagactacttttatgaggccacttgtgggatttgtcagaccaagagtgatgctgcttcaaaaagtcatggtggaattgctcggaagttacacagaggcaccaatgcttcccaaggctcgagttgatgccccacaggtgtattggacgaagcattggcaagatccaagnngcattncnttttgaacancttnttantntaaacagtcagttcggaaagtgagcttttcatgaccttaaaccattttggggagtggtaactggcgtcatatgtcaagttagtcagaactagtaaggactccatggatccctgggctggttccagaaccgagttgggcacactggactgcgtgcacttcaaggcgaaggcgtcgcacacatcggacaaccttggacaatcacgggaacttcactggaccatgaagtgcacc

SEQ ID NO: 698151 - DNA, 209 bp, Homo sapiens
  misc_feature (58)..(58): n is a, c, g, or t
  misc_feature (113)..(113): n is a, c, g, or t
gtgcgcacctcgtatccacgctgcagtagttcggcgatcgcccagcgtgcgatgaatncgctaccgcccgtcaccagcacagtctcgctcatgcgactccctcaataattggnggttgtttctccgctttagggagcatagcaccaagcggagaaacaacctccgtttatttagcgtgatctcaggattagctggcaccatggtccaat

SEQ ID NO: 698152 - DNA, 101 bp, Homo sapiens
ggctgagaagtcgaattcagtcgtccttttaatctccgaaactccttgctgtatgtgttgggctgatagtgggcatcctactagcagtctgcacctgcagg

SEQ ID NO: 698153 - DNA, 166 bp, Homo sapiens
aagcactttggtaagagagaaaagacacatggattttggagacaaaagttatcttcaacaaccaaataacattttaacagagcaacctatcaaggaatataggttagcttaggaatcagttagacctggactctagtcctgatgctgccaattaccagctataaga

SEQ ID NO: 698154 - DNA, 404 bp, Homo sapiens
ctggacactgctctgctctacagggttcccatttccgttctgtccccattgtcatctaccagcagtggatgttctttaaatgtaaacagatcagtcaccttgctcaccatcttccagtggttccccctcacttttaaattaacgtcaaagtcccatataatctaactactggcaacctctcccatcctcatcttctaacaccctcacacttgctccctacactccagccacaatgattttcctctcgttcctcaatcatattcctgacacaaaacatctgcacttgccattcctgggcctcgaatgttttatctcccaatcatcacttcatggcacgctttctttcatctctttcaaatgtcacctccccagagaggccttctccaatcactgcagctaaaatg

SEQ ID NO: 698155 - DNA, 157 bp, Homo sapiens
gctagggcagagtctaggagacatgaggtgcaagctgtccagttgttctctttcagtggagttgtacagacagagcttaattttctcagcaatgtatgtatgataacacatgatgaggtattgccacctgccggaagttacctcaatctttggtgtc

SEQ ID NO: 698156 - DNA, 1071 bp, Homo sapiens
gagacgcgcgagcgcaagcagcgggttactggtcgcgcgcccgagctccgcagtccctagccgtagccgcgacccttcctggctcgtccccaccccagcgtcgccgccatgcgcctccgccgttctagcgctgttcccgggtgtggcgctgcttcttgccgcggcccgcctcgcccgatgcctccgacgctgctacgacctcacggacgaccaaccttcgagagtcgcatctccgacagcgggctcctgcgggccctcatgctccgctcgcagtccttcgctccctggctggtggacacctgcaaggagcacttgcaccctgacgctagtgaagcgtgcaagctaaccagagatctaaaaggaatagtccccagttagccaaaacggctggaccttgccccgtgctcaacaacctaaaccacctggtaaatcaacactagtgcgcagtcaagctgggactattcgcaaagcccctttgaacaacgaactacttcccaacgacgccatgtgctcgcacacgaaacgccaaggggctggcatcataagtggcacttggcgaaccccataacgagcaccgtggcccttggcacctcgccgacacagttgcgctccacggcgccagctgttgcacacgcacaggccgggcggccgatggggaaaccccaaaggcctttttcacaacggtggacccccgttcctttgcaaggcagcaacccatggtgcagctgcaaacggccacacctctttattaacacggcaacacacacctgtccacgctacaacgcgttggcatttagaaactcggaatgtgacgcccttcctatacttaacgcttaagcggcattctcacacacacacgaaacgtggaatttcccactgcgccaaggttagcaaggtgtcccttccgacacttccgccggagaagggtatccgccgtataagcacaaagagcccaagtccgacaagggccaacaacccgtttgggaaaggccggcgcaaactacaacccgtttacaaccccggctcacacttcttgcgagcacccccgatctttagcccgaaaagccctgc

SEQ ID NO: 698157 - DNA, 181 bp, Homo sapiens
actcccaggattagtgtccataccccttcgtctgtcatctaccttcgtgtgtcataccccttcgtgtaacatcccccttcgtgtggtgtcatcccccttcgtgtgtacatccccctatcgtgtgtacatacgccttacgtccttcgtgtgtacatactgaagcagttgccgtacgaagggg

SEQ ID NO: 698158 - DNA, 143 bp, Homo sapiens
aagagtgacctgattatgaggtgattagaggatccctagttagtttcgggacgtagtgacgcgcacgcctccctcggagaacctggctcatgcgcgggttgagggcgcagcgcatcgctgctgcgtgccttctggcggctacc

SEQ ID NO: 698159 - DNA, 671 bp, Homo sapiens
agcggacttgcgcatcggggcgcgcggaggtggacccagtcgacctcccctgcagcgcgggcggcgcccaggctcggtcccaggaaagctcccggagggcccagagcgtgggctggggccaggcgggctctggggcagagcagggtgaggcctgttgcgggcctggtctcctcgccgccgtcccgcccggggtcctgggggatgtcgcgtgtcctcctcaggagacagtgccacttccaagaggtcctaagacaaaggggggccagtaggggcctccgggtgggagggagcctgcgcttctccacagacacaactccctcacacagctaccccaggagcacaccctgccggggtccctgtcctggcgaccaccaacactgggcccccaaactccgaacctgtttctgccttggacagagaggcctgagccctcccggcgtgccttcctgccacgttctcattccaaggacatctggctcggcgacccatgtgggtaatctccatcacatgcctgggccaccagggccatgccgttccgcggcccctttaccagcctgggcaaggctggcacctgtggaccagtgaatgggggctgcgatggcagcggggaggttccatcgttagcccaaaacatcctgcacatcagaagttggactattggcggctgactg

SEQ ID NO: 698160 - DNA, 162 bp, Homo sapiens
gtatttgctcaaattatactgtttctttctcactccctttcaaaatactccacttttatttctaactctcaccttgcatgcaggaatggactgtctctattcttgcatagactgtccattcttgcatgtgtgtgctgtgtgctgtgtcatgtgtgtgctgtg

SEQ ID NO: 698161 - DNA, 364 bp, Homo sapiens
  misc_feature (70)..(70): n is a, c, g, or t
atcgattgaaagcagccagccgatcaatagtcctccatccatgtgaaaaaaatcttagaaaaaatgcggnttaaagaaaccaatactctttctttaaaaaagttaaatggagttcttctgggaaaccaagccatgaatgcgagtttgtactaacatagccctgtggaggccacatgtgtagcaatcagatataggagcttttccatgtttgaattccacaaaggaaggcatatacatgatcaattatctgagcagaattctatataggttaagtaagggggaaaaatacttcatgtaaaatattccctttatagaacacagtcgcgctcgtgatgactcgtgtccccatggatacacatgacag

SEQ ID NO: 698162 - DNA, 429 bp, Homo sapiens
aaaggagtaaattttccagttgataaatgaaaatcactggcctatgtttaataagtttttctttaattactgtggaataacgtgccagctatcatcaacacaatgattttgtacatagggtagggaagcagtgatgctctcaatgggaagatgtgcaacacaaattcagggtcactccatgtattttacctacttcagcaatgcaactgcattttggggctttgtgaatcagatttagctgccttgtatagtcgtttgaaacactatgtgatgtgcgagagagttagagtttccttttagaagatcaaactcatcaacagttctttccaaattctcatgtgccacagttcttattgttctgtgtaatcagagattatcgccgtgttccttcatccaagcaattgtttttccttttattgtttccttttc

SEQ ID NO: 698163 - DNA, 518 bp, Homo sapiens
tctagtagttgaaatataataaggaaaatgtctaaaaagttacggcaagtcccacatcagaactctgtaactactactccttccctcaggacaccaagaaggtaagtaaattgagtcactccccatatctaaaaacataatgaagtatcatccttcagatagtactcgagctgagcttagagtaagcctagggaagtctttgcagatcttaaactgggcctcatactaatatctacctacctaccccaaatttcatatgtagctttcttaatggcccaaaaggaccacctctaatacatgaggaaataatcccaggtggggcaccccagtaacacctacaggtaggagatattcaagggtatgcaagaagtaatagtactgtcctggcctcagatgggtgaacaggagaaggagtaattagcaaaggaattagcccactgataaactaggtacggtgtaggcaccagtgccagtgcctttaagctacatgccacagtcatcccttcagaagacactga

SEQ ID NO: 698164 - DNA, 225 bp, Homo sapiens
ccagtccagagtgcagtggtgtaatcattgttttactggtagtttctgtctcccatgctcaatgagatggtcccacctcacgctctgagtagctaggaccataggcatagcaccaccactcctgcccgttttttttttttcttttcttttttctttttttttttttcacagagacggtgtctctcattattgttccccaggctggctttgaaccccggggctcaa

SEQ ID NO: 698165 - DNA, 257 bp, Homo sapiens
tttttcaaaaagaagaagctgggggagcccccccccccggggggggggtttttttcccccaaaaaaaagaaattttggttttcggggccgggccagtttgttccaaaagctgggggctccccattttttcccaaaatcaaaggttttccccggctcccggggcccctgcggtttgggtttgttttggggaaggggatttttcccccccaattggggtttttaatttttttagacccctttttaatagctggccccca

SEQ ID NO: 698166 - DNA, 415 bp, Homo sapiens
caagggggtcagtctggggcagtatttgcttcattcacgctgtaagtcgaaccccgccagaatatcccgatccagcatgctcacccaacggttgtagttgcgatggatcttaccgtccttgtagcccaggtcgcggctgtcgtggtaggagatggcgtagctgttgcgggtgtagcggatgtcgattgcggcgtagaactggccgcgcacggtgatctcggcctgcaccagttgcgggctcaggcgttgtaccgtccactcgcgtttttgcagggcggcgacgatcacctgtttcattttttcttcgctgacctggctcgtggccggcaactcgtgctgggtgttgagcaccggtttgctggtgcagccagccgtggtcagcagggccagcgtgatcagggtgcgtccgtagcgg

SEQ ID NO: 698167 - DNA, 217 bp, Homo sapiens
ggccccaaaaaccccccccccccccccggggggtttggggggccccaaaaatgattttcgcccccccccccccccctcccccaagggggggggggggcaaacccccctttttttcccccccgggtcccccccccaaaaagggggtcccccggggggggttttttggggggggggggggttcccctccccccccctttttttttttttggcccgggga

SEQ ID NO: 698168 - DNA, 946 bp, Homo sapiens
  misc_feature (235)..(235): n is a, c, g, or t
  misc_feature (654)..(654): n is a, c, g, or t
ccttggtgtgtcttatagggctcccactgctccccgtgtgtgcgttcgtttggaaaaagttttggtgatcgcccactgttgagggcgtttaacacaaaactggtgtgcgaccaaaacacctggggtgtaaatctataagacaattctcccccaaatttggggattcaacaaaaggttatattcggctggccgaaaacgttgtaaaaaaaaccggggtgcgccgccgcaaaggctntgaccccgcttggtagtcaaacaatgcaggcctttccctcctgtgctacccctccgcaagggtcctaccagccccgtgcttcaaccccgaagcttccggcgcccatcaaaaaaaggttgttgctagactttccccgccggggaccccattgggttggcgccccagctcgccccttcctcgccgggtctatggcgacgccactctaacatgtgagaccagccacggttataagaggccctgttcattaaaaacccttgaacgcccctagtttctctataatttcgcactggtatccccacagtgggagacacatttcgcggaagatttcttgaaaaaagggagatgaacgcaggggtgagtgactatatttgtgtctccctttccaagcggagattcggaactgtatacggtgagcatanccagcaccccatataggtgctaagacacacggcctgtgaaaaaaacacttatgaggaaatgtcagggggtaacaactacatattatggcacacatccgccaggggttttttgtagcaccttctcaataaaattccctcctctcacttgccgtgatatgagaacatgaagccaatgtatgtataactcagcgagtcccagcgggagttgtgtgacaacaaaacatgcacgtttgctcaataaaataatgcaaaaaaaaaattatgatatgtaatttctgtcccaacaaaaaca

SEQ ID NO: 698169 - DNA, 550 bp, Homo sapiens
  misc_feature (513)..(513): n is a, c, g, or t
  misc_feature (540)..(540): n is a, c, g, or t
  misc_feature (542)..(543): n is a, c, g, or t
ccagtctctccagggactagtatttgatagtatatgatctcttaccttttattttctcataattgaatatgggagatcaggagtcacaaattcctttcttggcagtttctccatctacctctgacttagagttttattaaaaatagccctattcttcaatatttaaagatagaaagtcaattcatagcccttttgtgaaggaacaggtatactgaagaatgctgtaaataatgaataataagcatgttgatcactctaagtgacacaattctgtttgaaagtttaaatacatgaatgtgctgttcctaggcatgagagtctcataagcaactgagatagattgttactagtgtaaaaccaaatattcataaatatttttaatagatgtatgctcctgttagtcagggtcaagattaggctaggaattaaataacatcttacatatatgtagtggtctacttaggtttcattatttctccaggaagacagatggaatttttagaggcagattanatcctttatagttgttaaaataaaaanannatcatca

SEQ ID NO: 698170 - DNA, 140 bp, Homo sapiens
tgtatcctatatctaccgtcttttctcttctttctcttcaaattctcttcttcctatttccgtccctgaacacttgtaaatctgtccttttatgaaccatatcacctgaacctcttttaggttttttttttttttttttt

SEQ ID NO: 698171 - DNA, 136 bp, Homo sapiens
atgcgatctgatgatctcttttatttaatgtgatttcactttgcgatcaagaaaagactttgttgaatagcttactgttctccagtgtttgggaaaaaaatcaccctgcatcactttttggattgtcttgattttc

SEQ ID NO: 698172 - DNA, 251 bp, Homo sapiens
gaagaaccaaatataggatgccccaatagagagcagacaaatctagaggcaattgaatggcaaataagaattgtcttctcagcatggtgacatgagatgctcagctgttaatctactaaaaatatcattattaatgtcattcattttctgtttctttatgttaatagctttgttacattgtgcttgctctctcttaagagtttccttctttgctgtgcaagttacatacatcatcttcagaatccaaatca

SEQ ID NO: 698173 - DNA, 950 bp, Homo sapiens
  misc_feature (63)..(63): n is a, c, g, or t
  misc_feature (104)..(104): n is a, c, g, or t
  misc_feature (107)..(107): n is a, c, g, or t
  misc_feature (118)..(118): n is a, c, g, or t
  misc_feature (127)..(127): n is a, c, g, or t
  misc_feature (151)..(151): n is a, c, g, or t
  misc_feature (157)..(157): n is a, c, g, or t
  misc_feature (160)..(160): n is a, c, g, or t
  misc_feature (174)..(174): n is a, c, g, or t
  misc_feature (186)..(186): n is a, c, g, or t
  misc_feature (205)..(205): n is a, c, g, or t
  misc_feature (266)..(266): n is a, c, g, or t
  misc_feature (269)..(269): n is a, c, g, or t
  misc_feature (280)..(280): n is a, c, g, or t
  misc_feature (291)..(291): n is a, c, g, or t
  misc_feature (318)..(318): n is a, c, g, or t
  misc_feature (374)..(374): n is a, c, g, or t
  misc_feature (405)..(405): n is a, c, g, or t
  misc_feature (413)..(413): n is a, c, g, or t
  misc_feature (417)..(417): n is a, c, g, or t
  misc_feature (448)..(448): n is a, c, g, or t
  misc_feature (458)..(458): n is a, c, g, or t
  misc_feature (780)..(780): n is a, c, g, or t
  misc_feature (789)..(789): n is a, c, g, or t
  misc_feature (796)..(796): n is a, c, g, or t
  misc_feature (859)..(859): n is a, c, g, or t
  misc_feature (864)..(864): n is a, c, g, or t
  misc_feature (876)..(876): n is a, c, g, or t
  misc_feature (933)..(933): n is a, c, g, or t
cctgagtcgactctgcgccgcccgccgcgatggaggccgccgcccagttcttcgtcgagagcncggacgtggtctacggccccgaggccatcgaggcgcaatangantaccggacgangcgcgtcancgcgagggtggcgttctcaaagangccaantantaaggctcgctgantcaagcgggcancgtgaacctgggcctggangccgaaggccaagaagtgttcgtaaccttcaacgcggtgctgcccaaggtggcgcccaaanaantcgtgttcganggctgggaaanctcgtcgctgaaactggccgaagcgangcggcgcgcgaaagtgctggaatgggggctgcaagaacaaatgtggccgcacatgnaagccctgcggccccggccttctgtttaaanccccgaantcancgcggccaaacagagcgcgcgcgcgcacaanctcatcccangctcgcgtgcgcacagctgtgagcagatccgcaggacatccgagacttccggtctagcgcggggctggacaaagtcatagtgctgtggacggcgaacacggagcgcttctgtgaggtgattccaggcctcaacgacacagccgagaacctgctgcgcaccattgagctcggtctggaggtgtcgccctccacgctcttcgccgtggccagcatcctggagggctgtgccttcctcaatgggtctccgcagaacaccctggtgcccggagctcttgagctcgcgtggcagcaccgggtttttgtgggcggagatgacttcaantcaagccanaccaaantcaagtccgtgcttgtggacttcctcattggctccggcctcaagaccatgtccatcgtgagtnacaancacctgggcaanaacgatggggagaacctatcggcgccattgcagttccgctctaaggaggtgtccaanagcaacgtggtggacga

SEQ ID NO: 698174 - DNA, 864 bp, Homo sapiens
  misc_feature (151)..(151): n is a, c, g, or t
  misc_feature (161)..(161): n is a, c, g, or t
  misc_feature (244)..(244): n is a, c, g, or t
  misc_feature (246)..(246): n is a, c, g, or t
  misc_feature (305)..(306): n is a, c, g, or t
  misc_feature (330)..(331): n is a, c, g, or t
  misc_feature (339)..(340): n is a, c, g, or t
  misc_feature (351)..(351): n is a, c, g, or t
  misc_feature (357)..(357): n is a, c, g, or t
ggtggtcactgtggagaagcgggttcctcctccaacaccaaggctgtcaccacatttcaccatcactgtgcgtcccaagaacgcagcgctgggtcccgggagggctcagtccagcgagctgatcctcaaacgatgccttcccatccaccangcagcacaantatgccgcccctctccctacgtggagagtgaggatgcacccccacagaagaagataaagagcgaggcgtccccacgtccgtcnangagtgtcatccccccaaaggctaagagcttgagcccccgaaactctgactcggaggacnngtgagcgtcgcagaaaccacacanntcctgganngccagcgccgntacgancttcggtccagctttctcacgctcagggtaccacgtgccggagattcgtgtaaagaatgagaagtgccgcgcgaaggtggtcatgtgtgatgacaaggccactgagtatgtccattcccctcctaggccagaggagctaccgaagcttttgctggtaacaggaaaagatcgcaggcaagacagcggcagtcgctaacgaaaattgaacaggctcggactggctagacgcttctcaaaactggacaggtcactgccactttgcacattgtgattctatttctagacagagcatttgtgttgaccgttccggcactgtcgtgcttcacttgtcacacatcggtcccctgttcggcgtacggtctgcggtgggcagtaggaccaccagtgtgggggtcctgctgggaccttggtgaagcttggtcccaggatgcttgggtggcctgggctctcacgtcaccccctgaccggccaacgtggcccgtggagcccgggcgtgaccctgtgtgt

SEQ ID NO: 698175 - DNA, 123 bp, Homo sapiens
ccccttgagccaccggacccagccaatttttcttattttaaagactattttattaaatggctgggtgccgtggctcaagggtggaatcccaacactttgggagggggaaccttttaaagtgaa

SEQ ID NO: 698176 - DNA, 170 bp, Homo sapiens
ctggcatctgcctccagccacggatctgccagcatgccctccttccccagacagctgccagagaaccattcaggaaacacagtatctgctcgtggcacgtgcccgtgcttcaccgtacactgcctgtcaaagtcatggtccagttctccatagggcaaggcacgacaggg

SEQ ID NO: 698177 - DNA, 774 bp, Homo sapiens
  misc_feature (151)..(151): n is a, c, g, or t
  misc_feature (161)..(161): n is a, c, g, or t
  misc_feature (244)..(244): n is a, c, g, or t
  misc_feature (246)..(246): n is a, c, g, or t
  misc_feature (305)..(306): n is a, c, g, or t
  misc_feature (330)..(331): n is a, c, g, or t
  misc_feature (339)..(340): n is a, c, g, or t
  misc_feature (351)..(351): n is a, c, g, or t
  misc_feature (357)..(357): n is a, c, g, or t
  misc_feature (742)..(742): n is a, c, g, or t
ggtggtcactgtggagaagcgggttcctcctccaacaccaaggctgtcaccacatttcaccatcactgtgcgtcccaagaacgcagcgctgggtcccgggagggctcagtccagcgagctgatcctcaaacgatgccttcccatccaccangcagcacaantatgccgcccctctccctacgtggagagtgaggatgcacccccacagaagaagataaagagcgaggcgtccccacgtccgtcnangagtgtcatccccccaaaggctaagagcttgagcccccgaaactctgactcggaggacnngtgagcgtcgcagaaaccacacanntcctgganngccagcgccgntacgancttcggtccagctttctcacgctcagggtaccacgtgccggagctgggtagaacgaactgacgataggccagtcaacggtcggtcacttttgaacaaacggccacctgacgtagtgtccgactccgctccatgcgccgagtgagcatccagcgttttgcctggacataggatcaaacttgcaggtcacagacagcaagcatggttgctagagagagaatattgagacacgtctcgtgacttgactagcacgcgttctcgacatgctgggacagtcatcttgccacctttgccaccattttgagtttctctcttggtaccatgcaagcattcgtgtctgaccttcacgacctggtgggttgtacttctctgatgtcggtcccctgntcgatgtctcggctctgcggtgggccagtagg

SEQ ID NO: 698178 - DNA, 421 bp, Homo sapiens
agcggactgttcctatcacatcacaccccagcaaatgccaagctgtgcgggccttctaccccatttccactatttgcccccgcgcgcggcttttgctccccgcgcgcggcttttgctccacgccgcgcggcttatcgcccgcgcctccgcggcttttgcagctttttacccccgctgccgctgcttttgcggcttttgtcagcgccaccgctgcttttgcccccgcgccccggctttttgcccccgcgccgcggctttttgctcccagccgtcacggctttttgccgccgcggctttttgcgtcttttcgccccctactctgcggctttttgccgccgcgactttttccacggccgccgcggcttcttcccccgccgcgtccttttgccccccgcgcgaccttttcccgcgcgtttgtgcc

SEQ ID NO: 698179 - DNA, 109 bp, Homo sapiens
tgaagaaattcaatgaagcgcgggtaagcggggttggatgcagtcagcggcgtaggatgcagtcagcggcgtgggatgcagtcaggggctttggatgcagtcagcggcg

SEQ ID NO: 698180 - DNA, 351 bp, Homo sapiens
atgaaaggttcctgcggcgtcaggccccgatgctggctacctgtagagacctgcacttctatagccagcctgaagatctgtaagcttcctgagggagctgattcaccactgtgccaaggtgacacaacccaaggcacacattgaccctgacttctcccagaccccatacgcgctgggcttgagctcgacagcaagcgccgaggacgtttgctggagaattctcctgtgcctgtgagtgactatgtgtggaccagtctctcactggcccatgctcttgttgacagaccaatctgtgaccacgagtcctcccacagaagcctgctgcttgttctgagtggtcagaggccgcgc

SEQ ID NO: 698181 - DNA, 170 bp, Homo sapiens
gtcgatgcgcgggctgcatcaaatgagtccgtttgcaatgacggcaccaaattctagaggcttgtgtacaggagagggggtgtgagcagcgcttgtgaagctccagactctcgggtcctaatgggcccattgatttttatttcaatactgttgatggaagcgtcgcgcat

SEQ ID NO: 698182 - DNA, 242 bp, Homo sapiens
  misc_feature (56)..(56): n is a, c, g, or t
ccccccggaaacccttttttttccgggccttcccggaacttttttggggggggccnaacccggcccttaagggggtgggttggttgaggtgggttaaaaggccccaaattaaagggttttttttttttccctttttgtccaagagggggccggtttttttttttggcccgttttgggggtgggggaaaccaaggttgccccccctaacccgggattttttttttgtggggtgtttttcccca

SEQ ID NO: 698183 - DNA, 150 bp, Homo sapiens
atcagcttcctttggactagtctcttagctaagacccacaaatacatttcgaacactttacctattaattacgcccattactggagtcctcagccaccacctcctaaacctccctctattcccacccagtcgtgcccatcccacctcaca

SEQ ID NO: 698184 - DNA, 119 bp, Homo sapiens
gcccctatggaaagggtgcaacccgcctaccatgagttactattaactgtattagtaggtatggtgtagtccatacttcagcactcgtaaggagtactgctagctagaatgttagaggt

SEQ ID NO: 698185 - DNA, 469 bp, Homo sapiens
ccacatgactcagcctccataatcacattcctttaaggctcaaagtaatttaaagttccaacaacattgattctgaattacttatttttgtagacccttgcaaatgcacccacaggcagcagattgctgggcacacagccatctggggagtggacctccactgtcgctgggcccactggcattggggacagcatttacatgggagagaaatcagccactgtgtatgcattgttgcaggttttcttttgctcacagccaaacctaatcctaactcatacaagtgggaagttgtgatcagagggagaatctagtctgtagaagcattaaatggttaagttagcaaattgaggagaaacatcacaggttatttatttatttagagacagggtctggctctgtcacccaggctggtttgcagtgagtcgagactgagccattgcgcttcagcctgggcaacagagcaagactc

SEQ ID NO: 698186 - DNA, 350 bp, Homo sapiens
ttgttcagctgaatagcgtcatctaaattacagataaggcaacttatgcgaagcctaaatgcccgatttacttctttggggatccagatattaagttagggcataacgcataaaatggaatgcacagctgttggcttctaggaatacaaacaggaggacataacccgagggcggctaatgtcttagcgattgggcgaagtacttcattcccagctgtgtgttaatctgtcttaccaaacaataacaaactctttatttatgacagaggctgagaaattccatttgtgcccagcaaaagttaaaagcacattaggaaatatttgcaatgtcagattcagtaatttgtcccg

SEQ ID NO: 698187 - DNA, 380 bp, Homo sapiens
gctcaacactgccctgatcacggcaacacgatctgctggttgaggagagtcgaagaatccccacagaagcatcgcaagtgctacgcagctggcagcagtagccaccagacacgcccaggattttttttgatagggagggggtgtggcgggcatcatgggctctgggaggggaaaacgtcgtcgtatggcaacggatcgatgcccacgtgcacgatcaatcttttcgggggaccttgaaagccgcttcgagttcgccgacgcccgtgctgctgcatgagctggaagcgcccagctatctcttcaggctcccgcctggggcccatgcaagatagaggcgtaagttgtctcccggggaccccgcgtccaatttggtaaatcag

SEQ ID NO: 698188 - DNA, 483 bp, Homo sapiens
  misc_feature (92)..(92): n is a, c, g, or t
  misc_feature (108)..(108): n is a, c, g, or t
  misc_feature (313)..(313): n is a, c, g, or t
  misc_feature (366)..(366): n is a, c, g, or t
  misc_feature (384)..(384): n is a, c, g, or t
  misc_feature (390)..(390): n is a, c, g, or t
  misc_feature (397)..(397): n is a, c, g, or t
  misc_feature (422)..(422): n is a, c, g, or t
  misc_feature (430)..(430): n is a, c, g, or t
  misc_feature (466)..(466): n is a, c, g, or t
taagagacagggtcttcttccatcgcccgggcaggagtgcagtgggtgccatcatggctttgtgggtaggccttgaagctcttggggctcangcagtcctttcacctnagcctcccgagtagctgggactacagacgtgcaccaccatacctggttaactttttaatttaaatttttgtagagatggggtctcgttctgttgtccgggctggtctagaattcctgggcctcaagcaatcctcccgccttggccttcttcaaagcagtagggaatacaagcatggggccaccgtgcttgaatgggatttaggantcataggaggggggcaaaaagatccatgagggaagtttttgttttcttctganttttgaagtttgctggtnacattngcagggnttttcttagttttaggaggggatgntccccgtntcacttgtttaaggaggaggttgatgcccggggggnaacaggtgggggaaggg

SEQ ID NO: 698189 - DNA, 298 bp, Homo sapiens
  misc_feature (30)..(30): n is a, c, g, or t
gtctactattactattatattctcggccgnttgtctatatgtaaataatttaattctctttgtaggcttaaaagctgtcctatttttaagaaagcgttctaagctcattacccattacctaattaatctcaaacatataactgatctcctcacacccaattggaccaatctatcaccctatagaagaactaatgttagtataagtaacatgaaaacattctcctccgcataagcctgcttcagattataacactgaactgacaattaacagcccaatatctacaataaaaaaaaaaaa

SEQ ID NO: 698190 - DNA, 259 bp, Homo sapiens
cagatgtttggatcaggacctccccaatgggggcaactgccgctaattaaaggttctgtttgtttccaaccattaaagtccctaccgtgatttgagttcagacccggagtaatcccgggcggtttctttatacttaaaattccccccctgtgggaaaggccaaaagaaataaggcttattttccaaaggcccttcccccgtaaatgatatcattcccaacttagtattatacccccccccccccaagaacagggtttta

SEQ ID NO: 698191 - DNA, 244 bp, Homo sapiens
gtcattccaaataataaatagcgatagttacagagaagtcacctatgcaatccataaaagccaccccaattcatctctaaagagaatgacccaatcctctcccaagtccacacagggaagagtgatagcattgctttcgtgtaaattatgtaatgcaaaatttttttaatcttcgccttaatactttaatatattgaatatatattgaatgatgagccttcgtgccccaccttcccctccaaca

SEQ ID NO: 698192 - DNA, 789 bp, Homo sapiens
  misc_feature (531)..(531): n is a, c, g, or t
actatcaaatgaaatgaaagctaagaataaagatgtaaaagatacagaaaagaaatgaataaaattacaaaatttatgaggagaataaagaaaaatttacacagctagattggaagatgttcaagttagagaaaagttaaaacatgccacgagtaaagccaaaaaactggagaaacaattcaaaaagataaagacacgggtggaagaatttaaaagtatacctgccaaggagtaacaatatcattaatgaaacaacaaccagaaacaatgccctcgagaaggaaaaaaagagaaccgacgaacacaaaacttacaggaagttatggatagccttaaacaggaaacacaagggcttcagaaacgaaaaacggaaacgtcgagagaaagaaccttatgggtttcagcaaatcggtaaatgaagcaacgttccaacacgatggatgtagcccagtcagaacttggatatctatctcagtcgtcataatactggcagctgtctcaaattaactaaggctaaggaagctctaaatnggcaggctttcctggaaggacttcttcaacaggaagtggacaaagctggcaattccagaggattttaagaacggaaaacttcccttcaaattgaaaaaacacacatgaaaaaaaaaaattttgtggggcgcgtccagggccctaaaaagctttttaacccattcttggggcgcccggcccattatgttatgccacgctcgccacgcggtcccaagaaacctggccacactggcggggttccccccataaaaacccggg

SEQ ID NO: 698193 - DNA, 995 bp, Homo sapiens
tgtggaaaaataatagggactgtccttgtcaccatgtagatcagcgtcgcccattttggcattccggccggtcggggagcctcccagtctgcgggcatgaaggcgaggagcgagggcgagagcttcgcgggctcggtggcaaacgtggcactaacgagttggctgggtggtagactgactcgcccgagcatccatatctggggctgtctgccaagcagcaggtttaacaatgctggatgccttcggtagcctcactaagcacaggtgggtgccatgtctgacaggcactatcccgcagactagctccctctaggcagcaggtcccatgttttgctatcaggatgggtacacgggtgcgcttgcctagcccgaagactcaaggatcccgagccaagcgaggaaatccgaagtcgatcttggggagaccgcccagatcatgtccacaggttctccagcgtccaggaatgtctggttgtattgacaccactggcgtaatcgacaactttacctgtgcccgacggaaacacgtcccgtgaatcaactctagaactagcctagtgttcaattcatcatcgtcccgtgccaaatgatcaatcgcacctaatataagtgcccataaggacctggtcgtgcttctaggacacaaggcctctagggtgtatgcatattccaggggttgcccacattcaaggaacctggcgtataatagagcactggaaagagaccaatggacgcgaggcattttgaacaaagatttcatccccgggaagacgaaaatccccattcagtggtcgaagtcgtgtgggcagtggtgcctttaggccggaacacgacaattctggaaccacgtcacatgcgggtgcccacaccggggcggttaaaggccttacacagtgttaagaccggtcgtggacttcccggttgccgaaagcaaggaggcttcaaacaaggactggagatcactcggacaggggccttcaatgcagaaaggcgag

SEQ ID NO: 698194 - DNA, 416 bp, Homo sapiens
cggcaggcaggtctgtctgtagagacaagacttcctactgacatccaagctactcgttgccacagctgctccaaggatggcaataatgagtgcgagctgcatcagagatgagagattgaactttaagaaaaatgtcgccgggcgcggtggctcacgcctgtagtcccagcactttgggaggccaaggtgggcagatcacctgaggtcaggaggtaaagaccagcctggccaacatggtgaaaccctgtctctactaaaaatacaaaaaaaaatgggttgggcatgtgggcgcacatctgtaatcccagctactcaggaggctgagccaggagattcacttgaaccggggaggcagaggttgcggtgagccgagatcgcgccactgcaatccagcctgggcaacaagagtgaaaccc

SEQ ID NO: 698195 - DNA, 172 bp, Homo sapiens
cgtctacgactgactggcaggtctcgcatgaatttgccttgaatttcaaccccagttaaccctactgtgcaggcatcagggcattgtggatgcctaccgccaagccctgccccaaatccaaatgcagggaacagcttgtctgagtcatagtcctaagccacggtcaacccac

SEQ ID NO: 698196 - DNA, 425 bp, Homo sapiens
cacataggggtgagcttggtgtgcacagaagcaaaaaactgagggcggtgaactgctgcctagatttcaaatggtgtgtcgaaattgatagaatctcaaagaggaactggctgtaagaaaaggacactcattgaaaaactgtagtactgcatggcaaaaagaaaaagagaaaaatatatcaaattaaactaaaactctccatacttttaattagtgcgccgttagacccataaagatcttggtggccgcctaggccaagtcggctttagattttagcaagctattgcatgcgcccgcattttggggctctttggccaattcccccatttgtgggtctaataaaaatacacgggacgacgtttaacagccggggtttggcccttgggctccctttatccccctggcgggacttccccttgccgcct

SEQ ID NO: 698197 - DNA, 463 bp, Homo sapiens
catacaacgcctcagtggatccagcaacatcttttgagcctggagcttgattggggcccttggattctttggggccttgcttctctttctgtgccagacttctctatggtggccgtaggtgatgcttctccatgcgcatttccagccactacaaggtccatgccccagctgggatccttcttcccaccaagcactaacctggggtggccgtgatccgaccagttacatcggttggcacccgcaatggtcccggggctgaagagattgtccggggagttccctgggccgtctcgccggtttggcttccgggcagcgggtttcgcgcgctacgttgttcctgtcgcttgcgctgcgcttggccgtgtgttgttacacgttatcgtgcccgccgtgtgcgtgcgtgttcgactgtctttctctcgctcgcgtcggtccgcttcacagtcgtgtcaccggcgtcccg

SEQ ID NO: 698198 - DNA, 232 bp, Homo sapiens
tgctaattctatacccagtcaaaccggtcatcgtataagacatcactgaagatatcaaggtctgggtctaacatatacctcccatgcatcctctctcaaaaaattattggaaaactgccctccaggaaaagaacactccagacaattagacgtatccaacaacaggacgacgacagtgacagagacattcccagggtaagattcccggattctaaatacgctgatgccacac

SEQ ID NO: 698199 - DNA, 618 bp, Homo sapiens
cactcgaccttactatcagacaaccttagacaatccatatacccaaataaagtataagcgatatgaaattgaaacctggcgcaatagatatagtagccgaaagggaaagatgaaaaattataaccaggcatagtatatgaaggactaacccctataccttctgtataatgaattaactataaataactttgcatggagagccaaagctatgacctgagaaaccagacgagctacctaagaacagctaaaagagcacacctgtctatgtagcaaaatagcgggaagatttataggtagaggcgacaaacctaccgagcctgttgatagctggttgtccaagataggatcttagttcaactttaaatatgcccacagaaccatataaatacccttgtaaatttaactgttagtgcaaagaggaacagctctttggacactaggacataaccttgtagagagagtatgtaacacccatagtaggcctatatgcagtcaccaattaagaaagcgttcaagctgaacacccactacctacaataataccatacatatctgactcctacactcaattggaccaatctatcaccctatatgagaactaatgttagtatacgtctg

SEQ ID NO: 698200 - DNA, 1627 bp, Homo sapiens
atgagtgtgatgatacatggcggattgaggaggatgatggtgaatgggcatgacgctatgagagattgaactgctagggggttgccgtgtcactgatgaatagagtcgcctggtcggtaccgtattatgaaccagtgacccccgtagttggtgagtcgaataagacaacactatgaccgatttatagggggagcacaccgtattatagggaccttctccgatagaggtgatgctcccacacacacaggtcgtggctgagccaacacaatagaaagacaacggcgccgtgtggtgtgttgaagatcgtgcggcgggcacccacgtgattacacttattataccgggtgtccctaaaagggggtatactcgaacgtccccatctgagatttggtccagaataatgttccgcgcctaacccgagatgagggggttgctctcacgcctgaaaaggggtgcgataatgtgacctggtggcggttgtggaatcaatcaacccgggacatcctcaccgggagcaacatcacgcaagggttggttcacaaatccacgcatactgaggcactctgtacaaattgtctcctgcgcgcgcgggacacacacgtgtgagagcaggacacagggcagtccccccccggagggggcgtccactctgtctcgcgcacgcgcgggggacgacaccaacgaccggagaaccggggcacccccctccggatatgggcaacgggggccccacctgtaaaataggtggtttttgtgttgctttgggggaaagtagccgggaggctcttctttatgatgggtagtaaaaaactgttggcgccttcatcctggagattccaaagctggtaacacccacagacccccaagtggcactgtttttccctcggaaagagaataaatatgttccccctcatactcgttatttgttgacccacacattgatatttcgtggccacaatgggtttaatgggttatagaatgtgagatgaatccgcggtgaaaattcttgtcggccttatatgggaattaacacacgctgtgaacacacgaaaagattattgagccacgaggttatcgccccctccctgattcctatgtcccgccaacacagaatggtgttgtctgttaaattgtgcgttgttctccctgtgtgtgagagtctctctgcacatcacattgtgtgaaaagtggtcccggggcacaaaggtggtatatctcctgaaggttctggcacacccacgtggtctccacaaacacactcccactcacttcctaagtgggagaatataaacttgagttcttaagggagatgagatataaagaacaccgcgttgaagagaaactgaaagagaagagaagaaagctgaacttcccactcaccctatttccccacgaggttttagaccctagtgctaagagagaattggtgctgtgaaaatatacctggagtgctcggcgctcacccgcgcgtaggcctcaagaaccagatgtttgacgaagacgatccggaccatcctctgcccccctcccctgaaaaagaaggaagaggaaatgcctcgctgttgtaaaagtttcagcccctcgtttttggtcctgtccccttggaacccttgtacgcaattgctca

SEQ ID NO: 698201 - DNA, 91 bp, Homo sapiens
gcctactactactactactgctcgaattcaagcttctaacgatgtacggggacatgagcaaaaaaatatgaaaaaaaagttgtactgcacc

SEQ ID NO: 698202 - DNA, 319 bp, Homo sapiens
  misc_feature (14)..(14): n is a, c, g, or t
ccctttttgaagantccggcagagtaaggtcccactgattcttgggattttccttactaccagctttagagtctgctttctcagatctgttaagtcagttaccacttactcatctgcttttcagcttccaaaattaattttattgctgctgattcctctattgtttttcctgttcttgtgttttgtgctttaaaaaatgctattattttagctttagcgatgtctctaagtgggtgaaagaggtatgtgaacaagacccccatctttgcccagatgtcctgatattatttctcccttactaagcttttaatgagtattg

SEQ ID NO: 698203 - DNA, 782 bp, Homo sapiens
  misc_feature (13)..(13): n is a, c, g, or t
  misc_feature (114)..(115): n is a, c, g, or t
  misc_feature (122)..(122): n is a, c, g, or t
  misc_feature (130)..(130): n is a, c, g, or t
  misc_feature (168)..(168): n is a, c, g, or t
  misc_feature (170)..(170): n is a, c, g, or t
  misc_feature (172)..(173): n is a, c, g, or t
  misc_feature (179)..(179): n is a, c, g, or t
  misc_feature (201)..(201): n is a, c, g, or t
  misc_feature (204)..(204): n is a, c, g, or t
  misc_feature (230)..(230): n is a, c, g, or t
  misc_feature (236)..(236): n is a, c, g, or t
  misc_feature (238)..(238): n is a, c, g, or t
  misc_feature (245)..(245): n is a, c, g, or t
  misc_feature (259)..(259): n is a, c, g, or t
  misc_feature (264)..(264): n is a, c, g, or t
  misc_feature (268)..(268): n is a, c, g, or t
  misc_feature (271)..(272): n is a, c, g, or t
  misc_feature (275)..(275): n is a, c, g, or t
  misc_feature (285)..(285): n is a, c, g, or t
  misc_feature (294)..(294): n is a, c, g, or t
  misc_feature (304)..(304): n is a, c, g, or t
  misc_feature (308)..(308): n is a, c, g, or t
  misc_feature (332)..(332): n is a, c, g, or t
  misc_feature (340)..(340): n is a, c, g, or t
  misc_feature (367)..(367): n is a, c, g, or t
  misc_feature (394)..(394): n is a, c, g, or t
  misc_feature (403)..(403): n is a, c, g, or t
  misc_feature (421)..(421): n is a, c, g, or t
  misc_feature (751)..(751): n is a, c, g, or t
cagctcaaaatanggcactaacatgatgagcatgcatgggctttggggggtgctctgtggtcttatggtgatctagaggggcgctgtccattagggctttctgtgatgatgagnnggttctncttctggnctattcgatggggtgaccgctaatcatgcttgggtctngngnncttggnttgttgctggtgtggttggggnggngggttttgggtgttgactggtttggntttggntnttaaggngttacatgtgggtngtggntgcngtnnggnggggttcggngctgggttnttgctgtgtnctcntgttaggcatactcgtggtctctnctactctnccttcatcgcgcctgtgacttcttgcnatttttttttgtttgtgtcattttctnatgtgttcntcctgggctctgggctcngggtgggcggatgctttgtctactttgcgattgctgtgtccccagtgcttggcatgggagctggtgcagagtaaatacatcataaatattttgtgaatgaatgaatgaatgaatgaccatgattaataaaaggatatagctgctcagtctggtgctgataatggtggtagtgatcaaaagggttaaaccacaggtcattaaatgaaaacagctaacttagtgcttacaggaaccatacactccctgtgtataaacatgccggtgtgtgtgtacaggtgtgtgtgtgcaaaagcataataatgtgtttgcaaaggtttgcatttgtgtagncatgtgtagatatgtatgcttatgtgttttt

SEQ ID NO: 698204 - DNA, 842 bp, Homo sapiens
  misc_feature (197)..(197): n is a, c, g, or t
  misc_feature (226)..(226): n is a, c, g, or t
  misc_feature (323)..(323): n is a, c, g, or t
ggtcagtgaccgtaaggcaggagaccggggtgatggtgttgaaccggtcaggggatgtggcaggaaagagtgtgactgctgccctcggctccagaaacttgccgtgattccgtgagagccaatgacctgtggagcgaagtcgtgcgtgcccgttgactctgctcacatgtgactagtataccgtccataacactggntgcctcggtttgacattcaggtcgaacgnttacgagcacgtagagtccaacagactgttacttgtgctcacatcgagtggtcatcgcaagtggcgtgtcagtgtggctcattgtgcatcgcccgantgacagcctgttgaccagtgacatgatgcgacgaactgtgcacacgtagtctacaggacagcgggtctacgtggcacaggagaaagccaccgaagtgcaacctgggaacggcagacaatggggtgctcacgactattccgcagtgcgacatatacaggcacgtacgtgatcttaacgtgcgagtgaggatccaaggaacgatttacgctctgaacatggacgtgcgactattggatcaatggaagcctctctgcggatgagagatcaggaatgactgcgcgaaggtgactaccaagccatcactggaaacactcatggtggcataaggtcgtgcacgcatagtggtagatggcgcaatactgcctgacgaggcccgcaaacgggaaccatgatgcgcactgtgccggaacattggtggaactcaagttcaggtgtgacagctactgcagactgcatgcaggccaaacgggcatgtgatgtggcttccacactgggctacctgtgatggtgagtgtggaa

SEQ ID NO: 698205 - DNA, 274 bp, Homo sapiens
tttcccctagggcccccaaaccccgcagttgtggaacccgtgaatcctccccaacgcctggtttccaaatagcacaccccaaaaccctggttttggccgttcgaatatgtgaaaactgacctgtccagggaaggccaaaaaagactgtgggattctggggcccccccaaaaatgggttggtttccagtgtgccttggggaacaaaaggggcaagtaaaaaaccaaacctcccaaccataagttatagccattcagggccccctagcagggttta

SEQ ID NO: 698206 - DNA, 333 bp, Homo sapiens
tgtgttcacaggatcttattgtgtggtgttatggttgacactaatgtagtcgagcatagccatactacaaaacatgtaaacgatgaggtaaagccctacacaaaaacacacggttagtttgcctacaaaatgagcacacaatgagtcacaaacgtttttagggtttggttttgaaaacacgaaaacaaacgcaagatcaatttcccatctatgatgcatacaaatatggacaaacaaagcctatctcgttacgagtttgggttgctgatgacgaggtttgcatttcactaagtccgttaggggattcgtgtctagtcataacaccacacaatt

SEQ ID NO: 698207 - DNA, 1520 bp, Homo sapiens
  misc_feature (57)..(57): n is a, c, g, or t
atgggtagacccacgcgtccgcccacgcgtacagcagagacgcagcatgggcgccgncatgcgcgacggagccgccgccactgctctgcaacattcatgcaactggacagcgcccgcgcccgcgaacctgcctccagttattccatgactcacagaggcaataagcacgacctaccagtcactgacgcccagataactatgcaagtgcccgccaatatcctatccggctatcaacacgcgacctggatctcgaccgcacaacgcacctagctgcgcgccgctaggccacgcccgcgcatggccgaccgagcccacacacgcgtccgtacagatagactcagcgccccactctccaccgccagcgacagaactacctgcggcacacaaggctggcacacctctctaggtcccacccgtaccctaattcgtagcccggaatcccacccacttcagacacatcgaatagcgtccgcggccgcacctcgccatccacgcccgggcgcatccacgacacgcacgccctagcacatccctcgccctcgcgcacacccacaggttaaccccgcacccccggcgccaccatgacggcccactcgcgacgcaggccgcaataccgagaccactgggcggcaccgccaagccccggccgcaccaccctctcccctagtccggaccccgatcgccacacacgcgaaccacgccccacatacgcctagcacaccactgtgccctagcacacactgacacgcgcaactcacgatcccgacgaacctacacgacggttcatgcgcccccacgcccccgaccaccgcaacgccctcatacccctattgaccacggcccacaccccgatctacagccccactcccccactccgagccacccctcacaactcacacccactcctactccacacccacaactgcgcccaatccatacatccacctcaccaacacacaccccccctcccccctctaccaacaccacagcacaccacccagccccccaccccatccctccacccccacaccacccctcaaaaccccactctctatcaccaccgccctcaagcggcgggccgcggcacgacagacgccacgcacactcgaccgagcagtcgccgccgggtctcgcgcgccggagcaggagccagcagcccggtcggccctcccccaccaccccgcgcccgcgcccgcccaccgacgcccacgcccacctagcgatacaacaacctacagcatcgaacctcagaaccccatatcactcgccacctcccacacctactgccaccagcaacagcactactccatcaaggccacactatcccaaacgatcacccacaacctctccaccacgcacaccgaaccaccaccgacaatacactacccagaccaactactcacgctacatccaacataccaactacatcaccacactcacacagcccgatacatccacacacactaagtcgtatcatcccactcatcaagacaagtacaacaatacacaaagcacatcat

SEQ ID NO: 698208 - DNA, 192 bp, Homo sapiens
atcggcatggggtcctgtagcactggaagtatcgcatgttgctaatgacaattgccatgatgatgccgtagataggcgcagctatacagaaggatgatgctggtagtggtagagcattacgggtaaggagtggcaaggcgaaagaaatgagaaagaaaccgtccttcctgcacagtaagtaccccgcaaatc

SEQ ID NO: 698209 - DNA, 360 bp, Homo sapiens
tacccctttctcccagacaagggtaggcaacataccataatggctaaaaacatgatgaagaacactgaaactcacttggctgtgacaccttgagccatttctctgtgcctcagtttcttcatctgtgacaggaggataataataatacttatccgtattagttgggtctacccagaaacagacaatgagacagacagaagtgcaagagatttattagtttgctgtgaaaattttggggcgaggagggtgaagaaagtagaattggagacagagcctcagactatgaggcaaatcagacaaaggcctgccaacctaatggagagctctgaaataaagattacccattaggggagttcccac

SEQ ID NO: 698210 - DNA, 253 bp, Homo sapiens
gggcagtgaatcgagctcgttacccctccgattatatgggtataactatcatgacataattacataatgcattgcgctgtgacgatacgttgtaataatggtcgtgacttggaaagcccccggggtggccagctcggctcgactaaggatggcttagagctgtgcctaggactccacgctcatgcgccgaataataggtatagtgttccaatgtcgtttgtggtttgtatataataatcgccggtcacgagat

SEQ ID NO: 698211 - DNA, 204 bp, Homo sapiens
caagtactactgcacagacacacacacacaaaaaaacggctttgagttgtaatactttacagtggatccatccatggacaagtgtatttgtcttctgttttctaaatcacaatagtctgtgtttcactacctggtggtatatattcgtagtcatcatataggaggcctaggattggatattgtgtcctgtactttttagtggta

SEQ ID NO: 698212 - DNA, 999 bp, Homo sapiens
  misc_feature (271)..(271): n is a, c, g, or t
  misc_feature (772)..(772): n is a, c, g, or t
gccgaagcgggagcggtcaatatgaagtttaatccctttgtgacttcctgaccgaagacaagaatcgctgaaaggcatttcaatgctgcctacccacattcgaacggaatgatactgtcttccccgtcgtttccataagacgctgagacagaatgctacaactgtgcgatccagtgcccatccgaaacggatgactgaatgttcatcgttgttccggtgtgacaccttactaagaaggtcatgcaacactggcataaggttagtccacggnattacaggagacaggaagagtactagtttagttcgtatcaattgaacctggtggttgcattgcgtggacaagacgggtctaaagtgggcagcaagacgtgtccatcgttaccggcatttcagcctcgcatgcagacgggtaggttaatcacctacgagctagaaatcttggagcatacatgagcccgtcgaataaaggaatccttcggaagcggtaaacgccgaggactcttcgtccgaagctgaaggatgaggcaaacacaaggcggctaaatacgaatagggacaggaagaccgagttgcagacatgatgccagtgaatacaagttagatccttagtatacaaccctgtggtactttaaacagagctttgaaacatcaaaaggtagaaaaagatgagaagagacccaataacaacagatcgggggggccgctccataggtgctgcgcaggcgagtgagagcggtagaaattcagaagcgcgagagcgcagaaggtgggnccccaatgtgtctggtgcatgtggcgtcggtggcgcccgcgtgtgtaacccaacacgtgtgggtccgatgaggtgctagatggtgggcgggcataggaatctagggccgcgagggatgcaacgcgcatattgaggcgtaaaagcaaccgaagttgttgatcttcgcacggagaaaacacggggggtaaaaagccccggggaacttgatggagcgttggcggcaaaag

SEQ ID NO: 698213 - DNA, 446 bp, Homo sapiens
  misc_feature (15)..(15): n is a, c, g, or t
  misc_feature (41)..(41): n is a, c, g, or t
  misc_feature (67)..(67): n is a, c, g, or t
  misc_feature (82)..(82): n is a, c, g, or t
gggtgcccacagtgnggtcggaacttcccctacctagtccnactcggactcacacactaaggtcccnctgaaaaacatcccnccccagacacaccccaaaatagtgctttaacaggtttttaggtattcccttaatcccagtcaagttgacaccctaaaattaagtcccataagtctaccctttgacccacgtaccccatatgcatttccttaaactatacttagtttccaaataaagacattaacaaaggaatagttccacctaacatgatgcaactcatatgatgcaaatgtcctttgtacaacccaaaaatgtgctaaacctttccccagaattcgactgtcaggattttgacatttcaagattgattttcaggattttagacttccgggattttgatattttggatttcaacatttaggattgtgtgttttgggattatgat

SEQ ID NO: 698214 - DNA, 207 bp, Homo sapiens
atctttatcatcgtcatgctgttgctcgtgtcccccgataggcctgtgcatccttactttagtcacacactgccagattgaaactctcactggtttgtgtcgccttactcccgcctaaaatgcacgaatttctggcaacccggtgacagaccaaaaactaacgtgcatcaataaacagaacatttatctactgacccgaatctctag

SEQ ID NO: 698215 - DNA, 187 bp, Homo sapiens
agaccactctcaaagaccccaaatccgtgccgcaggccctcctgagaagtagcccttgtacacctcgtcagagtgctgtacagatgccagaagaccacacatgctagccttctcagccagtagacacttgataacagtacgaacttgtccatcacgaggcctaggggacagcacggcaggatgccga

SEQ ID NO: 698216 - DNA, 149 bp, Homo sapiens
ggtgaaagtggctggtcagacgtgtagaattgcatctgtttttaagcctaatgtggggacagctcatgagtgcaagtacgtcttgtgatgtagttattatacgaatgggggcttcaatcgggagtactacatcgcttgtcaacgctcaa

SEQ ID NO: 698217 - DNA, 277 bp, Homo sapiens
tctagaggatcccgtgatattccagagagtcgtgctcttacggacgaggacgtgacgatgatcaacgcatattactgccgtttgtcatccaggacacttgggacacgcttcattgctgaagcgctgcgagttgtcgcgtacatcttgcggtcagcatgctgcgatctgcgtagcattccaggtgcgcatcgatggcgggcttcgggaccagcagcacaaacagcaggtcgaccggggcccgtcgattgcgtcgaaatcaatcgggagcgtcccaggt

SEQ ID NO: 698218 - DNA, 387 bp, Homo sapiens
cgtctcatatactaccaaatcgggacttaaattgtctcataaagctcaataagtaaatagagaagatagactttattggcttacttaaacataattattttaaaataacaagaggagtccctgtgttgataaatgttttatatcttatgctgctatgtctagaatgccttgtgtaatattatgaattagctagtaaatggacttcgcaaaggatgctcagtggggcctgtcagccaagggctaagtggatagcctttctgacattctactgctttttagctgttgtgtcggggacgtagatgtctgtagtctcattgttagggctgaaagatatgtttccatgaggacccagcagagtaatagttccggtagctatgatgaaggacg

SEQ ID NO: 698219 - DNA, 509 bp, Homo sapiens
  misc_feature (488)..(488): n is a, c, g, or t
  misc_feature (500)..(500): n is a, c, g, or t
ttttttcctcaaaaataaataaataaataaataaatacgtacatacatacacacatacatacaaacatatagaaatccccaaagaggccaatagtgacgagaaggtgaaaattgcaggcccatggggagttactgattttttcatctcctccctccacgggagactttattttctgccaatggctattgccattagagggcagagtgaccccagagctgagttgggcaggggggtggacagagaggagaggacaaggagggcaatggagcatcagtacctgcccacagccttggtccctgggggctagactgctcaactgtggagcaattcattatactgaaaatgtgcttgttgttgaaaatttgtctgcatgttaatgcctcacccccaaacccttttctctctcactctctggcctccaacttcagattgacttttcaatagtttttctaagaccttggaactgaatgttctcttcagccaaaantggggactttcncagaaagtt

SEQ ID NO: 698220 - DNA, 575 bp, Homo sapiens
gaaggtgagcggttgtggtcggttgccgagctccagcagcagtcggttctctacggagaacccgggagtaggagactcagaatcgaatctcttctctctccccttcttgtgagatttttttgatcttcatgctacattttcggatttgtgagaaaccttaccatcaaacgacgatggccatgtcaacgttaccgaactaggacagatcctcgctccgatgagactcccggtgtattcattgggagatctcaatcactctatgtggtcgagagaatgtctgatgtggaggcaatcttttcgaagtatggcgaacaacttgtgggctgctctgttcatacatgggctttgccttcgttcagtatgttaatgagagaaatgcccgggctgctgtagcaggagaggatggcagaatgacttgctggccaggtgttgtagatgattaacctgggctgcagagccaaaagtgaaccgaggagaagcaggtgtgaaacgattctgcagctggagatgtacggctcctcttttgactgggactatgactttcaacgtggactattatgataggatgtacacgt

SEQ ID NO: 698221 - DNA, 151 bp, Homo sapiens
aggatttgtaattccttactgtaacggagcttagagccagggatgatgctctggtgtggccagcactctgcaactgagaaatgttcagactgcacggaaagatgatcagctcttctccacatcactgaaggcacatgctcgcccctaaaca

SEQ ID NO: 698222 - DNA, 524 bp, Homo sapiens
aaatctatgatgatgatagaatatcttctcctcgtcgcctcgtacgagatatagacaccatatattatatagtactctatacgagagactccactcgcgcgcacactatattatgctctctttatatcgcgcgctctctctatagataagagacgagacgaggataatatacttatcccgcacgtggtagtataccagtcggctgccgctcactattataatttcttgtgtgtgtttgtgtctacatagacatatatataggcgatatatgatgtatgtgtcgtgtgtgagagcagatataatctcttcttgtcgtgtgtgtgcgtggcgagagaaataaatttgtgtgtgtatatttctcgctgtaggaatacgtatacatatataagaatatatgtgggggtgctctccacacttcgccatatttatttttactctccccgcgcgtctttctctccacccacatcttaataaaacacacaaacaccctttttttcccccccaaaacaaataacaaacaaaca

SEQ ID NO: 698223 - DNA, 726 bp, Homo sapiens
gaggcaccacctgctcttaatgttagaactaaaggtcagactttgactcacggaacaaagaaaaataacatgcacagatcggagcagagagcatataaatatacaaaatatgtgtaagaaaaccaaggtccagagaggcgggccagcaacaaaggtccagagaggcgggccagcaaccaaggaaagactgatttcagaggctcaggccaggcctagtgcagctcgacgacgtttagtgcaatgttccgcggtctcttgcatacctggacgctactgtttctccaactcagtcacatagatcaggtggtcctcgggagacttgccgtgggtcttactaaggtgcagtttgactgcgtgcttgctcgcaaaagtccggttgcaggagcttacattggaatgtggagcccaagtcttcctcggtggcccccagtgggcccagagttttgtatggtgaggacttacgaaacattctgctgttcttgaatctgattgagtggcagcttggagagatccttcaggctgaagcccaagtgtgtctccaaatgacttcatgtatgtagaagcagttctgaactgagaggcacaatcgtatgcaaaagaacaacaggatgccctgtgtccaggttctattaggaatatcgtcccccatgtccacctcaactggtacattcaacattgggccaagccagatgctgatggtggtcaatggaagaggccaagataaag

SEQ ID NO: 698224 - DNA, 227 bp, Homo sapiens
ttccaaatgggcgagtcttctaccgtgtctgttccatgtaggaggagatgtctatctcatcaggcagctcactaatatttgacctcaaagcgatcctgcacatcatatgatggatcttggcatcattcatcatctggacacaaaatgtgatagccaacagcccttggttgccacaaccggcctgctctggccacccgactgcaggtagcgtgtcacgactcctcagg

SEQ ID NO: 698225 - DNA, 134 bp, Homo sapiens
aggatcccggcaacacccgctatgtggggtgttggggttggggtccctgtattggtggtggtgctgggtgtcatgggttggttggtctgtgtgccagtgtgtgttggtgttggggtccctgtagcggggtgttg

SEQ ID NO: 698226 - DNA, 132 bp, Homo sapiens
tgactactctggagatgcattgtagccaaacagcaaaactgaagaaatgtgagaagtcttaaagccaaagctgttacagagatgaacgtctttagtcaaaccattaagagttagaaagatgatctgtatcaa

SEQ ID NO: 698227 - DNA, 386 bp, Homo sapiens
ccccgcccccggcgggggggcagggatttcgggggcccctcacagttttgccccccctgcccccctgggtttccccccccggttgcccccggccccccctgggttttccccgcgttttctgcctttcccggtggggtggaatttgttttggggggggccgtcacccactgtcctccgcccctttcccctgggggaccccctcgtgtacccccccctttgccccccccgtccccgcgtggcccttggcgcgccccccccggcgaactccccgaaggtggtggtggcccctttgggaacgtggcctcccccccctggcccgtggcccccggaaccccgggcctgggtgggggctgggtttgaaataacccctttcgtttgggggctta

SEQ ID NO: 698228 - DNA, 317 bp, Homo sapiens
gctttaggaaaaagttgatgaaaatgagaaaaaagatggtttattcatgtctatgcagtaaactattaccagttctttgaaaaaggagcaaagaaaggtaatgttaatctctttttaaatgaaggtaaactcttgcccagctaaaggaaaatttatatactaaaagggtttggaaaactccttcagaggaactttaattaaagagtagtttaatgtgatgctgtgaagaaaaaccccccctctattagtaatttcagcttccccaaataggatagaataaatgcaaattaaaaataaattaggggcagatttctcca

SEQ ID NO: 698229 - DNA, 198 bp, Homo sapiens
ccaacaagggaactgaggcctctctagccaacagcatgtgaacgagccttcttggaagcagatgtctcagctttagtcaagcttccagtcctaaacatctgtcctgctgacatcttgactgcaacctcatgagagatcctgagccagaactacccatataagctgttccctgattgccaaccctcagaaactgtgtga

SEQ ID NO: 698230 - DNA, 604 bp, Homo sapiens
  misc_feature (342)..(342): n is a, c, g, or t
atcttcttctgtcttctatgggtgactagagtctcgctctggttgcccaggctggagtgcagtggtggcgacttctgctcactgctacctctgcctcccgggttcaaggcgattctccttgcctcagtcctcctgaggtagctcgagactacatggcgtgcaccacgcacgccctagctaatttgttggtaattttacgcagacataggggtttcactggtatataggccaggatggtctcaatattccttgaccttgttgatctacgttgccttggctctcccaagagagctagggattacagggcacgaaccacgcgcaccttggccaagtcagcaatanaatttcttttctaatttacccccatttcttattaattcacacttcaaaaaagcatttcctggaagtatatctaagtgtgatggttggtaatatataacaaatgaaaagatgtaattagattataagaaaagcatctgcctgtaaaatatgaaggacgaatggaagtaatggactcctcatggggcccacagtgaaccaggaaggacccagaaagggtgccgggcccttcccctgtgctgcagctacaggggcccatttcttc

SEQ ID NO: 698231 - DNA, 397 bp, Homo sapiens
aggcattctagctatgggaatgccaaatttgcaggagactaagattctgtgaactttttgcctcaggacagcgtccctgtgataatgtggagggtcttgcatgctttcttacagtatcttactggataagagttagaaatctcagggcacccgactcccatatgcaggaatttaccattatccaggaaaaaggaaggttgtggtctaaggaggaaccagagtggatacttagaactatagatagctgagttacacccatacacaggaatttacaatggcctaggggtaaggtggactataggatagactagaataggaactatggcaaggggacgaagcccttgcccctgacttctaagattaagctgaccttaggtggggcagccgatgtcgacgc

SEQ ID NO: 698232 - DNA, 750 bp, Homo sapiens
  misc_feature (83)..(83): n is a, c, g, or t
  misc_feature (405)..(405): n is a, c, g, or t
acaggctgcatcagaagaggccatcaagcagatcactgtccttctgccatggccctgtggatgcgcctcctgcccctgctggngctgctggccctctggggacctgacccagccgcagcctttgtgaaccaacacctgtgcggctcacacctggtggaagctctctacctagtgtgcggggaacgaggcttcttctacacacccaagacccgccgggaggcagaggacctgcaggtggggcaggtggagctgggcgggggccctggtgcaggcagcctgcagcccttggccctggaggggtccctgcagaagcgtggcattgtggaacaatgctgtaccagcatcatgctccctctaccaggctggagaactactgcaactagacgcagcccgcaggcagccccncacccgccgcctcctgcaccgagagagatggaataaagcccttgaaccagcaaaaaaaaaaaaaaaaaaaaaaaaaaaaaaaaaaaaaaaaaaaaaaaggggggggggccccaaaaaaatcccccggaggggggcccagtttaacgcgccaaccccgcagttttttgtggtacaagaggtggcccccagagaggggcgcgggcaaaaaagcacagggcaggcgacgccggcgggataacacaacgtcgcgtggacggggggaaaacactgtcgtccgcgggggacctcgggagaggagcaaccctcaagtgcgcgggggggaacacatgtgcggcaaacaccaga

SEQ ID NO: 698233 - DNA, 147 bp, Homo sapiens
cgactctagaggaccccgcggctctcgctgtctatatgggcatcaacatggggtcgtttatcgccccgctgatctccggcttggctgattaaatctcacggctggcactggggcttcggcatcggcggtatcgggatgctggtggcg

SEQ ID NO: 698234 - DNA, 170 bp, Homo sapiens
ccaacctcaagatggttcaattgatgcccttgcttcttcctagcatggtttctctgcttgtcatcataccacactgataacaggaaggatgctttcgtcattcagcttcgcagtttaagaccagtgagaccctagcacattcaaatttcagagctgttagttctgtacga

SEQ ID NO: 698235 - DNA, 422 bp, Homo sapiens
ttccttcgaccgcactttcttccattactctgagtttaatctgcaaatgcctaagtctgctgagttatgcggagggaaaataatacttgaattgcaaaagaaaatgttctgtataagttacaaagctattttgtttagttttctgtatacactcatatatttacataatcactggttataaacttgcatcatgttttgtgatgtgtggatattagatcgataaaaatatcggtccatatatgtacatataggtatacatatatttacacacacatatatagagagagagagaggaccgaccaataattttcatcttttatgtaaagattgcaagacagtgttattttatttgaataaactgaggcatttatatcttcctgtatatcattactctattgccatattggcttagcaccattctg

SEQ ID NO: 698236 - DNA, 314 bp, Homo sapiens
gaaagagaccacttgtccttcgagcaggagttaacaccttcaccacttttggaggaacaagaagtacagttgtgtgttagcacacgactcggttccttcgagtttttttcttctcgtcgcccctctgttgtaataagggtggccctccgtattatcagggaaggcagtctggactctgccacagaagtccgcactatgccttcacacatgagtaccgaagacaagttcttgctagtcgtgtagtcacagttcaatacagtcaatagatgaatcctaatggtgtcatatctggtctagctggtctattcaacgaa

SEQ ID NO: 698237 - DNA, 292 bp, Homo sapiens
  misc_feature (37)..(37): n is a, c, g, or t
acagaagcgctgattcaggacggtttaagctagacgntttaaagcaaggtaagctaaaaatgtccagcaaaatgacttggggagggagcgcttcccactgttgctctttttaaaaaatgagttcttttttaagatagaaatctttcatggtcctctgaagagcatagtaacatatatatagatcatggggagaaatatgtttatttaagtaagtcctgcgagtaatacactacgatgatgctccgcttcaccgctcagtgggggctatgtagatggatcattaccttttgag

SEQ ID NO: 698238 - DNA, 290 bp, Homo sapiens
  misc_feature (5)..(5): n is a, c, g, or t
  misc_feature (7)..(9): n is a, c, g, or t
  misc_feature (11)..(11): n is a, c, g, or t
  misc_feature (13)..(14): n is a, c, g, or t
  misc_feature (16)..(16): n is a, c, g, or t
  misc_feature (21)..(21): n is a, c, g, or t
  misc_feature (113)..(113): n is a, c, g, or t
atctngnnngntnncnggatnactagagtcactatccggaaatctaagaatatcctcttggtcatcacaaaaccagatgtctacaagagccctgcttcagatacttacatagnttttgggggaagccaagatcgaagatttatcccagcaagcacaactagcagctgctgagaaatccaaagttcaaggtgaagctgtctcaaacattcaagaaaacacacagactccaactgtacaagaaggagagtgacagaggaagcggtcgataaacctgttgtcaaatttagggc

SEQ ID NO: 698239 - DNA, 134 bp, Homo sapiens
tcttcatgcctaccacagatgagaacaggaagttgcatgtgaagcagagaggagtgcagagcaattctccgagaaaatgggctttttctctgaggacccaagaaagacattgacatatctacacgacattgata

SEQ ID NO: 698240 - DNA, 225 bp, Homo sapiens
ttgtcaatcgagctcggtaccgctctttaatggcagtggcatgaacatgggctcagcgttatgtccgagacatcaccagtggtgcgtggtggccacagctcactcttttggctgctgtggagtcccccgtggcatgaattcagcaggtgctgcttttctgtgctggtcagactgggcggtgttccaggttgtgtcactgcgtgggggctgccattaaaggagctg

SEQ ID NO: 698241 - DNA, 529 bp, Homo sapiens
  misc_feature (16)..(16): n is a, c, g, or t
  misc_feature (43)..(43): n is a, c, g, or t
  misc_feature (55)..(55): n is a, c, g, or t
  misc_feature (58)..(58): n is a, c, g, or t
  misc_feature (81)..(81): n is a, c, g, or t
  misc_feature (105)..(105): n is a, c, g, or t
  misc_feature (119)..(119): n is a, c, g, or t
  misc_feature (173)..(173): n is a, c, g, or t
  misc_feature (217)..(217): n is a, c, g, or t
  misc_feature (439)..(439): n is a, c, g, or t
  misc_feature (462)..(462): n is a, c, g, or t
  misc_feature (479)..(479): n is a, c, g, or t
atgacacatttgtgtnatgtggaaaatgtgactgggacaagtncaaaactatagnagnagttgacctcctgtgctctgcgnaatcttccagagatatgcaccttnaattgtttaacagncttttgtgtttaatccccttcagcccctagctcttttattctaccaggactggnagagttgatacctgcagttcaggcctgccagtgactcttagtgntctgtttctgacttatttttcctgtctctgtcttccaacccccaataatatttccaccggggatgcatcatttttactcccaatattctgtaggagaggggagtcagggatgctgtcttcccacggaatagtactcagtaacaaaccaattgcattttagttgggcagtgcttccacccacccttcagatccctttcagctaaaacccttcccccttccctncatgtgtttttagtttccggttnggttgttgggttttcantgcccttcttctaacctattaccatgggcggaaaggaaaattttttccat

SEQ ID NO: 698242 - DNA, 182 bp, Homo sapiens
aactacatgcagccttcagctctggtgccatggattgcaccaacatgtagcgaggaaagtagcatacctccacgctcaggccttgggtagatgtgagcaaaagaacaggagcagcataggttgtttgagctatgaggaaatgaactttgctttttatatttaactaggaactgaaatgagca

SEQ ID NO: 698243 - DNA, 240 bp, Homo sapiens
ataaatcaagaaacagttattgcatttttgtagtgctgtattaaagttaaggcggtacccacagtcttgcatgtctcatttcccagagaacaagtcaaggttacggtgaggcataagtaaaagattgttaaagggtattcatggttttgtcttttgctttatgcctcagtttggtttaaaactttgatggcaaatggtggtattcagtgtgggaagtgtcatatatttcccccttatcat

SEQ ID NO: 698244 - DNA, 113 bp, Homo sapiens
acatcatttgaatcatattgatcttcatcacaaataaacttctttaagcaaattagggtttgatgtcagaatattgactatctctacagaaatattttacttcaattaccaaa

SEQ ID NO: 698245 - DNA, 308 bp, Homo sapiens
  misc_feature (175)..(175): n is a, c, g, or t
  misc_feature (237)..(237): n is a, c, g, or t
  misc_feature (254)..(254): n is a, c, g, or t
catctcttgtttgcccccaaggaagagactttctgtttcccttgggaactcacattctgtgatggttaatactgagtgtcaacttgattggattgaaggatgcaaaggattgttcctgggtgtgtctgtgagggtgttgccaaagaagattaacatttgagttagtggactgggnagaggcagacccaccctcaatctgggtgggcaccatctgatcagctgccagcatgactaggnagaaagcaggcagaggnaacgtggaaagattagactggctgagtcttccagccttcatcctcctcctgtgc

SEQ ID NO: 698246 - DNA, 413 bp, Homo sapiens
  misc_feature (34)..(34): n is a, c, g, or t
  misc_feature (144)..(144): n is a, c, g, or t
  misc_feature (163)..(163): n is a, c, g, or t
aaaagcagcttccctggcctaattaccctttccnaggttccaatgcccccttcagtttgacccctgatcattaagttgttgtagttctctgggtcctttaaagatagttttaatggcccaggcatggtggcttatgtctgtaancccaacactttgggagtcnaagacagcaggatcacttgaggtccaggagtttgagacccagcctcgcccaacatggtgaaacactgagtctattaaaaacaatacaaacattagtcaggcatgctggtgtgcacctgtaatcccagctaccctggaggctaaggtgggagaattgcttggacctgggaggtggaggctgcagtgagccgagatcatgccactgcactccagactgtgtgacagcgcaagactctatatcgaaaaaaaaa

SEQ ID NO: 698247 - DNA, 118 bp, Homo sapiens
acggcggcatagtcatcctgtgagtgctccagagagtaatacatgtagcagcagctcgagcgggcatctgagtcctcgccacccagtagaattctgcagtgcctggtaaaaggctgtt

SEQ ID NO: 698248 - DNA, 201 bp, Homo sapiens
tgtgactgctgacggacgtgtccgtgaccgggacagaccgggtggtgtcacctgtggatgctgacggacagtgtcggtgaccggacagcggggtggcgtgacctgtggatactgaggaagcgtcggtgacacgaagaggggtggtgtcaccttgtggattgctgaggaaaggcttgtgaccaggaagaggggtggcgtgca

SEQ ID NO: 698249 - DNA, 717 bp, Homo sapiens
gagaggaagagacagaggcaaaaggaaagtcagagagagacaaagtcaaagagataaagaaagagagaaagagagatatatatataagtagttaagaaaaaaaacagtgtaccttattcctttaaaagccaaagtaaatttaaaacctgtaattgataattgaaagtattctctgtaaccctataatgctccaataccacttcattgtcagtgtaaacaatggcgtatcctgaaagcactgaggccttcctatcaaaaatccttaacccagtaacccgtggatggcccaaatgcattcagtctgtagcggcaactgctttgttaacagaaaaaaaataaaacaaaaataacttttagaggaaacctcatcgtgagcacacctcactagttcagttcagaagtatcctaaatcaaaaaagcaaaaaagcagcttactaactcaaaaatcttaaggtatgaggctattccgttaggaaaaaaaaaaaaagccatctataccaattctaaattaatttggacaaaacaaggtcttattaatagcaaaggataattaaaatcccaaacttacaaggtttttaaacaaaagtaaagcttgcttaaaggtaacaagtgtaacatgtattatactaacttctattcttgtgcctcagacagctacccacagacttaaagaagtcgcttaaaaagataggtatatcttcaaagaacaagaaagaa

SEQ ID NO: 698250 - DNA, 135 bp, Homo sapiens
atcaaaaactgctgacaatgcaacttaaaatgcagaaccattgatcaatttggatgtaaataatcctgattttacggctggtgtgatggctaaggctaaccatgcttcagatacaacgtcatgatgattacctgg

SEQ ID NO: 698251 - DNA, 1123 bp, Homo sapiens
tctacatttagagaaacctatttatacttatcttctatttcctattttagtgtttcatttatgtgcggtactccaatttaggacttttccatagtgccaaagccatacatattcagtagaacatcaataaatatacatacagcaattcaacactttattataaacacgggcttcgtgttagcataattcagctaaacagtcaggctactgtaagtgttctagagcatattcaagacaggctagcattctcaatcttacaatattttcaactgatagtagcgtttatatcgggatgtaaccctatgataagttgacgaacacatactctttttgtgtgtctactgtgattcacgctatttcttaaatcatcagccaagcatgttacgctacgtatacactatgacttcctaaacacatgtgcatggcttccctgcacggagatctaccaattcgcctctgagactacacactcatcaaggtctaccaagataatcaatgtaatgatgtatcagttggctatctagcgacactacattaacttagtgcatattacacatcagggttaaaactaattcagacatagagccactttccatccaattctattaacattctccaaacataatcctttgcaccaagggacagtcatatcattcacatattcacagtgactccgacacttacccaatcaagtgggcagaagtcatgcagcataactactccagcgctccacagacctactccacagaggccacaccaccacgcacaaaggggctggcacactactaacacccgcaagcacgtgcgaccacctgggcacacactcactcacataccacaccacgcccaccgtgccagaacgagaccacaacccagcagtggcacaaacccaacgctacctcacacaccactgatcccaagcgcgcaccatcgcacaacgcgcaagcccccaccaccgttcagcaccgcaacaccaacacagacccaacaacaacgaaacaaccatgactccaccccacacccacgactccccacagccaaccaccaacacccaccaagcacaccgtcactccatcaactcagtcaagccacatcaatcgcaccacgatgactaataaacaag

SEQ ID NO: 698252 - DNA, 236 bp, Homo sapiens
cgcaatatcgactcgtgatccacccgactacggctcccaaagtgctgggaatacaggtgtgagccactgcgcctggccagtagttatcttttaagttatttactctgttttttaaacttgatgtataacattgagatgcatttattatatatcacatggtaaaataatccctctaaataatacttctctttctggattactatgaatctctgtcatttacagctcagccataagct

SEQ ID NO: 698253 - DNA, 329 bp, Homo sapiens
gttgcagtagactacaccttgcacaagtgccctaaagagaatgcaaagaaaaacactagtctcaaggactaggtttaattcaggcaatggacagtgatgcctacaatgggactgtgagggaggtagattgaaaggtatagtgccctgtctcaataaacttcaggtttttaggggggtgagagtgtttaacatgttaatttaggggagtctcacactggacggtgtcttttgtgtgttaaattaagggtcggggttcgcctcaggggagtttcgcatcgggggtctaagcgtactgctgtaattccctccctctctggggagtactgata

SEQ ID NO: 698254 - DNA, 382 bp, Homo sapiens
tggaaacagagtctcgcttggtcgtccaggcgggagtgcaggggcgagatctgggctaacggcgaccttcacctccggggtccaagcagtcctccgtgactcagcctcccaagtagctgaaacatacgggcgcatgtcatggcgcccgatataattatgtgtattttaagtaaagaggggggtcggccaggttgggccaggcgggtctcaaactctggacctcgggtgatcggcccacctgggcctcccaaggggtagggttacgggtgtgaagccaggcgccgggccggggtttcctttttcaactcttctatcctaaggtctccattaattgggcgggttaagatatccaaggcagggctcacaagaagtagtgatagtt

SEQ ID NO: 698255 - DNA, 418 bp, Homo sapiens
tgcagatcggcgggggtgttgccgccggcgttgcgggtgaaggctttgaccagcaccacggcgagcacgactacgcccgcgatcagcagaagccagaagatccaggcaagtcccatcccgcccataccaaagccgttcatcatcaaaggggattccttatctcttgtcgtgcacggccaggccgttcctgaccgtggactttcaggggccgtgcagtgccggtggttctaggccttggctgactggccggagttctgccaggtttgccagccagcgtagctgccctcgagctcgacgacgtcgtacccggcccggcgcagggcgctggccgcgacggagttccgcacgccggactggcagtagctcacgatagtgccttcggccggaagctcatccaggtgccacatggcgcggccgc

SEQ ID NO: 698256 - DNA, 105 bp, Homo sapiens
ggatttgctggtgcagtacaactaggcttaatagggactcgaattcgaggctcgaattcgagctcgaattcgagccactcccgacccggggaggtagtgccaaaa

SEQ ID NO: 698257 - DNA, 1016 bp, Homo sapiens
  misc_feature (26)..(26): n is a, c, g, or t
  misc_feature (93)..(93): n is a, c, g, or t
  misc_feature (104)..(104): n is a, c, g, or t
  misc_feature (107)..(107): n is a, c, g, or t
  misc_feature (109)..(109): n is a, c, g, or t
  misc_feature (186)..(186): n is a, c, g, or t
  misc_feature (193)..(194): n is a, c, g, or t
  misc_feature (235)..(235): n is a, c, g, or t
  misc_feature (252)..(253): n is a, c, g, or t
tgggctgggtttggccccagctgganggaagaggggtggagactgtttccatcctaccctcgggcccacctggcaccctgaggggccaaggancagctggggcntgngngagggccataccccaccctcagcaccccttccatgtggagaaaggagtgaaacctttagggcagcttgcccggcccnggcccanncagagttcctgcggagtgaagaggggcagcccttgcttgtngggattcctgacccagnncgcagctcttgcccttccctgtccctctaaagcaataatggtcccatccaggcatgtcgggggctggcctagcgagcatatctgagggaggaggcacctctccaagggcttctgcaccactccaccctgtcccccaatctctggtgagtcttggctggcagcaagccatcatacggaagggaccaacggcaacggcacggtgccctccagagtgtgcacgtgcccatgtggcctgtggcctgtgtcccatgacccacacctgtgatccgtgcctccaacaccactggccaccaggctgcagcagccaaggccgaagctctggctgaaacctagtgctggtgtcctgaccaggccattagagccttctcatttgcaccacagcatcatcgctggtcaaggaaccgaaagtccccatagtcaacctagagcaccgggagttagctagcggcttgtaggcgacatccccaacaacctagatgccaccttgagtatgggatgaatagatagacgcaagctgagcaaaatgggaaccaataacttagataacatcccacaaccgagagctatttcattatcccacactaacacaatacatctaaagccaaaacaataacaaagcctatatacttctcacactaaacaaactcattacactttatacaatataataaacaattatatcaagaattttacacatcacactcaaacaagacataccaccatatcaaacccaaaaataatacgactacacacaccatacact

SEQ ID NO: 698258 - DNA, 616 bp, Homo sapiens
caataccaacatattgtacaacagctattaatgaacatcacctggagttcaagtgtgcctgacagctgacacttagttaatttctccctgaaacaagaaccgtgaaacttccacagcatgcagaaaacagcaatcatccagtggccactgggcatgttaaccccaagtacctgcgtttgccatttccatttgcgtctggtatttccagcaactacaactttacgcacatgcagaaaaactgggtataagcagcacatgttcctcacatttcagttaatatccagttctcacatttcaatagcatcaaatgcacttgttcccacatcccttcacttcagactcccatgtcacagggcgaggagcacaaagggggggcacacattcagcagtgggggcaagatgcaatccaaatccacatttggtaaaaccacacttataacccattgggcacgctaccttactcatacttttcctacagataaacgctttcgtccggactcctacataatgggacaggactttcacacgagacttttaaacaggtaggacacgctacattctcccccccaatcctccaccgttgagtcctcatcgggccgactggtcgaatgctctg

SEQ ID NO: 698259 - DNA, 926 bp, Homo sapiens
agcgggctctctcggccgggcggcggtgactgtgcaccgacgtcggcgcgggctgcaaccgctcgcgtccggccgcccgccatcatggtccacgcactcgcacacctgtcacccggtttcaccgatcgtactaccagactcttcgcaggagcttggcaaggcgtgcattgtcgtctgctggtccgcagagtgtgtgcaagcagaacctaccatcgacaggacgtacgcagacagaatagatcatcacataccaagaaacttgtctgcccaggtgatcaccagaagtctagaacagtagaggctcaggatacttgtcgcacttctcgaagcagtccaatagcagtccgtgcgcgctccagtgatcatgtattttctgagctgaccggcgtgtacactacactgcgtgcctttgacccttgttcacccggtcggcggacgctgctttgacacgcatcgcttagtgcgccacgagacgtgacataccagtgcgaagcacggatgcctagtccacctgtgatacgatcagcatccgtggcacgcagtgttacaccagcagtccgagcgcagactattgaccagtccgatcgcgacaggagacgctgtagatgcctgatgagacctgcttgcatgagcccagctacaatgtctcggtcgtgccacggtcgtcgacgactgtgctgcatgttcgaggcctacgccgagtcgcaattcccaggggacgaagcagctattgcgtagggactcggtgatgcgtgcgcaccgcctaggtgtagcttgttcctccttgacggtctccgacggcaaccagattccgctagtggacaaaagcctgtgcgactatcctgggtccctgcgggagtccatccgtgctatatacctcctgcgtggggcctattccttcgccttctgcggcactgacggctccg

SEQ ID NO: 698260 - DNA, 258 bp, Homo sapiens
  misc_feature (8)..(8): n is a, c, g, or t
gggttttngggggggggttttcccccccccggggggaaaatttggggggaaacccccctttttttccgggggcccccggggaaaacccccctttttttaaaaaaaaaaatttttgggggggggggggggggggcctttttttccccccctttcggggggggggggcaaaaattttttttttcctgggggggggggggggggggggggggggtttttccccccccccccccccgggggggggggggttttttttcccca

SEQ ID NO: 698261 - DNA, 268 bp, Homo sapiens
tcggtacccccatagtcttcacttgcaggaaaacgagggttaggcgcatagggctatcaggacatgatgaatcgcttaaacagcagctgctggatgtcctgatggtatgacaatggggtcaatacagtgccttacggtacgcgtgtactccaaggccacctgctgttccactgcaatcccttaatgttgagcactgtaatgcttaaagcccatccagcagctgttccttcgagaacacgcgcccttccgctttatctttctctgaaag

SEQ ID NO: 698262 - DNA, 228 bp, Homo sapiens
gagcacgctgactttgtaaaaaatagctgagacactagatgtaaaaaaatagctgagatgctgggcgcagtggctcgagcctgtaatcccagcactttgggaggccaaggtggatggatcacccgaggttaggagttcgagaccagccttgccaacactgtgaaaccctgtctctactaaaaatacaaaaattagctgggcatggaggcacacacccctgtgcgcaag

SEQ ID NO: 698263 - DNA, 318 bp, Homo sapiens
gctcgactttctttttttttttgagatggagttttgcctctgttgcccaggctggagtgcagtggccaatcccagctcactaaaacctccgcctcccaggttcaagcaattctcctgcctcggcctaccgagtagctggaaccacaagcacggaccaagtaactggaactacaggcacacaccacttagtagagatgggttttcaccttgtttgccagggtggtctcaaactcctgacctcaagtgatccgcccacctcaatcttccaaagtgctgggattacaggggtgagccaccacacccaggctggtgtcgacg

SEQ ID NO: 698264 - DNA, 431 bp, Homo sapiens
agcatacttaattagctaagacttcttattctaggcttgaccctatgttccacatcttgtgaatttgtagttgcataggctgctctctgacactggttagtgacctggaagctatagtaacgttaggggaggtgttgtatgagcatagaggtatccttgcaaggaaagacttgtcttatctcaatacgtctttgtttttgcacacaagaaagtcaatgtatgagtcttctaaaatcttcctatttccaagttgcagagtaccactgattcctaaacaaagatctaatttttgactcagagacgtagcaaggtctgaatcgcaattataatttaatgatcattaagataaattttctctctgatatttagattttgcccaattattaagatatttgggtgtctcgtaaagaatggaagactctagtctcttg

SEQ ID NO: 698265 - DNA, 645 bp, Homo sapiens
ggtgggtgatagaagacaaagtcgtttttgtcgtaaaacgattggatgtggtggagaggagagtggtgttgcggagaggatttaaatggggtgaaattggggaatggtggattagagtgttttatggactgcatagtggcgcgtaggcctttggtgagaggtatctgtggggggaggaaatgtcggatcgtttaggaccatatagtagaggacataatatggcggggtattgatgggtatacagcgcaggaaccgggtacactcgcgtgtgtggctgcatacacgcctcgcgtacagatacgcgcactggatacttgtatgcgaaacgtgccgcgggagggggagcagcattcatgacggtacaaggacgatttcagatcgcggcaccgtgtggaccaaacaagtgcgtgagaagcaccgcgtattttgcccctaaaaaagcgacaagaattagcgtgggctgtggtgggcggcgttgccactggtatgtgcccaggctagatcacggagggtttaaccagcgagatattcacttgtacttgggcggcgcggggttgcagtgagaccgagattgtccccactgcatttcagcctggacaactagaacgagaatccatttccaaaaaaagaagaacaaaaaaaagg

SEQ ID NO: 698266 - DNA, 205 bp, Homo sapiens
gaataagaacctgtctcaaaaaaataaaaaggatgcatgtaagccataagtgaagaaatgaaaagagatattccatggaaatggcaaccaaaaaggacagagctggctatacttacatcagacaaaatagatgttaaatcaaaaactgtcacaagaggtggcacacacctatagtcccagctactcaggaggctgaagcagtggc

SEQ ID NO: 698267 - DNA, 307 bp, Homo sapiens
taatggctcactctacctcttcttgccaggttcaaaggattctcatgcctcagcatcccgagtagctgggattacaaccacgcaccaccacccagcacttggaagaccacgggggacagattgcttgagctcaggagttcgagaccagcctgggcaacatgatgaagccctctctacaaaaaatacacaaattagccgggggtgatggggtgcacctgtagtcccagctactcgggaggctgaggttggaggatatcttgagcccagaaggtccttcacccagaccctgtctcaaagaaacaaagga

SEQ ID NO: 698268 - DNA, 150 bp, Homo sapiens
ggctcggtaccgatcagcacgcaccaggtgaaaccgccgcccacgccctcgagctgagcgtgtcgccgcgctggatgcgccccgtgcgcacggcatggccgagggccagcggaatggaggccgccgaggtgcgtgctgatcatcctaatg

SEQ ID NO: 698269 - DNA, 762 bp, Homo sapiens
aagaagtttgctgaggcatttgaagctattccccgcgcacgtggcaggaaaactctggaggttcaaggccaatgaagtaatctctaaactttatgcagaacatcaagaaggaaatcagaacgtggattagatattgaggctgaagtccctgctgtaaagggacatgcgtggagcgctggtattctagatacttaccgtggtgaaaatattgggctatcgaagactcgctactaatgcgttgcagtcactgtacgttagagtggatcagatcatcatggcgatagaccagcatggatgggcccaagcctccaagtgggaagaaagactggtgagtgatgaccagaaagtgacttgaaagttggcttagagttttctagctgtgaggtggaaggctgtagtttgatatgtaggtactgaaagaatcaccctgatgttttcttagttctccttaaattagatgagttactgtgtgtttgtatgcttggactggatgttataaataaagatattgtgactgaaaagtaaataacactaaatcgaaatcaactcagaagcagctgcggcgactgccagatgcagacaaaaagaaagaacacaactacgttgggggaccggcccacgaatgcatctgcactggacactgggcgaccaagaagaccggcaccgcatgccgtcggtgcctccacatggaacagccgcggcacccggctctggaacaccccccggctacgggcaccggctcaccggccaggcctgaaaccc

SEQ ID NO: 698270 - DNA, 289 bp, Homo sapiens
ggtttcctgtgtgtgtggacggagtggtcccccaggaccctctggtactgcttggccctcctggctccccctgtgtcctgcggtgggaaagaacgggcttcgtggtcctcgtggtgactcaaggtccacgttggccgacactggagacgtcggtgccgttggtccccctggcttcgctggtgacgaagggtccctctggagacggctggtactgctggaccctcctggcactccacggtcctcagggtcttcttggtgctcctggtattctgggtctccctggctcgct

SEQ ID NO: 698271 - DNA, 492 bp, Homo sapiens
ataaacagaaacagtcagaaaattacttctgggagatggcagatgatgagatattaagacagaaggcagacactctgcacagcagctggagaggagaaaaggtgcattagtcaaatgaattatgaaaaaaaaatgaaatcaagttccagagaggtgccaacattttcttcatgctattgagtattttcactttctgagatatattcattagttgcaattttggtcagtttattacttggacaaaaacaatttggattatagcttttggggaaaaatatactatttaagtgattaacttaagaatgatatgatggttcgtaaaaatagacttattttaacttagttaacttgaataacttacttttaaaagtcattctcacagatcatatccaaaatgtttgtttttcaattcatgaattaatcctcaggatgaatgttattactttgttaagttagattttctgggcaatatggtgaaaatataagtaatac

SEQ ID NO: 698272 - DNA, 197 bp, Homo sapiens
taacgagcttatataatgggatgtcagcctcttaactgctaagacacttagatgggtctcagcgtaaaatcataaaagaacttttgtatttaatacacagtttgctttgagactttacagcatatgatcttttttccataaacttgtacagtgcaaacgacattttgaataccatgatcgatgatgtcccatgcttc

SEQ ID NO: 698273 - DNA, 900 bp, Homo sapiens
  misc_feature (1)..(1): n is a, c, g, or t
  misc_feature (77)..(77): n is a, c, g, or t
  misc_feature (105)..(105): n is a, c, g, or t
  misc_feature (136)..(136): n is a, c, g, or t
  misc_feature (153)..(153): n is a, c, g, or t
  misc_feature (164)..(164): n is a, c, g, or t
  misc_feature (181)..(182): n is a, c, g, or t
  misc_feature (184)..(184): n is a, c, g, or t
  misc_feature (193)..(193): n is a, c, g, or t
  misc_feature (211)..(212): n is a, c, g, or t
  misc_feature (254)..(254): n is a, c, g, or t
  misc_feature (264)..(264): n is a, c, g, or t
  misc_feature (273)..(273): n is a, c, g, or t
  misc_feature (290)..(290): n is a, c, g, or t
  misc_feature (354)..(354): n is a, c, g, or t
  misc_feature (368)..(372): n is a, c, g, or t
  misc_feature (400)..(400): n is a, c, g, or t
  misc_feature (404)..(404): n is a, c, g, or t
  misc_feature (406)..(406): n is a, c, g, or t
  misc_feature (415)..(415): n is a, c, g, or t
  misc_feature (417)..(417): n is a, c, g, or t
  misc_feature (425)..(425): n is a, c, g, or t
  misc_feature (508)..(508): n is a, c, g, or t
  misc_feature (628)..(628): n is a, c, g, or t
  misc_feature (803)..(803): n is a, c, g, or t
  misc_feature (812)..(812): n is a, c, g, or t
  misc_feature (879)..(879): n is a, c, g, or t
naaaaattcaaatacagcgagtcaccattgagtcagactagaacgcggactgacagggcatcaccataccgcggganaggagccgggtcaggggaggggtatacnaaacagggcagaggggaggggactgacaatngtggcgtgccggggggngggggccggcngggcccccccagcatcnngngcctatcanccgatggcggcaacagannccctgggatagacaggaggctgcgcggcaggaggagaaatcngatgtgagcncgctccccncacgtcccccaagggcncctgcggagctcgccggcattggagggtccagcccaaggggccagggtgagggggtctttggcnggcgcgcgtccccnnnnnggcccacctcccctgagggaggaagganggcnanctttgtgcngnaagggctnggggggcggcaggcccggggcccgccggggtctccacaaattgtgtctgaagagaatgcaaaaggtcctcctgcccgtgtgcnaaatagaaaccggggtctgcaggctcagctccggcctcctgctcctctgcaggtgctctgcatgtcctcatggggtgccgggctcagatcaagagactgctggcagtggcggcacggcancagggccagagtgatggggacgctgaccaagaagggtgccgagggtcccccgccgctgcccagctccccagggtcacagatcttcgtggtaggtgggggtgccagggagctggtggtgctggtcgtggtctccgcagcctgggcctccgtggtgaggtgtcgcggttcctcagtncagggcgtncgttgggcggctacgctccagttactccatgtcccaatctcattgtcctttggctgccacctggatnatgtactccttcccggcgtag

SEQ ID NO: 698274 - DNA, 391 bp, Homo sapiens
tccaatgcgctctccctttcaaaggatcctagggctgtgggacaaagaacatacatttacacatgcgacagagcttcgcagccgtcagagactgccacaccgaccaaggctgaagtactagcactcgcgtctggatggcccacaatagcaccggcacacacgacatccgtgaccaggtgctcatggactacactgtccttctcacaacggcgctgtacggcgagagtgacctctaatccaccccgcccgagccgccctcagtcttgtgcgccgtgcactgccttgcacatccagccgtcgccagtctccatgcctgggttcggtttcagctcccagcctcacccggtacgctgggccaacgtgatgataaaaccccgcaagacagttaaat

SEQ ID NO: 698275 - DNA, 296 bp, Homo sapiens
cggacgcgtgggcagtggtgcagtcttggctcactgcattccagcctgggtgacagagcgagagtctgtctcaaaaaaaaaaaaataaaaaaaaataagggcttccggtaggaagcttagtcaggggaaaggatttagagaggaagggacaggaaatagagaacagcaggccgggcgtggtgggctcacgcctgtcatcccagcatttggggaggctgaggtgggcggatcatgaggtcaggatatcgagaccatccgggctaacattggtgaaaccccgtctctactaaaaatac

SEQ ID NO: 698276 - DNA, 662 bp, Homo sapiens
cgatatgagcttataaaataaagtagtatttgggatgtagatcagaaataaatgctagtcaagagataaatctagctgcactgagagctcgtagaatctagaaacttgaacatgctactatcggatgagtagaaggcagatccgtgtcgtcagatacacgagagattgccatagtgatgcgactcaacagtttaatgaaactgattcatacgaatactccagtacttcaacccgtgttgtagttgaagcctactgaaaaacacatttgtatgtttactaaagagatctaacagttttaactgacgaaaaatactgcagctacatttcagtcttttaaggtaaaacaagatctagaatattctagttcagtatactgggctcaaaaccaactttccttttgaaatgcatctagactagactatattccttacataatatcattgtcatcatcatcttcatgttttctcttcagtgggttgcttcattggctggtggttcttgtgacgaaaccatgtggtggtaataagaatattttgggcccaatcattgaaggattaatcagaacattttgaactgcaagttgttgcaggaaactgtaaacagagaagaaagccccccaaagacaagctatgaattacccaagaatctgaaacatattgata

SEQ ID NO: 698277 - DNA, 444 bp, Homo sapiens
  misc_feature (250)..(250): n is a, c, g, or t
agtgaccttatattattgctaagggaatatgagattaacttcctacaggggccaaaaccagagaaaggcttccagcaacttcgatgaaagtagtttggccacatgtcaagccaattgtatgtaatatttatgtacctttttcataactggaattgccaaataagcatggagatctaaatgatgtacttgttagtgtattcattcatatgactgtaaagattatttttcactccataaccaagtacttggnatatctaccggaaaacatttgaacaaaaaacaatagggtttttactatctttcttggtataaaacatattgttccaaaaaaaataacacaccctcccttttttttgagtgagggcagggagtacctgaaataagacaatgtttactaaggcaaataattgaaaattaaatctgcactttatagcaaattataaa

SEQ ID NO: 698278 - DNA, 104 bp, Homo sapiens
attactatttatcgatcaagggaaacttgaagaacagagaccagaaagagtaaaagcttttatagacaggggctgcagaacaaataaagcacattctggtaccg

SEQ ID NO: 698279 - DNA, 434 bp, Homo sapiens
cactctaaggatccccaacgatggtcctcagcttcccgagtagctaggattacaggtgtgcaccaccacgcccggcttctttttgtattgggagcagagatggcgtttcaccatgttggccaggctggtcttgaactcccaacctcaagtgatctgcctgccttggcctcccaaagtgctgggattacaggtgtgagccactgtgcatggccagattaccagatattaattgagtgcctggattatatggcaatataaagttctaggttcttgccttcatggggcatagcgtcatgggagtaatgcagacagcgggctgttaccgtgtgatttctcctcaggtatgtctagattctctgaggcttgagaccatttctcttgttttcatggttctttatttgccccagatgaatgtgcactttgggattcctcct

SEQ ID NO: 698280 - DNA, 624 bp, Homo sapiens
cagccagttgaatcccgttatttctatatttactttaggcttgactttcagggatcttagtaatttttgcctgttttgtcactacatatgtcatcagatcagactagaacaaagaaaagcttactgttttcaaacagggaaatgtgcatagtaatgctttactctgaattagaaacatgtttatgataatcctattagaaaatttgattgattgattaaagtgtctttttgggtcgacatccctagcgtttctgatcctgagtaatcaaatttaaagactacccagcagcaaaacttttattaaataattatctacttttattaaggctgtatgcctaggaattccatctgtttggtataattagaaataccaaggtgaggtaaaatcttaagaagttatttggccttggatttcagttctactcctgggctcttgggtcttgatttttgcatattcccatgttggaaaatacaatagagcttaatagtagttattgggggggaggaggtaccaacttttttgtggtttagaactttgggatagtcaggttacctcattggacattaggcatttttttatattgccagaaggatggaaacctaagttttggggtgtcacggggg

SEQ ID NO: 698281 - DNA, 386 bp, Homo sapiens
  misc_feature (345)..(345): n is a, c, g, or t
  misc_feature (379)..(379): n is a, c, g, or t
tttagccctttgaacatatttaagatagttgttttaaagtatttgtctaggaatatacattattacagtcattatagagaacagttcggaggttcctcaggaaactaaatatagagctaccatgtggatcctgcagtcccactgctaggtatatgcccaaaagaaaggaaatcagtatgtcacagagatatctgcattcccatgtttattttaggcactcttcacaatagccaagatatgggaagtccattcaacagatggaatgggataaaggaaaatgtgggtacatctattattaactggggtactatttcagggccttaaggaaaggaatgggggtttacntccttttggccaccaacctggggggggggaggtngaagggt

SEQ ID NO: 698282 - DNA, 299 bp, Homo sapiens
gctgggttgacgatgatttcaccatgattgagtcaagctggtctatgatcctggtgacctctgaatatccgtcgcctaccctcagccttccaaacactgctgggattacaagagtcagtccactgtgcccagcctgtaaaactttaattaaattaatctgttatgcttttctcttgttagcctttttttttttgagacagggtcttgcttctgtcaaccaggcggaaggtccgtggcaccaccagagctcacgtgcagccttaacctcccaggtctcaataatcttcgaaacctcttct

SEQ ID NO: 698283 - DNA, 295 bp, Homo sapiens
ccgtccgggccagcagggcatcgccgatttagactccggttccaacgcgaacctgaagccggaaaccgccaagacctggaccgtgggcctggtgaacagccccgagttcgtgccgggcatggatgtcagcctggactggtggaagatccgcatcaacaacgcgatcgtgggcgagtcggccaccgacatcctcaaccagtgctacgtgcagggcgtggattcggcctgtgcccgcttcacccgttcgaccggcgcccagacgctgggccaggtgaccgcgctggatcgctcgctg

SEQ ID NO: 698284 - DNA, 1468 bp, Homo sapiens
  misc_feature (441)..(441): n is a, c, g, or t
  misc_feature (551)..(551): n is a, c, g, or t
  misc_feature (691)..(691): n is a, c, g, or t
  misc_feature (699)..(699): n is a, c, g, or t
gaaagcgaagaaggaagctcctgcccctcctaaagctgaagcgcacaagctgaaggcttgtacaggccagagaaggcagtgttgaaaggtgtccacagccacaataaagaagaagatccgtcactgtcacctcgaaccgtatcgcggcggacgcgatacgacgacgtgcgattccggatgacagccgcagaagtatcctcgggatagagcgctcccagggaggaaacaagcgttgaccattatgctatcatcaagtgtccgcgtgaccatcttgtaggtctgccagtgagagaagagtagaagtagaacaacgacacttgctgcttcagttgttggactgttaaacgtccaacaaggacacgcagcatttagaaccaggtctgtcgcacaggcataggcctcgttactgaccaattagactagtgcgtcccatagggttanataccatcgcctggatgtccggggccctgcatggggacgatggataggagagcgcgattagtgttcgacatggactccgtggagttgacgaagtgcctctgggggcatgntttgccccacacgagacacactgtggggatcagtctcaacacgtgaagcgtccaagacgtggcgctgagatgtctgggagatcatgagtcattgatttattatcatccatcgtgttctgcactcgagttacttgagacanacaggagnacataaacaagacagaaacagatatatatacacaagaaattccaagacttgcgtgcacgaaggcttggcccactattaagggggggtgggctggaaaatagggacggatgcttgccgacactatggcgaacccaaggggccccttggagtagccaaggcaacgggagacattccggggcccctttttctggtcctggaaaccagagacccggggggaccttttcatagcactgcgcgatttgccccgggtcggtaggagatatgggaccccgagaggcgcgtggacccaggcaaaagacatatctggagcgtttatacaaggggaggaaggataaacctccggagaagacaagaagggagacaacacatcacgcgtagtgacgcacaacaaggcggggccggccaaagccccccaccaaaggcgcaaggtaactgtcgcgccaaacacattcgttttctacccggcggggccaaaagcccgcgggacaagtcacggcccacaaaagggatccctccggacaggggggcacacaggtgtggctggtaaaaccgaacgggacgccagccgaaaaacagggagaggacggccagtgcacatgtgtgtgacgcacagaggcaagatccgcgggaacgagggggcccattaccctcgggaacccggaggggccagctagacaccgcacgagggggcacggggggcgaccaaggcatacatagagcacccagagtgatacaggaggacgcgacataagacaaagggataacccga

SEQ ID NO: 698285 - DNA, 381 bp, Homo sapiens
gtccctattttttataacgtattaactttattattttcttattattttaaaagaatctatgcacattagcaaaatttaaaagatagagaaaaatataaacagaaaaaattatgtttacttctaccaccctaaatcaactattatcaattttatacatattttactccatcttttttcaaagtttcttacattttcaaaataacaatgtgtatatgctgttttatatcctactttttcacttacagcatcacattttccaatgtcattaaaattctctgtgaatgtaaattttaaaaactgtacctactgttttttggaaatctgtaacaagctatgtgtaatcattcttctaatattaaacatattgtgtccagaaaaaaa

SEQ ID NO: 698286 - DNA, 210 bp, Homo sapiens
gaagaggtacgcagttactgggtactccagtctcctccctttatctgtatgtgtatccctgtgctggttgcacacatgcctcgttcactgatgtatataataagcctgcaccatttgtatgtcaattctacctgctcttcttatccatcaaaaatcactttaacttatctctgtccatttactcttccatataaatagttaatcaaccca

SEQ ID NO: 698287 - DNA, 142 bp, Homo sapiens
tttctgggaaggggccctccaacaagtggggaaaaccttccatcagggcaaaattttcaaaggaaaattttttgccataacccaaaagcctgcacctgcccttcaaggaaatgggggtccttaaaagaaactccacctttga

SEQ ID NO: 698288 - DNA, 1061 bp, Homo sapiens
  misc_feature (279)..(279): n is a, c, g, or t
  misc_feature (802)..(802): n is a, c, g, or t
  misc_feature (816)..(816): n is a, c, g, or t
  misc_feature (1019)..(1019): n is a, c, g, or t
gctccaatgggggtggggggcacaggcttcatacctagtggagcatcataggattagtgggaaaagtaggtcggtagcaaatggggatgcagcaatacagagtaaatccagtggtagtcagggtggcagagatgggtagaggcaagggtaattctttcttggaggcaagagaggaggaaaggcagaacaggatggatggcaggacctgtgtaagaagaaggtcttaaattctaaacaagggtatagtaaaggtagtgtggccaagagggaaagaggaancggtggatctggacagccacaatagcaagcaatatgggcaggggtgcatgggctcactgggaccctatccaaggtaaatggaaataatggagatgaagaaaggaggaagaggaggaagtggcgggactggctgtagagttttgtaggaactcacttcatggaacagaaagaaagaagaggagaacaaggcttgagtggaagaggggaaggaaaaggcagcctaagggaaggcgctggcctgaatcagtggaagatctggaggagcaacagaaaacagttcttgaagagaaggtgggatagagagaggatggaaaagtttgagcggtgagagagcaggtcaaagtagtgagcacatccctatggagaagagatgactgagcccgatgaagcaataggccctgggtggttgagagaaatatgggccacagacaggcaggtaccttcccttggccaaggaagcaaggagaagaaatgtggacgcaaggggaaaggcttcaagaaagaatgtggaagtgggacgatnaggcagcgccaacnggggagtcacctacagaagacagggtggaggggcccccagggaaggatggagggcagaaagcgtggtggaagggagctgggcaggacagccacaggcaggacagccataggtggagtgaggtgaaggggcaggtcccagagtaggaacaaaggaatttggagtgctcagagcagcctgcaaggttcagcatggggcaaggaangtattagaggggggaagtcgacgcggccgcgaatttatagta

SEQ ID NO: 698289 - DNA, 130 bp, Homo sapiens
gtctggtgccagtcctaagagctggtgcgagggctcgtggatgtgctactcagggaaatgacttaggttctcccaggtgctctgttgataaggatggaagcagaactactttgagacaccagcacgaatt

SEQ ID NO: 698290 - DNA, 996 bp, Homo sapiens
  misc_feature (279)..(279): n is a, c, g, or t
  misc_feature (903)..(903): n is a, c, g, or t
gctccaatgggggtggggggcacaggcttcatacctagtggagcatcataggattagtgggaaaagtaggtcggtagcaaatggggatgcagcaatacagagtaaatccagtggtagtcagggtggcagagatgggtagaggcaagggtaattctttcttggaggcaagagaggaggaaaggcagaacaggatggatggcaggacctgtgtaagaagaaggtcttaaattctaaacaagggtatagtaaaggtagtgtggccaagagggaaagaggaancggtggatctggacagccacaatagcaagcaatatgggcaggggtgcatgggctcactgggaccctatccaaggtaaatggaaataatggagatgaagaaaggaggaagaggaggaagtggcgggactggctgtagagttttgtaggaactcacttcatggaacagaaagaaagaagaggagaacaaggctgtggaaggatgccagaggaagaaaaggaaatgtgcagaagaaaaggaaatgtgcaaaagaaagtgcttccatgggaagactaccaggttagttagaatgcgaaaaacacaaaaaatgctaagtaagaagtataaaaagcacatgaaagaagtagtaaaaaaacgaacaaacaaaaacaggtataaaggggcattctggcccttcaaaacaatgatcttcaacagtaaatgcaagcacaagaaggctccaggcttgggaggccaaggtgggtggatcgcttgaggtcaggagttcgagaccagcctggccaacatggcgaaaccctgtctctacttaaaaagaaaaaaatcagctgggcgtggtggtggatgcctgtaatcccagctacttgggaggctgaggcaggagaattgttgaagtccagaggtgaggntgcagtgagccgagatcgcaccacctacactccagcgtggcgacagagtgacttcttcgtctcaaaaacacaccacccccaccaaacacacag

SEQ ID NO: 698291 - DNA, 424 bp, Homo sapiens
agccgaagatagaaatcaacaccaagagaaactctcaaaagcacacaattacctggaaaccaaacttgctcctgaatgactttggtgtaaaaaacaaaattaaagcagaaatcaaaaaaattactttaaataaatgaaaacagagatacaatataccaaaatcttggggcatgcagcaaaagcagtgttaagaggaacgtttatagccactaaatgcttacatcaagcacaaatcagcaaagatctcaaattaaccaatctcaatattgcagctcagatgacactcagaaaacacaagacacaaattaacccgcaaagctcagaaggcaaagaaatacactaaaatccagaaccagaactcaaatgtcaattgcaggctccaaaaatcccagcacaaagcactcccatgcaacccaaaaaagtt

SEQ ID NO: 698292 - DNA, 146 bp, Homo sapiens
tgacacgcacaagttccctaaggataacagcgcaatcctattctagagtccatatcaacacatagggtttactgaactcgcattttggctctagagatttccgatggtgcagtcgcaattagaggttcgtatgttcaacgatttat

SEQ ID NO: 698293 - DNA, 114 bp, Homo sapiens
gacagccgaggcacataatgagacctcacctccacaaaactttttcaaaattagctgggcatgctggcacatccctgcagtcccagccactcagggtggctgaggcgggagggt

SEQ ID NO: 698294 - DNA, 803 bp, Homo sapiens
gaacgaaaatctgttcgcttcattcattgcccccacaatcctaggcctacccgccgcagctactgcatcatatctatttcccccctcatatatgatcccccaccctcccaaatatctccatccaacaaccgacataatcaccaccccaaccacatgcactaactcacaactaaccttccaacacaccaaatgcataacccataccacaccccactccacaaggacgcaacctggatcctccttatcacatagctatccctctcactccatctttcattgcaccaacaactaaccctccctcgccactccatgcctcactccattctaccaccacaccaccccaactatctataaacctcagccatggacatcccccttatgagcgcggcgcacgctgattataggctctcgctctaagattacaaaatgccctagcccacttcttaccacaaggcacacctacaccaccttatccccatactagttattatcgaaaccatcagccctactcactccaacccaatagcccctgccccgtcacgcctaaccgctaaccattactgacacggccacctacttcatgcacctaattggaagcaggcacccctagcaactatcaaccattaaccttccctctacacctcatcaatcttcccacattcctaatcctactacttatcctacaaatcgcctcgtgcccttcaatccacgcctcagtcctcacactctagtagcctctcaccttgccgacacccctccacaccaacccccccccaacccccaccccatacaccaccacccac

SEQ ID NO: 698295 - DNA, 409 bp, Homo sapiens
cgcttgtagtatgtcatggaataatgtctcctctatagctgctcagttctcctggagtaccatctaatcaggactgtgtaatccatgtatcgcatggtctgtatgcctcactagagtgtactcttctccatggtaggatcttactttggtccaactttttatttccaccagtttatagtgccttgccatatagtaggcagtgttagtaacaatttaaagatcagtacaatgcaataaaccattatacatagaacggcatcatagctcttgaccagctaagaagagtacacaaaagaccttgcggtatttcgcatgatggaacgctcattcaaagcaaaagcacataaaccatgataaaatatgacaagctttccccagatgcagtctcaatcattagtctggaagagac

SEQ ID NO: 698296 - DNA, 215 bp, Homo sapiens
acaactcttgcatgtcgtgtgtctacacggtggatcccagctgaggcatgagaggcatctcagtgggggtaatatctcctatgcttcttgcatacatcactaagtggctaaatgattagcacttatctgctctatgagaaacatgcagaagcgtcaatctacctaagtatacatttttaaattgcagccgaacagaaattcactttgttgcagtg

SEQ ID NO: 698297 - DNA, 192 bp, Homo sapiens
gaaggtgctacggttcccagacaacggacccagagtgaggccgaggcaggacgggcaggcagcaggcaggtgtggggaccctggattccccggcaggggaacccccaaacaccaggccctttccagtgtgaaatggggcccctctttcagttaattattccatccctggagagtctggggcctccactgcag

SEQ ID NO: 698298 - DNA, 488 bp, Homo sapiens
  misc_feature (391)..(391): n is a, c, g, or t
cataacctttaatgagatcagcttcatgaaatggaagagagcttcatttgcatttgggaggaaaaaggatttgtaagtcgataggacttttggaagaagagcccgcctgggacagggagcatggtgctgttggccagtggggcaagatgggcagtcagaaaatcccaggaatctcaggggactttctgagcaatagtagaggaataaaagtaaattaacaaaatgtgcaaagagtgaaaaatataaaaagcaaactatttccaaatattctcccagatagccctactcaataaaaaataaggagtaaaattttcttttgttcccagaatcctgatctcttttactattactactataattcattttcattatgggctgatcaaacccacanggaacccagaaacctaaccagcattttccccaaaatatagtatctctaggactaggctctaaacaattgactgaaaagtaaactatggggacctgat

SEQ ID NO: 698299 - DNA, 592 bp, Homo sapiens
caattttataaaagtggatttccacaaaaaggttcttttaaccgccaattttctttttattaaagctgtgagggtaaaggtaggcatttgtcaaggttctcaaaataggctaatttgcaatcaattatctaagttcagtatttgtgtaaagatttatcttttagtgtgaaatctgtgcaaatcttatgtgtacattcactgagttttgacaaatgcagatacatgtgtaactgaacttatgactttccttatagaaacttcagaaagttccctcataccccttatctcaatcttgtcactaccccttttccctcaggcaaccaccattctgatgttttttccactatagaataagagttgcctgttttagaatttcatataaatgcagtcatacaatatttagtctttctgtaagacttattttgctcagcatgtttttgattttgtaacgtgtatcagtagtttctttttactgctgagtagatttcattatatgaatatgctgcagtttgtgtatcccttcaattgatagacccttaagctgattcctgttttggctattatgaataaagtcgcaatgaacattcttata

SEQ ID NO: 698300 - DNA, 781 bp, Homo sapiens
ccacgcgttcggcaacctccgcctcccgtgttcgagtgattctcctgcctcagcctcccaagtagctgggactacaggcacgcaccactacgcccagctaattttgtgtttttagtagagatggggtttcaccgtgttggccaggatggtctccatctattgacctcgtgatccgccccctcagccttccaaagtgctgggattacaggcgtgagccactgtgcccggcaaaactctgtctcaaaaaaaaaaagtaagaggaggaacacattcaccctcggtataatgctggtatatatggagagatgtgctctgctacaaaagttggtgataaaggattaattttcttaaaaaaaaaaaaaaaaaaaaaaaaaaaaaccaaacaccacaaaaacagagagggggggcgccgcgcgcgcctacaagagagagtattcccccgtccgaggggggggcgcgccccacacgggtttgtcgcgcgcgcgttacacgcgcgcggtttttttgtggtgggaaacccagcgggggggcgccccccatgagggggggcgcgccgctattattctaaaccgcctcgagcgagccccccgtctgacgcgcgcggcgcgcgtgttataaacccacgccggtccccgggagagagggggggacaaaacagaccgtgcgctcccggggcgggcaacaccctctgtggggagaaggggcgacccccctttacctcgccgccgggggggggcggggcgacaccccaatggcggggcaccacaacacactcccccca

SEQ ID NO: 698301 - DNA, 96 bp, Homo sapiens
taactggaaaaaaagtttattaggggaaacgggatagaatctattcccaatttctgagggtacaaactttaggggccttgaaaaattcaggatcct

SEQ ID NO: 698302 - DNA, 422 bp, Homo sapiens
  misc_feature (35)..(35): n is a, c, g, or t
  misc_feature (116)..(116): n is a, c, g, or t
  misc_feature (119)..(119): n is a, c, g, or t
  misc_feature (140)..(140): n is a, c, g, or t
  misc_feature (142)..(143): n is a, c, g, or t
  misc_feature (165)..(165): n is a, c, g, or t
  misc_feature (188)..(188): n is a, c, g, or t
  misc_feature (190)..(190): n is a, c, g, or t
aataagcccatataggtgttccactggaatggggnaaagaaaagcagaggtcggcaaaacattttgtaaaggacagattttgtaaatgcctttgtgggacatatggtctcttaaanccnagtaagctttgatgtgagtanannagtgtctgagcgctagtcttgnaaatggtgcagtgtacctgtgcntnaataccaacttatgatggacactgggatttgaatttcatgtgatggtcatgtgtcgtgaaatattattgttttgaattatgtttccagccattaaaaaaatgtaaaatctcagccgggcacagcggctcatgcctgtaattctgccactttgggaggctgaggcaggcggatcacttgaggtcaggagttcgtgaccagcctggctaacatggggaaaaaatgtctccactg

SEQ ID NO: 698303 - DNA, 112 bp, Homo sapiens
ggtagctggaaatggtagacactcaccgtctgccggtcaccttcgaacagtgagtgtctgctgccccagggtaacatcctgtccacctgacttgccactcaccacgccggag

SEQ ID NO: 698304 - DNA, 264 bp, Homo sapiens
acatgtgtatacgcgtgcatgcgtgtcatgtaatgtgtgtgtatgtctagcatgcttgtgattgcatgtgtgcatgtgtatacgtgtgcatgatccatgtgtatgtgtgtacatgtgagagtgcatctgtgtatgcatgtgtgagcgtgtttgcaagtgtgtctatgtatgtgtccgtgtgcatgtgcatgtgcgtgcatctgtgtatacataagtgtgtctgtgtgtctgcgtgtgtgtccgtgggccttatgatagggtacc

SEQ ID NO: 698305 - DNA, 117 bp, Homo sapiens
cctcagtaatgcctttcttgttgggtaggggttgggagtccccgtgcatcctgtttttggcccataaggggctgcagcactgtgggcgccaaagcacaaattaaattttcaaaccca

SEQ ID NO: 698306 - DNA, 235 bp, Homo sapiens
  misc_feature (25)..(26): n is a, c, g, or t
  misc_feature (196)..(196): n is a, c, g, or t
gatggtaaaacctcgtctctactannaatacaaaaattagccaggtgtggtggcaggctcctgtaatcccagctactcaggaggctgaggcagagaattgcttgaacccgggatgcagagtttgcagtgagccaagatcacaccactgcactccagcttggacgacagagcgagactctgtctcaaaaaataatanggccaggcatggtggctcaacgtctgtaatcccaagcac

SEQ ID NO: 698307 - DNA, 191 bp, Homo sapiens
tttttcccccctttaattttaaattattgggggccacccttccccggaccggggggggtaattttccgggccttttggggccccttgggggatttaagggatgggaggggtttttccccgggccccggttttgccccccccggggaattggggccaccccggcttttgaaaaaaagaaaaatttctttaga

SEQ ID NO: 698308 - DNA, 582 bp, Homo sapiens
  misc_feature (7)..(7): n is a, c, g, or t
  misc_feature (185)..(185): n is a, c, g, or t
  misc_feature (191)..(191): n is a, c, g, or t
  misc_feature (199)..(199): n is a, c, g, or t
  misc_feature (225)..(225): n is a, c, g, or t
  misc_feature (234)..(234): n is a, c, g, or t
  misc_feature (283)..(283): n is a, c, g, or t
  misc_feature (291)..(291): n is a, c, g, or t
  misc_feature (309)..(309): n is a, c, g, or t
  misc_feature (337)..(337): n is a, c, g, or t
  misc_feature (339)..(339): n is a, c, g, or t
  misc_feature (344)..(344): n is a, c, g, or t
  misc_feature (365)..(365): n is a, c, g, or t
  misc_feature (390)..(390): n is a, c, g, or t
  misc_feature (392)..(392): n is a, c, g, or t
  misc_feature (416)..(416): n is a, c, g, or t
  misc_feature (422)..(422): n is a, c, g, or t
  misc_feature (431)..(431): n is a, c, g, or t
  misc_feature (438)..(438): n is a, c, g, or t
  misc_feature (456)..(456): n is a, c, g, or t
  misc_feature (459)..(459): n is a, c, g, or t
  misc_feature (465)..(465): n is a, c, g, or t
  misc_feature (476)..(476): n is a, c, g, or t
  misc_feature (484)..(484): n is a, c, g, or t
  misc_feature (514)..(514): n is a, c, g, or t
  misc_feature (519)..(519): n is a, c, g, or t
  misc_feature (527)..(527): n is a, c, g, or t
tgcagtngacagcgtcaggggggtgggagaaaagggaagtgagggagggaagataaagaaaaggaattaagttgatcaagtggaattcttttttttttttaaattctggggaactatgaagtcttggcaagcacagctcggtcctgcagataatttcccaaccgtgtacaaatgggacccaaaanggagantcccttangaccctgaagaggcgcaacattaaangctacgatnatccagtagcaggtgtcccagccttcagtggccagccgctcctcctctnatccccangataagggggatgaaaangtctcccccgtgatggtttccattcctntntcctnggcatcggggcgtgcgcggtncagcaccttgaggaagtcagacgtntncgcccgcatacgtgtgtgaatatnggcctnagagcactngatgtgntagtgcaggtagccccgnaangtgtgnatcaggtgganggtgtagnctcgagcacgggcatcggggtacgagggancagcncaaggtantgtagccaatgttgtcacccaaaggggggactgtgtctaccagctccagaggagg

SEQ ID NO: 698309 - DNA, 221 bp, Homo sapiens
ggttgcaggtcacacaggggaggtgatagcatggctttcgggtacattatgtaatgcaaaatttgtgaatctgcgccttaatactttttgatgtggtttgatggggaatgatgagccttcggccccccgcttccccctttttggtcccccaacttgagatgtatgaaggctttgggtctccctgggagtgggtggaggcagccagggcttacctgtacact

SEQ ID NO: 698310 - DNA, 342 bp, Homo sapiens
  misc_feature (11)..(11): n is a, c, g, or t
  misc_feature (73)..(73): n is a, c, g, or t
  misc_feature (82)..(82): n is a, c, g, or t
  misc_feature (101)..(101): n is a, c, g, or t
  misc_feature (129)..(129): n is a, c, g, or t
  misc_feature (143)..(143): n is a, c, g, or t
  misc_feature (188)..(188): n is a, c, g, or t
  misc_feature (212)..(212): n is a, c, g, or t
  misc_feature (217)..(217): n is a, c, g, or t
  misc_feature (258)..(258): n is a, c, g, or t
ggcaggtaggngttactcttggcattatgatctaagagtcgtagattagagtttgaagacataatgagtagtnttattaaanatagctattatcattctgnatttaggtgcaatattcagaattcaganttggtaataacttnctttgagcactgtttcagcagcttttatcctattcatatgactgncagacatattccagggaactattntactnagccttgttgattgtccctgcattaaataaaatccacaggngcaaaattgtaaagtaggccttttagttcaatttgggcatctttttttcccgggggtgatattctcagtcccagggggtttgga

SEQ ID NO: 698311 - DNA, 432 bp, Homo sapiens
  misc_feature (422)..(422): n is a, c, g, or t
ccctgggtctgacttagtttgggggcatttaatgctttggtaaagttaatatcctcttactccctggcaaaactgttcattactcttacctcaaatgtacacttgatttgctgaggctttttaaaaacaggccggccggccgggcgcggtggctcacgcctgtaatcccagcactttgggaggccgaggcgggtggatcaataaggtcaggagatcgagaccatcctggctaacaaggtgaaaccccgtctttactaaaaatacaaaaaaaaaaattagccgggcgcggtggcgggcgcctgtagtcccagctactggggaggctgaggcaggagaatggcgtgaacccgggaagcggagcttgcagtgagccgagattgcgccactgcagtccgcagtccggcctgggcgacagagcgagnctccgtctca

SEQ ID NO: 698312 - DNA, 861 bp, Homo sapiens
  misc_feature (53)..(53): n is a, c, g, or t
  misc_feature (590)..(590): n is a, c, g, or t
  misc_feature (737)..(739): n is a, c, g, or t
gatagatcacatcagaactcctgtggggaggaaaggcttgataagtttaaacncatggcccccttagagaccacaggcgatgtctgtctccatccttccctctccttttctgtcacctttccccctagctggctcctttggacctaccccatgtccttagctgacattgtgtggcatagtattccaaacgtgttttacgggtactctctaagcaaatgtagctcatatgtgcaggacttatcatgaataccaaatctgctttttagtaaagcgtaaaaacatcacaaagtaggtcattccatcgaccacccttgtctctctacacatttagccttgaggggatctggatcggggtctttgggataacagtatgtagtctgtattagtatcgttatatgaaaaaggtgacacttgcagcttctttaacacaatatatacattgtgttgtagcttacattatactctagcatgtttgtttcttcaaccgctgcaagcttagtagcgtaaaatttgatacaagagttgggaacaaaaactaaggttatagtgatcgatattcttgaggataacagcttgaacaggctctaagntaaatctcaggctatggaagtctagtccctggtttattggcctggtaactcgtggtgccatgtgtgaatcttatgcgggtaatgattaaggagtgtggttaatttcttcaagacagaaccaagggtttaacataccctggaacgatnnnttcttgcagagcctggtgggtaagcgattgttgtaagcctggtatgggctttggcatttaggtagttgtccttggttaacatggaacttgtccagtatggctaaagtgcgtctaaaattaat

SEQ ID NO: 698313 - DNA, 859 bp, Homo sapiens
ggcgcgctttgggaccaggaaggttgagagagaggcccaggatgaggaggagcttggctcccagtcagctggccaagagaaaacctgaacggcaggtcctgtgatgatgacgactggcaacctggcctagtgactccgtaggaaactggaaatccagcagtgagacccgagatccaggagtgttccctgtctccttttctcggaaactttgagtcacgctaatcacatcaaaccaacttggtcgtggcacaggcagtcagcatgaagcattcattcgaagcattgtgtcaaagcctttcaaagtccccattccaaattatcaaggtcctctgggctctcgagcacttgagtgcctgaatagagggactgtgggtaccagccggagccctccatgaccccctggaaaaagatgccttggttctgtatgatgcctcccccgctgagcgctcatgaccagctagaagcttgacaaggagaaactccctgtccatgtggttgttgaccctattctcagtaaggttttgcggcctcatcagagagagggagtgaaattcctgtgggagtgtgctcaccagtcggcgcatccctggcagccatggcgtgcatcatggcttgatgagatgggcctaggaacacgacgcttgcagtgcatcacattgatgtggaccacctttccccaaaacacaccaaccaaacacacaaacaaaacaacacaagacagaccgacagacagccacaggaagaagaaaaggaggagggacgagaaaaggaaaagagacacagagagacaacaacgcaccaaagcgacagcagcgaaacacaacccgaacacacaagaacacagaacagcaaaccagcc

SEQ ID NO: 698314 - DNA, 185 bp, Homo sapiens
  misc_feature (53)..(53): n is a, c, g, or t
gatagatcacatcagaactcctgtggggaggaaaggcttgataagtttaaacncatggcccccttagagaccacaggcgatgtctgtctccatccttccctctccttttctgtcacctttccccctagctggctcctttggacctaccctgtcgggctagtcggggggaccgagctgattgtagt

SEQ ID NO: 698315 - DNA, 167 bp, Homo sapiens
ctctctatagatagtgctctctctctaccctactctctcccactccccagctctggactaacatacctgcatgtccacagaggcaccaatctgcaatgatagatgagactactctcacccacccatgctactcaggaaacttcttcacatatctcataacacagaga

SEQ ID NO: 698316 - DNA, 248 bp, Homo sapiens
acctggactaagccaacattaatccaagaaacagcatatacagtgccatataataagaatatggaaagttcatagctgtttacattttagttccctgtatactaataagtttcctaagatgttatataattaggtagtctaagataacaatataggctgggcgttgtgacttacgcctgtgatcccagcacttttggaggccgaggcaggccgttcacctgaggtgaggacgtcgagatcagcctggc

SEQ ID NO: 698317 - DNA, 412 bp, Homo sapiens
aaagggaaagccatgtggaagcgggaatgttgagccttatcataattccatttaattcaccactctgacctctgtaaaaaccagacactggagaatgaaagtggactattgaaaactcagccaagtagtaaccgtaactgcagcgtctgtaccagatgtgaaacattggctagaatagactaagacaaggtcagctacatggtttgtggccactgatctgtcaaatgttttcttcccccacccatcagaatggtagatcaaaaactgtattcccttgagatagaaaatatttatgatggacacacacacacgcgcgcacacacacaacacacatacacttacattgctccagagttccctattaggttggctgaggcttttgttgtgactgcatcttagtaaaatctctccc

SEQ ID NO: 698318 - DNA, 293 bp, Homo sapiens
ggtaattcatgctttttaaattcagccagccccccctctttgaaattttattatgtaaataatttgtgttccctgatccctcgtttaagtttttagttgtatgtcatcttttctctagcaggaattggcaaacttttttgtaaaggggtaaaaagtgaagattttaggctttgcaggccatatagcctttgctgcaaatgctcagccctgctgttgtaatgtaaaagctcccccagcccctccatgaacccgaatgagtgtggctggtgttccaataaacctttttttcccca

SEQ ID NO: 698319 - DNA, 240 bp, Homo sapiens
  misc_feature (61)..(61): n is a, c, g, or t
ctgcattcgttacaccatctcagccagatctgagctcctgacaaaatatgttcaccattancaggaacacaggagtcatcagtgtggtcaccactgggctggaccgagagagtttccctacgataccctggtggttcaagctgctgaccttaaggagggtaagcaccagcaacagcggtcagtcacgacacacgattcctccgatcttcaatccccacgtacagggtcaggtgcctgaga

SEQ ID NO: 698320 - DNA, 162 bp, Homo sapiens
agggcccgtgggagccgcttgctcgggatcggagtcgcttcgcacgccgtatcacccaggcccaggaggagctgagctcctgcctcatccctggtgcccgggtcagggcctgggcacgcctcaggaacccaccttgagcccccatccctgccctcacccaga

SEQ ID NO: 698321 - DNA, 409 bp, Homo sapiens
aagttcacacttatatgaatctgtatgccatatgccggccctgactcgtggaaatgtccacgtggacattaccacaaatcaaagttccagaacctgagtaaggatccttagtacttgagtggcatcttgttgacctggaggagcatttctcattgtacaagatggcctttgttctagctaaaatgtctggagaattcccaaagactttccctaatgtactaggcattttattcggatggactatacaaactcttcttagtcattatcaatctcggtttcttggtggtgcagtgaagggagaaataggtctagtttcctgcctctgattagccgcacagctttgaacaaatcacatttcatctttgaacttacctctactgtaagactaggtgactcgtggaattgtcca

SEQ ID NO: 698322 - DNA, 476 bp, Homo sapiens
  misc_feature (6)..(6): n is a, c, g, or t
  misc_feature (449)..(449): n is a, c, g, or t
agcccngacctaaccagttatgttatctatagattccagacattgtatagaaaagcactgtgaaaatcccgtcctgttctgttctgttctaattaccggtgcatgcaacccccagtcacgtaccccctgcttgcccaattgatcacgaccctctcacgcagactcccttagttgtaagcccttaaaaaggtcaggaattgctcactcggggagctcagtttttggagacgtgagtcttggccaaagctcccagccaaataaagcccttccttctttaactcggtgtctgaggggatttgtctgcggcttgtcctgctacagggttacagggcgtgagtaaccacatccaggcacatgtgtattaactttctttaaaacattttaaggcactgcagtaaatttgggtctcaaagttggacacaaggaggttcctgggccgggtgtaggtnaggtaggttttgcccattaatccaaac

SEQ ID NO: 698323 - DNA, 308 bp, Homo sapiens
gcggctccgggtacctcttttgcagtttccgccgtaccgaacaggcggctgatgtcgattcccaggcctttactgatccgcaccagcttgtcgtagctcagggataacttgtcgttttcgatcttggacagcgtggtcgtcggcaggccggttttctcgctgacctgtgccagcgtccaaccgcgctcgacccgaatcgccctcaagatgctgcctgggtgagcggtcgtggatttgccgcgcttatttgcctcattcggcaatgttccgttcgccatcgagcaatactagcgcctgcggctttggtt

SEQ ID NO: 698324 - DNA, 417 bp, Homo sapiens
  misc_feature (15)..(15): n is a, c, g, or t
ttggcccaaggcaanttcgttgggtcaaacaaaccaacccccagaaaaaggccagtgtggttacctttcctgtttacctgaaatttacccgggcagaccttatttttcccgtgggctttgaaattgcttcaaaggaggatccttgcagctttttcgaacggggggttgcagttttgtgcccaaagtaaacttttttagctgcccccttttgtaataatgaaaggtgggattttaccttttttccttttttaaaaatttggaaggtttgagcttgttaaaaaaaaatggttggttttaggttggaggaaactgaatggaatttttcggttgggagtggtggaaattggaaggatacccggagggttttgggaaggcccatggggggggtccttttaggaaattaaacccttagcctta

SEQ ID NO: 698325 - DNA, 196 bp, Homo sapiens
tacctcttctcccctgacaccctgatagcgcatcacgatgaaggcgatcagcaccccaaccggcaggaaatgattgccaccagagatgaacgcaggtgccagagaaagattccgcagaccaacgcgacgacgatgaactcttcgatcagcttgtggctgaggttttccacggcacgatcaatcaacttgctgcggt

SEQ ID NO: 698326 - DNA, 229 bp, Homo sapiens
atggttttaatttctatttccttgatgacatatgactctgagtatcttttcatgtgattattagccatttgcatatctcctttggagaaatgtctattcaaactgtttacccattttaaaaatttggttatttgtctttttattgttagttttaagagttctctatatgtctggacacagcccttatcagatatatgatttgcagatatttcttccattctgtggattt

SEQ ID NO: 698327 - DNA, 524 bp, Homo sapiens
cagtgttctctcctgagcatgaagctgactcttggtgttgcttcactgcacctgccatgtgccactgatgattgttcttgtcttcctctgggagagtaagacggagagcatgcagtctgagtgcttcccattttattgttgtgtactaagaacagtgtttttgttgtacatgagggtgatagctttaacatttagcaggcaaattgttttgagaacatgtcaagtgagagcttttttcctttgttctttgcttgctgaagggatccttgtggggtgggctgcttggtctgtcacatggctctcaaaaatagtctttctaattccagtattccttggtttttctgggcttctgaaggtttttactatgtagtgatttcagaaagttcattattgcttagtctgctgtgtttagttctcttcaaggttttgtaaaagagacaaaagcttttatttcttggtaggtaaagcatgttgaagttatccatttactctttttttcctttttttctttcctttctttctta

SEQ ID NO: 698328 - DNA, 216 bp, Homo sapiens
gtacgggatgcttcacagctactcgggaggctgaggtacgagaatcgctggactgggaggcagaggatgcagtgagccgggatcacgccattgcactccagcctgggggacaagagtgaatctgtgtctcaccaaataaaaaaaaagaaaacgaaagatgcttaccaaaggttaccataagccacaaattcatacccacttatccttccagtttca

SEQ ID NO: 698329 - DNA, 146 bp, Homo sapiens
taaatttggggggggcccggggggaattatatggtttgggggggtcccccccccccaatctcatgttgaattgggatcctgagttttgggggtaaagcctgggggggggggattgggtcctgggggccgatttcccccctgcggtt

SEQ ID NO: 698330 - DNA, 410 bp, Homo sapiens
  misc_feature (298)..(298): n is a, c, g, or t
  misc_feature (302)..(302): n is a, c, g, or t
  misc_feature (346)..(346): n is a, c, g, or t
  misc_feature (400)..(400): n is a, c, g, or t
ccatggatgaatggataagcaaaacgtgtcatgtacatacagtggcatgttactcagccttaaaaaagaagaaaactctggggtgggcacagtggctcatgtctgtaatctcagcactttgggaggccaaggcgggtggatcacctggggtcaggaagctcgagaccagtctggccaacatggcgaaaccccatctctaataaaaatacaaaaattagactctacctcaaaaaaaaaagaagaaaaagcagaagaagaggaagaacaggaagaagctgtggagacatggtactgctanaccngtaggaatgttgacatgatgctaagtgaaataagccagtcacangacaatgctatgtgatttctctatatgagatgtctatggtactcaatttaccgngacagggcag

SEQ ID NO: 698331 - DNA, 135 bp, Homo sapiens
cgtgctcgcttacgtgatcctggtcataggtgatgctctgtgtggtatagtgatacggtagcagaaacggggaagtgcattactacctcaaggaacatcatgaacactttcaaattggacccttgggtgaaattt

SEQ ID NO: 698332 - DNA, 174 bp, Homo sapiens
  misc_feature (40)..(40): n is a, c, g, or t
agcggggcacgtgtcgctgagtctagtggcggcacccccntgttgtggtcaggctatctgcccgtcaacgagtctttggcttcaccgctgacctgaggtcaacacgggcggcaggcgttcccccagtgtgtgtttgaccactggcagatcctgcccggagaccccttaaactcg

SEQ ID NO: 698333 - DNA, 1173 bp, Homo sapiens
caagcgccttctccgacaccaggaagcccacaccgcaccagaagaccaagatgtccagcgaagcgggccaaagccgaagaccaccaagaagcggccacgagcggggccacgatccaatgatctgtcgcaaatgtgtagaccgagtcccagagtccaaggagtattaatggacggcatgttcagaccattgatgtgaccagaaccgtgatggcttcgttgacaaggaggaacctgacacgacatagcatggcactcgcctgagggaagaaccgccgacagacgaataccatggcagggtcatgatgagcgaggccccggggcccatcaacattcactcatgtgtcctcactcagtgttcgagggagaagcatgaacggagaacggtacctccgaggatgtgattctgtaacgcgctttgcgctgcttcgaccgaggaagcctcaggtttcatccaatgaggactcacctccgaggacgctggtcacacacacatgggtgaccgcttcaacagatgacggaagtggacgagatgtaccgggaggcaaccattgataagcacaaggcgactctcgactacgtggagtgcacccgacatcctcgaaacatggcgccaaggatgaaagacgactacggccaaccaaagtccaatcggccgggagctgacggcacaagactctcatcttcctatgcgctagacccagcacatagctaccggacctcatatatagtgaaaaagcaggactacaccataacgcgacgacccaaaggtgccagaactggaccacaaagaacaggtccaggaatcaggccagaacaagaaatcacagggctgcacagtgaacaaaaaaacagcggaagaccagcgccgcacagaagaagaacacaaggccacaaatcagcacaacagactaacaggaacaccacgggcggagacacgagacacggagagcagccacggcgagaaacaccaaggcgccaacagaaggagaacaggcagcacgacaccacgggcacaaaaaacgagcagggcagggcacgcaacggacgccagccccacaacaaccggagcaagaacggcgaggaaacaagcaagacacaacaacaagagccagagagagagacgagagaaggcgagagacctagagaacgcactgcgcaagcgtctccgagaga

SEQ ID NO: 698334 - DNA, 440 bp, Homo sapiens
ggggggaccacacgcgctgcaaaacggtgctcacgggcaaggtggggggcctcctggcctttgccaaacgccgcaaattttgcattggctgccgcccagtgttcagcccccagggagccgtgtgtgagttttgccagccccgggagttttagctgtatcaaaaaaaggtatcccatttgaatgccctggaggagcgcttcttgcgcctttggacccagtgccagccctgccagggcagcctgcacgaggacgtcatttgccccaaccgggactgccccattttttacatgcgcaaaaaggtgcggaaggacctggaaaaccaggaacagctccttcggcgctttggaccccctggacctaaggcctggtgaccttgcaagcatcccatggggcgggggcgggcccagggagaattaataaagttttggacttttgctata

SEQ ID NO: 698335 - DNA, 238 bp, Homo sapiens
cgacacggtggtgttagacaggtgcggtctgtacgtacgtactacgtgctgccacgccgctacggacctgggacgacgactacgacgaccgtacgacctgctgtgactagaccggactacgaccgaccgacggggcgtttggtgttgggttactggccgggggtttactacttgactaacttgttgtgactgacacacttgactggcggggactcctctacgacgtcgaccctgcacg

SEQ ID NO: 698336 - DNA, 147 bp, Homo sapiens
ccatcttagtcagagtggttatgacctgtcagggtcacatgaggtctcgccagtttcctgggtcctcttcagaggccagaaagttctaagttctgagtccccggccagggtccctataacacctcggtcacagaaggctgttggcaa

SEQ ID NO: 698337 - DNA, 195 bp, Homo sapiens
agaggcatcatctttggagtcctgcctccagcggaacgtgtggtctcttctatccataatgtatgcacagaagctgtttatttattattggggaatgctcctgcagcatgctgacttcaccttgtgcaatccagaagaagagggatctgtggctaccgagcaatatcctggtgacccctgatgcatgttctgggt

SEQ ID NO: 698338 - DNA, 180 bp, Homo sapiens
cgagatcgcgccactgcactccagcttaggcaacagaaagagactccgtctccattaaaaaaaaaaaaaatcagggatagaagggctcctgaatgctttagtcttactgttgtaagatatgaagaggccaggtgcaggggctcacaccagtaatcacagcacttggggaggctgaggtgg

SEQ ID NO: 698339 - DNA, 171 bp, Homo sapiens
caagccccctatcttacttttcaagtgccatcctactaagcactcatactatatgcatcccctcagctacacacgagacaacacacagcacacgcatgaacacagcacacacacgagcacagcacacacacgagcatacagcacacacacaaacgcacagcacacactgtt

SEQ ID NO: 698340 - DNA, 857 bp, Homo sapiens
cacactttattataaaacgggcttcgtgttagataattttgctaaacagtaggctactgtaagtgttctgagcatatttaagacaggctagcattttcaatttacaatattttcaactgatagtaggtttattgggatgtaaccctatgataagttgagaaacatctcttttgtgtgtctactgtgatttaagtatttttaatcatcagccaagcattgttagtagtataaatatgattaataaaaatgtgcatggctttcctgaaggagattttttaattgcctttgagaataaactcataaggtctaccaagaaaataaatgttatgatgtttcagttggcttctaggaaataattaaattagtgatattaaattaaacaaatgcttaatttaattaatagtcaacaacttagccacgtgtggtggtgtgcctgtagtcccagctactaggcagggtaaggtaggaggagcccttgtgccaggagtttgaggctgtagtacactattattgagcttatgaataaactctgcacttcagcctgggcaataaagcaagacccagtctctagaaaaaaaaaatgattaggtaaagaaaagaaatcaaattttcacaatgggagaatgtggttttactatctgctaggccccttccatcaattcttattaaattctcaaaataatcctttgaaaagggagtataattcacattttacagtgacctgaaccttacccaaacaagtgggagagcaggagccaaatatcaggctccaaagcttttttttagtgcatcacaatgacaaggggtgggttctttcacccaagaatgtgcttcctggaaattttttagatgaattc

SEQ ID NO: 698341 - DNA, 449 bp, Homo sapiens
ggtagaaatgaggaacgtgttattggacaggtggagaaaaggtgatccttgttataaagtagcaaagaactggctgaattgtgtttacgtattagtgtttgtagagggtaggacttgtgaacagtggaatggggatttaggctgaggaggtctctaagcaaagtgttgaaaggagagggtttggtcctcctgactgcttataagtcgaattttgtgagcagagcgagactcccatctataaaaaaaaaggaaaagggaaaaaaggaaaaatcctatattgccattgaatgtgccctttaaaggtgattctgatgaggcagtcagaaagaaatgaggagagctgtagagaaagcttctgctttcttaaagaatacataagtaatcatgaacagattgggggtagaaatatgggtggttaaaggctgttctgatgtggtctcaggtagaaa

SEQ ID NO: 698342 - DNA, 101 bp, Homo sapiens
ttggtcgtgtggcgtgtggtgtgtatgttgacgtggtgtgttgggtgtgaatgtggtgtgttgtgtggtgtgtgtttagtgtgtgagtgtggtgtgtggtg

SEQ ID NO: 698343 - DNA, 401 bp, Homo sapiens
actagtgtactatttgtataccaattatttagatatctgggacgaatatgttctagttcctttaacatagtaatacataccaaagctgactcaagcaagttatagataaatctgaatagactcataccaagttagaaaagattgagctaatattgaaaacactttccatcaaagagaacaagattttattaaatatttaaagaagatttaacatcaatctttcacaaattcttccaagaaaagaacaagaagaaggagaagaaggaggagaaggaggaggaggactttcatacttattctagaaggtcaatattacactgatgccaaaaccagaaaaagctaccacaagaaaactacagacaaatatctcttatgaatatagacacaattagatagtggta

SEQ ID NO: 698344 - DNA, 157 bp, Homo sapiens
cagccacttggtagtacctcatggaggcctgtccatggctgctcatacacttctacactggacattggtctcatagttggcccaggctttggctgctctcccctcatttcctgatgccgggtggtgtatgttaggtcccagctcagcaggtgtgtct

SEQ ID NO: 698345 - DNA, 501 bp, Homo sapiens
cactcccttatatggaatttcaggtgtgtattttttatttatttttattttttattttgggagtacccaggctggattgcagtggtgcgatctcggcttattgcagcctccgcctttgggggtcacatgattctcgtgcctcagtctcctgagtggctgggattacaggcatgcaccaccatgcctggttaatttttttgtattttaatagagatgggatttcaccatgttggccaggctggtcttgaacttatgacctcatgtgttccacctgcctcagcctcccagagtactgggattacaagtgtgatccaccatgatctggcctcactccagcttttttgtattttcagtagaaacaggattttgccgtgttggccaggctggtcttgaactcctagcctcgagtgatctgcctgccttagccttccaagatgctgggattacaggtgtgagccaccatgcccaagtgggtttctggtctttaggtaaactagtttg

SEQ ID NO: 698346 - DNA, 216 bp, Homo sapiens
tacagactgaatgttttcatgttacttatactaacattagtttcttctatagggtgatagattggtccaattggcgtgtgaggagctcagtttatatgtttgggattttttaggtcgtgggtgttgatcttgaacgctttcttaattggtggctgcatttaggcctactattggtgttaaattttttactctctctacaaggttttttcctacgtg

SEQ ID NO: 698347 - DNA, 179 bp, Homo sapiens
atctagaggaccagaagcgcaggaggaaggacatagagaagacgacacacaggggaatgcaagacaggaggaagacagagcagggagatcaaaatcaccagggataagagcagcgaggacggaagacagggggcacccggaagtttgccctgtgaaggacagcagagggcagaggggtg

SEQ ID NO: 698348 - DNA, 113 bp, Homo sapiens
gtatatggtgagccgtatatgggtgagccgtatatgggagcatctgaaattatgttagccttggcctagttatggtgaattaaccttagcatatgatagttctcttaatgttt

SEQ ID NO: 698349 - DNA, 145 bp, Homo sapiens
atcgcggaccttcgctggcgggcacttagaggtggggagcgaaatctcttatccaacatcaactatctggtcgattgaactcttcaatctctgcactcaaagcttgttaagatagttaagcgtgcataagtgcccgccaatcgaa

SEQ ID NO: 698350 - DNA, 1463 bp, Homo sapiens
  misc_feature (314)..(314): n is a, c, g, or t
tgggatagtgggacaacataacaccaaattcccccagcccagcttctgggggcatgcaaaattccttccttaccacgccgggaccaccttcttcatatacactgtggaaaaactgtggattcctgtgttagcgagaacgcccacaccgcccctgtggaacctgtggcgctgtgataaccgggtggaaacgcagcaccggtcccattcggtttctccgagaggtggtatttcacaagtgggcgcctcatctcggtctcctcatctcttctcgggtacacccagaaatatattattctcagagaacatctcttttnaccttttctccccgctatagcgcgcggtttgctgtggagaaacgcccagacagggagaccaccgagaagcgacagcgcgagagcggagagcccaaaatgcgcgcgagcgccacagagcacaccgcggtgttcgtgctctcccacacacaaaaagggggcgcgcaatagagagcgcgcggcctctctctctcccccccggcgcacacccggggggctcctctctctcaccccacgcggtgttgtcgcccgtgtctcccaagagaggtgtgcggaagagcggccccccgagaaggaagagaagctcccacgaaagtgaacccctttctctcccccccgagggggacactctgcgggggctagtgacctctcccggtgggaaaaaatttcccgaacgcgctatacgagagaaaaaaggcctctgtgaagaaggctcctaaagagttttaaaacccgccgagggacaccccataagggggcgcgtgaaaaaaaagagcgtccgttgaaaaacgacatttgtggcgaaacaccacacggcgcgtgggtggggcaccctggataattaagggagacgttcgtgtaaacccgctgggaaaaccccgtggtggggggttctccaaaagacaacctctagctttctctcttaaaaaacatgccggccaagaagatgcggggcccccggcctcctcactaacgaaagttattatcccccgtccagcaggggggcgccaccaaaaagccatatacccgccgatggaaccaccaaaggttctgatcctttgtgtaccaccaaaggggggtgggcccccctataatagggaagagagctcccggatatatataaaacgactaaaggacacctgtggcccgggctgtttttaaacaaacccgtctcgctgtaccgcggcgcacaaacaaccggtctaacccttggggacccccttgtggggaaagcaaccccctactatctccgggggccgtggcacccaacattgtcgccacacacaccctagaagagagattaaacgggctctcaggcgcagatattatccaacttctcagcaggttattccggttggttgacaccaacagccgcggcattttgtctgctcgctgaacaacattggctctcgcgacaatggatcttaaatc

SEQ ID NO: 698351 - DNA, 585 bp, Homo sapiens
tttgtataggtactagggagcagattaaactatatcagagtgtactttcaatatcaaagcagggagaggccaagcatgaaagttcctcagatcagaaaggcaggctgtgttccatgccctgaagagctatataggaaaacagtgtggaactataaaaacgtactaaaaaattaaaaataagtggcttctctagcgtattccaacagattctaagattacacagcaggataagactcaactcctaactactttcttcattgcatggcattaaatggatctaacgtgtggttctccaaacttacttgaacatggagcaacatacaagtgctgccactcggatggcctgccccactggaaggcacattacttcgtcaccaatcacaggagaggttcatggaacaagcaaataccaccgcgacagaggccctgaataggatcccagaccttatctttgtacccaagaccaggcgtcaggaacatttctacttctcagtgccaccaggggggtttgacaatgctacttaaataggtggaagggggtgccccaaagagaaattttggtaaattaggattaacagaaagcct

SEQ ID NO: 698352 - DNA, 110 bp, Homo sapiens
acaagctgagaaacttgaactctatatcgagttacacaagtactccctgataaaggggaattcatgcgtctacaggatgactgaagaaattgtagagacgagtgtctccg

SEQ ID NO: 698353 - DNA, 1004 bp, Homo sapiens
tggatggaagaccaagggttgccaggcccacggtaactgccgagctgcctgctgtcaggtgacactgagggagtggctgtgttttttccgggtgtgggaggatgggtggtcagagccaggagtatggagatctgagaccgtgagcagggaaaaaagccaggtgctaacattgcaaccattcctcacgccaccgccacattcagagcgtggtgtgggaaccctttgtgcgtgctgggagaggcgtggaagcattatttccccaagagcacgtgcccgtgggcattcatttcccttccgtgcgaggagcttgagccagttccccttcacagatgtggtctaaactgaggctgagtgttgggacgggcagaggcacaccggtaaacgtggcatccccttaggcgcctcttggggaaaggaaagtgtggatgcctccttggaggacaggcaaggggctgggagtgggtagccgtcatgtggtcccccggggaatcccattttaaacttgacccagaatggcctggggctcctttcactttcagggggcctgttttcctgggccaggcttgtgtagcacttcccaccctcaggcatgagtacagacgggtcaaaaggtttatgcagtcaaggccaaagcctgccctgagcccagacacactcggtggtcccattctgggggcctgggcccctaaacaatctcttctcagcagaaaggcgaactccagagtcaggtccccgaaatccccgttccagagcaaaccactcagggatttcctatagggggtaaatacgcgttgaagttacagccctgtgaagcggagcaggtcccattcaaaacagcgttgcgacaactactcgggccaaggaaaagcgggaaaaccccctggcacccgaggacaaaggggctgtctgtctgggtcccgacaggcaagcggaacacaggcaaaagagacgcgtgggagataggctcctcgcaggttgacgacacactccactagggtgggaga

SEQ ID NO: 698354 - DNA, 979 bp, Homo sapiens
gattccgaatggagagagcgagctgactgattgtgtgttcgcgtctcgcaaaccggtacgctagaatcatgtatgaccaattgagctgaaggagcagaatgactgaattcaatagaagcgtttcctcactactcttgaccagaagatggtgatggacactaataaacagaacatagggggacattgtgcgtaccctgtatctgattgtatctctgtgagagcaagaagtcccagcacgaatgcagtagtcatcaagcgacagtgcagtcaatgaaagatacgatgcctgattggcatgtggcagcagagttgacttccctggaatttctgacaatgctggcgagaataaatgcctgaccacagacagggatcgacgacatccatagaagacatatccgatgtgtgggcataaggatggcactggtttacattagtgctgctagaaagcttcgctcatgtgatgactgaactcttggtagtagacagttaccgagatggatcgtacaatggctgaaatgtgcgtggccaagccttatattgatggtgatgctccagtatactattgaagagttggttcacatgatgtacaggtaaggtgacagaccttgtcagactgtgtacagattttcttggtcaactgtgttgttcgcttttgcttgtagagcttcatcctgttacaggtttccgcctactggtcaaccacctttttgcctggttttgcttactaacgcgttcagttccttgccgttttctcccttaatctttcctgtgctgttctaaacccttgtttaagaacttgttccgggactgttgccgtgcgttcggcgggaatataagggggaggggctcagagtaaaggcggcacaacggagcgggtggccctcccatgtggggaacaggcgctggtggtcttccctatccctttggctcagggcggcgctgcgccgcctagtgtggctccatcgccgggcctactccg

SEQ ID NO: 698355 - DNA, 836 bp, Homo sapiens
  misc_feature (398)..(398): n is a, c, g, or t
aaagttaaaaaatacacatgtcatactgatctatacccgtatcaattcattccttcatctctttgccaagttgtccttcctttcagggcctgctccttccagctttcagaacagtaccatgcaatcccacttgctgctcaatattcgaaagataggctggacaacgcactcttttcaaattggccatcgagttgccctgctttcataagaatgtctacatatactaatgtgtgtcactgtctgtgcctagttcattggatttcgacattcctaggatgttcaaattcatcgactgcttgactagtatgcaaacctcatatacttattcatttaactccactattttaggtgttactctagagtctataacaacgatagaatgtgctcatcatgtctgnattaaagtgcacgattgcgaccgattctctctgaattggtcagcgcatgctctccctctgtgcgcagtgaactgcgagcgtctcttgttcatgccagtcccacttcgctatatgctagagcagaacagatggcgtgtgtatgtatcctcgagagggctgttgtgcgttcagtggagtcttttgcgcaagtcctgttgggcgcactttaactatcaaggaaggctccgatttcagcgcatttgatgagttgcacttatcaggagcgtaactgattgcgtgtcgatcatgtgactgtattactcacggtatacccctagtttaccttctcagatctagtgccatacgattttgccagccgagttctgtccgcagtgctctgaaaatcctttcctttctctattccctcgctaagtcttttgaagtgtccctcatgtactg

SEQ ID NO: 698356 - DNA, 124 bp, Homo sapiens
tcacacaaagccctctcctaacacctctactcctgcccacgctgcccccagggtggtctgctccccctcttccccagactcccccagtggccactcccttggcttcaccaggctaccaagactg

SEQ ID NO: 698357 - DNA, 287 bp, Homo sapiens
gacttgtgtctgtgtttttgttaactatgcacatcgatttgactgagagacatagcacagtttttcgctggtgaccgtttcagcatctgctaaccatgaaagtcaggacatgcatcatccatcctacctcactgttgcttcttttccagcaaaagttcagttttgtttgttttgaatttttaaaatcacaaccagaatgtccttgaggtattccttgtttgtgtttttatcttgtgagtatttgtttcatcctttattaaaaacatgtctttagagcaaaaaaaaaa

SEQ ID NO: 698358 - DNA, 112 bp, Homo sapiens
tcagaggggggaggatggctcgagctccggagtcagaggggggaggatgtgttgagccccgaagactgggtttgcagtgagccgagatggcagcatggactctagcgtggac

SEQ ID NO: 698359 - DNA, 419 bp, Homo sapiens
ctatgggatcaacagttttgtgatgagtctgagcctggatcctgccaatatcagtgtattggtcatagcttgtacctgctgtgacagcaactcagtgtgcatttagcagaaaggaatttctacgatggcatgacagacacttggagtgtgacagacatgagagaagctacaaggctctatctgccaagaactgagagcagggcgctgaacggacacacgccacagtttaaacgatttttaatcagatttaccattcaccattcagctaagcaacccagggacagacaaggttataggttcaccatccatttcatcaatggtgaaacgctttacatacattaagaatgacgttgacatatagactttcacattaatagttcttcgctacagtgataaagggatgtagacattataagcaa

SEQ ID NO: 698360 - DNA, 284 bp, Homo sapiens
agacggggacagaacgtttcactttagccagcatgagctacattaacctgtatttttccaacgttcagtacaaccttagtgggatttctggcgctgtggcaagaaatatacacacaccacagtacaggttagcagaaatatagaagcaccatccggtcaaaaccgtgctgcggagatgggagagcaatacacgaaggaacttttgtctacactcaatgcttacggaaaaatgccggacattattagatgttaagactcccaaaattagcattcaaaaagggtta

SEQ ID NO: 698361 - DNA, 655 bp, Homo sapiens
tgcgggccgagatgtctcgctccgagaacttaggctgtgctcgcgcattactctctcttactggcctgcaggctatccagcgtactccaaagatgcaggtctgactcaacgtcatcctagctgacagaatggcaacagtcggaattgtcctagacattagcgtatgtgtcatgggtttcaatccgatcccgactattgacacgttgacttaacttgaagaatggacgcagagcaatggatagagtggagcaatacttggacgttgtcgttgacagcgagaggagttggtcgtttctatctcattgtactacgggtgaattccaccgccccactgaagagagatgagtatgccgtgccgtgtgaatgagtgtgactagtcgcagcgaagatagtaaagtgggatcgaaacatgtacggcagaatcatggaggttggaagatgcccgcattgggaatctggcatgagattcctgattctgctagctatgctatagaatatgatatgcttatatacttacgactttatgcacaaaatgtagggttatgataaggtcgaacgatgggacatgatccttctttataattctactttgagtgctgtctccaggttggatgtatctgagcaggttgctccataggtagctctaagatggccg

SEQ ID NO: 698362 - DNA, 221 bp, Homo sapiens
atgtgggctaccgccacgtgctcatcccagcttcttgggcaggacatgcaccccaaacggggtacttgtctggctgggtccacagctcgatctgcgcctcacctggttggtgaaggagtcactcatcacgcagctggggtggcccatggcacaaacccaggttgaacagccgaccctcggccagcaggatgctgcggcgcacacttcttcaaccgataccg

SEQ ID NO: 698363 - DNA, 843 bp, Homo sapiens
  misc_feature (1)..(1): n is a, c, g, or t
  misc_feature (67)..(67): n is a, c, g, or t
  misc_feature (69)..(69): n is a, c, g, or t
  misc_feature (112)..(112): n is a, c, g, or t
  misc_feature (158)..(158): n is a, c, g, or t
  misc_feature (164)..(164): n is a, c, g, or t
  misc_feature (171)..(171): n is a, c, g, or t
  misc_feature (174)..(174): n is a, c, g, or t
  misc_feature (177)..(178): n is a, c, g, or t
  misc_feature (180)..(180): n is a, c, g, or t
  misc_feature (183)..(183): n is a, c, g, or t
  misc_feature (186)..(186): n is a, c, g, or t
  misc_feature (188)..(189): n is a, c, g, or t
  misc_feature (203)..(203): n is a, c, g, or t
  misc_feature (213)..(213): n is a, c, g, or t
  misc_feature (216)..(216): n is a, c, g, or t
  misc_feature (218)..(219): n is a, c, g, or t
  misc_feature (226)..(226): n is a, c, g, or t
  misc_feature (238)..(238): n is a, c, g, or t
  misc_feature (241)..(241): n is a, c, g, or t
  misc_feature (245)..(246): n is a, c, g, or t
  misc_feature (254)..(254): n is a, c, g, or t
  misc_feature (260)..(260): n is a, c, g, or t
  misc_feature (262)..(262): n is a, c, g, or t
  misc_feature (264)..(264): n is a, c, g, or t
  misc_feature (268)..(268): n is a, c, g, or t
  misc_feature (270)..(271): n is a, c, g, or t
  misc_feature (280)..(280): n is a, c, g, or t
  misc_feature (288)..(288): n is a, c, g, or t
  misc_feature (293)..(293): n is a, c, g, or t
  misc_feature (300)..(301): n is a, c, g, or t
  misc_feature (322)..(322): n is a, c, g, or t
  misc_feature (325)..(325): n is a, c, g, or t
  misc_feature (327)..(327): n is a, c, g, or t
  misc_feature (343)..(343): n is a, c, g, or t
  misc_feature (345)..(345): n is a, c, g, or t
  misc_feature (348)..(348): n is a, c, g, or t
  misc_feature (369)..(369): n is a, c, g, or t
  misc_feature (371)..(371): n is a, c, g, or t
  misc_feature (373)..(373): n is a, c, g, or t
  misc_feature (375)..(375): n is a, c, g, or t
  misc_feature (381)..(382): n is a, c, g, or t
  misc_feature (392)..(392): n is a, c, g, or t
  misc_feature (401)..(401): n is a, c, g, or t
  misc_feature (404)..(404): n is a, c, g, or t
  misc_feature (406)..(406): n is a, c, g, or t
  misc_feature (421)..(421): n is a, c, g, or t
  misc_feature (439)..(439): n is a, c, g, or t
  misc_feature (441)..(442): n is a, c, g, or t
  misc_feature (457)..(457): n is a, c, g, or t
  misc_feature (459)..(459): n is a, c, g, or t
  misc_feature (464)..(464): n is a, c, g, or t
  misc_feature (469)..(469): n is a, c, g, or t
  misc_feature (497)..(497): n is a, c, g, or t
  misc_feature (532)..(532): n is a, c, g, or t
  misc_feature (545)..(545): n is a, c, g, or t
  misc_feature (550)..(550): n is a, c, g, or t
  misc_feature (553)..(553): n is a, c, g, or t
  misc_feature (566)..(566): n is a, c, g, or t
  misc_feature (570)..(570): n is a, c, g, or t
  misc_feature (586)..(586): n is a, c, g, or t
  misc_feature (599)..(599): n is a, c, g, or t
  misc_feature (603)..(603): n is a, c, g, or t
  misc_feature (631)..(631): n is a, c, g, or t
  misc_feature (640)..(640): n is a, c, g, or t
  misc_feature (655)..(655): n is a, c, g, or t
  misc_feature (666)..(666): n is a, c, g, or t
  misc_feature (669)..(669): n is a, c, g, or t
  misc_feature (698)..(698): n is a, c, g, or t
  misc_feature (714)..(714): n is a, c, g, or t
  misc_feature (737)..(737): n is a, c, g, or t
  misc_feature (766)..(766): n is a, c, g, or t
  misc_feature (779)..(779): n is a, c, g, or t
  misc_feature (782)..(782): n is a, c, g, or t
  misc_feature (817)..(817): n is a, c, g, or t
ngttcggcccgtgaggggaagggaattggtggtcaaggggaaccgggggaaggagatcagctggagngnattgatttcggaggtttgtgttcatttcgcccgtaggccctgntcgatggggtttccaatgtcctttcgcccgggggttgagggctganatgagngagagcnagnggnnantgnggngnnagggcgcgcgtgcntccccccaangcngnnccgtgtngagaggatgctnccnaggnnaggggggngaggcngntnccgngnntgagtgggntgtgaggngaggnggggtcnnggttccgcgacatgaatgggncgntngattttgcgcaaggancnggntattgggtatgggcgcggtgngntntnatagtnngggagtcgangctggtggnttntnattgattttcgtggncgagggtccttctgcgtnannccgtgtgcgtcgtgncngaccnttgcntgggatcacctttgccccaccctccagngggtcacccctgttcaatggttgcagcctccctcntgtcttcccgggntccangcnttgggcccggtgnttcnttgtgtaaataagaantgtttggttttgnttcntgggccaagcaggccccaattttctttnggaaggtcntccaacaatctttcntccctcggtcntcntgttgcccgcataaagaataagccttgcnttgggattttgggccntggggcgggccggtaggggcccnttcttgtgccgcacacccggttcacccgntgttcccaagttngcntcttcggcccaatccccggggaaattccgggaccngggtacccaagccttgcttttttttt

SEQ ID NO: 698364 - DNA, 526 bp, Homo sapiens
tcgcagtcggagtccgcgctaatcttcgccaccatgccgcctacacgtggtctatatcccagttcgaggccgctgcgcggcctgcgcatgctgctggcagatcagggccagagctggaaaggagaggtggtgaccgtggaaacgtggcaggagggctcactcacagcctcctgcctatacgggcagctccccaagtaccaggacggagacctcaccctgtaccagtccaataccatcctgcgtcacctgggccgcactcttgggctctatgggaaggaccagcaggaggcagccctggtggacatggtgaatgacggcgtgaaggacctccggtgcaaatacgtctccctcatctacaccaactatgaggcgggcaaggatgactatgtgaaggcactgccccgggcaacagaagccttttgagaccctgctgtccccagaaccagggaaggcaagaccttcatagtgggagaccagatctccttcgctgactacaaactgctggacttgcgaaccggcctatggg

SEQ ID NO: 698365 - DNA, 933 bp, Homo sapiens
gacctgaacctgactgagctccgagccaggactcgggtgcctggggcggacgaggccggttctccgggacaggagggagagtgtcctgggtgtcagccagaacatgtcttcaacctgcaactcatcaaagaaatgttcactttatctgtaggaaaagtcactgtcttgagtctttctggaggctatgatttttgccttactcccaaagccacggaagaaacgtggctggtgaaattagtcctcatcacagggtgctggaggttggactcggagggctcttagcccttgcaggtgtgcccggctgtagactcctgttcttgtcctctgggaatatcaataaggaggggcaatgaggaaaacatgtaatgatggctcgggaaagctggtagcccatcaaggagtgcagcgcctattacctggcgaattgcatgccaaaaaggaaggagtggtatacggagttaaccccgaccaggtttatcaaaacgacacgttcggggaatggtttccactcctaatcaaacatgccggaaatcgtaacagcggccagcacgttcccttgactggtcaagatgaagcttaatgggaacacctcctttgacggggacatttcaacacgccatttcaagggctttttaaagctttctacctgctatgatggttatgggcccatgccattggttgcatgcaaggtccgctgtgtcccgggggacaacggcggcggatcacgtgccagaattgggccctggggtccggcctctgttgtggcaaccactgtccccacgacccggcgcaacccgctgggtccgccttttaaaagcgtttgtagtgcacaagccctgtgttcaccatgcataaaggatcataactgatgggtcgtatttacaacgcgacgttcacggcacacttaccatacttccatgaatttttacttag

SEQ ID NO: 698366 - DNA, 151 bp, Homo sapiens
ccttttgggggggggggaaaagtttccccgggttttccccccccttttccccccccggggttttttttttttccccccaaagggcgggggagggtttttaatacccaaggggttccccccccttcctttttaaaaattgccccccaaagga

SEQ ID NO: 698367 - DNA, 174 bp, Homo sapiens
aagcgcacgataggcgcgtccccgaaatcctggtgtgtcaatcactgtacagcttcatccggacgcctttctcctcaagtatcgtgcgtgatggacttgatctcgatggtcttggggtgtgcgctcctactaagtgtgggctgcaccgacgttccgtgctgatatttggatttg

SEQ ID NO: 698368 - DNA, 384 bp, Homo sapiens
cttctcctccccactcagtcctcggttccggcccggttcggttcgttagggtttagtagtggggaagaggaggaatgaatggcggacgtcgagtaccgctgcttcgtcggcggcctcgccatgggccaccgacgaccagtccctccagaacgccttctccaagtacggcgacgtcatcgactccgaagatcatcactgacagggagacgggccgttcccgcgggttcgggttcgtcgaccttcgcgtcggacgaggcgatgcgccaggcgatcgaggccatgaacggccaggacctggacgtgcgcaacatcaccgtcaacgaggcccagtcccgccgctccggcggaggcggcggcggctgcagccggcggcggcggcgggcg

SEQ ID NO: 698369 - DNA, 168 bp, Homo sapiens
ccgctcgtacagtttctgaaaaggggatgagaagagaggtgaacaccccctccccatacccaaccccctgctcaccctgatcagaggattgagtaaacggctaggctggagggggtaccaggtggccaggtgggactgtttcaaatttccctgatccccaggcttggg

SEQ ID NO: 698370 - DNA, 162 bp, Homo sapiens
gctggtccgctttcagagtagcacagactgaatataagcacaggaacactcgtgaaaccaactgagcttttcttttgcctagaagggctataatcctgccttctacatcagttcccatttatgctgaagacccagttgaaagaattgtttcctactctgtga

SEQ ID NO: 698371 - DNA, 463 bp, Homo sapiens
  misc_feature (38)..(38): n is a, c, g, or t
accctcttctgctgggttcagagatatcctgcctcagnctcccagtagctgggattacaggcagctgccaccacgcccagctaatttgtatttttagtagaggtggggtttcaccatgtggcaaggctggtctcaaactccagacttcaggtgatccacctgccctggcctcccaaagtgttggaattataggtgtgagccaccacgccctgcctaatgtttgtatttttagtagagacagggtttcaccatgtttgccaggctagtctcaagctcctgacctcaggttatctgtctgcctcgacctcccagaatgctgggattacaggcgtgagtcatcgtgcccagcctcatccttaataaattgaggttttaatttgcatttctctaacagccaatgctattaagcatctttccatgtgggtatttgttatctattttgatgaagtgattgttccccgct

SEQ ID NO: 698372 - DNA, 203 bp, Homo sapiens
gccatccgccaacaccaaatagacacgacattaagttaatataatggctgttatctgcagctggataattattcagtaaaccaaattatacaaatattgtttgtagcccactgtggtgtgtgtgttgagtgtgtgtgcgtgttagtgaggaggtgggtgctgaggggaaagatgagctgagtgttgggcgataacatcaggag

SEQ ID NO: 698373 - DNA, 253 bp, Homo sapiens
  misc_feature (22)..(22): n is a, c, g, or t
  misc_feature (79)..(79): n is a, c, g, or t
  misc_feature (146)..(146): n is a, c, g, or t
  misc_feature (196)..(196): n is a, c, g, or t
tctactaaacgcaaagtagagnaaatggaagtggatgacttctatgatgtaatcaaacggctctataatgaagataatntctcagaaaatgtgggttctgtgtgtgcactattttatcaagacaagaggacatcttccccttgtcnacctttcagcctgttctgtcatgtagtttaacaagtgctcctttgagtgnaactaaggaggactactttggaatagaacatgcaaaatcaggaaaggctgtagaagg

SEQ ID NO: 698374 - DNA, 407 bp, Homo sapiens
gcgtcgacccaaggccgagctggccgtgaaggactcacagaaaggtgttcaggaactgcgccaggaaagccagcgctccgtgcaaccggtgcagtaagcatcggccccgcttgacgcctgctttccctgaagcttgaaccctaaaaaggatgaaccattatgcgtaaacaattgatgatccccgccctcctggccctcagtgtcggcctggccgcctgctcgtcgcagcccaatgccaacctggagcaggcccgtaccaacttctccggcctgcaagcgaacccgcaagcaagcaaggtcgccgccctggaaaccaaggacgccagcgactacctggacaagaccaacaaggcctaccaggaccatgaaaaggtcgaaaccgtcgaccagctggcttaccgtcgacg

SEQ ID NO: 698375 - DNA, 107 bp, Homo sapiens
atgcgatttgttcctcatgcactttactatagccagcagagcatgaggaacaaatctgcatattttgctgaaacatctggtagctttgaagatgctctgccaagggg

SEQ ID NO: 698376 - DNA, 401 bp, Homo sapiens
gtctggaaacctagccctattctcacacatagtgagacagccaccccttatgccccaacaaagccgaatgccctaagaggccattaatttcttgggataaatggtgttctatggatcataagcctgctagttaatgaatctaactatgaaatctgtctgtctatgctgtttacaggttgagaattaaagtatattagatttctcctagaatctttacaatagtagctctgaatttatgggcatagagttcaaattttaattactcatccaattgggaagatactccatcaataatttaatttaagaccttaatttggtagggctaaaacttgtcatccatagaagaataaaaattctttctggagaaaatcatccttaatccaggaatcttagaactcata

SEQ ID NO: 698377 - DNA, 843 bp, Homo sapiens
  misc_feature (2)..(2): n is a, c, g, or t
  misc_feature (62)..(62): n is a, c, g, or t
  misc_feature (64)..(64): n is a, c, g, or t
  misc_feature (83)..(83): n is a, c, g, or t
  misc_feature (93)..(93): n is a, c, g, or t
  misc_feature (95)..(95): n is a, c, g, or t
  misc_feature (135)..(135): n is a, c, g, or t
  misc_feature (142)..(142): n is a, c, g, or t
  misc_feature (145)..(145): n is a, c, g, or t
  misc_feature (147)..(148): n is a, c, g, or t
  misc_feature (150)..(150): n is a, c, g, or t
  misc_feature (154)..(154): n is a, c, g, or t
  misc_feature (167)..(167): n is a, c, g, or t
  misc_feature (175)..(176): n is a, c, g, or t
  misc_feature (180)..(180): n is a, c, g, or t
  misc_feature (183)..(183): n is a, c, g, or t
  misc_feature (188)..(188): n is a, c, g, or t
  misc_feature (192)..(192): n is a, c, g, or t
  misc_feature (218)..(218): n is a, c, g, or t
  misc_feature (236)..(236): n is a, c, g, or t
  misc_feature (239)..(239): n is a, c, g, or t
  misc_feature (258)..(258): n is a, c, g, or t
  misc_feature (260)..(260): n is a, c, g, or t
  misc_feature (278)..(278): n is a, c, g, or t
  misc_feature (283)..(283): n is a, c, g, or t
  misc_feature (299)..(299): n is a, c, g, or t
  misc_feature (313)..(313): n is a, c, g, or t
  misc_feature (316)..(316): n is a, c, g, or t
  misc_feature (326)..(326): n is a, c, g, or t
  misc_feature (335)..(335): n is a, c, g, or t
  misc_feature (351)..(351): n is a, c, g, or t
  misc_feature (365)..(365): n is a, c, g, or t
  misc_feature (374)..(374): n is a, c, g, or t
  misc_feature (389)..(389): n is a, c, g, or t
  misc_feature (405)..(405): n is a, c, g, or t
  misc_feature (437)..(437): n is a, c, g, or t
  misc_feature (440)..(440): n is a, c, g, or t
  misc_feature (480)..(480): n is a, c, g, or t
cncttgccccccaccacccccccccccccccccccccccccccccccccccccccccggggncnccgcggggggggggggggngcgggttccnanacacccccaaacctgaccccgtccaacccccgcatttgantaaaccncangnncntttntttaatatttgcncagtttgnncttngcntttcngtcnggggggaatatgggcaaaacccaggnttaccatgctaagataanggntcatatgactgccatagangnggtacatacaaacaatgnaaacnaatcacatccttaggntccatgattaccgngangatttccccngccccaagngctttattatatttcntaaaaaatataggngcagcagcntatcacaagtctccncaagtgcattaatganggaatcaaaacaacacaacagattcataaggntgngagaactgcagaacaaccagaagtcagttttatgcttctncttgttctggataattcagaattttgcggtgtgcctgtcgtaaatattgctgctgtttgaagtaaactttaaatgctccttttatggcaacaaacgcaattccacccaagattgtcctttgtaaattagagttaacactactgaacatcaatttaccaactattgtagcaatagtaggaaagacaagggctccacacaagattcgagtagcagagacatgatctgctaaaggattggcctcagctggaattcgaggaacaggacaacctatccctggaaatatactatttaaaatttgtagtttattcgagtatttgcgccacagtctaagcacatagtcctcccagcgaatcatcttgccta

SEQ ID NO: 698378 - DNA, 98 bp, Homo sapiens
ccttatccccatactagttattatcgaaacattgctactcattcaacaatagcctggcgtacgctaacgtaacattactgcaggcactactatgacaa

SEQ ID NO: 698379 - DNA, 1449 bp, Homo sapiens
ggatcagcgatggcctcatactcccatgaagctgacagttcatcctacgcctcgtgtgggatcactcagtctatgccctccggaccatggacctagaaggacagaatggacagcctaatcgaggaacggagtgctggcacacagcatcgagcaggggtaaccacggaaaatggaccaatgaacgcacacgactggagcactggtagtcatgcacggtaatcacagggctgtctcgaagaatgaaatgcggccatacatgtgtggagacgattgcaaccagagaggtaggaatatccggattgaactgagaggttaagcctaagaagggaacgtcttccgtaggcagtggagatcacaatgccttcgagtttgctttggggaagcgttggacagcatggggcaggttccctctcgtgccatcatcgagcccacggtaatgggtcactttgcattgtgtccacctatgggatctagaagaacatcttctagacttcacctcttttgcgaatgcggtccaacagaaaggcgtgcatccaaggttgaacgaaagccgacagaacttgtggaagttgaccacacactatactacgagccccggattcgttgtcattggaggccccgatcacgagtccgggtcctttcacagtactttgggaaccaatatgcgggagacaggttacgccaaggtggccttcggtcgtccaatccttgccggtaagtaattgcgcgagacaaagggccaagtttggaaaaggtttggctcgcagaagtactcaacatacggcaatggcgaggcatgtgcgggaggccaattacatttaacgcgaatttcgttgcaaccatccggaatggcaaggacatggccccaccacccttaagaattggaagccacagtgggatccattcgcgcgtttggccccagtctgtgtaggttgggactcggggaaaaggatgccgggaacgaaacagcggaaggataagtgggactcccaagttggctttcgagaggagaagcagaggtagggggggaaagaaatggttgtgggtttgggacattacggttaagaagggaaattgcctgggaacgtagtttggaaggcaaaaagggctatagagattgggaaagggcattaccgttcagaaggaattttgggggccctggggtgcatcgtagaaggccatttgggtacattggactcctggaagcgggaaacgtgggcacggtaagatgaagtttgagaggggaggcacagtcgggatagtgcaaactctacattttggcaggcttgtggtaacctttgggaagatattatacagtgcaacagtcgtttggccacaaagtggggcagaggtggaacaaaagggaagaggcacttactaaaaagggcagcagtattcagaggaatgacgcacgggctattgggaaggcagagttgtaagggagtgtgg

SEQ ID NO: 698380 - DNA, 835 bp, Homo sapiens
gagagcaaagagcgagcgagggagaggagagagagagagaggagagagaaagactacacgcgcggcagagacacacggtcactggaattccattattaaataagtgagccgagcaatggtgttatgcgggagaagatttttcttgaactcgttgtcttcgtcttggtgcgaaagaagcgactccagtctcgtcgtcctcgaagctccgagctggattgttcttgggcgctgacacccgtctgtggtattgcttttcgtatttgcattttattccgaccccctccctcggcgcgttccttccagcccgttcatctctgcaaatcgccgtcgtctccctcgactcccctaggtcccctctcgtgggaagctgcaggaggaagttggaccgcgcggggaactcaacgccttcacggacgatatggaggggagggctgagccctggacgtgggcatgttggcttatgacaagccgtatacatcacgatacgcgtatatttgacttgtagcgggcaaggggggcgtcgagaggcagaagcccagtcgcccgcctctcacgccgagccccatccagccagaggcgaagactcggaggacctcgggcgatcttcatcgggtggaactagcatgggatctccgcattggatttggggctgattaccacgtgcttgcctattatgagggccgtagtgactactatcatctatctctataccaagggagaactgacaacaacacatggtgcgcataccttaacgcatgactctggcaaacggtcgtctgcctcttcttctttttagggccccgtagctccacgctggcgccccccagtggacgcg

SEQ ID NO: 698381 - DNA, 881 bp, Homo sapiens
agtacataaactaaagctactccaatgctgaccagtaatgggcccagcacacctcctattgactaaccactgacatgactttcacaaaagaaacacgataattctgaatgcaacacaaccgacccacaggctaacttgattagggagtcatcccgtctactatttcttaagcagatcaacactaaagctatttagctgttccccaagctttgtactcggaccccctagagcaacccccctcctaatattaactgacctggactcctagccctcacaatcatggcgaagccaacgccacttatccagtgaaccactatcacgaaaaaaactctacctctctatactaatctccctacaaatctccttaatgataacattcacagccaagaactaatcatattttatatcttcttcgaaaccacacttattccccaacttggctagtcatgcaccgcgatgaggcaaaccagtcagaacgcgctgaactgcatggctagcatacttcctgattactagaccctagtaggctcccttcccctactcatcgcactaattttacactcacaaaccctaggtcactaagacattctactactcactctcactgcccaagaactatcaaagtcctgagcccaacaaattaatatgactagcttacacaatagcttttatagtaaaagataccctctttacggacatccacttatgactccctaaaagcccatgtcgaagccccccatcgctgggtcaatagtacttgccgaggttactctttaaaactaggcgggtatggtatatacgcctcacaatcatttctcaaccctgagaaaaagataggctacccctcctgttatcctttgaaggctaatttaaaaggtcct

SEQ ID NO: 698382 - DNA, 139 bp, Homo sapiens
  misc_feature (72)..(72): n is a, c, g, or t
  misc_feature (119)..(119): n is a, c, g, or t
aacgggctgcgcaccacagaggaggctctccatgccagccacggcttcatgtggtacacgtaggcccttgtnctccggccacctggatccctgcccctcccactgggacggaataaatntctgcagacctgaaaaaaaa

SEQ ID NO: 698383 - DNA, 311 bp, Homo sapiens
agatcccgtttattttttatcactaagttacaaacatcttacaatcaccaccttggtcagaaacatagcattgccagaatccctgatgcttgtcccttttccctatcccagtcaccactcgtggtcccaccctcaaatatcaatcactttcttatttttcctgtatacatttaccacctgaatattcatccgaaataccattggtctacttttgctattgaacaaagggttatctactagtggatatccatagcacattccctcttgaaccggctccttttgctgccgtgtttgctagactctgttgtcta

SEQ ID NO: 698384 - DNA, 942 bp, Homo sapiens
  misc_feature (201)..(201): n is a, c, g, or t
attaggatagggggctgtattgcccgctcctcctgttgagacgtggtgaaggcttgaatagggcctctattatgataagcgccgggctcagcgtccctgggtttaataaacgggcaaaaactcatgtgttccgcatgtttgatctagtggtgcgcgcaaattggttgcggacgagcagttgtgctgtgcccttcatagggntgtcacaggccgccacagatggtgttgcaccacgccgtgctgtacagctcgtgccaccgatgaggggctcgctaattgcctgtcactaacgaagctcgaggcaggtttatctgtcagggttgcccccccgaattattagcgccggcttctaatccccagcgcccctccaaatgataggggccccggccttttcttatacaaaatgtatagaatgtggtgatgtttcgcaatccccgattaatagacgctcggactgtcctatctctagataaatttcataagcgtactatgtggagaaaccaccctattgctcgttatacccttgtgcggagacacttatgtataggaaaaggggggagaatgtaatagtggctctaaaatcagaagcgaaaggaggtctcacaagacacccccacgagtcgaaagaaggcttggttgtctcgattaaggaagcccatcaaaacaaagcgtctttgttatctctaccttgagtcaaggcgcggcaggatgcgtgccttcgaaacccccgatgtacccggcgtggtggtgactatcttttttactttcctcagagccggagttttcgttgtatgcggtacccaactatttaggattgtgaggatcacgccgattagccagagtctccccctacctgttcacggtgtcaacaaaggagggaaatcttcgtttttggggcgcacaaaaagaaaatatgacaattaaacgccccacatagacaac

SEQ ID NO: 698385 - DNA, 723 bp, Homo sapiens
tccctctcttaccatcaaatcaattggccaccaatggtactgaacctacgagtacaccgactacggcggactaatcttcaactcctacatagcttcccccagttattcctagaaccaggcgacctgcgagctccttggagcgttgacaatcgaggtagtactcccgattgaagcccccgattcgatagtaactaattacatcagcaagacgtcttgcactcatgatcgtgtccccacattaggcttagagaacagatgcaatgtcccggacgtcgtaaaccagaccactttcattccgatacatcgaccggggtgtatactacaggtcaagtgctcttgaaatctgtggagcaaaccgacagtatctatgccgcatcgttcctagaattaattcccctaaaaatctttgagaatggggcccgtatttaccctagtagcaccccctctaccccctcgtagagccgaaaaaaaaggaaggaccaacaaaaagacgaggacagaataaataagcaaaggacagcaagaaacaacaaagaggggcggagccgccgcaatgaggcaccacccggggagcccgcgaatactggggcaaccgaccccttacgttcctgagggggggggcccctaggggcgacagggttaatatacgaaggagtgcacgagcgcgacggtaacctataccgcgtggggaggcagcacaaacggtgccgggactacctggga

SEQ ID NO: 698386 - DNA, 361 bp, Homo sapiens
gcgtcgacgctgagcaaaagatataaagttattagtagcctccatagtctagaaaacagtgctgtttgaacgaaatatgatggaagccacataggtaatttaaaattttctaagagccacattaaaatagtaaaatcaaaaaagaggtgaattcattttaataatatatttatttagcctgttgtatccataatactatttcaacatgtaatcaatagaaaattattaatatgttttactttttttcacaacaagtcttcaaattctggagtttattttatgctttgagcatgaaactagccatattttgaggactcagtggccacatgttgctgtggctaccatagtgcacagcacattc

SEQ ID NO: 698387 - DNA, 775 bp, Homo sapiens
aaaaaatgaagtttcctccccctctccgggagaatctcttcacttgttgagcacccatgaaaacgccccatgaaggagccattcacggagtatttaccaggccctcttcagttatgccggggcacactacggtgagcaagacagctgtggggcccgccctcactggaactcaccaccttagggggattgtcccattacaaattggctgggggaggccaggcacgatgggctcacacccataatcccagcacgtggggagggcaaaagcaggtgggatcacttgagctcaggagttcaagaccagccgggggaaaagggtgacaaccagtctctacaaaaaatacaacaattagccaggcttggaggcgcacacctgtaggcccagcaacttgtaggactgaggcgagaggatcacttgagcccaggaggtcaaggctacgtgagccatgtgcatatcactgcttccgtctgggagacaaagtgagacccgtgtctcaacaaaaaaccacaaatgccgtcgacggaatgttgggagggaactcacggggactcacagacccgcttacacaggggaccttgacgcccgtggtaaaaagaactttcagtggccccaggcgggcccccactgggggaacccggtttctttgtggaaaaatacaaatttttacccggcattggggggcagctgtaacccccgtatcagagcgcacgttgcatgacccaattgccttgcctcagtgggaaaagcaaactttcactcacagaagagacatag

SEQ ID NO: 698388 - DNA, 1557 bp, Homo sapiens
  misc_feature (280)..(280): n is a, c, g, or t
  misc_feature (299)..(299): n is a, c, g, or t
  misc_feature (314)..(314): n is a, c, g, or t
  misc_feature (368)..(368): n is a, c, g, or t
  misc_feature (521)..(521): n is a, c, g, or t
  misc_feature (736)..(736): n is a, c, g, or t
gctcttaccttattacctcaatcaaccattagtccaaatcattttacccaaattaagatacttagctactctcacctagagacctgtgcgcatatagaatataagttaccagcaacacggtgaagaagaactcgaaaatagtataactgaaaccatcgtcgatacagtattacgactaacggtagtacaccccactaaattaccctatgcgtgctaatacactggacagtttagcttcatggaatactatatcttatgtctacacggcacgtacgtcctnagagtctcacacgaacccntcccgacaaataacncagtcaatcagaacctacccctgaagctaaactagccactcaacacagcaagancacaagccacgttacatcatgatacgtcaaaccttcagatggcgaaagtgatattacatccggttaagaagagacgaactaaaagcgtaagcagacagctgtaggctgcatttaagtcatcgtagttgtccccatatgaactcacgaatattncttaatgttgtccaaacatatttcaaaactcttttcgctcccgagcacgtacactcgcttcctttcaatattccactctcttattgatccacaaattctgcaaaaccctaagatataagttcttcaattaaagaacgcgaaagccaggactggcgtgcctctgatgacaccccacctttaaaatggaaaagagccgaggaggcccgttcggagtnaggcaagtctaagattaacggttgacacatttaatagcagtcctctttacctcacaagccaactcatttacacgatataaaggtgcgccccttcaataaagaaaggcccaaggcgttttacatttctaaacttctataacagagaaggcagacggaatctcttaaaaggaagcgtccccacatgataaattccacaaccctaaattcacctttacagtctataacatttcacttccggaaaaaagtcaaatatacagttgtccttaactctcctatctatcaaaacgccataatttagaggcacccctgggggtccgtaataccgacccctttaaatccggccattccaacctattatactgcgtggtcaacgcggcactcaacggccttaaaacttctgagatgaacaaagccaatataactttcggggttcaccaggccgagctccaaaggcccccttgagggttatcgttagatgtataagccaatttatatttggccaatattctcgcctccataatgacacttatagttccaatatcctattacacccaacatgtgcgcctaaaaatgtgcgtataacttgaactgtacattaccttacagaacaatatccgggcgtaggttcaggaccttctaagatcgccgacaagggcccataacacagtatttttcacaaccagacttttctttagggatcaaaggccagtacttacaccactgtgcatctcgacatgcagacaccaattaatcaagctctcacagaccagcaacagagacagctcccgcgcacggcgcatctctatatcacttcacagggg

SEQ ID NO: 698389 - DNA, 1145 bp, Homo sapiens
agcggagcggcgcagggataacccgcggccgcgcctgcccgctcgcacccctctcccgcgcccggttctccctcgcagcacctcgaagtagcgcccctcgccctcctgctcgcgccccgccgccatggctgcgctcccccgcgcggctgcgtgtcctggccctgtaccggggctggcgctgcgtcctgtcgtcctgtgccgtggggccccaggtgggcattaagtggaaatataactccagctgatgcttcaaaaacgagaaagcaccctgtgtcccaaacctatagacataataaggtgtggccgtggagtagagaaataaaaggccacaaagaaaattttcctttgtgcgagacctgtagaagcggcccagaaaagcggggcgagcgttgtgtgggacccggacatctgcgcccccgagggtgcgacgcacggttgggtgaccccacgcgacgatgtttcctcttcatcacttgtggggcgtctttggaggcgcagaaggcgagaaattttggagagagttgtagcaattttaccctatattgggcgtttaaaccaagaagaagtctgcaaaaatggggaccacttgtagaataatccttatagggcgagtataaccttaccccaaacgctttacctatttgaattggagagaacatcttcgtcaacatttggggtgccccccgagaaggaccccccttaacagggcgttttaagggcactgggagagcccaagcggtgtcaaatcctatcagagatggagcctatcctataaaccacttgaaccttggtgcccacaacggcgttgtgtacaaggaaaagccaaaattaagcaggaaattccttctttccacctgtgactctcccctaaaatgcgccttgggcacctaaatttgggctgttttccctgagaaattgcggtcctaatttcaaagccagaaatcttttttcctaaacctatacttttggtggtgggatctaccccaaaaccgaaagaaggtttaaaaaccaacaccatgttaaaatggcctcttttgagtaattttccctggggagaatggccctcctccacttttacaacaaatgtgaaaaaataaaaaggcacttttgggttgtaacacaaaaaaccaaacaaaaacgcgagc

SEQ ID NO: 698390 - DNA, 308 bp, Homo sapiens
tttccttgccccatttaaaaaaaaaccccaatttgcaagccaaaaggcccttttggttacctttttatttttttttgtgaaaggcaagggcaaccccaaaaacttcaaagctggttggggtggcccttttacctcccggcaatttcctcaaattatttttaaaacctttcaagggccttcgatggatgggtagggggaaatttgggaattaattttataaagacctggggatttacttaggattgcaaaggaaggttccccattcccccaaggttttccacaattaaaacatttttttcccccttcca

SEQ ID NO: 698391 - DNA, 194 bp, Homo sapiens
tgttgtgggcttcagtcgaggccctgatgcattgcatagtctaccatgtgttctgatgctcccttgccctgcagaggtcgagtgcagacgcgggggccagtcctgcacccgcctctacccctcgccgacagccagaccacaacaccatattgtacccagattgctaggattggaagtgaggaggtttctcaccc

SEQ ID NO: 698392 - DNA, 163 bp, Homo sapiens
tgtacacgcccttgggccagctgcccgggtgagagctccgccgccacgcgacaggcctgaaagcgagcgcctgggttaaaccagccgtaacagccatggggacaccccgttccctgacccacgggacggaacccacctgtgctggaggtcgtgactgctaact

SEQ ID NO: 698393 - DNA, 184 bp, Homo sapiens
ggaacagcagggtcttgaacgggcgaaaaagctaaatatcgatgtatgttaggtgtcagctatccatgtaggaagcggctagtaccgatacctgagaccttcgtgcaggcaatctctgatgcccgctgtgttttatgacatgggggctagaggttggtttcagcatgtatctgcttgatatatg

SEQ ID NO: 698394 - DNA, 165 bp, Homo sapiens
ggcaaattacagaaatagttcctgcaaaatcagataggtattcagcatcataggaaaggggcgaaaatcagataggtaggtattcttaagaagttgtggccgccggcgcggtggctcccggtaaatcccaagactttggaggccgaggtgggtggatcacctgag

SEQ ID NO: 698395 - DNA, 379 bp, Homo sapiens
  misc_feature (95)..(95): n is a, c, g, or t
gagcataaatgacatttaaagctgcttccagaccaaaaaattttgtcatttcactggtacggttcaacaaccggggtgtctgataactgaacagngcctaaacattccagtaagaaccattattttctttaatgaagaatgactaatccatattctacaaggggcggtatggttagtaattctatagggaatgtcccgacataattttcaaattgtacaataacacaaacaactttgttaaggccatgttttatttgctgattaatggacagaaggcaatgtaatttattttcaagtattttcttgaaagtctgtgctcataaaaatcatgaaaagttggaaagactgttaaatcactgaaactttaaatatatcttat

SEQ ID NO: 698396 - DNA, 262 bp, Homo sapiens
agtattcgcctcaccaagaccgtctactatctcgcacatgaaacaagctaacatgactaacacccttcaattccatccaccctccatctcccataggatggcctgcaccccgacataaccggtctttttgcccaaactgggccatttatcgaatgaatgcactaaaaacaagtagcctcatcatccccaccatcatagccaccagcaccctccttaacctctacttctacctacgcctaattcctccacgcaaatagtaatt

SEQ ID NO: 698397 - DNA, 819 bp, Homo sapiens
ggtgattaagctgtaccggtagacccgtctcagggcatgaaggcgctgcaggcgcgatgactccactgtggaccctcccggcccaccaggtttcgcgcgcgttcttcggtgggtctcaccagggttggcatatcctagtatctgggtgtggcctctcctgacgatgcatcgtgtggtggctcggatgcacactcgcctatgtacgctttcggcatctcgtggtcctggtgcttgcatcctaggaatcagtctggtcctctggggcgtgcaaagcagtgccagtgagatatttcttgatccggatgtcagccgcttggcatggctggttgcgcaatgaaaccgccagtcccattgtgcggtttggccacggcgatcacaccacatcgggggagtcatcagtccattaaccggtttgtttggtggacttcccaaaagagctttttgccacaattgggggcgcgccgtgagcggtggaccagtgtgtgcccccgcgcgcatcgcgaatggggttctccgaccaatttggcctcaggggtgcgaaagcgttgcgggttcccgtgactgcatgacggaggatgctgccttgaatggttttgaagccgctagatttttatgctggattcacgtctgcgtaaactcacaactgcgaactggtttcgggagtagggagcaacatgtctacctttgatgaaaatgtgtgttacaaacactagagggtattgtcaaccacctggcttgggtgaatactatatgaaaaaccgatgcagggggttgtggcagtggagaacagaaccaaaaagaaggtaaaacagtacttgg

SEQ ID NO: 698398 - DNA, 439 bp, Homo sapiens
  misc_feature (316)..(316): n is a, c, g, or t
  misc_feature (410)..(411): n is a, c, g, or t
gacgaaactcagctcgtcactcgggtaattgccctgcatcacattgtaaatgctgaactcggccgcgatcggttgccgggagaacaggcgctcgaacatctgcccgtagccctgatattgatcgaccagttccgggcgcaggacatcggtttccagaatgcagatgcgtaacgacataaaaatacctgacacaaaaagataaagaatgaaacccgagcctgccttgaaacctgctttcaaggcaagcacagaacgcgcgctcgcaagctccggttcagcttgccggcaaaccgacgaaagggaggccgaaccgtgntcctcctcacactcggacgaacggtagtctgctaagggacagtcgcttttcacccttgcacgtgtctagcaaaaggcccgctagccggctggannaatgcctcatgcctttttaaaaagactt

SEQ ID NO: 698399 - DNA, 123 bp, Homo sapiens
agaggcgtttagtcacacgattacccatgtcatagaagccgcgtacgagtgtttagatcaccccctccccaagtaagctaaactcacctgagttgtaaaaaactccagttgacaccaaaaata

SEQ ID NO: 698400 - DNA, 183 bp, Homo sapiens
tttacatttgatgtgctacaaggatccaaactgctgtccaagagagtataagaatcggtctgaatgagaactcctgcccacgtccctatctgttatggatcactgcagcttgcacatcatgttatgcaccgtattacgtcaacatatagaccttggcctgaagtggtgctctctagtctagac

SEQ ID NO: 698401 - DNA, 225 bp, Homo sapiens
  misc_feature (29)..(29): n is a, c, g, or t
gatgccttcctcttggaggcagctcggtnccaatgtgctgctgttcctctgcaccaccgtcattggcatctgcacacactatccagcagaggtgtctcagccaggcctttcaggagacccgcggttacatccaggccggctcactgcagcatgagatcggcagcaggagcgctctgctgtcggtattgcccagcacgttgccatggagatgaagaggcatcacac

SEQ ID NO: 698402 - DNA, 322 bp, Homo sapiens
gtttttttcctcttaatgtagttttgactctgccttacctttgtaaatatttggcttacagtgtctcaaggggtattttggaaagacaccaaaattgtgggttcactttttttttttaaataacttcagctgtgctaaacagcatattacctctgtacaaaattcttcagggagtgtcacctcaaatgcaatactttggggttggtttcttcctcttaaaaaaaatacgacactggagtgtgtgtatgtgtgcgagtattagcgcccatctggtggatgcacaggtgagaggagggagaattaactgctcatgatgtcgtgg

SEQ ID NO: 698403 - DNA, 438 bp, Homo sapiens
  misc_feature (18)..(18): n is a, c, g, or t
  misc_feature (54)..(54): n is a, c, g, or t
  misc_feature (72)..(72): n is a, c, g, or t
  misc_feature (108)..(108): n is a, c, g, or t
  misc_feature (119)..(119): n is a, c, g, or t
  misc_feature (171)..(171): n is a, c, g, or t
  misc_feature (199)..(199): n is a, c, g, or t
  misc_feature (421)..(421): n is a, c, g, or t
tttaccccctaaaaaccnccccttaatttgaaccctaatccattttttgaaaancccatcaatctggggatnaattctggaagcccctttgccaaatggggaaaaggnaatgggacgcnattcccagctcttttttaaaaatttaaatttaggctgagcgcagtggctcanaccctgtaatccccagcactttgggagnccaaggcaggcagatcacaaggtcaagagatcgagacccatccctggccaacatggtgaaaccccatatctactaaaaatacaaaaattagctgggtgtagtggtgtgtgcctgtaatcccagctacttgggaggctgaggcaggagaattgcttgaacctgggaggcagaagttgcagtgagcagagattgtgccactgtactccagcctggcgacagagncgagactctgtctcaaa

SEQ ID NO: 698404 - DNA, 843 bp, Homo sapiens
tatctctgcgactatgtattggtccaagagtgaccgccactggtgtatgaaatgcagtatggatctctttaacatgcctctcactcttatcaagatagttatggctttgaggataataaacttacccgttctcactttaatcatttaacagctggcatatatgaatagaaaggaggattatctgcattgtaaaataatcagtatggtttatatgttgaatttgagatttgtgtgtccatttcattggtggcctatatggtggctggtgtcttctggtaatggtaagtagaagtctcaatcgtattttctctctgatggcattatcgaagttttcaatcatacacgaagtctcatagcacagtgacatttcttaatggtgggagtccagctcatgcatttctgattatacaaaacagttcgcagtaggttattagtgactctctgagtttattagtgaaattctgagcgtaaacatttattatgtgttattatcttgtatgtaccgaaagattgaaatctacgttagattaagttaattaactcaaatactgtgaactatcatttaataagactagaagagagaaagtgttagtatctcaatgtacaccaactgtgcaatgtgatctttgattggagttgaaataatctaattggcctttgtgaaatctggggaagagctgtcggattctagtagatggatactgaggtactcaggcccacttaaacttattaatgtatacccttgtggtttcggcctttatgcttatgtaccgagacacgtggtattttttaattaacttttgtttgagtcaaaaaacaaagaaaggggggccgttaaggacc

SEQ ID NO: 698405 - DNA, 757 bp, Homo sapiens
  misc_feature (757)..(757): n is a, c, g, or t
ctgatgctgcgactggaggctatgattctggatctaccgatgatggatcgctggggagagtccagcaaattgaaaaaccggacagttgtagatgacttactgctccaaaaaccatttcacaaagaaaacatggaaaggtggcccatatcaagttgcagactgaattgctgcatagggaagacgcattatatagatggtttcatctcatatctatggatgcttatcaaagacatacaaaggtcgtaaatgactatattttatactatggtggcaaaaacgaagacttcaagcgtttggtggaatatgacaagacagacttgcatgttatacgataaaattatatattcctatggaatgaggaggaccaaatggacattacttgggagaagagacttgctaagacctactatgatctatctttttatgattactgcatagctcatctcaatacctataatgataattagtcaggatttaggtggccagtctaaaatgaattctttacaagataaggtcagttttaccgggcatgcaatattgttataaaaaccaccgctcactcagatggcaagttgatattggttctattgacactgtgtgagaaaagacctgtactccgttaagttccacgttatgccagaaatgttctcttaaacggaattcccctactgatctaaaagaaactccgtcactaacctgaagccagacatcctctatacattggatcttgtatcacttatattgtccaattatcttn

SEQ ID NO: 698406 - DNA, 955 bp, Homo sapiens
  misc_feature (451)..(451): n is a, c, g, or t
ttctgcactgtatccccgacgggcactcctcggactaacagcatgcattcgtatcttagagctgtattagactggctttgcatcgttgacccatatactcttcaataacccttattcaatactatcattgttgcttacttcagttcgaagtagacgattactagcacatgggtcgctgaggaggtccagtcacccgaagggccatgtcacgctagcctgatgatcccattccttcccttggtacatcgtcccggaatgattcctgggcgccagtctgaaatggataattagcatcaaaagactaccctccatgtgatccgttcagtagccctagccagtcatgcgacacatcacatgcagacatgggatccacttcgtggataatctgatcctggaatcctccggatctttggttcgattgaattcattgccaccgatacgtcccctgcgngaaagtgacatgaatactgtcctaacccgagagaggtgaataggctcaccattgcaaacgcaactcatgagtccacaaagagagacgtattgaaaaaacagggattgtagacgacacctactatggatcatggtacaaggtactcgagtgacatgtaaaaccccccagatgaaaagaacacgtcatacatatacctctggaacaaaggattcgcggtaccctatcccgagttcccctgtagagagtaaggactccgatgcccaaaaggatttccagcccattaggttccgcataattaatttgccctaacctaacaattagacttatctctataggcacccatgatttaacaaccggaaacaatctctctacacttattccacataccctttataccactccaattgacaccctaacagcatttactaaataacctcaattcaaagctacttccctataacacacgtctattacattgcccccatccccttttctatcacaccc

SEQ ID NO: 698407 - DNA, 1158 bp, Homo sapiens
  misc_feature (338)..(338): n is a, c, g, or t
tgtcgcctggtttttacagacaaggtgtctctcaagtcttaaacacaagggtaatctacacccagttggggcctcaattataccgttctagctctcccttgaaaaaaacgtttcttgtgggaaatttaaaatggttggaaattcagagaagggtgtccgtcccctaagtgtgataatatttccccccctggtaataggccgttttttccagaagaagaaaatttgtcacggagtcgccccaagagtgccccccgggaatctcgcccagagtgattaaataagaaaaatggaaaaattggggggaaaaaattggccccaaagggtaaatggaatttgcnccagggtttcataggaagaagttgcccatagacttgattcagcgtcctgaaaattcaaaaggcacaataatgtgtccctcctgaaaaagtgtactccggacaaccctgcccttgaggatttttgaaatatagaatccaagtctttaaggcccagaggaaggaagcttgcgcccgataataagttgaccaattagaggacctaataatctctcggtcaccgatggaatggggaaatatgaattagcctcccggacccaatttccctcgtgcttaaagccctcttttctgatattgtgactcttgtaaagcccacggagaaataattactctgttattcttataatagagatagttttggcaccactcttgagggtaaatgtgcacccaaatgtttgtgcaccacatttgagggtataatgggtgttgtagaataagtgtaatgtgtgttaaagaagaggaatacccgcgaagccactatgaaatgtaaattatgcgttaacaccaagtcaccatttcccagtgttcgccatgagaataaaataatttgtggaaagattttgagtaaaactccaaaccgttgggataataaataaaggagaaatttgtgtttttaacctttctggagtagaataatttctaaagtggtattctaaaatgcaccagtgtttcccaggaaatagctgatagtgtaaatagttaggtggtttgtgaaatagttaggtgatatccattttcccaggaaatagctaagatattttgaaatgttaggtattcccaaaatttcatatgtaaagaaaatataagtgccttttatattata

SEQ ID NO: 698408 - DNA, 879 bp, Homo sapiens
gatagagagaaactccgggacactccctgatggccaacttcctagtccgagatgcttgctaggcaatgatccaggagtcgaggtacactggcgtgacgcctcaggcaaaggcgggtaacaataagctcgagtcaaggtcttccatcgagatgggcactatggcttctcagaagccactcactctatctggcttccgattgtgcgagcctcatgtcaattcacctacctggcacgatgctcatctgggcccagctacaggtgcgcaagctggacagcatctggctcctctaggcctgttgtactaaatactcatgcaaggaacggagatagtcaatggaggactagagtggaggcagtgggcgccccaggcgttacaggtctgatcaccagtggtagtcatggacacagagcctcggcgagatagtgaggccgagttttatgaagagtagcgacacggaccgtcccaggagtctgctaggatgacatgcgtacgtgtcgacactctgaaggctcttcacatgagatcgttatcaccgatctttgaatgagcagggccagactcaagagacaatgcaggacggattacctggagcgcgtccggcgtgaggggcaccgagacagacgatgccaaggatcctgcttgaactccgagctggttcaacgtcccgcatgcccgagatcgcatgagcagccgcactgaaggctggagcatcagctgcgggtcgcaggcctcggaccacagagagatcgaaaagcgcatgaacggccttcaaggcggaacctcatgcaggtgggcaagagtccgagaccagtacctcgggtgaggtccccggaatggccccggcggaccaatcacgccggtgctggggttacttgcgg

SEQ ID NO: 698409 - DNA, 439 bp, Homo sapiens
  misc_feature (25)..(25): n is a, c, g, or t
  misc_feature (72)..(72): n is a, c, g, or t
  misc_feature (408)..(408): n is a, c, g, or t
ccaacaggcaattaaactgtggacnggggagcataaacatatcctgtgtcaacttctcctacccatggaatnagtaaatgcataagttgggatgaggtgaaacaacacctctggggaacctttcatgacaatttaacagcagacataaggcaacttaaaaatacaattttagaatcccttcaaactgtagatctacacacccaacaaacagccatatggaagggtgtgtgagattatctctcctggatagaccaccgctcctgggggcggggggtggtgggtcactccttgattagaaaagaatgttgctaattatactcatgtttgtcttatgttatttactaattttaggatgaaagccggaataagagcaatgtccaccatgcctgacagacccttgctgcgcanacctgactctccaatgaacaagactaatgca

SEQ ID NO: 698410 - DNA, 911 bp, Homo sapiens
  misc_feature (90)..(90): n is a, c, g, or t
  misc_feature (139)..(139): n is a, c, g, or t
  misc_feature (141)..(142): n is a, c, g, or t
  misc_feature (147)..(149): n is a, c, g, or t
  misc_feature (187)..(187): n is a, c, g, or t
  misc_feature (242)..(242): n is a, c, g, or t
  misc_feature (244)..(244): n is a, c, g, or t
  misc_feature (257)..(257): n is a, c, g, or t
  misc_feature (293)..(295): n is a, c, g, or t
  misc_feature (300)..(300): n is a, c, g, or t
  misc_feature (307)..(307): n is a, c, g, or t
  misc_feature (314)..(314): n is a, c, g, or t
  misc_feature (317)..(317): n is a, c, g, or t
  misc_feature (320)..(322): n is a, c, g, or t
  misc_feature (324)..(325): n is a, c, g, or t
  misc_feature (336)..(336): n is a, c, g, or t
  misc_feature (339)..(339): n is a, c, g, or t
  misc_feature (341)..(341): n is a, c, g, or t
  misc_feature (345)..(345): n is a, c, g, or t
  misc_feature (353)..(353): n is a, c, g, or t
  misc_feature (363)..(365): n is a, c, g, or t
  misc_feature (367)..(367): n is a, c, g, or t
  misc_feature (369)..(369): n is a, c, g, or t
  misc_feature (378)..(378): n is a, c, g, or t
  misc_feature (390)..(390): n is a, c, g, or t
  misc_feature (394)..(394): n is a, c, g, or t
  misc_feature (397)..(397): n is a, c, g, or t
  misc_feature (422)..(422): n is a, c, g, or t
  misc_feature (525)..(525): n is a, c, g, or t
  misc_feature (544)..(544): n is a, c, g, or t
  misc_feature (546)..(546): n is a, c, g, or t
  misc_feature (548)..(548): n is a, c, g, or t
  misc_feature (602)..(602): n is a, c, g, or t
  misc_feature (686)..(686): n is a, c, g, or t
  misc_feature (903)..(903): n is a, c, g, or t
gtatacatattagggaatcccttaaaattcaactctagagttatacaccatctagtacttttgcaatgaatgttaacaacaacaaaaaanatctctaaacacctgaaagccccactattaacatggactatggtaatanannatttnnncatttaatttgttcaacatatagtatttacattatganaccaatggtgatgatacaataaagtgataaagaaatagtaaaaataaactttaanangcaaaggtttatngtctgacaatgctaattatcctaattgtatatgagnnnttaanccatagngctttcngtnacnnncnncttccccctcnggntngtgntcgtggcnggcgaccggnnngngngcgacggcngcgagggctganattnganttttttccccaagaatgtgtgagtngataaatgacatttcagagcagatattaatttacttgtggacagaaaaagaaactcaagattggtactggtcacaagcctcttcccaatagaaattataaaancagtaagataaaatttaanananatctaaaaaggggatgcataggcaaagagtaccataaatggcacagctcaaaanatcccaggaccaatcagacacacatcttttctctctccttcagcgacaagaggtcgattttgccatcaaataaccatgattgangcaagcgaggggcaccaggtgtacaactgattagatcttgcaaaatactaagatgggagcaggggtggccagaagaaggggtaatttatatataattcaaactatatacagcataaatggaatgcagcccatcccaaactggctctgtgaaacaattggacctttatagttaaaattataacaagtgtaataataaaatagatttacatgggaagcnaaatccaa

SEQ ID NO: 698411 - DNA, 126 bp, Homo sapiens
ctctaaaacgatcctagcacctcagtctaacaaagcgctgtcataggcgggagccaccacacctagcctatacaaggagcattgagctactctcagggccgagcacacagacgccatgcacgaagg

SEQ ID NO: 698412 - DNA, 997 bp, Homo sapiens
aactggtgagtctgtgggagttagcgaataacaggggctggggagcccgcagacgcctttgtcatagctccgggccggagccagaccccggaaggtgcgagagagaggtccatggatggtatatggatatggatgtcttggatggataacatgggaagcgatgtgggtggatgcttgtaagatcagggagctcatcagaaatcgtctatcttttggcgtggaaggaatgcccgatcacccaagaactggggagtcttgtttgagagactgatagatggtctggggaacatggatctgagtacagttgtcttttcggaggtctcaaaggagcagttaagaggttggccaagagtagatctgtgtcgcaggtagaatgcagacagaacaggaggaagacgcgattggacagcttgcatggagtatcttgagtagagaggctttgaagtgtctggaaagaggtcgtcatgggtgataattgatattcgttgaatgtgggaggatggccttgattcggacatcgattctgatttgccaaatccagatgtgtgctccatgtgtcctctgggtactgaatgctcgattgcttgtatcctaatcattattctcatataaaatgttgtagggataccgcttatgtgtcggttgatgatgtgggatgctggccgaaaggtggatgtcggattgtatgtataaaatttaatgaggctacacgattaattctaatggtcgaaatgtgatgagtcagttggtctagcggaggctgacaggggtcaggggaataattgttaacccaggcaagttttaattcgaagtggggagttggattggggacctctgatgaatttttgagtgggccagagaaggggatatagggcggttaaaaaagcggagatattaaagactcggttgtgcacagggtcaccgttttttctgtggaagaccacgattttgatagtcgtcacaagttttgtacgatcgtggattcgggtttttagaa

SEQ ID NO: 698413 - DNA, 303 bp, Homo sapiens
gcctgatccgctttagggtgggaggattacaaagtacattgatcagttagggtggggcagtaacatatcacaatggtgcaatgtcatcagttaaggctattttcacttctgtggatcttcagtaacttcaggccatctggatgtatatgtgcaggtcactgggatatgatggcttagcttgagctcagaggacggacagagaccagcctagccaacatggcaaaacgccctctctactaaaaatacaaaaatgagccaggatggtctcgatctcctgcttaagcggatcagcgggtaccgagc

SEQ ID NO: 698414 - DNA, 227 bp, Homo sapiens
ctcttgggagggcaggtgggaagaccacttgatgtcgggagtttgagaccaggctaggcaatatagtgagaccccatctctattgaaaaaagcaaaaaaaaaaaatactatttaaaatagcttattaaaggattccagtgaaaagtgtaagactaactgttagccattgtttaagtttgggatgcacaaagagccacgcaaagagccacacaaagaggggtcccgag

SEQ ID NO: 698415 - DNA, 230 bp, Homo sapiens
taggggtcctcttgctccttcttggcccgtcctgaaaagaatggtcgcacttggacaatcctcgtacagttggaccttcttgcatttgaggcccttaggtcaccaaggcccttcttgcccccattagtccccctgcccatctggaccttccaaggcttaagcgtagttggttattactttggtacgatggagacttttcaggcattgccagcttgttagaacttttttaa

SEQ ID NO: 698416 - DNA, 86 bp, Homo sapiens
ggggggggggggggggggcctcttttccaaaaaaacccttttttttttttgggggggggggggaaaagggcccccccctttttgta

SEQ ID NO: 698417 - DNA, 262 bp, Homo sapiens
gcaatcccgcgtctagaactggacaggatgattctgcctactctcttgagcaagcaatgatactggtgaatgggctgaagccacattgtgggggggcagagacaccctgggagacagagagctcccaccctacacaccacccccctgggtaataccctggactggtggggagctcacacgaggggaacgagggacgtgactccttagacagccaaagtggacgtcgtaagacgcagagcccggtaagtcagaacaccctggg

SEQ ID NO: 698418 - DNA, 690 bp, Homo sapiens
tccctggatccctcttttgtgcggccaggagattgatagaaaaatcatatttgttttgccaaatgacagcaagatttagacatctgaaatccacgcggggtcccatccaacgcatggtgaaatagattatgaagcaattgtgaagctttcggatggctttaatggagcagactgagaaatgtttgtcctaagcacggtatgttcccaattcgtgctgatcatgattttgtagcacaggaagacttcatgaaaccagtcagaaaagtggctgattctaagaagctggggtttaaattggcctccaaacctgtgtaatttcctgtaagatttttgagggcggcatgccaaatgttggcttattgtaaaaataaagttaaagaaaataatgtatgtattggtaatgaggtccttaaaagtatatgaataaaaatatgggtaccctcataaaaattagtaattcaccttttaagatccagaagaaatttgtatgtttgttaaagttgcctttattgcagcaagttccaaagggaaagtgttgaagcttttcatatttgcggggtgagccttttgtaaaatattgaaaggggtttgagataggggtataaaaaagccttttttatgccttattttgtatcatttgttttcctcatctaaaaagttgaataaaatctgtttgattcggttttccta

SEQ ID NO: 698419 - DNA, 876 bp, Homo sapiens
ggtcgacccacgcgtccgcggacgcgtgggtcaaatacttaaagcttccagaaccttcagcctcattgccaaatcctccatcaaagaaaataaagttatcagatgagcctgtagaagccaacaacgaacgattacactaacgctttaactactaaagatttgaagacctgaaaacgaacacacactacgcaaaatgaactgcagctcagaaggcttctggctacaacgttgaccaagagtggcaactgaaacgtacttgactacccttttttggggtaccaccacactacaacacaacaacacaacacaagcgcgaccgggcccgccaccataagaaacggcctatcccacatcaacagggagcgcccccaaaacgcattgtaacggcgtctaacccccaagggcttctcacaactgtcggtaccaaacacgtgcagcgctccccctatatctacagcaggacgctcgctaactatcaatcaacgccctacggcgcccactcctgcgccccgacccggcctcttccacaccaaacacgcgtctccggctgcaaccgggcgcgcaacaacttcgcctcaccccctgcggcgggcacccctcgccgctccaaacgccgcacacctcctcacctctcactcagtcggcccgctcgcaccccataacctctcgcgccacccacccaccctacgcacctcccaccccgacacgcactccccacacacgccttcctccacacgcggtcacccctcatatcacaccacacccccctccaacccgcgcgccccctacacatcgctccgcctccaacacacctccagccacgccccaccatccccccccgccccgccctcccgcacccacctcccccgcccaccc

SEQ ID NO: 698420 - DNA, 420 bp, Homo sapiens
cacgaggcggacccgagcgcgagcgcaggcccagccagagatggctgattccgatcctggggaaagaagctatgataacatgctgaaaatgctgtctgacctgaacaaggacctggaaaagctattggaagagatggaaaaaatctcagtgcaggcaacctggatggcctatgatatggtggtcatgcgtacgaaccccacactagcagagtccatgcgccggctagaagacgccttcctcaactgcaaagaggagatggagaagaactggcaagagctgctcactgagaccaagcgcaagcagtgagctaccatctgtcagcagcctgtgggccgaagccagggacatgggtccagaagcccagacgtgtagccatgtgcatggtacttgtttctccaataaacttatttcacggggaa

SEQ ID NO: 698421 - DNA, 515 bp, Homo sapiens
  misc_feature (386)..(386): n is a, c, g, or t
  misc_feature (395)..(395): n is a, c, g, or t
atctctacctaaaagtacaaaatgagctggtctcaaaccagctggccaagctggtctcaaactcctgacctcaagtgatccatccaccttggccttcccgaagtgttgggacttacaggcgtgtgccaccgtgcccagccgagccttcttagctttttggggttttttttggttgtttgtttgtttaagacagagtcttactctgtttcccaggatgctggagtgcaggggtgcaatctcggctcactgcatcctcgacctcccaggctcaaggtgatccttccatctcagcctcccaagtagctgggactattagcaaggtgcatgcctggctaatatatgtatttcttgtaaagtctcaaacttctggacttaagcaatccaancaatccacntgcctcagtctcccaatgtgctgagattacaggcttgagccatagcgcctggctgatatttgtccctttgtgtctagctcattttacttggcataatatttagaaaattcatgtttaaaa

SEQ ID NO: 698422 - DNA, 172 bp, Homo sapiens
ctagaggatcccgcactgtagttcatacatgcactgtagttcatacctggtcgctgtatcggggtggtcgcagtatcgggggggtatgaacaacagtgcaggtatgaacaacagtgcaagtatgaacaacagtgcatgtatgaacaacagtgcaggtatgaacaacagtgca

SEQ ID NO: 698423 - DNA, 816 bp, Homo sapiens
gggttttcacaagtgcacttggttcaatctatcttgtctctgatataggctagtggctgtaattcctaacgaaaagctttcactgtagacgtcatacagtctgcatacacagagatgaagttagtccacttggatcaagatagcctgcgtctgcgtttacaaaagatgcacaccaggcttcctttacaagtgaactccaaggggctggttgttaaagtaccacccttcctgacagacgttatgtggggctcgtgtctacttggcctgaaaacaagatgtgtcctaatcatatgctatgctcacagctagtagcatccctcatgcgtcctttgtcatactctggaaagaaaaaaattctgctatcttcagagaaaccatctattcatacttaaatatggaagcctttacaaggaactcaaatactacatttcattctcatttgtacaatgtagacaactaagcatgaaaaggccaggttgtaatccgcagttgacattgtcagacctgacttgaggctttatgtacatctaaaatcgcacaagggggaacggaggacaacgacagaagctcaactttagaaaccatggaacatcacctccctctttgacgagagagctgctttgtagaaaccaggctccatgtcttacttgttgggcttctcacaggtagaccctgcccctttcttacctcacatggggcaagagggactctaaaggagggcgtaagccaatagaggcacctgtgagccctcctttactcaggaagggacatccatgtgggaggccccacgagggacattttaatctcaaagaccag

SEQ ID NO: 698424 - DNA, 843 bp, Homo sapiens
  misc_feature (13)..(13): n is a, c, g, or t
  misc_feature (64)..(65): n is a, c, g, or t
  misc_feature (68)..(68): n is a, c, g, or t
  misc_feature (73)..(73): n is a, c, g, or t
  misc_feature (121)..(121): n is a, c, g, or t
  misc_feature (303)..(303): n is a, c, g, or t
  misc_feature (364)..(364): n is a, c, g, or t
  misc_feature (427)..(427): n is a, c, g, or t
  misc_feature (561)..(561): n is a, c, g, or t
  misc_feature (630)..(630): n is a, c, g, or t
  misc_feature (698)..(698): n is a, c, g, or t
  misc_feature (732)..(732): n is a, c, g, or t
  misc_feature (734)..(734): n is a, c, g, or t
  misc_feature (736)..(736): n is a, c, g, or t
  misc_feature (746)..(746): n is a, c, g, or t
  misc_feature (748)..(748): n is a, c, g, or t
  misc_feature (753)..(754): n is a, c, g, or t
  misc_feature (759)..(759): n is a, c, g, or t
  misc_feature (763)..(763): n is a, c, g, or t
  misc_feature (767)..(767): n is a, c, g, or t
  misc_feature (783)..(783): n is a, c, g, or t
  misc_feature (810)..(810): n is a, c, g, or t
ttattatattctnccccatggggccttgcaggaaaagggacccaagccatacccccaccccttnnccnacgcncaccccacctgaaccaagggacaggattctaagagaatcaagtatctnaaataagccagaatgtatctggggaagaatagccattaatttcctagacctgacactgggtttatttgtgtctgccaggaagacggggagtcagtaagaatcgtaaatggactagatgaggggaaaaaggatgggcccccctttatcacagcctgagcccaaaaaggttgggataaacaggngtgtaaaaaagagaggagggaaaagggaggatgggcaggggagagaggaagggcaggggcngggttcacccaaatcacacagcattgtaggaagaagcaggggaaccattggagtccccagccnggaacaggaggggagggcccagcacccagagagaggagaatcccaaggcccccctgtcaaccccatcgtgaatagatgcaaaagccccccccccccagagaatccagaatgggccgtccgaaggcaagagagcntagggacagacccgcagccccacgcccaggccgcccccccccacccccaaaggccccgccaggagaacnatagaaatacagagttccaggtctctgccccccctccccagacccaagagagggagtagagacaaggnacaaagaccctggacgtaaaggtgaacatcagtntngncacatataanantattnngaganaggnaagntagtgcatgccccaanatggatgcctcccttcaccttgcaggnagccggaactttgatagttgcagataccacaat

SEQ ID NO: 698425 - DNA, 625 bp, Homo sapiens
taaaaaaagagtcccatttggtggcccaggcgggattgcagtaggcatgatctgggttcacggcaacctccacctccggggttcaagcaattctcatgcctcaaccagggcccaccaaaccgggctaattttggttttttaatgtaaaagagggggtttcaccatggtgggccaggctgtgtcttgaactcctggacctcaggtgatccacccacctcgagctcccaaagtgctgggagataacagggctgtagaagccaccggggccgggcctcatctaaccaatttgggatctcggggtgggatgtcacagagaaacactatgtccccattatcttccaagattatttcaaaacataaaaaatcatggactgactggggaggacacagggacagaacatcgtcaaatcctgagcatacctcttcagaggctcgagggccccacgaggacgggtctggcggcgtacaagaggaggtaccagctgcacaggcccctcccatcgtgatagtgccagggggggaaacaacggcgcctccccgggagagacgagacctcttacaccaccaaaggtggcggaccccaaaaaggtacccccaccagaaccgggatagcatcgcagacatg

SEQ ID NO: 698426 - DNA, 330 bp, Homo sapiens
  misc_feature (16)..(16): n is a, c, g, or t
gactctagacgatccnctgctgcagactatccgtagtacagtacggttagcaattttagacgtttggcatctaccgctgtgtcacccggtgaatatcaggcagctgtgagatactaggaaagctaacagtgatcgaacatggaaagagctctgcttgacctggagagataggagagaataccgagctgctcagacgagtgaacttcatagcgtggacatgcagatgaattagaagaacttatcaactactatcaggatcgtggctattttgaagagctgatcaccatgttggaagcagcactgggacttgagcgagctcacatggggtac

SEQ ID NO: 698427 - DNA, 258 bp, Homo sapiens
cccggaaaaaaaaaaaaggggggggggggggggggggggttttttggggttgcccccttttcccaaattaagccccccctttttttgggggcttttgggggggaaaaagccccccatttttgggaaaaggggggcccccccccccccgggggggttttttccccccttttttttttccccccccccttttcccttttggggggcaagggggggccccgggggggggggggaatcccggcccgggaaaggtttccccca

SEQ ID NO: 698428 - DNA, 1036 bp, Homo sapiens
ctctgtgactattacactaataaaccctgggctaccacgtagcccgttgatctccaagtagtttacctatgcaagacctgtgacactctgaattcacttctctttctttcagaaagtagtccataacatggagcttcaattcatcaacaggtaaacacttgtctccaacccagtttcatttaggccatttctttttcaaaatgtcagctgttctcttccaagatttttcaccaaaacaatgatcataagtgctggaatatataatactttgcaggcctcaaataacccagacatactctcatatttcttaggtgtatttaggtatggtacaacttaccagcattaccctgtacaatatcaggagttaattccttacctagaactatttcttccttttaagattcataagtaacctttatttttacagagctacgtataacttccacattacagtcaggaacctgaggtgtaacttactaagtgaaccccaaggttattcaatcttgcaaaagaaacataaacaaatagggcttacagccatggacagcactgaatcacaagctatcagctcaattgccaaaaccgcttatggatgacacacgccagtctccagccgctcggcatgcctagcaagatcggacaacatctcccccctggcctccttcaacacagatacacctcaaccaaaactcagccccaaccgacaacagacggcacacgcgtgacacagtcaaccacacgcatcaagaaagaaacaaccaggacaggcaacgcccagcccaacaaacgacaccaacgacaacacggcacaacacacaaaccacaaagagcgacacaccatctaccaccacaatagtaacacacacagaatggagaaaactaaacgctgtggtcattgttcatttctttctattaaaaccaacaaaagagagcaaaacaaacaaccaaaagaacacaacaacaccataacacaaagagacaacagacagacaagagaacacacaatacaccaaccacaaaacagagacaaacagca

SEQ ID NO: 698429 - DNA, 86 bp, Homo sapiens
  misc_feature (26)..(27): n is a, c, g, or t
tcgcctgggtcagggggtgcgtgtcnngggaggcagaagcatggatcccgggcagcagcgccgcctcaaccgacaccccacaaggg

SEQ ID NO: 698430 - DNA, 738 bp, Homo sapiens
ctgccacgctgcttccggatcgaccgacgcgccctccgccagccgacagacacagccgcacgcactgacggtctccctgcggatcggacacatagtatgaccattaggatgttcagatctcccacccattctatggaaaaccaaggggatcgggccatgatagccacatggcagctttgaagaacgggacacctttagagaagcttgatcttggaggccatcaccgatgagaacttacaaagccggattccggcagagattcctcatatcatcgatcatgcattgctagattaaagagtgcccctgatctccagatttttctaccatcatcctggagacgtagcagagaaatcagcatcatggttggagttcaaggcacacagactgtgccccctactgaccactgtgaagtttcttggggctggcacagctgcctgacatcgacagatctcatcaccatttcctctggatactgctcaagtccaggttacagatccaacggagaaagatcagggagccagatgcgcgctacaggtcagccgcccagtaccgacggtcgtgatgggcaaccatttctgaccatggtagcgtacatgagggcccccgaagacctctacaatgggactggttgccggcatgcagcgcacaactgagctttgcctctgtacgatatcgggctgtatgattctgtcaaacagtactacaggaagggctctgagcatgcagcatgagagacgc

SEQ ID NO: 698431 - DNA, 300 bp, Homo sapiens
gagaattaatgtcattatacccacctagtaaggtacaatttgatgatatatttttatttcttgaataatatctggataagttcatgcagggctacttacaagtacatccaaaagatcaagaagacttgactagaaaatctcctggaaagatatgaaagatatgaagactctgatggaaaagatgaagacccttaacattggatatctttgggagatgtgtcaaaatgaatgcaggattctgatacctacaaaaagatgtcatgatgaagaaccacctagtaaggtacgatttgatgacac

SEQ ID NO: 698432 - DNA, 300 bp, Homo sapiens
ctcagctatgccttggggaaacaaagtgggatagacgaagaacctctatttacaaagactgtgttctattccggttcttttgttgtgataactatggagaaaatatatctgtttacgaaggtgggctcatgcagatcatacaatactggtccagttaaaaccttactacccaaagtccacagtttcgtagagacaccgtgcaagtgacatatgtattcctattataaggggagtgcagcatgcagaggcgtttttcgctaccagttcctccaaaagcaaaggctaactccagaagtccgc

SEQ ID NO: 698433 - DNA, 174 bp, Homo sapiens
ggacctggtggggcacggggacccttgatcttggaagtcgtggaactgcttgacagccggtcggcggcacttgctggccgcgctctcctccaccttcatgctctgactggcagtgggctcgggcgcggtgccgggcccccctgtctcggtagcactgggtggcgtccgtcgcgg

SEQ ID NO: 698434 - DNA, 216 bp, Homo sapiens
cagtgcaagagcaacacgtttccacagggtagacattatgagaagcaagtattttctctctggaggcagaagatgttctcagcatcgagaaaaccgcctggcagagagaatggccatccttcacgcagagcgacaggttctgtataggtcttggttcagtgtggcaccagcaggcaggagcacgtcaccaggagcaggagtggcgaaacgagtggc

SEQ ID NO: 698435 - DNA, 337 bp, Homo sapiens
tagagatgggtgtctcactctgttgcccaggctgcagtgcggtggcgaatcatggctcactgtaacctagaactcttgggcccaagtgatcctcccacttcagtctcctgaagggctgggactctaggctcatgccactaccaccagctaatttttaaatttttttttgtagagacagggtctcatctctcgatgttgcccaagatggtcttgaactcctgggcctcaagcagtccctcccacctaggcctcccaaagtgatgggattacaggagtaaggccaccacaccgggcctaaaaggtatcctttttaaaatgaagtattttgaataataaa

SEQ ID NO: 698436 - DNA, 112 bp, Homo sapiens
agtctggggtatgcatggcgctctgcgcgcctctgactggttcggtcgatcgggctgtcgtatctttgggcgccgataccgacgccattcgcagggaagaccagtcgagccg

SEQ ID NO: 698437 - DNA, 451 bp, Homo sapiens
  misc_feature (283)..(283): n is a, c, g, or t
  misc_feature (286)..(287): n is a, c, g, or t
  misc_feature (336)..(336): n is a, c, g, or t
  misc_feature (345)..(345): n is a, c, g, or t
ataaaaatctcccgtctggttgctgctcggagaggctccaagaaatgcaaaacaaacccgcctggaaaatgctgccctgagaaccagagcgagggcttgaaagatgccttcaacacagactcttctaggaatccagccagctttgggacggccgtttcacaaaaccaaaaaacaccaagtaacatttctaaccggagaattgccggttttagcaagaaaaaggggcttcacctaaaagggagggtcacaaaacacgaaggtgttccccctgcgcctgcctctnccnntctgagcagatccgtccgttactgttgtcttttatctccaccctggcangagggggcncagcatcctgtctgtgtgtgtgctcactgtttgcccgcctgtctgccaggcttcttctctggctgcctctgcctgtgcccgggatccctctctcgccccggccacc

SEQ ID NO: 698438 - DNA, 406 bp, Homo sapiens
aaggctctctacctagtttgatcaggttaatccggactggaaagggatgggagggagggagctggcaaacaaacccggctctgctggtatctcagctctgtagtcctggttcagttcttagcctctctgagcatgaatttccttgtcagtaaaaagcagtggtactcgtacctacggtgtaggaaggtggtttggtggattaaatgagacagcaaagcacttacagcaatattgggtaaagggtagtggctacaattctaatttaccaagtaagcataatttaccaaataataataattaaaagggaattcattcaaggccccaagtatcactgaaacgggcccaactatcccatagaactaaggtgtatggttgcttttgactatccaggtagagagccgggcaa

SEQ ID NO: 698439 - DNA, 284 bp, Homo sapiens
atggaaagctttgtttgcttccccaaaaacatgcttattccttaagggatgggttagaggtactgtggatttttctgttttctgtcttacaagaaacttgtctatgtaccttaaaactttgtttaggatgaggagtctttgggtccctggacagtagtttgacggatttccccttttgtcccctagtaagcccaggtgctggatttgaacagtttgagctctttttgtaatatactctaaacctggtatttttggggtaataaacgagatgcaggacccttgga

SEQ ID NO: 698440 - DNA, 136 bp, Homo sapiens
ctgggaccactcacacagagagtatctcctcacctccagccagcaccagtacactccatacaacagctgaacccaccctggcacccactaccaccacctcattcacaacttccacaactatggaaccaccttcaac

SEQ ID NO: 698441 - DNA, 130 bp, Homo sapiens
cccattgacagatggagaaactgaggcccaggccaaaaaatatctcactagaggctcacgcatttcttggaaaaatttggggcttggacttaacggacggtcgttcagcagcagcgcggagcttccgaag

SEQ ID NO: 698442 - DNA, 135 bp, Homo sapiens
cgcatattcatgcaccatacccgaagctgccaacttgtatttcaggcaggatcgatgggcttgggcggcgacgtgtacgtctggatatgggcgaaccggtcaaaatcgtggagtaggctgacaagatgatcaatc

SEQ ID NO: 698443 - DNA, 972 bp, Homo sapiens
aaaatagcaaatcacgtgcatggacccctctctacaagtgcagctttttatagaaattctgaacagatatatctatctttatgaaaaggaaaatgatgcggtaacaattcacggttttaaaccagcattatccaaaagattcgagaagacctcccgaatcttgacatccagtgaagaaccacgcagcagattaacaaacatttccataacacactgcgacgcatttgcgcttgcggcgggaatcaccagaatccgaggggccaaatttatcaacggtctcatcctttaccaaacggaaatagctcaccatactcctttccatgtacatccagcgagggttttattaccgctacgctttcccttccatagatcgtgccttccagaaatgctgaggtaggtatcccatttcttacctgcgactgtgttttacccagcacatccggacactcaccttcacgaccataactacacatctattcacttggtaagtgtccaacctctttctgatcaccccaagtagcatgactgatctgcattcaacaaatccctgtgaatctgtaacaacaacaaaaccacacaaacacccacacaccccaaaacacaacctaaaccctggagaaacaccagagacgacccaccccacaacacagccacggacaagcaaacgaacaagcacgagaacaacgaggtgacaacaacaacatcaaaaaccacgaagaacagatacaacgcccccacaagacactactgaaacacggaaaccacaaaacccacggactaacgcaagataaattacaacggaacagcgacataagacacaagtgacaaagtaaacacagcggagacatacacccacaaccagtagcaccagcctcagcccaatgctcctaaacaacctaccgacacagacacgcacaatatacacaaagcccaactacgacaacacaccacagcacacaagagttacacacc

SEQ ID NO: 698444 - DNA, 288 bp, Homo sapiens
tgcgttccatcagcacacctggctaatttttgtatttttagtagagatggggtttcaccatattggccaggctggtctcgaactcctgacctcaggtgatccacccgtctcagcctcccaaaatgttgggattacaggtgtgagccactgcaccgggccacaatttgcttattttcaaataagctgtagtctttcaacaattagcaaattagtatttggaatttgtgtccaccaattatttttaactgatagtttatttagataatatcctgatgggagaagactgcg

SEQ ID NO: 698445 - DNA, 2036 bp, Homo sapiens
  misc_feature (34)..(34): n is a, c, g, or t
taatgttacggataggtaaactgaggcccaaagnggatatagtaatagtcccagtgtcagtaaactgggtcttgaacttaaatgtttgtttcagttctcattgccttcatctcttaattgtcggcacttaaggccaaccaagcagcttagacagcgcagtccactcaacggtaactttatttgctatattgacaatctgctctgttctgtaatatagaacattggatcaatctttatctttttgctgacttaaggaggctgctattgttgcaatatccagagatttcaagttctagccattgcggggtctttgtggtgttttcaatttctcctctctccacccctgcccccatctgtggccatctaagttagcaatacaatttattttggccatttaaaatttttctgcctttgttttatttcttcccaaatatatttgaaaatgaatgatctatatagctgattttctgaccacatatataattgcaatttttatttgctcttcaaactattacaacatttttgtccttataaggttttttgggcagataatgcgaggtctgtggtgttaccttttatatactcctattaccttatgtttgtgaagcattttacattttacagagcactttgattcatctccctatttgttcatttatttaactgatcagttcactgaaatatttattgaacacctactggaaccaagtgactgtgctagtaacttgtgatatacagtagtgagagtccaggcatgtaaccgatcattatagtacaataacatccctaaaccagactttacaagtagataggatcaacaatactctatcaattttcaactccaattttctattctacttaaaatgggaactagaaactgtttgcctgaagaatgtgtctgaaacataatatatcactgcatgtctgtgctgtagacctgttaattttatctgtgagaaaaaaagttactcaaaattctccctgacctaagaatactttctagttcactgcagtcttactgaccagatgcaacagttgaagtttgatttctcgacccaatatttctattgggttttgaattattaatatcactgttttgaggtattcagaaacaccagtgtatcaaaaaagcatttgcactttaggtgtgtgtggtggttatgtcatttattagaccatcccagacataagacaatcagggaaatcagaaaactccagcctcaaatgtgtctataatttcctgttctaccattgtcatatcataacatggtattacttcttaaggttttgattaagttgatctagcctcaacttaaattgtaatacatctgcctaattattgtctggaataacttttcaaccatccaatgcccactgctctcacaatgattattgtagagaagtaaaatggtaattattcaagtaaagtcacataatttctggagtcagtttttcataacaagtttatggaatacatcatcattggcttcttcataatatatttattatgagtgaccaaattttgcctggaggagcaaaatgctcaaaacttgttattataggttaatttccagctcactgttgacactgaaagattctgtgttactttaaacccaggataaaaggctggaaaaaaaattaaatgtaagtcataaactagtactcagcttttcctagtttctaaggcttattaacatttgcaaattactcaataaatgtctttcataatggaataacataaaagcttttgatttggcagatagtgatattttatttattttcattctggttgaaaaaaatctcagtggcttctcttcattccacgagaattttgatttttaacagcagtctctctttttctcagcattgcaaatatatatgtatatatacattcatgaccaaagtatcgcttactgaccatgcagctgtaaaccttctgtgcctatcaaacaaatacatagcatgaaactaattttagaagtttcatgggggaattttaggggaaagtataaacctaagagtgagtgaatggagat

SEQ ID NO: 698446 - DNA, 721 bp, Homo sapiens
  misc_feature (406)..(406): n is a, c, g, or t
cgccactgcgggctgcctggccggccagccgctacaggagcggacccacgcctggtgcgagcggctgcgcgcgcggctggaggagatggacagccggacccgcgatcgcctggacgaggtgaaggagcacgtggaggcagtgcgcgccaagctggaggagcacgcccagcagatactcctgctggccgaggacttacaggcccgcctcaagaagctggttctagcccctggtggaagacatgcagcgccagtgggccgcactggtggagaaggtgcaggctgtcgtgggcaccatcgccgaccctgtgcccagcgacaatcactgaacgccgaagactgcagccatgcgacctcacgccactccgtgactcctgtctcctcgcaggctgaagagggagaccctgtncccgtcccagccgacctcctggggtggaccctagtgtaataaagatgcaccaagtgtctcgctcgggtgctattggaataatgaaaagaaaaaactcttgggggggcccggtacccaaattgcccatagtgaggaggattaaatatactggccggcgtttacaacgtcgcgatgggaaaccctgccgttcccaacttaacgtcttgagaacaacccctttttcagctggggaatacaaagaggccgacatatcgtcttccaaagtcacctgttggtgaatgcaatgtgagcgtatatttttgtcccgtatttttt

SEQ ID NO: 698447 - DNA, 618 bp, Homo sapiens
  misc_feature (34)..(34): n is a, c, g, or t
taatgttacggataggtaaactgaggcccaaagnggatatagtaatagtcccagtgtcagtaaactgggtcttgaacttaaatgtttgtttcagttctcattgccttcatctcttaattgtcggcacttaaggccaaccaagcagcttagacagcgcagtccactcaacggtaactttatttgctatattgacaatctgctctgttctgtaatatagaacattggatcaatctttatctttttgctgacttaaggaggctgctattgttgcaatatccagcagaaacttctgaagactaaaacgtccctgtctgacagctctgaagagagcaatcgttctcccagcacagtgtttgagctctgagaatggacagactgcctcctcaagtgggtccctgacccccatgtagcctaactgggagacacctcccagtaggggccaactgacacttcatacagctgggtgtccctctgagacgaagcttccagaggaaggatcaggcaacaatatttgctgttctgcagcctcctctggtgataaccaggcgaacagggtgtggagtggacctccagcaaactccaacagacctgcagctgagggacctgactcttagaagg

SEQ ID NO: 698448 - DNA, 2339 bp, Homo sapiens
  misc_feature (34)..(34): n is a, c, g, or t
  misc_feature (2115)..(2115): n is a, c, g, or t
  misc_feature (2117)..(2117): n is a, c, g, or t
  misc_feature (2132)..(2132): n is a, c, g, or t
  misc_feature (2149)..(2149): n is a, c, g, or t
  misc_feature (2167)..(2167): n is a, c, g, or t
  misc_feature (2173)..(2173): n is a, c, g, or t
  misc_feature (2181)..(2181): n is a, c, g, or t
taatgttacggataggtaaactgaggcccaaagnggatatagtaatagtcccagtgtcagtaaactgggtcttgaacttaaatgtttgtttcagttctcattgccttcatctcttaattgtcggcacttaaggccaaccaagcagcttagacagcgcagtccactcaacggtaactttatttgctatattgacaatctgctctgttctgtaatatagaacattggatcaatctttatctttttgctgacttaaggaggctgctattgttgcaatatccagagatttcaagttctagccattgcggggtctttgtggtgttttcaatttctcctctctccacccctgcccccatctgtggccatctaagttagcaatacaatttattttggccatttaaaatttttctgcctttgttttatttcttcccaaatatatttgaaaatgaatgatctatatagctgattttctgaccacatatataattgcaatttttatttgctcttcaaactattacaacatttttgtccttataaggttttttgggcagataatgcgaggtctgtggtgttaccttttatatactcctattaccttatgtttgtgaagcattttacattttacagagcactttgattcatctccctatttgttcatttatttaactgatcagttcactgaaatatttattgaacacctactggaaccaagtgactgtgctagtaacttgtgatatacagtagtgagagtccaggcatgtaaccgatcattatagtacaataacatccctaaaccagactttacaagtagataggatcaacaatactctatcaattttcaactccaattttctattctacttaaaatgggaactagaaactgtttgcctgaagaatgtgtctgaaacataatatatcactgcatgtctgtgctgtagacctgttaattttatctgtgagaaaaaaagttactcaaaattctccctgacctaagaatactttctagttcactgcagtcttactgaccagatgcaacagttgaagtttgatttctcgacccaatatttctattgggttttgaattattaatatcactgttttgaggtattcagaaacaccagtgtatcaaaaaagcatttgcactttaggtgtgtgtggtggttatgtcatttattagaccatcccagacataagacaatcagggaaatcagaaaactccagcctcaaatgtgtctataatttcctgttctaccattgtcatatcataacatggtattacttcttaaggttttgattaagttgatctagcctcaacttaaattgtaatacatctgcctaattattgtctggaataacttttcaaccatccaatgcccactgctctcacaatgattattgtagagaagtaaaatggtaattattcaagtaaagtcacataatttctggagtcagtttttcataacaagtttatggaatacatcatcattggcttcttcataatatatttattatgagtgaccaaattttgcctggaggagcaaaatgctcaaaacttgttattataggttaatttccagctcactgttgacactgaaagattctgtgttactttaaacccaggataaaaggctggaaaaaaaattaaatgtaagtcataaactagtactcagcttttcctagtttctaaggcttattaacatttgcaaattactcaataaatgtctttcataatggaataacataaaagcttttgatttggcagatagtgatattttatttattttcattctggttgaaaaaaatctcagtggcttctcttcattccacgagaattttgatttttaacagcagtctctctttttctcagcattgcaaatatatatgtatatatacattcatgaccaaagtatcgcttactgaccatgcagctgtaaaccttctgtgcctatcaaacaaatacatagcatgaaactaattttagaagtttcatgggggaattttaggggaaagtataaacctaagagtgagtgaatggagatgattcatggaaaaaaaaataaaaatctaaatgtgctattaggcagagttattaacttcttttagttgttgtttgagatngngttctgctcttgttncccaggctggagtgcantggcgtgatctcgtctcnctgcancctccgcntccaggttcaagcgattctcctgccccagctactttggaggctgaagtgtaagagttgcttgagcccatgagttagaggctgctgtgagctatgatcatgccactgcactccagcctgggcaacagagcaaaaccccatctctaaataaaaaaaaaaa

SEQ ID NO: 698449 - DNA, 459 bp, Homo sapiens
aacccctcgatcaccacaatccatcgagcagaaagagggaagggatcataatatatacaactcttaaatcttgggacaccactattataaaccaaacccccaaacaatgacgattagcactacgatgaacacgctaaggctcagatcgtacacagtgacctttccaaagagcacagagccgagtatggtcagagcataaattagaacccaggtctagggattcaccatccaacctgtctgttctccaagcgtatcatattgtcttcaaaggcaatcctctggggtacttattggtctgaggaaccaagaccagagaatgacaatgtagtttcacagcctaacatgacgaccgttaacattcgctgaacacctgctatgtaacccagcagtgtgtgaggtgctttataaacattagtaataatacataatgccgctaacattttcaaaacagcatgtctc

SEQ ID NO: 698450 - DNA, 103 bp, Homo sapiens
ctgtggaaaatcgggatcggaggaacgtcactaacttctctgagtcttacaagtggagacaaccattacttcctaccatcagaggattgatgagagtgattcg

SEQ ID NO: 698451 - DNA, 1109 bp, Homo sapiens
acaaccatggacgcaggacggtgcaagcaggttacgaagtgacagtgctggtgcgggactcctccaggctgccatcagaggggccccgggccggcccacgtggtagtgtggagatgttcttgcaggcagacgatgtggtacaatgagccgtggtctgggcaggactgctgtcatcgtagctgctgggcactccgagaatgagctcagtcccagcgacgagtgatgtccgagtggcgcccggaacattgtggcaggccatgaaggctcatggtgtggacaaggtcgtggcctgcaactcggcgttaacctgctctggtgaccctaccaaggtgcccccactgactgcagagctgtgactgattgaccacatccggatggcgcaaggtgctgcgggcatcaggcctgaaggtacgtggctgtgatgcacgacagcacataggagaccagacaataactggggcgtacacaagtgacccctggcatggatcgagaggccttcaaaggggtccatctccaaacattgactgggccatttcatgctgcggctgcttcaccaccgatgagtacgacggacagagcaagctaaccagacacgagcaagtaaccagataggcacactggccacatcatgggaagagtggaccttccagggaccaatgacgggcaagacggaaagggggaacaaactggagagacaacagagccgacagacacctaagacaaacaagacaaaacaggcgcaacgcaccaaaagcataccacaagggggacacgcatacacagatacccaaatatagtgacacaggagccccaaaacagcgcgcacaaagcccaggcgcagaagcggcaacaacacagacaacgagacaacgaaaccggaaccgagacgagaaccacggcgcggggcgacagaggaccaagaccagcaagagaaggtcaaggggcaagaacaccggaacaaggtaaaataggacagagcgagaagtcgtgggacgagagaaacaaccggcacgagacgagaccgaagacgacggacagacgagacgcacggcgagacagaaaagaggcgcgggcaacagagagcaccacaacagcgagaccgaggcaac

SEQ ID NO: 698452 - DNA, 469 bp, Homo sapiens
tacggtagtggtacattattcagtcgtgtgtgcattcttgtgaatctttttttaggcttagtaatgttacacaggctgatagatcatctctttgatgtgaaaagcatcttgggttatacattaaaatcgaggtggacattatttccccaatttcacaacaggattcacattgttaatttataaatctagacttggagaattaaggactgaagaaatgaccataatctaaaactatctacgacaaatgtgaacttaaaaggacatgcccactgaattcagtgtcctttgagtaaaacaaatatctatctgctagcacatttggtattaagtgtctactgttcctgcctgttaatcgctgggaacacaaatagtgcaattagtgcaataggagaactctagccttttatcttgggtccccccaaaaatacaaaccaacagaaacttgttatgcactcatcaaattgtacta

SEQ ID NO: 698453 - DNA, 1332 bp, Homo sapiens
  misc_feature (284)..(284): n is a, c, g, or t
  misc_feature (664)..(664): n is a, c, g, or t
gccatctactttccggtggctggcatgtcacagggagtgctcatgcttgactactggaaggatgaccggtcaggtcccttgctctttgaggagctccacctcgtgagatcttgagagagatgagatgtggcattatggaactatcgagggtaggtgaatgaactgccagagtagttcggctgaaggcttgtcctcgttactgaggggcttgctgatggatcagggatctctggcgaggcaagaaccaaggtgggacacgggctgttcacacagcggcaatcaanagggcagagagagagagtgtgcgcttgagtgcccatgcgaggaggcagtcgtttgagaaagtactaagcattccaatgggtagtgcaaagtcgagtcgggtcgtcgtagtcatgacgatgtatacatgcttccattgtcgtggcttcatgtgtgtcttttaaagggaagtggatacaaatttgttctcgtatacaggattgagtggcatagagtttagttcaaaggattagcttgtttacacctcattaacacgctatactttggcgccatttatataagtgcaattgggggatatgcatatgccgctggaaggtatttaggggatgatttcgtgtgaatgagtggaatgtaattccaggattagtatgcgcccacgtgntacaaaaacagttcaaaaatgcgtagtatcggaggggttttcatttcagcctgttttcgagacaactacccgtaacaatggtccttcacgtgtgcgttcgcaggaaaagctggggggcaccaaggaagtggtcgtccacggtaattgctctaaccgccaaggccctgggaggatggcacacttgggctatttgtattcgttccaatgtcctacagaggtggcgaacaggccgttgtcaggcctttcgctgtggtggggttccaaaaggcggggagtaatccttgcgcttggcccctccgcaggcacgtgccttggaaggttaggcttggtgggaactctactgaagggagcaccaacagagtcgaatacaaggggcccccaggctgtaaaattttgcagtcgggtccgtttccactaccgggtagagcatagcaaccaaggaagggtgttatccaccccggactgtgtttgagcgccaaggggggcttgaggaatcgttcgggacaggtttcccttgaccctttgagagtgatttccaacgccgcaaaccgttaggtggacctctcgccacgagacagttgtggcttggaggaatttacccgtgggctattttgagggctcgaaccatatggggacttggggggatttacacgagaaagcaccccttt

SEQ ID NO: 698454 - DNA, 277 bp, Homo sapiens
tagtcctcaggggagactatagtacagtatacagccacggaccccgtcaggcaataacaggacaggtgatatccatatggtcataaaaggttctcccggggaaaattccattcacaccggtaaatgggggatttaatatgcactccagataatacgggagtcaacggtactttaactggctgggagggctatgatttcacagaaggggtctactggacaatgtattattggtgcttatagaagatggcgtcgggaaaccaacatataccattaaagg

SEQ ID NO: 698455 - DNA, 935 bp, Homo sapiens
ggatggaccgtcagccgtaaggatggcaatgccagtggaaccacgctgcttgaggtctggactgcatcctaccaccaaactcgtccaatgacaagcccttggcctgctctccaggatgtctacaaaattggtggtattggtacttgttcctgtttggcgagtggagactgtgttctcaaacccggtatggtggtcacctttgctccagtcacacgttacaacggaagtaacatctgtcgaaattgcacatgaacgctttgagtgacgctcttcctggggaccatgtgggcttcacatgtcacagaatgtgtcttgtcaaggatgttcgtcgtggcaaacgttgcttggttgaagaaaaaatgagccagcaatggaggcagtggttcacttgtcaggtgatatatcatgaacatccaggcaaataatgagcctggtatgccctgtattggatgggaagaggtcaattgatgcaagttgggtgagtgaaggacacagattgatcgcgttcgtggtaaaaagtggaaagatgggcctaattcttgaagtctggtgattgcgaggcccattgtggctattggtttcctggcaagccatgtgtgtgaagaggcttcttagacttatcacttttggatcggtaggatggttcgtgaatttaggaccggctatgtgcgggtgggtgtattacatgcatgacaatacatggatttgaactgagaaggtcatcaaggttgtcctgaaaaggttaaagggtaatgaattttatccaaaatacgtggaaccaactatatctaggtatggatacaggataagaaagtatgtacatgagctttagtagatacaagaggatatgatacaggattaacgtaagaaacgtagtttgcacatgtatttagggaggcatattagataagcattaggaggcattagtggaaaac

SEQ ID NO: 698456 - DNA, 394 bp, Homo sapiens
ctaccggacgcaacaaatagaaggaactataggcctggtacagtggctcatgactgtaatcctagcactgtgggaagccgaggtagtggatcacttaaggtcaggagtctgagaccaacctggccaacatggtgaaaccctgtctctactaaaaatacagaaattagctgggtgtggtggcgggcgcctgtatcccagccactcaggacgctgaagcagtatattttaccacaattaaacatttttattaaaaaatttagcagaaggccaggcacggtgtttcacacctgtaatcccagcactttgggaggctcaggcaggcagatcacttgagctcaggagctcgagaccagcctgagcagcatgggaaaactccatctctaacagtaccaaa

SEQ ID NO: 698457 - DNA, 171 bp, Homo sapiens
gagaatctggtgtgatagcactatactattcagacactcaggcctttacctagttgctcccctaccttctgtcgagaataggattattcccatgcacctctagggatagagtataagtagtcaggctattgaacggggattattttaccccatggtcacacaggggaaaca

SEQ ID NO: 698458 - DNA, 1008 bp, Homo sapiens
  misc_feature (3)..(3): n is a, c, g, or t
  misc_feature (21)..(21): n is a, c, g, or t
  misc_feature (25)..(25): n is a, c, g, or t
  misc_feature (31)..(32): n is a, c, g, or t
  misc_feature (50)..(50): n is a, c, g, or t
  misc_feature (144)..(144): n is a, c, g, or t
  misc_feature (170)..(170): n is a, c, g, or t
  misc_feature (269)..(269): n is a, c, g, or t
  misc_feature (289)..(290): n is a, c, g, or t
  misc_feature (337)..(338): n is a, c, g, or t
  misc_feature (526)..(526): n is a, c, g, or t
  misc_feature (562)..(562): n is a, c, g, or t
  misc_feature (585)..(585): n is a, c, g, or t
  misc_feature (650)..(650): n is a, c, g, or t
  misc_feature (684)..(684): n is a, c, g, or t
  misc_feature (692)..(692): n is a, c, g, or t
  misc_feature (993)..(994): n is a, c, g, or t
  misc_feature (1008)..(1008): n is a, c, g, or t
agngaaagagggaaggtaggnaggnatgggnnatgggtttaggagggttnatggcttcaatgatagaagagatatgtgaaggtgtggtcaaatgtaatataagaatgaaagtttaggtagagataaggagtatggttattacantattgacatcaagcgaaagagggggngggggagggaggcggcgagcgggggcagggggaggcgtcgaattgcgaggcttcgagtgtgcaccgcagagaatacggggtcaaagagtaggagaaggnaaatcaagacaccatgacannaacggaggacagtagcaccttataatcgagctaagtcgaacactgcnnccgcccgttcccgcgctagctttagccgccttgatcgcaagaaagcgcagtcgcaccttctttctcgtctgcccgccccggccaccgcaccactcgatcgcacgaccatcccgcacgcaacgacaatcagccatcctccctcgcccctttctgctcccttcccattcctctctctacacccaatattnccgcaacctccatccgagctctgaggttgcatcgcnctacgctagcggccggtcgggtnttactgcgcactagtacgcgcgtaccgattcgtccaatacctcccaccgaacacctcaccctgantcgactcgagacatccgaggctcagatctcgcancgaggtgnccgccccgcgaatcaccagcaaccaacacattacgtccgccccagccctccgtcacaaccacactatattccgccgcccttcatccctggtcacccgctctcccctcaagctcacctccctctttccgctccacgccgcctgcgaccgctccccgcaccttcttcaatccgcccgcacttgattctcattatgtatatcccctccgcccccgcaccccgcttcccaagggcgtccacattcccccattaccctacgtctctactgaattccaagtcccaccgtgccaggcagggcgcgcgnncaatagtagtggcn

SEQ ID NO: 698459 - DNA, 892 bp, Homo sapiens
  misc_feature (217)..(217): n is a, c, g, or t
atgtgcttcatcatggttctgggtcgttcacctgccgtttctggtcatataggtgtgcttctttcagcggacttggcgggcgtgtccgatcccgtgtgcctggttgtcctccgattggccgggtccatatgctgccccgggcccctcatttggcgcactatgcggagcttgtaccggttcgcgcctttcggggaaccggttatttcgtgttctagcncccgagggccaccgcccgcgtgtcccgggcgttttattgtttccaccccccgccctggtgcggtgggaacaccacaagctcccctcgcgcaaatggggcggtcaccccccgagcccaaaaacaaaggagccctaccccccatgggctatatggccgaaagagtcgcgcctgagaaattgttgtgccaagaggggggccaacgttccggtggaaccaccccgcgggggtctactcccctggacgttgtagctcttcccacggaagccctcgtaatgcgttgtgagcaaaaatgaccccggccgtccttctatgagaagaggcccagggccacaggagggcaacttccctgggcaacagaaccttgccccgccagctcagtgttcgcagacatatcacaacaagagggctgccacacgtgcctcaaagagatacacgggcccctcctcctgccacatcacgaccagttccccccctgaagaggtgtgtgggggccccacccacgccacccgcgagagagaaggcggttcctcacgatcccccgcaggggaacagcccccggaaagtgggacagagcgaacacccgggcccggtttagcaaacgattctgcgttacaaaagagcctttaacccccacggaaatgggtgtggaaaaaaaaaaccccttttacaataaca

SEQ ID NO: 698460 - DNA, 1152 bp, Homo sapiens
  misc_feature (1152)..(1152): n is a, c, g, or t
ggctgtctgttcaatctcgtggctacaagtgtggatatgagtatgtcctattcaatagacccgcttcagttcgacactcaggactacgagtggttgtgacaatgtgtcctacatagtggattccacaccgatgggcaagatgccagtgggcaccggcaagggctgcagaacggggaagctagtcaatcgaactggaatatcccatcaccatcttccaggagcagagatccctccaaaatcaagtggggcgatgctggcgctgagttacgtcggtggaggtccactggcgatcttcaccaccatggagaaggctggggcatcatcttgcaggggggagccataaaggagtcatcaatctctgaccccctcgtgctgatgcccccagtgttcgtgatgggtgtgaaccatgagaaggtatgacaacagccgtcaagatcatcagcaatgcctcctgcactcaaccaagctggcttagcaccccgtggccaaggtcatcgcatggacaactttggtatcgtggaaggactcatgagcacagaccaatgccatcactgcacacccagaagacgtgtggatggccccgtccgggaaactgtggcgtgatggccgcggggctctaccagaacatcatccctggctctactggcagctgccaaggtgttgtgggcaagggtcatgccctgagctgaaacgggaagctcacgtggcatggacttccgtgtcccaatggcgacgtgtcagtggtggactgactggcgactagaaagactggcccatatgatgacatccagaacgtgcgtgaacaagcgattcgaaaggccccgaagggatacggggaacacactggcaccagggggaacaactgaactcaacagggagccccgtcccccacattgaacgcggggcgggaaagccccaacgacagcatggtgggcccaaataccggcgtagcacaacaatgtcagaaacaggagggggggccaggcggcacagtttacagataaaccaggcaacgccaaacgcaacaggagaacccgtcgagcggacgacacacacaaccatgactgcgacaaacagagaagaccactaccacagaccagaagacttgatcgggaaaagtcgtacgagcaacaaataaaacgacgaagaacn

SEQ ID NO: 698461 - DNA, 1045 bp, Homo sapiens
cactgttgtcacttttgtgtgtcgctacagagcccgtggggtcttttcccctatcgtgtgtgcgcgtttgatgcgctctcgtgacgctgtatggtatttgtcccgttgttgagtgccgctcccttcctgggcaatgtccctttggtgggccaccttcctcgctggtgctatgtttccgctgttgtgatgctccacgctgttgtcggttttatcccctccatgtctgtccctgggcccgggtcgccacttcgtgcccgcttaagactatggcccgcatgtttggatttggtttttccaatgtccccctttcggcttttctggggcctgttcccttgtgtttttgtggccgttcgtttggcacccggtcactacttgtgcccaatttgcccgggtacaggtgacccctcttcaagccccggtcatgatggaggtccccaggcacagggtacccttgagctccgttggtcttggtccagctcccttagtccgtccttccttagcctggaagtccgtatctggagtcacccaagcccatgtgtttttgccatctaggccttcacctggtctgtgggacttagtacctgtgtgctgtggtttacccggtccacctggttcttcaggcccctgacacgatgagacaggggctagtattgacagggccacagatggaactgtttgtttgaattttcctgagagccctggcttatgttctgggccttctctttaacctccttaccatgaggttagtacttttagtccctgttttacccggggttagaatagactgttaaggggccactgagaaatgaaccacgatgaagtgcacacgtctatggggtctgagagggcgcacacgaaaaaccactgaaatgcacggcacgattttcgctgacaatctgccacccacctttataaaccacgatggttcctttcaccaacccctgggtccaaaacgagaataatttggcctataatgttaaaagacaatgcccggaaggttgggttaattaaaatcttggtgcctggaaaaaaaatatataaataa

SEQ ID NO: 698462 - DNA, 640 bp, Homo sapiens
ggtcgctgaggctgctgccccgggcggagaagcttgcgtcggtggctggagcagaggcagcagccggactagcagcggaggcggtcgggatcgatggtgaagatggctggtggctgggcgttcggaggcggcttggtggcctgctatctacgtggcggcggcagtgagggcggcctgggcccctagagcggctcatacgactgatcaatcgccggcgtagccagtcaccggaggcggcggctggtgtgcgtgtggatgtgagccggggctgcgggcggcggtggcggtgggcgagaactacgatgaccctgcacaaaacccctggttctccagttgtccagcgatcacgtggtgccttgtacttgattggtgtggttgtgttggaaaggcaagatcacttgctagggaggggccttttgacgagagaacggttttgggacacccatccagccctattgtgggttgcgctaaatggtccctacatatatgggaaggacacatgcaactgtgctgggaatctcttggaaggaatgctggtgggggggggctttgacatgcgccggttttaaactcatgccatgcacgagctggacccaccggtatgcgacttgctgtgtcacccggactttggtggacctac

SEQ ID NO: 698463 - DNA, 367 bp, Homo sapiens
accgactgagggtcttcctgtccctcatggcgactggctggtacgataaccttactcctggacatagacaaagctgatgccatagtcaagatgctggatgcagccgtgattcagatggacggaggccacggagaatgatcttcgccatcctggagcaggcagaggaggcggagcaggccggaacgctggggagccagcacgaaagcagaaggacgggctggagcaggctagggacggcgacgcaagcaacgaccacccctaccacaacacacagcgcccccccaacgcaaccgccacgcacccaacacccgggccccccaccgccgcacacaccggacgaccacgggagcgaccacagcgcccccac

SEQ ID NO: 698464 - DNA, 583 bp, Homo sapiens
tcaaaccgggcgcgtcgcgacgtgtatccgaatagcatcgatgtcgtacctggctcagtcaatagttgtcacaggtattcagccatttcggaatatgccacgttattctgctgggtaaccatgtttatagtttagtgtacagacatttagaaatcagaaggtaactttatagacagtaacaccaagtatcctatgtcgtgcttgccccgaaatataactaactagtataacggatgtaagcaatattaatgatggtttatataactgtgtgatacacatgtgtgcttttactttactatataaactatgagcaaaaaactgatatttgaagtagaatagaatggcgtaaatcttaatgaccagttattgaccaaagtgtactcagaagatgtaattatgtcccaatctaaggaatcctttaatttggggatgaactttacttacacatgccgtttcagcttcagttgcctcattctatgacatcattctggtcaagtctaagctttatcatgtctgacttcgtttaacactgaatctgtgatgtaaggcctgtataatgtgccatataaattttattcatcat

SEQ ID NO: 698465 - DNA, 259 bp, Homo sapiens
gaggcttgggaacaaatatgttgtgtagagttcaggagagagtgcgtcatatgttgttcctaggaagactggtgtgggaagggtcgttttggatgcacttgagcaggggtccccaacccctgagccatggagccgcaagggagccacacagcaggaggtgggaacatccagttgcaggaaaacaagcttaacacgcccactgattctacattatgggtctccctctgttgtccaaggctggggtgtagtagtgctatcg

SEQ ID NO: 698466 - DNA, 662 bp, Homo sapiens
gcgaattcggccattatggccgggcatagtggctcacgcctgtaattctagcactttgggacgccgaagcgggcggatcacaaggtcaggagattgagaccacggtgaaaccccgtctctactaaaaatacaaaaaattagctgggcgcggaggtgggcacctgtagtcccagctactcgccaggctgaggcagaagaatggcgtgaacccaggaggctgagcttgcagcgagccaagatcatgccactgcactccagcctaggcaacagagcaagactccatctcaaaaaagaaacactggaaaagagtaacgataccaattgcgtaaaaatgttggaattaattctttttcctttcataactctcttgacccggttgcgatgcctcatgtcttgactcccaacactttggtaggccgaggcggctgcatcacctgacggcagcagctcacgacaggcccgtatcacatgtcgaaactcccatcccttataaacataccccctattccgcacatgctcccagacgcctgccaccccagctccttcggcacacacggccgcctcactcgccggactcaggatcccactgctccacgcgtgccgctcctgccctatacatttcagcctgtgccatacggacttgctccgcccaccctacgccg

SEQ ID NO: 698467 - DNA, 782 bp, Homo sapiens
  misc_feature (6)..(6): n is a, c, g, or t
  misc_feature (212)..(212): n is a, c, g, or t
  misc_feature (214)..(214): n is a, c, g, or t
  misc_feature (218)..(218): n is a, c, g, or t
  misc_feature (257)..(257): n is a, c, g, or t
  misc_feature (269)..(270): n is a, c, g, or t
  misc_feature (313)..(313): n is a, c, g, or t
  misc_feature (439)..(439): n is a, c, g, or t
  misc_feature (450)..(450): n is a, c, g, or t
  misc_feature (457)..(457): n is a, c, g, or t
  misc_feature (491)..(491): n is a, c, g, or t
  misc_feature (519)..(519): n is a, c, g, or t
  misc_feature (536)..(536): n is a, c, g, or t
  misc_feature (556)..(556): n is a, c, g, or t
  misc_feature (564)..(564): n is a, c, g, or t
  misc_feature (745)..(745): n is a, c, g, or t
cggtancggattgcggttcgcggcgcgcgccaccggggaaggagcggtgggccgaggggttggaggtggggccccaggaggacctcgggctgtgggccgggagagcggagtcggggagtggggcgggggagcgaggtggcgccggggagcctgggatatggcgcggccagacgatgaggagggggcggcggtggcccccggacacccgctcncnaaangatacctcccgttgccgagggcgcgcgcccgttgggaangcaaaagcgtgnngcttgaaaaacgggcccaagcgggcaccttcccggtgaatggngccccccgggacagccttcgatgacacgcccccgggagttatcgggcgggcctacaagaactaccaactgggccccagaaagaaggagaacccagcgcccgcgctgtctgcctcgcggggcgcggngagctggaganccccggnggggccgagaggcaggcccgcttgcccctttacnggcgctctcccccgctggcgctttcgtnggttgctcctggatctntcagacctggtacttcgctngggtcaancgccttttcagttggattccagttacaagcattcatttagcaaacgttctttctgaggggctttcttacgggtgttcacctttggctggcaccatcggactgggcttgtcccatgggtggtaacatgtctgggcccttacggtgcccccctccatctttccccgggcccaccctgggctgnctggggacacccagtagggccttgcgggcttcaaccg

SEQ ID NO: 698468 - DNA, 368 bp, Homo sapiens
ggacagaggtgtgttgtcactgagtgtggcatctgactgtcttggggtccacacacggcattatttgtactgtagagcttgtggtcgcagagtcagtggatcgtcattaacgaacattgctacacgatgcagccagcacaacatggagagatcatcaaacacttggcaacgccttacagaataaatccaggtgcccatggaccgagccagcatcctgtggctcatcggagagtactgtgagcatgtccccgggattgcacctgatgtcttaagaacaatggccaagtcattcacagcagaggaggatattgtcaagctgcaggtcatcaacctggcagccaagctctacctgaccaactctacacagg

SEQ ID NO: 698469 - DNA, 302 bp, Homo sapiens
gggatggtgagtgttatggggggtttgatctataagtgaagccgacgtgttgtaaggtgagacgtggagtgatgtgaggagatgcatggactatgaggatgaggtgcagaataccagggagcggcagcagaagggagagaatgagcttaaggagctggaacagaagcactcgcagctgaccgaggagaagaacctgctacatgtgatcatgctgctgtgcgagacagagctgtatgcagacggctgagtgagattgcggttgcggctggctgtgccaagaagcaggagctggaggagatact

SEQ ID NO: 698470 - DNA, 384 bp, Homo sapiens
ggaattaaaatggaaaacgttgccagtttgtaaacccaatccagatgctgtgttaagcatggtgcccaggtggaagccctgccttttgttcccacgtgctgccacaaaaatggccctggtggggtgaaatggacggagaaccccgttcccaaggataactcatggtgtgggctccagaagcccatttccctgaaatcctaagaggacccagtttcagttttcattaataaaaaatacatggggggattttagaacctaaaagtgttttgcaggaatttaaaaccgggaaaggagggtggcttgtttccctggtcgcgtgagctttttttttatctgtttcccccaaagttgtcagcggcaataaaacgagactgggagtcatca

SEQ ID NO: 698471 - DNA, 215 bp, Homo sapiens
tcttctggccacgcccctgaaaggcggctcaaagacgcgtcatgcagacggtccagaagctgatgctggcattgaggggtggaactgacggctgtcgaccgtattactgcgaccccccctaaaaaaacggctgccatctggtacagatgaagctgtatttgaaagtgcgcactggtcttagtagcgaacatcgacactctgtgaatgcgtaaggg

SEQ ID NO: 698472 - DNA, 285 bp, Homo sapiens
  misc_feature (46)..(46): n is a, c, g, or t
  misc_feature (48)..(48): n is a, c, g, or t
  misc_feature (62)..(62): n is a, c, g, or t
  misc_feature (90)..(90): n is a, c, g, or t
  misc_feature (118)..(119): n is a, c, g, or t
  misc_feature (155)..(155): n is a, c, g, or t
  misc_feature (229)..(229): n is a, c, g, or t
  misc_feature (245)..(245): n is a, c, g, or t
  misc_feature (247)..(247): n is a, c, g, or t
  misc_feature (249)..(249): n is a, c, g, or t
gatgtaacacgagaaagcacataccaaggccaccacacaccacctntncaaaaaggccttcnatacgggataatcctatttattactcanaagttttttttttcgcaggatttttttnnagcctttaccactccagcctagcccctaccccccantttaggagggcactggcccccaacaggcatcaccccgctaaatcccctagaaggcccactcctaaacacatccnattactcgcatcaggngnancaatcacctgagctcaccatagtctaatagaaaaca

SEQ ID NO: 698473 - DNA, 357 bp, Homo sapiens
ggagaaccaccggtctttattccacaagggccccttgatcaaggttaacaggaggcaacgctatgcttcaaacgccgtgtcagaggccctaatcctataggtggccaacaaagtcaaggtccccctgcaggatctcatggtccggaatgacaccccctgtggaaccaccattggacctatcttggcttctcggctggggctgctggtgctatatttatgcaacccccaactggccatgcactctatccgggagattgcctgcacctcaggagtccttcataccctcaccctcttcaagggcttttttgtgctgttcccttttctaaaccataatcttttagtggattgagccctctt

SEQ ID NO: 698474 - DNA, 905 bp, Homo sapiens
gtattccgcgtcctgatttcaccctagccactcctttgtgacaaattcttctctccctgtgaattctcagatcctttcctgatgggtctcgatgttatctagcaaatacctggatgatataaggtctagaaggaatttgtacaggtccaatcgcatgaacgaaccagcgggtacctagttatctctaaagtacactttccaattcccactggagcttatcatggaatgactttgtacagtgaagcaaccggcattctataatttctcctgattatggttatcattctgtaaagtgtacagtgaatagtgtcaacgtttgctaaataaactggctgagtattcacacaataatgttacacacaccatcttttaggcagagggcagttatgccaaatcatcacgcatgagcgtctggacatctgcaaccagtatgaccatacggtatactacaacagattattagataccacgtgctcactgtaacttgtgaggaatctcaaagagggcttgtaggcacctttcccacaatagagctttcttgatgttctattttcttcagagacagggttttgctctgttgcccaggctagagtgacagtcggcttacgatgatagttactgaagcctctaactcttgggctcagcagtcctccccgctcagcctcctgggtaaccaggatgcaggcacatgccatcattgcctggcttattttaacttttttttttgtagagacatataaatgagaagttattttgctcagactggtctttgaattcctggcctgaagcaatcctcccatcttcgaacctcccaagtagctaggactacagacacgtgccactgcgcctagccttccatatactttattacttaaaggattaccccgccggacgctcacattgcc

SEQ ID NO: 698475 - DNA, 984 bp, Homo sapiens
actggctgatgaactacaatgtggaacacgcacttgcactgcgtcagccaggctgcccttcaccctgctaatttgcgcactgcacggcccttgcccagaaacctaccacctggcaactaaacgcttcttctgcgtgcccctgcacagggcagcgtgctggcactggcagcgccttgctctactcccctcacagctaccaacacgacttcccctgcgttactgacttctgaacagcaacggaactttaactgcacgacagctacactcggcaagcacactcactggcgccacgaactgcttgccagacttacactgcgcctaccttacactggcaacgcaagcactgcaacgcactgccttacacagcacaacagctctctcctcaactacactaaacgaacaggcgctaagctccagcacactgactgcgagcgcagcactgctactacagcaacacgcctccatgcctgcctactacccgagcagcaactccacgtcctactgcaacacacgcaagccccaacgcaacagcagagcttacacacacacgacacgcagcgctggcacaccggctcacccaacaaactgctccccctgtgacctacacgcacacgcacagcgcactccgggctacgccatcacacacagcaacgggcacaacgccctttccccttccgagcaagtccatccagcgggagcccagcgggccctggcccttggacgcaaggctttaaagaccccccacgtccacactctctatcttaacttggagcttacacatgtctcccaagcgaattaattacggcactttcgacctttaacaagcccttttacgttggaaaccccacaggcccactcacacctcaccaccacctcagcgagcctacgccaccatccacgacgcccggggctccccggccgtccgccggcctgctcactccgagcagcacgaagcgccgcaacagttgccctccgcacacatat

SEQ ID NO: 698476 - DNA, 1052 bp, Homo sapiens
gggcgcctatcgcccagctcggtcagctctcccgcctggacctcacctccaaccgcctggccactgctggctcctgtgaccctgcttttctctcgtggtgctgtgatgcagatggcctctccctgcccccctggtgctgatgctttagctgggaaccccctgcacttgcaactgtgatgcttgctgtggctgctgtgcggcttggctgctgtgcctgtgactgacctttgtgaaactgttgctgctctcccctgccctgtgccttgtgcctgtgcctgctacgttccttgtgcgcatgttgcctctgatgtggctgatgttcctccttgtgatgcctgccctctacatattgccctgcctgacactgccaagctgccctcatagggattgctaggagagtgccatgctgtgggcgcatcagctagccagtgtgccagggtgaccctttggggttgaaccctctgctgccctaaccataggcaccattgtgggcttctgtgctcccattggacgggaccacggtggtctagcgtcttgcggcaacatcttcacagtacccctgatgcccctgtgggcctttttcccctcgaatcctgtgagaacccctctaccgagcgactccgcgtgtgtttgaccctgtggcctgcattgtggcgtgaaccaggcccttgggtcgtgtgcctaaccatctcgttggccattctggcacaacaccaaaatcacctgtagcctttgagttagagtgagcccaacaatggccccctgaccgttatggacactatggcgatgtaccttgctttggagcccattttgctccccattgggtctgggcgaaaccaaggccatggttggcaccaggagtcgtgtaggtcgccctagaacccaccgtggaggcccctcttgaagaacaattccggccagcggcccattaccggtcttctggcaatcttgtcttttgccctggaggggagcttgcaagcgtggtgaccccgccctctgcgcaagttcttagaacgcccaggacctgttagccaggggttgaacagcggacg

SEQ ID NO: 698477 - DNA, 965 bp, Homo sapiens
ttgcgcggcgttgggccgtttacatattttccgcgcctctgtctttctctccggtctgtttgggtcccaacatagagttccccgaggttccttcccgttccgggtcgcccgcccctttatagaccctgggcccgttcacgtgatgtgactccctcgctgcaattcgtgggacagccctcctttatgttggagcctgaccttaaacggggcaccccatgtcccggtcactgtttcgatcggggcgacctccgagcctggtcaagtggtcgccacccctgcgcggcggtaaggtgtgccccacacatgggccgggacccttcttcagggttccgccaccgccgaggtctcctcccctctagagggtgtgcttcccccccggaacagcctcgctgcgggattcttttaccgcaggcgttttgggtgctacagaccggcacccccccccctggttcattcctgataagcggtggtctctttcggggtaggaggaccccccggaggtgtcaccaagccgacgcaatggtgtgcgcacccgagtacctataaagaggccctctttttcccctcctcccacagggggcattgatgaacaattctccggtttctcccacgaaggtcttggtgggccccacagacacacaagggcttcgttataggggagactctccacaatcacatgaggggaggccccagcactcagacaacaatgtctcaatttcacccaaagggccactaaatatctctccttacagtcacctccccaaatgctctattagctggaccgtctgattccgttcacccattatacaaccccccgcatgctctcccatacaaccctgtgaacatacaccaccaagcagagttttattggttacttctttctcccctccacattctctcaagtttaacgttcaagagttattcttcacccccttttaaaacaaaaattttctttccacataaca

SEQ ID NO: 698478 - DNA, 225 bp, Homo sapiens
cagtgctctagagggcgtttccgggtctgggtacagtgagtccgcatctcagcctcctcagtagctgggattacaggtgcccaccaccacacccggctaatttttatatttttagtagaggcaggtgtttcaccatgttggtcaagctggtctcgaactcctgacctcaggtgatctgaccgcctcggactcccaaagtgctggaattacgggcatgagccacca

SEQ ID NO: 698479 - DNA, 208 bp, Homo sapiens
gactacatcacttaccgcggcgggattctagtacattagaggctgattcagtcataatcccacagattgtatctacgctcccattgtgctccatcaacctagcacatacaccaaatgtctgaacctgcggttcctctcgtactgagcaggattaccatggcaacaacacatcatcagtagggtaaaactaacctcggaagtatgtagt

SEQ ID NO: 698480 - DNA, 453 bp, Homo sapiens
  misc_feature (31)..(31): n is a, c, g, or t
  misc_feature (292)..(292): n is a, c, g, or t
  misc_feature (370)..(370): n is a, c, g, or t
  misc_feature (385)..(385): n is a, c, g, or t
  misc_feature (410)..(410): n is a, c, g, or t
  misc_feature (439)..(439): n is a, c, g, or t
caaagtgctgcgtctacgggcgcacgcttgncactgagcccaggttacttcttaaaacgtggccaggtgcggcggctcggccgtaatcccagcactttgggaggctgaggcagaaggattgcttgagtttgggagttcgggaccagcctggctaacatagcaagactccagctattgggatggctgaggtgagtagattgtttgagcctgggaggttgaggctgtagtgagccatgattgcaccactgcactccagcctgggtgcagagggagaccctgtctccaaaaaganaaaatgaaaaaaaaacacatacaaataaaaacaaacaaaagaaataaaaaatttcccagagttaacaaaggcaggganattaattaattcttnttattcccaaaaaacattggggtgnttcccttcagtttgggagagagggaggantccgtttaagttag

SEQ ID NO: 698481 - DNA, 269 bp, Homo sapiens
tttgtgctgctgaggcagaggttgtagtgggctgagactggcattgcactccagcctggtgtgaaagagcgaggctccatcgcaaaaaaaaaaaaaaaaaaaggggcccaaatttggtggttcacccttgttattcccagccattttgaagggccagggtggggggattggtttgaaccccaaattccaaaaacagcttgaacaacagggagagaccttaatctcttaaaaattgtttttttaattacgccgtgctttggttgccccac

SEQ ID NO: 698482 - DNA, 332 bp, Homo sapiens
  misc_feature (53)..(53): n is a, c, g, or t
  misc_feature (304)..(304): n is a, c, g, or t
tgatccagagactagacacgactgagcgactgaactgaactgtacgttagttngcagtctgggaaggccaggcaggcaagatgtgtctcggctttttacttaggtatttatttgtcaatgacattgttacaagaagatctgttgaagacttttaattgctgatgatggaagcaaatatgaaagaaaaagtcattctttggggccaatgctctcagtggtttgctattccaactcttcaaaaactgctctgatccttaaacaaaaaccgtatttaaaagaagcatcaagaagaaacatataggantctctggatcattcacgtaacctctagg

SEQ ID NO: 698483 - DNA, 159 bp, Homo sapiens
tgggttgggggtggccccgtgggggtagctcactccccctcctttttctatgcctgtgacccccgtggcccacacactggagttacctgccctgagcggggatgcagtgttgcacttattacttgaccagcccctcccccaataaacttgccttttgga

SEQ ID NO: 698484 - DNA, 170 bp, Homo sapiens
ctcatacacgatccctccttttggccacgcaggcggcatggatacaggagaatagctctgaacctgtgaagtggatgttgcagtgaggccagatcgcaccacagactgggagacaagattgaaatgccgtctcaaaaaatataagtcaaaagcggatgcaaaaagtgcca

SEQ ID NO: 698485 - DNA, 365 bp, Homo sapiens
gccaacttgaacttcgtttctacccctaatcctgatcctttccgtgacaatcctttcacacagccagaccaatcgacaccttctgcgtttgattctctcgaatctccagatcatactacagagaatacgagtagatcgtctactgcgctgagtaatgggcccctgaatggggatgtcgactactttggtcagcaatttgaccagatatataaccggactggccaacaggaagctcaggcaggcccatggccctttacaagctcacaaacccagccagcagtgagaacgtcaccctattgtgggaagccatgccaatggactgtacatatagaatggactacagcgacttgcgctctgaccgttct

SEQ ID NO: 698486 - DNA, 81 bp, Homo sapiens
aactggcttgtatgaaattttctttctgtatttctctaaatcattttgtattaaaagccaaatagatgcctttttccaaga

SEQ ID NO: 698487 - DNA, 155 bp, Homo sapiens
tgctaggattacaggcataagccaccgtgcccagctgagttacatactctcacatactttcatgttactaattagtgttcttgtatttcagcttgaagaactccctttagtatttctgaaaaggcaggtctagtgttgatgagcctcctcagctt

SEQ ID NO: 698488 - DNA, 243 bp, Homo sapiens
tgtgaatggatagcacgcaccttcacctctcccatcacattgctgcctcgcctcatctgagccatgtgtttacctgtggacactggcaaaccttcttttttagcctgtaggggtagaatacatcattcagggattcaagaggggtcaggttattacatgtaccattaaactgaggggccatccatctatttcaggtctagaaaatatttattactggaaaaggtgcgttgctgattcaattcc

SEQ ID NO: 698489 - DNA, 286 bp, Homo sapiens
ttcccctgtgtatcccaccccaacaacgtgcttccgtcttcgacaactgatgcagcagaagctggtggaccagaacatcttcacttctacctgagcaggacccagatgcgcagcctgggggtagagctgatgctagggtggcacagacttccaaagtattaaaagggttctctggtcctaccctgaattgtcacccgttaaggcctaacttggctggtccacctttcaccatggtggcaggttggccagcggtgcttgagccttgtgcatagggagggcttgtgat

SEQ ID NO: 698490 - DNA, 705 bp, Homo sapiens
agcggggggatgaggtcgcggccggtgggtcccgcgctgttgctgctgctgttcttcctcggatgcggccgagatcgcgtgcgtctgggcccaggctccgacgccgctacaccccagactggactcgagcctggattctcggccgctgcagagcctggttcgacgaagccaagtatacggggtgttcatccactggggcgtgttctcggtgcccgcctggagcagcgagtggttctggtggcactggcagggcgaggggcggccgcagtaccagcgcttcatgcgcgacaactacccgcccggcttcagctacgccaacttcggaccgcagttcactgactgcacttcttccacctcggaggagtgggccgacctcttccaggccgcgggcgccaagtatgtacgttttgacgacaaagcatcacgaaggcttcacaaacgtggccgagtcctgtgtcttggaactggaactccaaagacgtggggcctcatcgggattcgggtggggaattgggaaaacggtcactcgggagagagagaatatgcgatatggaatataccactcactcttagaggggttccatccagtctatctacttgataagaacaatggttcaaaacacagcattttgtcagtgcaaaaaacaatgccagagctgtacgaaccttggttaacagctattaacctgatctgatctggtctga

SEQ ID NO: 698491 - DNA, 926 bp, Homo sapiens
  misc_feature (178)..(178): n is a, c, g, or t
  misc_feature (250)..(250): n is a, c, g, or t
  misc_feature (378)..(378): n is a, c, g, or t
  misc_feature (405)..(405): n is a, c, g, or t
cggagagagcaaccttaaaattttcgggaattcccaattgggggttaaaaaaaggggtttagatttggggatccctctacatttttacttggttaaagtccatatttcaacctacatcaatgcatgaagcgtcatgatgttcatacaatgttttatcatgacgcaagatgtagctacngcatcgagtagtgcatatagtctagatctgataacttgactcatctgtatgagtacgtacctaccacttacncagattgtcatttataataagacatgtgcagtacactgagcaagtagagcttcatccatggctagcatgtgtatgtcaggcaagtaaagggtcaccccactggattcgatgactaagatatgcagatnccagatgcaagagtcacacgtatattntcctcaatggcaatgttacacagtagatggttaagaagaaaggtctgttggcttcaattctgcagctgatgttctacactttatggacttctcacttgaattttaaattctcctgaacaataatttcccatcaatttccatttctttgaatagccaccatgtgtaatttattgataacatctctgaagagctgaattaatgatatttcctagctgttgctccagatcatgtagggtagaggaggctgaagactgctacagagtaaggcatctctattgcctcaaaacgtcagacgagtacggatacttttcccagagtgaagcaggtcaaatccttcatttattttttcaaaaggtacaacatgggttattaacgcatccagtgacaacttcttagccatacaatcagccacaagttttgggataccttctttactcttatagccaccataagcagcctccttccaggtgcgtccagtcagtagcagcatagggtttattgagaggttctgagctcgtgcc

SEQ ID NO: 698492 - DNA, 885 bp, Homo sapiens
gacaacatcttaggatgctttgaggtctaaatgagttaacattttcaaagcacttagaatagtgtctgagacacaagagctatatgttagaggttatcatcattatttgtattttgtgaattacgctgcaaaaaaaaaaaatggtgggttacccaacattcattccccacctttctggctgccagggcctggattgggtggtcggtggttggttggtttccctacaagtggattaaggggcagatcctggattacactaaagtcaggtttggacaattggacagtccatcagacagatctgggcccattacccatttctggtatcctggcaagctaagaatggtttaatatttcctaaatggtggaacagattcaaagaattctggtggaccccttgaacactcatctgatatccaaattttcagcggtccataattaacagtttcggaaaccttgattacaaccaaaaaacacctatttatgttgtgaccgtgtggctgtcttggcattaaccccagcagagtggagtagtggtagcagacaccaaatgccctttgagcctaagatctagcattttacaaggtaagtttcgtgtgacttagaagggtggaaaatttaaaaggcaattgtagaaggtaaggctttaataaggtatttcatggtgtccagaattggtggcttaccaggcaatttggaggggggggggggaaaggccggatattaatgggggcataaattcataatggtgaggaagctggggttagaaagtattttttcaagaaagggtgttttaactggctaatgggccgtacttcgaacaggaatttttgagggaagttgcgtaacctttgaaatacctgtggcaaaaaaataaacaaacaaaac

SEQ ID NO: 698493 - DNA, 1094 bp, Homo sapiens
ccccgtgtgtttttatacgttctctggtaacctcccgttttgcccgtttcgccccgttttgtaccctcctggttttttctacggcataatttataacctccctcgtgtctgcgtcttgattagatccgcttcctctgcttccccgcggttgttattaccctcgtgggggtgaccttcttgttttcccactgagtcccctccctcggggtagtggtcgctgcggtttgtttcccctcttggtcggatggttacctcgtgtcttaactttctgtagtggcgcatcttttctctatatcgcgcacccctgtggtgtgggtgctatctctatctgtctgttgtgtatcttattatgggcggcccccctatgccgctttttcgtattagcctccttatgtgaagagttacaccatgggcaatgcactcccccgttccccgtggagttcaccctctgaatccccccggtccaaaagggaccagcatctaagcacgctagccatgcagcgtccatacgcttttgcctgagccccacaccccaccggggaaccagaccagtggattaaccctttagccatattatatcggaagtgttaactatatgctatactaacccccagggttggtcacaatttcgggcacaagccacaccgcggtcaacacacgagtttaaccccaggtccatatgaaagccgcgcgtataaggagctgttttaagagtccacacccctctccccaattatagcgttgaatacatccacctgacgttggctgaaaaacatcccaggttgacacaccacaaattagactaacgcaaagatggctttaacaatatatctggaccacacaccaattagcttagacacccaactgggattagatacccccctatgcttagcccttaacactccaaccagtttaatcccacctaaactgctctgcccagaaccctatcgagcccccagctttaaactccaaggacctggcggtgccttcatatccctttagaggagcactgttctgtaatcgataaaccccgatctaacctcaccccctcttggtccgcctatatacccccattttcagccaaaccctgatga

SEQ ID NO: 698494 - DNA, 427 bp, Homo sapiens
atctctggtcgtcatatcccttacaggtgaagggagactgacataggcttgactactagcagaggtatgtgcaaggaagaaaagcccagtgaagcttgccccacagagtgagccatcaaactcaagtctggccgggcgcagtggctcatgcctgtaatcccagcaatttgggaggccaaggcaggtggatcacaaggtcaggagttcaagaccagccttgccaacgatggtgaaaccctgtctctactaaaaatacaaacaaaattagtgaggcattatggcaagtgcctgtaatcccagctacttgggaggctgaggcaggagaatggcgcgaacccgggaggcagagcttgtacgtgagccgagattgcaccactgcactccagcctggtgagactctgtctcacataaaaacacaacaccaaaa

SEQ ID NO: 698495 - DNA, 445 bp, Homo sapiens
acacgtccattatgtactcgtcaaagtccttggactgctgagccttaaccagtcgggtcttgtacactatgtcctctcttgtttcagaggccttgtcgagccgttcttccagggtgaccttgtcatccgacttgtgtatgaagcaattctcctcagcacagttcatcacggcagagcttgtccgagcttaccatcctccttttccggatgttagaaccgggtacagctttcctccaggtggtaataggcgtagaccttgactgctccaggctgaataagctctacattaaatgtattggtgaactttgaaagctagacagtcatcctcagagtgtgagatcttgtccaggtagatgatgagggtgttcctatcggagaagggttggtccagctcatacttggagattgtatctgtcaacaccattggccagctgcttcaagggtc

SEQ ID NO: 698496 - DNA, 204 bp, Homo sapiens
  misc_feature (50)..(50): n is a, c, g, or t
  misc_feature (128)..(128): n is a, c, g, or t
gctgctcgggaggctgagacaggagaatggcgtgaaccccggaggcgganttgcagtgagcggagatcgcgccacttcactccagcctgggcaacagttcaagactctgtctcaaaaaaaagaaaaangagaaagaaaagcagttcccctgagtctccttgttgacaggagggaaatccttccctattgtgggagggtgagagt

SEQ ID NO: 698497 - DNA, 884 bp, Homo sapiens
ggctttgaggcagtaccggagagaaagatggcggctaccttactagctgctcgggagccgggccagcaccggttgggggggccggagggtcactccagactgagaaagccgagaagttcccactgggaccaactatcatgggccgtgcagtttgacgcgggcgtgttctggggggcggactccagaacaaccactgggtcttaacatcgccaaatcgggtgactgacaaggctgacaccttatttcacgaccgcatttcctgctgtcgctcaggctcagctgctgaatacccaggcagaaagttgaattgcgtgtaccctaacagctcggtatccacagcaattgactggattgagcctcatgtgttccaccacagcaagcagcctctttcagggacgatgtgtaaccgataccggaagacctgatggcgggaaaatcatcatcgcagggcctggcgaccctcaagaaggagggcaggtgtactcagtgcctatggggggtctggatggtaagggcaggccttttgccattggacgttcggaagctctaaatctatggatatgtgggatggtaactaccggggagggcatgcccaaggacagagtggtctgcaattcaactgcaagtgttcctcggttttggcgccatggaagcgggaatggcctccagtggagaagtgatcccgctggataccatggagagtcggtggaagagggcagacttgggagacaaatacaattcgcgtgcattacaccgcggatctggatcagttggcaaaatgccgacgggcattatacgttcctgaacacagagacgctgcagggcgagacaaaaaatgtgcgcggcacataaacggcggagaatgacgcaggcgtgtcaaaagg

SEQ ID NO: 698498 - DNA, 290 bp, Homo sapiens
  misc_feature (44)..(44): n is a, c, g, or t
  misc_feature (197)..(197): n is a, c, g, or t
  misc_feature (238)..(238): n is a, c, g, or t
  misc_feature (257)..(257): n is a, c, g, or t
attaacaggcatgtgcccacccatgcccggcctaagttttgtanttttagtagagatggggtttcgccttgttggcccaggctgctctcctgacctcaggtgatctgcccacctcagcctcacaaagtgcctaggattacagatgtgagccactgcgcccagccaaaatttttcctcttttgaaaactgttaccaanacagactttttattaaactaatattgttttgtgtatttgtnaaatgttacggaatgaatnaattaaggtttgcatattacctgtaggtagttt

SEQ ID NO: 698499 - DNA, 245 bp, Homo sapiens
gttcacagctctcgacttatcttgtccaatctccctggttgggccccaggagtgcaggctgctgacagcacagctgtctgcagacagtgactgcccaaggtgaagatgtgtcagaagccccatggtactggccctgcacagtttcatagacatctacacaggtctctttactgtggggaacaagctgctggtcagcctggacttgctattgtgcaatccagacatcatatcaaggctcggagaga

SEQ ID NO: 698500 - DNA, 1560 bp, Homo sapiens
atcccgccccgacgccctgcgaccatggaggagggacctctgacgggcgggctgaccagccccgaggatgcgatggtgacggagctcttaagccccgaagggtccagatcgcttcggagaacatcggactgaagagcaccccgatgaagtacgaggaggacgagattaccacgatataacaaaagaagacgtacactagggacccggcggaaccccacagcgaaccccgtccctgcaacggcgatacaaccgccgacgcatggagacgcccgcactggcaaggagaccagagatcaacggacgaaagcatacgaccggcggaggacgacaagcagaccgagcgaggagcagccatccatcgggaggaagcttagcgcacggaggaagtcccgagaagacatacagacgacgacatgcgaaggaagcagtcagagcggcatcacgatgcaagggacacacagcaaacacgcaccacgaacaatgcaaacgatgacaacttatgcctgggtccatcacacgagaataaccccccgacagacaacaacggaaaaaaccccgaaacgagcctgataagacacccacatgagagaagcaccatgagaagatcccatgagaaacgagcaggaaaacatcacacacaacccaggcgaccagaatcacagcaagtaagcaatccccaccaagcatagagcaaagcatccaagagggaaacacgcacgagataggaaacacaaaacaataaacagaaacggatacaactacaggttcccaggcagaacacgcaaagcggcaaagcagtaaagcgcacggaaaacatccagagtccaatggcacaatcacgagaagaaaatccaccaggctgtcaccacacggaatacacacacaaacacggaatccgactagcagacagagacgttaaagcagaggcatagcacgataaccgttgcacaataatgacaattccatttcaaagcgacacgaaggaacgttatgccgacatccacacacaaaagtagcatataagaaagagacgacgaccacttataagcccacattcagagaatataacaatcaaaacaaacaagaaataattgagcaatgactccgcaactagtacaagaagacaaatcgacacaatagatatcaacaaaggtcaaacgcacccaaatacgaacaatatatcaacatcagcaaagagataagtaggacatgcggccacacacacacgaatcgatgacgagtgagcatacagaaatgacagaggaccgaagaggaaaaccagtcgctcgccagcaacgatggagagataacagacgacctcaaggctagccccaaagcaagaccagaaggacacagacacgaaccgaagataggaggagagacaccaaaaaggaggcgcaaatacagcacacagaactagcaaggaggtaaatcactcacgaacgcatgcgagacaccgaaacacagacctggagcgcataacaacaagagaaagaaagcgagggcaacatgacgacaagcgacaatacgccgacccgacgcacgacgcgaccgaccgca

SEQ ID NO: 698501 - DNA, 882 bp, Homo sapiens
  misc_feature (710)..(710): n is a, c, g, or t
tttcagttatctgtaacctaacagctatgttctgaatagagacatttggactgattcccagtccaagtgtatacctgcttaggtgtttgctgtgcgtcctgatgctgatcttcttcactaattcttgatacgagctagttacggttcatgaggatgaatagaacaatatatttatgaaccagtgatcgggcctcatagaaaacgaattaggaattaggaaatctgagagtgaagatgatgaccggggatgtgcgtatagagatacagagtatgacattatgatatgtgagagtgggtgactgaccaaaagatacttaatgtgagctcgaaaagtggaggaattaccgaaggtggagatcttgaataatatggtgtgaactataaccaagatagatgggttatgatatatatttgtgttaaatttttgcttgatgggacattattgtaaagatgctatatgtactccaactgaggagcttaaaagtgtctgtttatcgttatgttcggtaaaatgcagccagaacggagggaagaggcgctattagtgtcagcgatggatggattagggaggagaaaggaggaactgaggattgcgacatgatggggaagtatccgcatggggaaagtgtggggatagaaaaaggaaagttcatgataatggtagtgggagaggaacggtttgtagtggaaagctggtagtggagggaacngtttgggggtcggggtggggggtgtaatcgaggacagtatggccgagagcgtatagaagatagaattgacggaagcggcgtgagcgaggtgcgggcggaggttatagagagggcgccaatcgggacgggtgatttcgcgagcattgcggaggaagagcgaggaagtgaggat

SEQ ID NO: 698502 - DNA, 874 bp, Homo sapiens
ggcctcgggttcccgccggacccatggacgcgctctagaagagaaagaagaaggaggttccggctgtgccagaaacccttaagggaaaagcgaaggcctctcgcagagctgaagatcaagcggccgtgagaaagacagtttgcccacaaagatgctttcgaaaaggcaaggaggccagcttaatctatgacacaagcaagagcactatcgacaagggaatattaaggacagagggtaacagaacctgaaaactctcgaatggccgcacgcgattggcagagaaaagcctggcatcttcatagtggtaccctgcagaagcccccacttggcgttttgtcatgcagaatccagaggttatcatactggagctgagccctataaggtgtcgacacacggtgtatgcagctttccttccgcctgtcgtcaaatcattcaagtgggtaccgtttagtcgcaagtctctaaccacagggggtgtcagactcaacaggcttagaggacttgatagagccatatatcgccatgggggtactccccatctgaagtctagtaaatgaactaattctacaagcgtggttatggcgcaaatctaattagcaagcgaattgctttgacagataacgcgtggattgctcgatctcttggtaaatacggcatcatcgtgcatggaggatttgattcatgagatcctaccctgaatggaatacgcttcaaagaggcaaataacttctctgtggcccctccatttgtattatgcacgaggtggaatgaagggaaagaccacccattatgtagaaggtggagatgactggcaacagggaggaccagatcatacaggcttattagaagtattacactcaagttctatccactt

SEQ ID NO: 698503 - DNA, 257 bp, Homo sapiens
aagtcatctgtatttctttgccctttccacccttctagctaaacgcttcctgtgcatccatgctgtgtttctgcctctgacgggaggtggacttggcgtccggcctaaacttctgctaaatcttctcggcttttcaattctcttctttcctgaatttttattgagacagagtctcactctgttgttcaggcaggagtgcagtggtgcgatctcagctcactgtaacctccacctcccaggttcaagtgattgcctcc

SEQ ID NO: 698504 - DNA, 363 bp, Homo sapiens
  misc_feature (363)..(363): n is a, c, g, or t
agaaaagagcaactaaagccgggcgcggtggctcacttctgtaatcccagcgctttgggaagccgaggcgggactatcctggccaacatggtgaaaccccgtctctactaaaaatacaaaaattagctgggcatggtggcgcgcctgtagtcccagctactcgggaggctgaggcagaatcgcttgaacccgggaggtggaggttgcagtgagccgagatcgcaccactgcattccagcctgggcgacagagtaagaccccgtctcggattcattacacagatttaaagataacaatgttatccggtcaggagagtagttttgaagacttaactttcattaacgcagtgtatttgagttggcn

SEQ ID NO: 698505 - DNA, 309 bp, Homo sapiens
agcaccaaaaaactaaagcagtttttaaaccgatatttacgtggagaaaatcataaaatccactgcgtctgcatactgtgttatgttacagtgcagtttggtgtgctttactacacgggttggttacagggcttctgtgcattgtaaacataaacaggatggaagaggttggatgcgtgtgttcagattgtaggatctagtccggactggctgtgtatgttgtgacgttaaatgaaagaggaacccccctttgtatgatagtcatgcggtcttatgtatgataaacagttgaataatttgtaaaaaaag

SEQ ID NO: 698506 - DNA, 240 bp, Homo sapiens
  misc_feature (130)..(130): n is a, c, g, or t
  misc_feature (195)..(195): n is a, c, g, or t
ggatggtggagcgcatcgatgaggtgtcttcattgtcgaggaaggagatgcactggtcaccagacctggtccctgggaatcagtttatggagagagagagtctcgatttcggaggagatgacaaattagnaccgagcctggacccttccgtccaagctagcagcagcaatcctgggtggtgtggaccagatccanataaaccgggggctaaggtctttacctggggctcctgggaccaag

SEQ ID NO: 698507 - DNA, 1341 bp, Homo sapiens
agcggggagtgggagtgcgtggggagaggtcgtgggctgggaccgcgaaggggcgtggagcggggcgggccggctcggattcctggaaggctgagactccagtgacccctggcgtgagtgagaggcaactttccctgtctgggcttgagttggggagaggagcaggggcggcctttgtaagggacccagtcccttgctcccttgaccatcacctgtcacctaggggtcaactgtgcatacggtgatggtcctggaaagagccatgaacctaccatggaagcgagatgaaggcccgattcgacctttaacgagggacccttggaaggcccaaaggtacccggcatggcccctttggattggagcgacactgaggacacattcaatgcccacaaaatacccctgggagaggtacccagccgtttgggcacttcgcctttccgcccggggaacccaagtggtcagtaaagagggcctatcccttggtaacggataagcttacttggtcccacggcatccttgggccagacaaaagttcgaactaacattgaaagtcggggtctgcgtccatgggccttttaacacaccccccctgtgatcttccccagctctgaattgactagactactcgaagcgtgcttatggtgctgaccccctatacacatttaattcacaacgtaatctctaaccatttccaaaccaaacacacttgttaccaaatgtcccaccccaaaatcattaatttccccttgacaacagcgcctgtgaccaacaacacaatcttactacctcccaatcccaatcttctatgcgtcagtgaaaacccacttgccaccacaacctctagtctgcaatataacccacattccatcatgatgactacacgtaaagctgagagccacatacggccgacagccacggcacttggagtatcttgcaaccccatattaggaggcccaaaaggtggagaaaactcctagttggagcaagtattcacacgatacagcccagagatctccccacatagaccggaccgagtttcaaagcccccgttaatatagataccagaactcacttattggtcgcctgaaacttcaaccccttttgcaacaaattacaaattaattgccatatcatcagatcaacaacaagttcccacttataacaaaccaccacaatatgtctactgtcaacactacatcacatctttctgtgccgcctaaatagaattctactcgacaaacaagagataaaccacaccacacactatgatactagtagtataccaacacagaaattatttacccccattcaacttcttcttttaccacaaacccagataaa

SEQ ID NO: 698508 - DNA, 541 bp, Homo sapiens
acatggtgttgcagggcatgtctttcccctgttttggtttcatttttccctcattttaatggtttcttggggaggccatttctaatgtttgcattaaactctctgattccatgattttacttttttggtagttacgatggactgaataaagagttaagtgcacagaagaacctaggactgccaaggctagacaacatctaattacttttgaaccaatagctagttgttgttgttgtcatgttgacttgacttttcaagtatgtaatgtttcgagatgtcttactgacagtgtattaaatggcaaaatttggtgtccatttatttttactgtacacactgttcatgttgtgcggtacaaagtcgcagtccaataactgtcctgtttttatacttgtggaactgttatttgtcttgttaaatccctgatttatcaaggatttgatcctgtttttgtctaatactatgatgtaactgcacctgttttggtaaacctgaagatgctaaaaggaaactaaaacatttatttttaccacaaaaaaaa

SEQ ID NO: 698509 - DNA, 837 bp, Homo sapiens
  misc_feature (144)..(144): n is a, c, g, or t
  misc_feature (251)..(251): n is a, c, g, or t
  misc_feature (341)..(341): n is a, c, g, or t
  misc_feature (405)..(405): n is a, c, g, or t
  misc_feature (411)..(411): n is a, c, g, or t
taagtatggcttttcagaatggttgttgtcattattcttgcctttaaaattttaactcatcaaagtgaagattagaaataaattttagaaaatgtagaatagtatgattctgtccctgtaatagaatctcagtggagttttttngcaaaactaatatggatttcatctgattttattatttcttaaattttagattttatgagtaccatttatatgatggtacaagcattcactctttagtagcatttttngtttttcagacaagctgaagtggtttattaagattgggtaatatttaaatagcaaccttctctgccttttttttttaaatatagaatttnggaccatttggacttttaaaatgccgggcattctttaccaaccaagtaaacgggaagatctgtnactggntagaaccaggttgaggagacagtacggaattggtaacaacagtcattggatttataatcaaccatacaaatactatgtgtaatctataaaaatcataaagaacacttttgtcagaactccaaaaatgtggtatatacttccaggccataagaagtgaggacttaatttaatggactctgaggattacggtcatttatgtatgaaaacaaggcgggaactatattagcaggctcgggtttccagaggaccttcttcagtgtccctttttacatggcacctattaaggcattcttagcaacttcgcaactaacgatatgaacatgcggtggctgtggcgacaaataaccttggtaacaaaacacaaaaatttggcgcccacaaaataaagggcgcccagagaagcatcaaaagtcagggtacaacggg

SEQ ID NO: 698510 - DNA, 1107 bp, Homo sapiens
tgaaggcccacattgggggagagaccgtgatcatgaggtatagcgttcacgcgcttgacgtaccaggtcttttcccccaatattgggaactgacccaggggaaacagctgctcaaatgtggttataaagtgctatattgggtcggaaggaacctggggtcttgtctttcgtaaagatgggtaccgggccgttaaatagtgtggtctggctttgcccgggcaacgagtagacgcatgaacaaattgcactggaaaatgcattcctacgtttgccgcaacggtccaatagggtccatccgatttctgcggaaattcttttccatctttaccaaaggatgagagtgcctttgtcatgaatagttacactcaggtaactgcgcagggctaccacctggtcagtgggatggctcgagcttactattccaatagaagacttgttgaaccttcaggttggaacatagcaactcatatgtggaatgtcagttctatttcagcgtactattcttgtgcgagacggaatgctatggtaaccccattctggtggaataacgcccagtcaaagacacttagtctgaatcagcgtgtgtctatcccatccgaggggatcccgaccaagacgtccgacggaattcagcatgcactagcatcgggccaccagagtcgaaagggagactaccataggttggagaaagcgtacctgggtccgagcggcacatgcaccatcgtacacacccacttacctttccggccaggaccagggttggctttggagaactttgttccgaacacacttcatttcatcaatcgctaggaaacactctgcaaccatcaactatgagggagggccaacgaagctcatattcgtaagctggctgagtgcatccgctggtcgtacgagggccgggattgtcactcaggcttggcaacatcgctcggttggaacttaactagtgcgtccccatgggagtacagacaggtgacaggatatgcgatggcgtccagttcggagctgggatacaggtatcctgtagccgacacccctacaggagaagctctgggatctggggcagcaagcaaggcagcccatgccacacaccgtctctcgaga

SEQ ID NO: 698511 - DNA, 183 bp, Homo sapiens
cagcctgggcgacagagagactgtctaaaaaaaaacatacatacacacacacacacacacattatgtatctggacatgtggtatattatgatgggctactttaattacatatgttttcaaggtttatacatattgtaatgtgtaaggtacacaataccttttaatgaataatattgcattgta

SEQ ID NO: 698512 - DNA, 180 bp, Homo sapiens
tcaaaagtatcccaacataacctcaagaaagattcgtaagcataaaagcaatgtgcagcatgcagctcgcttttcgcctgatactgtggctaagtcactaaaccatactagggcggttaattttttggcgtatgccgaagcgactcttgagcagcaggagtctgagttcggcgcctattg

SEQ ID NO: 698513 - DNA, 448 bp, Homo sapiens
acacgtaacgcttcacgagcactggaccatacctttccctgcacctcatcttctttcaactgagacttaaacatatgacagatgagacgtccattgaaactagaacagccatggaattacacatagtggggaaacgggtcccacagagataaagtgcctggaaccatgatctccttattatcaatacccttttttcctctagacccaagatcttaaaatgagcaaattagaaacagacacaagcgggtctaactgtatttgatggctgagggaagagcaggcgaaaatcttaaaaaatactatctcctgattgcttatggcccactccctccaacccagtctgcaggtgggtcatagtccaaagaccctatttccaaccctgaggtcccactgcaggcagtactatggcctcacgggaaggaagatgtatccagaagaaggcgttacg

SEQ ID NO: 698514 - DNA, 193 bp, Homo sapiens
gatccccggcgtcatggggtctgtaggattgtggccagaggagaggaaaggtgcggcgctggaaaggtagcacggccaggggagaggagaggcacggcgctggcggggaagcaccggccagcccagcagagagcagaggcacaggcctatgggggctgcaaggagcctacagagcccatgcgcgcggctgccg

SEQ ID NO: 698515 - DNA, 1903 bp, Homo sapiens
  misc_feature (375)..(375): n is a, c, g, or t
gcaaagacgcgagcgtccatcacttagctagccaggacagagccgttcagcctcaacagccagttctatcgcacaaagtagaatgatataagtgcgagtagatacatccgcgaaccgtgggcagcaattgagatatacgatacgccggaaatgcgggaaagcatggaaagagattcatgaagcactagaagccagtacatttatcatggcatagggcagctaagccacgcgtcattaacgcgtgtaccttgccagtagaattgcaattgtcaagctcagaatacatcaaactatatgagcgcacagagacagcagcacaaaaagcgtagaagaacccccacagtacagaccttaggacggggagcctcacgcttntacacgaaacccagttcttaagacaagcatgcccacgaccttcggttcctttaattgtggagacgcacaagaagattccacgctcgtgcggcggacaagccattctttcattggaaagggttccactgccaacggtgcggtgaacggtataggactcccttaaaacgacggggaatacgcaccttaaggggtgaagcaatgcaatgccggtggggggattttaccggtcccaccttataaaagggcaatccatgcgaaaatccttctttcaagggtatagcgaaagagcgctattcgtccacacataatttctttgtggtctgccaccttaatcccaacgttaataaacccccgccctttccatttaaaaggtatttacagccgacccccgtttccttgggattttaatcaacgacttcattccttgtagaaggcggtatggcctatatcaaatgcctacgcccctgaggaagagatggcgaagtggggcaaacgaacgctgagaggacgggtgccgatactgctgcgggcggataaatccaaaccatcaaaaggttgtggattaaatcactgaacaaaaaacgccatttcttctcgcgcttttaacggtaaaggccaaacggcagacggttgccacagaaacaccaaccacgattggttattcgagaagatccgcaaatgtccgcacaaaaattcaaaaggggtcaaaaagagagggcatccttttggatagaaaagaaaggccagaagaaggagcaccaatcagccacaaaaaattgtatagaaggaggagaaaagacagaccggcagtggttattccacacaaaggggggcgtttctcaaaaaaaggcgacacacccaccgaaaacagattggagctgccctttaacacatagaagagcatgtgtcttccgcccaagagaaagctacaagattaaatttaacaaggctgttgggaaacaagcctttcgggcgtttgccaaaccaatagcggcgtcgaagattctcttgggggaaaccaccaagagagggtccataaatttccgaagccacacatttaaatttaaggcaaaaaaggaacaccgcgttaaaaacgtgagattcacaaggaatcaatgttaaatgggtttaacaacacacagttgggcaatacgacaaagccaacatttttgtcgctttagacaacatcatcagggtgtgacaagtattcaaaaggggcccccttgtgggcggagaaataccacacggcaaaccttcttgacagcagaaagacagcaaggcagttgaggaacaagccgtatcgcgacacccaacacagtgatgtacgaaacgaaagggtgccgccacacacactgattaaacatcgtttaggcgaaaacatccaccaaacgcgcaaaaaaccgaacaaaggcgcatcccacactatttattttttgaaagagccgcgggttctccacactatggtgggtcgaataaacacccccctatatagtgaaaccaaggagcactacaatcgatgccgttcgca

SEQ ID NO: 698516 - DNA, 1288 bp, Homo sapiens
cctctccctcaacaagggagagacctcatcaggatgaacccgaggacgcttcgtgaactgctgctacattaagttccgtttctcaatcaccacgcacgtccatgagacacgcccaaggactgcgagtatgttggactcttcaagtggcgtttttaagattgtatttccatggacatccatcttctagcttcagagcagagaccagaggtgcaacactaccattcgattatccaggcagggcattgggccagctatggcgcaacgattgcaccaacattaagccaagcattatatccatcaccatttggtggttcctgcatcattagcacggcacacatcagtggggcatcagtcaaggcagcaggcaacacagtcacagggctgccacaggttgtccccaccgaaaccctcccaggcaccttaacaccgagggcacagcacagcagttaccattcatgccacgatggtggcgcacaagcccagggccagggggtgttctatcatggtttcacaagcaacggcgaaaccattttccacgttcgcaacgtgttcacagaatcacaaagggggtccgtcacgtgtgtgggggagaaacaattttacacggttttgcgaggattttatcaatttgtccatttgttatccagtcgcagtcagagggggtatagtcaagtttcacctggttcacatttctagtatgagtagagagtagtgtataacgttagtataaacagagtttataccaagggggatttacccattggtttggccatcggaaaactgttgctttgtcaaaggggcttataagggtataaccacactaaggaggcatcaataattaacttaagtagggccccagtggcacttggggcaacatgttcatgtttcactaatgaagtagtttaaacaagaccgggttcaacaatatatttggcagccaacaaacatcaaaattaaagacacacaccaccagccaacacggcgcacaccgcgtggcccagcacacctatacaccaccgggcggcaacggacgcatgcatccaccaacaacacagacaggcaccgggggttctacactcacacacgcacagctcaacgaacacgcacaaactagacggacaatcgaccgatgcgcgaaccaaacgcggggccactaccaccagcgtgatgcgacgacacataaccaagacacaaacatctactcagacgcagacaagcacacaccaacggcatctcgtgctgacacaccacacacactacgggacacggggctcacaaacagtgacat

SEQ ID NO: 698517 - DNA, 1323 bp, Homo sapiens
gaacaatatgatatttgacttctggtcataagcatgactataggtaggtaatttaatcttcatatagttcgttttctcatttttagcattctaagattgaactagatcacattaaacagatgttgccccacatccctaaactgggaaaagaataaggttttatttataaaaaagttcaaaccatagacagaaaggcaattaaaccctggaatgcggaatccacaaatatcgcgtcttggttgctttaacactggagtaaaataaccttcttagaaacaaagaacacttaacttacagggaccattcttttgaacgcaatagggggacattgaccaagtggccagttccttagtccaattgtccacttttcttcccacaattttactggttttcaccttaatttctccattacagggaaaaggttggcacaacggttgcccttagaggcctctgcgcaccgaacacaaacgaacaggccacacgtttaggcgcttactgcttgggggtacacaacttagcacgaagcgttcaccgggtttctcaccaaagtacaggaaaaaccaaggattggccttgtcttaccaaaccccatgcacatagcaggggatcgcacgacgaatgcttaagcaattggccgctttgtggacttcaacccttacttacaaccctttttatcggaaccgcaccttcattgaccagggaaacggaacatacttaccaattttgccgctttgggccaacagattacccgcaagacacacagtgtaaagcacgaatcttccatctgtcccaaacaaaaagggtcggcaactattaccgaacatgggcaggagaaacactcttgtcaagaagcttcactttttaaacagaccagccctttaccgttagcaaccgtccttattggcttaaccaaacaaacaagtgtctgtgaaccccccttaaggaaggcaagcaagaccctcggcgacaaccggtgaaccagacccgcgacgcgcgagagaccgtttttcccccttgattacttagccgttccgaccaaagtcaagttaatgcaaaacgacgtgaccccacctcgccgcgctcttatcttgcaaagaagagtccttgctgtacaagtttatagttcgcacacgagcggccagccggcatcactggacatggcacatctgctgtcagcgtgcgcccacccccactggcctgtcacagcgtccttacacaccagcacacatttaatggccgtccgcaactgcggcacgagctgtcgctaacttcccccgaacacacgattcctccaagtgctaccggttacgaccacagctatat

SEQ ID NO: 698518 - DNA, 402 bp, Homo sapiens
ctcacctgatgaatggattaaattcaactgtgggctctccaaacagtggaatatgatttagccataaaaaggaacgaagcagctgggcgcagtggctcacgcctgtggtcccagcactttgggaggccgaggccagtggatcacgaggtcggaagatcgagaccgtcctggctaacacggtgaaaccctgactctaaaaaaattagcccaggcacgttggcacatgcctgcagacccagctacttgggaggctaacgcaggagaattgcttgaacctgggatgcggaggttgcaatgagccgagatcgttccactgcactccaagcctgggagatagagtgagactccgtctcaaaacaaaacaaaacaaaacaaaaaaaacgaagcaccaatacatactac

SEQ ID NO: 698519 - DNA, 122 bp, Homo sapiens
caagtagctgggattacaggcatgtaccaccacacctggctaatttttatatatttttatttgttattttttgagttggagttttgcactctagcctgggttaacagagtgagactctatca

SEQ ID NO: 698520 - DNA, 253 bp, Homo sapiens
  misc_feature (101)..(101): n is a, c, g, or t
  misc_feature (216)..(216): n is a, c, g, or t
aaaatgtcaggccagtaacaagacacagatgaactggggaggaagagagttttgacttctgcaactggttacaggggaaacggcgctggaagattatcacncagaccaactcaaagattggaagagttttcccggaagctaagtgtacctatctagagctatagtgtgtagtgtggaacgtgtgcgattcactctaacatacataatgtgattaanctgcttttaatactataagctaacgtcgtgagtcctg

SEQ ID NO: 698521 - DNA, 981 bp, Homo sapiens
ggccgccctttgtcgcttattctgtttttctaattattctgtccttttcttttctatctgtttgttctatttttgtactctttgcttgttctaattttctttccttgttgaggagccgcgaggcggaggtcgcggggggctgggggcgagccccaggtcggccccggagctcggggccccgcgccgttcggggaggcgggggctctccgctctgcgcggtcccctctgtcgacgcggctcgtggggctggctgcatgaggcctggcccgtccgggttgtgggctgcgagctctccccaggacgacttcacactgtaaggagccagaaggaggtggagagaagcctgtcttggagattttcctggggcaaatccctgacggtcagttgcatggagtgagagtgtaccgcggcgttgtatgtggctcagagtaaccacagtgctgtgcagtggctagagcaattccagccatggctggttcccaatggcgagctttatcggagaaacttttggacacctacatggatgacggatggtgagtggtggatagccaaacaaggagggaccagggccatcacagacaatgacatgcagagtatcggaccttcgtagtatacttacgaagtcaggtgtctccaccagctctagtatggagtatatgaccctgcgatgtcgagctggaaacgaactgaagaatcctgggctgaaccctgctgagcgaagatgaacgtggcaatatagactaccaacaaccgggccgacgttgtgcgccctaggcaagaaataggcccgaggttgcgtcacacccggcgacgagcgggagccaaaaccaataaccaccatggacgcaatgtgctaagggtcagcccagaacttctccatcgttgtagaacatcggcccactggacaatcgcaatgacaacaacaccaggggctgagcacacacgcacaagcacccagctgcgaccccagaacaaacaaca

SEQ ID NO: 698522 - DNA, 542 bp, Homo sapiens
cagccgctgatcaactgtattgaagcccagctggccgatgtgcgagctgatatgagcggcagaatcaggattaacagcagttcatggcctcaagtcgcggctgaagcaggagatctccacctaccgcagcctgcttgagggccagaaagatcactacaacaacctgtccgcctccaaggtcctctgaggcagcaggctaaggggcttctactgtcctttggagggtgtctcctgggtagggggatgggaaggaagggacccttaccccctgctcttcccctgatgtgccaataaaattttatggtccaaggggaaaaaaaaaaaaaaaaaaaaaatatatatatatatatatatatatatatatatatatatatatatatatatatatatgtgtgtgtgtgtgtgtgtgtgtgtgtatatatacgtgtgtgtgtatatatatatatatgaaaaacaatacatgctcgttgtagaaatgtggaaaacatggcgaactaatcagaaattcataaatatcacccgtgactttaccacccagaaaa

SEQ ID NO: 698523 - DNA, 260 bp, Homo sapiens
ctccgcctcccgggttcacgccattctcctgccttagcctcccaagtagctgggaccacaggcgcccgccaccacgcccggctaattttttgtatttttagtagagacggggtttcaccgagttagccgggatggtctcgatctcctgacctcgtgatccgcccgcctcggcctctcaaagtgctgggattacaggcgtgagccaccgcgcccggcccactactggtttttaacaggatgattcaaagtgcagtccgttc

SEQ ID NO: 698524 - DNA, 938 bp, Homo sapiens
  misc_feature (226)..(226): n is a, c, g, or t
  misc_feature (228)..(228): n is a, c, g, or t
  misc_feature (230)..(230): n is a, c, g, or t
  misc_feature (234)..(234): n is a, c, g, or t
  misc_feature (816)..(816): n is a, c, g, or t
  misc_feature (832)..(832): n is a, c, g, or t
  misc_feature (879)..(879): n is a, c, g, or t
ggcaggttcgcttacatcgaccgcctaagagtcgcgctgtaagaagcaacaacctctcctcttcgtctccgccatcagctcggcagtcgcgaagcagcaaccatgcgtgagtgcatctccatccacgttggccaggctggtgtccagattggcaatgcctgctgggagctctactgcctggaacacggcatccagcccgatggccagatgccaagtgacaagaccntngngggnagggatgagtgacttccttcaacactcttcttcagtgagacgggggctgggcaagcatgtgccccgggccaggcggttgtatgacattgggaaccagactagtcgatgagtggtaagttacgtcgatctggcgaggcgtactcgggctacgtgtcttcgctccgctgagcaactttatcgacagtgcaaagaagatgctgcctaataactatgcccgagggcactacaccattggcaaggagatcattgaccttgtgttggaccgaattcgcaagctggctgaccagtgcaccggtcttcagggcttcttggttttccacagctttggtgggggaactggttctgggttcacctcccctgctcatggaacgtctctcagttgattatggcaagaagtccaagctggagttctccatttacccagcaccccaggtttccacagctgtagttgagccctacaactccatcctcaccacccacaccaccctggagcactctgattgtgccttcatggtagacaatgaggccatctatgacatctgtcgtagaaacctcgatatcgagcgccaactatatacttancgcgttattggcagantgtgtctccatcactgttcctgagattgatgggcctgatgtgcctgngattccgaccactgtgcctacccggtcattctcttggcatgcccgtttttgtggaagcc

SEQ ID NO: 698525 - DNA, 128 bp, Homo sapiens
caggagtgtggctgcaagagataaagggtctggaggaagatccggaggttcatgtgtgttccctctgctgagtattgatgcccttatcacctgtgcctttcacccctactgaaccccacttcagataa

SEQ ID NO: 698526 - DNA, 629 bp, Homo sapiens
aattgacctccggaaaactgctcctcctttgacgtgtacgtgttcccaaaatccatcctccattccacaacaagcccagcgtccaaccagtttggggttgttccccccctgcctccaagtttgcaaccacctaccaccctcccctgtgttccctgtgagacctgcccaaggtacagagagctgtgtgcatgctgagcaacaccacagccattgctgaggcctgggctcgcctggaccacaagtttgacctgatgtatgccaaacgtgcctttgttcactggtacgttggggaggggatggaggaaggtgagttttcagaggcccgtgaggacatggctgcccttgagaaggattatgaggaggttggtgtggattctgttgaaggagagggtgaggaagaaggagaggaatactaaagttaaaacgtcacaaaggtgctgcttttacagggaagcttattctgttttaaacattgaaaagttgtggtctgatcagttaatttgtatgtagcagtgtatgctctcatatacaattactgacctatgctctaaaacatgaatgctttgttacagacccaagctgtccatttctgtgatgggttttgaataaagtattccctgttttaaatg

SEQ ID NO: 698527 - DNA, 1117 bp, Homo sapiens
  misc_feature (20)..(20): n is a, c, g, or t
  misc_feature (93)..(93): n is a, c, g, or t
  misc_feature (104)..(104): n is a, c, g, or t
  misc_feature (110)..(110): n is a, c, g, or t
  misc_feature (301)..(302): n is a, c, g, or t
gcatcatggctgcccccttncagcacgggcattcatgcgggcgggttgggtgtggcattcttgtttgccaggcagcagggtgcaggacagcanaggcagcaggnatactnattatccattccttttggccctgcagcatgtcatgctcccagaatttcagcttcagcttaactgacagacgttaaagctttctggttagattgttttcacttggtgatcatgtcttttccatgtgtacctgtaatatttttccatcatatctcaaagtaaagtcattaacatccaaaaaaaaaaaaataannaaaaaaaaaaaaaaaaaaaaacaaacaaaaaaaaaaaaaaaaagaaacaaaaaaaaaaaacaaaaaaacaaaaaaaaaaacaaaaaaaaagaaaagcaaaaaacaacagaacaaaaaaaggagaagagaggggggggcggggcccgctaaaacattcctccgcgccgggggcgggcgcaccaacaccgcccccgcacgccggctctgatggacaggagaggcgccgcccccatacgaatgatgagagacataatatcaaacacgaccaggcgggcgcggcgcatgccacaaaccacaaacaccgctggagaggaacaaaaccaaacaaggaggagtgacactctcagctggaacgacgaccaccacccactttgtgtggcgggacgccaaacacggcgacacaccacccccacaacaaaatacccagcggcgcggagaaacaacaaaccgcacggcgagctagaggatgcaacaacaccaacacgttatctgtgcggagcgacagaaaatagcgacaagaggagacgagagaaaaaaaataatcgacgggcggcttgatgaaataaaccacgcgcagcgacagccagagcaacgacacgagaacgcccacgaccacagcccacgcccacccaccccaacgccacggaacaccgaaacgagaagaagcagacagacaccgcagcaccaccagaaccgaacaccgccgacacgacagcagcagagtacacccgccacacgaacaagcacgccaacgcagaacgaccgacagacaccaccgagcacggaacgaccggcaccacaagcaggagacaacc

SEQ ID NO: 698528 - DNA, 197 bp, Homo sapiens
  misc_feature (5)..(5): n is a, c, g, or t
tgaanacctggcgatccccaagtcaataaatcctcacatatactttttttgtttttccaacttttccctctttgaaagataagatgtgtgcgccaacggaacctcttcctggcgggctgcgtctcattagtggctccccacttggaatacaagtgaatcaagttccccaatgtgtgcccgagtggaacctactcctg

SEQ ID NO: 698529 - DNA, 101 bp, Homo sapiens
tcaagcttctaacgatgtacggggacatgaatgctttgttacagacccaagctgtccatttctgtgatgggttttgaataaagtattccctgttttaaatg

SEQ ID NO: 698530 - DNA, 431 bp, Homo sapiens
cacacatattctccaggccagagcacatcttacacagacctcaaatctttattctggacacgtacacacagcctgtggcagacacaatttttatatacactgtgccaatcaccaagtgcgtctctcagcaaggtacacggacctttacacaacatatccaacttttcttgtgctatattttggatctacacgggcaacctctatattgcgtttggctcagacatcttcaacccccattacaggataccacttcccaagcacaagcgtcagagtctgaggtcgtgctgcgacacagtaagccacactttcagagagaataattcctggtggaacacagcatagcatgattgcgaccacaggatggctgaaatggaacttgggaagcgccacacccacatcttgttcctttcgggctatttctacagtgcgcg

SEQ ID NO: 698531 - DNA, 2472 bp, Homo sapiens
  misc_feature (1656)..(1657): n is a, c, g, or t
ggtaccgcgaacggtgcgttacttacctcgactcttagcttgtcggggacggtaaccgggacccggtgtctgctcctgtcgccttcgcctcctaatccctagccactatgcgtgagtgcatctccatccacgttggccaggctggtgtccagattggcaatgcctgctgggagctctactgcctggaacacggcatccagcccgatggccagatgccaagtgacaagaccattgggggaggagatgactccttcaacaccttcttcagtgagacgggcgctggcaagcacgtgccccggggctgtgtttgtagacttggaacccacagtcattgatgaagttcgcactggcacctaccgccagctcttccaccctgagcagctcatcacaggcaaggaagatgctgccaataactatgcccgagggcactacaccattggcaaggagatcattgaccttgtgttggaccgaattcgcaagctggctgaccagtgcaccggtcttcagggcttcttggttttccacagctttggtgggggaactggttctgggttcacctcccctgctcatggaacgtctctcagttgattatggcaagaagtccaagctggagttctccatttacccagcaccccaggtttccacagctgtagttgagccctacaactccatcctcaccacccacaccaccctggagcactctgattgtgccttcatggtagacaatgaggccatctatgacatctgtcgtagaaacctcgatatcgagcgcccaacctacactaaccttaaccgccttattagccagattgtgtcctccatcactgcttccctgagatttgatggagccctgaatgttgacctgacagaattccagaccaacctggtgccctactccccgcatccacttccctctggccacatatgcccctgtcatctctgctgagaaagcctaccatgaacagctttctgtagcagagatcaccaatgcttgctttgagccagccaaccagatggtgaaatgtgaccctcgccatggtaaatacatggcttgctgcctgttgtaccgtggtgacgtggttcccaaagatgtcaatgctgccattgccaccatcaaaaccaagcgcagcatccagtttgtggattggtgccccactggcttcaaggttggcatcaactaccagcctcccactgtggtgcctggtggagacctggccaaggtacagagagctgtgtgcatgctgagcaacaccacagccattgctgaggcctgggctcgcctggaccacaagtttgacctgatgtatgccaagcgtgcctttgttcactggtacgtgggtgaggggatggaggaaggcgagttttcagaggcccgtgaagatatggctgcccttgagaaggattatgaggaggttggtgtggattctgttgaaggagagggtgaggaagaaggagaggaatactaattatccattccttttggccctgcagcatgtcatgctcccagaatttcagcttcagcttaactgacagacgttaaagctttctggttagattgttttcacttggtgatcatgtcttttccatgtgtacctgtaatatttttccatcatatctcaaagtaaagtcattaacatccaaaaaaaaaaaaataannaaaaaaaaaaaaaaaaaaaaacaaacaaaaaaaaaaaaaaaaagaaacaaaaaaaaaaaacaaaaaaacaaaaaaaaaaacaaaaaaaaagaaaagcaaaaaacaacagaacaaaaaaaggagaagagaggggggggcggggcccgctaaaacattcctccgcgccgggggcgggcgcaccaacaccgcccccgcacgccggctctgatggacaggagaggcgccgcccccatacgaatgatgagagacataatatcaaacacgaccaggcgggcgcggcgcatgccacaaaccacaaacaccgctggagaggaacaaaaccaaacaaggaggagtgacactctcagctggaacgacgaccaccacccactttgtgtggcgggacgccaaacacggcgacacaccacccccacaacaaaatacccagcggcgcggagaaacaacaaaccgcacggcgagctagaggatgcaacaacaccaacacgttatctgtgcggagcgacagaaaatagcgacaagaggagacgagagaaaaaaaataatcgacgggcggcttgatgaaataaaccacgcgcagcgacagccagagcaacgacacgagaacgcccacgaccacagcccacgcccacccaccccaacgccacggaacaccgaaacgagaagaagcagacagacaccgcagcaccaccagaaccgaacaccgccgacacgacagcagcagagtacacccgccacacgaacaagcacgccaacgcagaacgaccgacagacaccaccgagcacggaacgaccggcaccacaagcaggagacaacc

SEQ ID NO: 698532 - DNA, 2591 bp, Homo sapiens
  misc_feature (1775)..(1776): n is a, c, g, or t
agctggttggttataacatggtagacacttagtcatcttctatagctgagatgttggcacaggaggacagatcacaggctataaagatgaataaggtgtctaccatgattattattctaagctggtggtaataaacagtacctgcctcgactcttagcttgtcggggacggtaaccgggacccggtgtctgctcctgtcgccttcgcctcctaatccctagccactatgcgtgagtgcatctccatccacgttggccaggctggtgtccagattggcaatgcctgctgggagctctactgcctggaacacggcatccagcccgatggccagatgccaagtgacaagaccattgggggaggagatgactccttcaacaccttcttcagtgagacgggcgctggcaagcacgtgccccggggctgtgtttgtagacttggaacccacagtcattgatgaagttcgcactggcacctaccgccagctcttccaccctgagcagctcatcacaggcaaggaagatgctgccaataactatgcccgagggcactacaccattggcaaggagatcattgaccttgtgttggaccgaattcgcaagctggctgaccagtgcaccggtcttcagggcttcttggttttccacagctttggtgggggaactggttctgggttcacctcccctgctcatggaacgtctctcagttgattatggcaagaagtccaagctggagttctccatttacccagcaccccaggtttccacagctgtagttgagccctacaactccatcctcaccacccacaccaccctggagcactctgattgtgccttcatggtagacaatgaggccatctatgacatctgtcgtagaaacctcgatatcgagcgcccaacctacactaaccttaaccgccttattagccagattgtgtcctccatcactgcttccctgagatttgatggagccctgaatgttgacctgacagaattccagaccaacctggtgccctactccccgcatccacttccctctggccacatatgcccctgtcatctctgctgagaaagcctaccatgaacagctttctgtagcagagatcaccaatgcttgctttgagccagccaaccagatggtgaaatgtgaccctcgccatggtaaatacatggcttgctgcctgttgtaccgtggtgacgtggttcccaaagatgtcaatgctgccattgccaccatcaaaaccaagcgcagcatccagtttgtggattggtgccccactggcttcaaggttggcatcaactaccagcctcccactgtggtgcctggtggagacctggccaaggtacagagagctgtgtgcatgctgagcaacaccacagccattgctgaggcctgggctcgcctggaccacaagtttgacctgatgtatgccaagcgtgcctttgttcactggtacgtgggtgaggggatggaggaaggcgagttttcagaggcccgtgaagatatggctgcccttgagaaggattatgaggaggttggtgtggattctgttgaaggagagggtgaggaagaaggagaggaatactaattatccattccttttggccctgcagcatgtcatgctcccagaatttcagcttcagcttaactgacagacgttaaagctttctggttagattgttttcacttggtgatcatgtcttttccatgtgtacctgtaatatttttccatcatatctcaaagtaaagtcattaacatccaaaaaaaaaaaaataannaaaaaaaaaaaaaaaaaaaaacaaacaaaaaaaaaaaaaaaaagaaacaaaaaaaaaaaacaaaaaaacaaaaaaaaaaacaaaaaaaaagaaaagcaaaaaacaacagaacaaaaaaaggagaagagaggggggggcggggcccgctaaaacattcctccgcgccgggggcgggcgcaccaacaccgcccccgcacgccggctctgatggacaggagaggcgccgcccccatacgaatgatgagagacataatatcaaacacgaccaggcgggcgcggcgcatgccacaaaccacaaacaccgctggagaggaacaaaaccaaacaaggaggagtgacactctcagctggaacgacgaccaccacccactttgtgtggcgggacgccaaacacggcgacacaccacccccacaacaaaatacccagcggcgcggagaaacaacaaaccgcacggcgagctagaggatgcaacaacaccaacacgttatctgtgcggagcgacagaaaatagcgacaagaggagacgagagaaaaaaaataatcgacgggcggcttgatgaaataaaccacgcgcagcgacagccagagcaacgacacgagaacgcccacgaccacagcccacgcccacccaccccaacgccacggaacaccgaaacgagaagaagcagacagacaccgcagcaccaccagaaccgaacaccgccgacacgacagcagcagagtacacccgccacacgaacaagcacgccaacgcagaacgaccgacagacaccaccgagcacggaacgaccggcaccacaagcaggagacaacc

SEQ ID NO: 698533 - DNA, 247 bp, Homo sapiens
tctagaggatgccctcttctccttgacacatactacaaaagttaagtcaggtcaagagaggtggctcgacatcctataatcccagcacgtggggagggctggggcaggaggatcactggagcccaggagtacaagaccagcctcggcaaaaatagcaaaatagtgaggccttatctctacaaaagacaaaagttagctgaacatggtggcaacacatactgcagtcccagctacctagggggggagg

SEQ ID NO: 698534 - DNA, 1679 bp, Homo sapiens
ggtaccgcgaacggtgcgttacttacctcgactcttagcttgtcggggacggtaaccgggacccggtgtctgctcctgtcgccttcgcctcctaatccctagccactatgcgtgagtgcatctccatccacgttggccaggctggtgtccagattggcaatgcctgctgggagctctactgcctggaacacggcatccagcccgatggccagatgccaagtgacaagaccattgggggaggagatgactccttcaacaccttcttcagtgagacgggcgctggcaagcacgtgccccggggctgtgtttgtagacttggaacccacagtcattgatgaagttcgcactggcacctaccgccagctcttccaccctgagcagctcatcacaggcaaggaagatgctgccaataactatgcccgagggcactacaccattggcaaggagatcattgaccttgtgttggaccgaattcgcaagctggctgaccagtgcaccggtcttcagggcttcttggttttccacagctttggtgggggaactggttctgggttcacctcccctgctcatggaacgtctctcagttgattatggcaagaagtccaagctggagttctccatttacccagcaccccaggtttccacagctgtagttgagccctacaactccatcctcaccacccacaccaccctggagcactctgattgtgccttcatggtagacaatgaggccatctatgacatctgtcgtagaaacctcgatatcgagcgcccaacctacactaaccttaaccgccttattagccagattgtgtcctccatcactgcttccctgagatttgatggagccctgaatgttgacctgacagaattccagaccaacctggtgccctactccccgcatccacttccctctggccacatatgcccctgtcatctctgctgagaaagcctaccatgaacagctttctgtagcagagatcaccaatgcttgctttgagccagccaaccagatggtgaaatgtgaccctcgccatggtaaatacatggcttgctgcctgttgtaccgtggtgacgtggttcccaaagatgtcaatgctgccattgccaccatcaaaaccaagcgcagcatccagtttgtggattggtgccccactggcttcaaggttggcatcaactaccagcctcccactgtggtgcctggtggagacctggccaaggtacagagagctgtgtgcatgctgagcaacaccacagccattgctgaggcctgggctcgcctggaccacaagtttgacctgatgtatgccaaacgtgcctttgttcactggtacgttggggaggggatggaggaaggtgagttttcagaggcccgtgaggacatggctgcccttgagaaggattatgaggaggttggtgtggattctgttgaaggagagggtgaggaagaaggagaggaatactaaagttaaaacgtcacaaaggtgctgcttttacagggaagcttattctgttttaaacattgaaaagttgtggtctgatcagttaatttgtatgtagcagtgtatgctctcatatacaattactgacctatgctctaaaacatgaatgctttgttacagacccaagctgtccatttctgtgatgggttttgaataaagtattccctgttttaaatg

SEQ ID NO: 698535 - DNA, 200 bp, Homo sapiens
ctcacatttcctttctccctgtcatattttcttcactgattctcctgcatcctctttatatttttaagaactcctttgactatattgcccccctcaataatccaggataatctccccatttcaagatccttaatcacatctgcaatgtatcttttgccatataaggtaacatattcacaggttctagggggtggtatagt

SEQ ID NO: 698536 - DNA, 2511 bp, Homo sapiens
  misc_feature (1695)..(1696): n is a, c, g, or t
ggtaccgcgaacggtgcgttacttacctcgactcttagcttgtcggggacggtaaccgggacccggtgtctgctcctgtcgccttcgcctcctaatccctagccactatgcgtgagtgcatctccatccacgttggccaggctggtgtccagattggcaatgcctgctgggagctctactgcctggaacacggcatccagcccgatggccagatgccaagtgacaagaccattgggggaggagatgactccttcaacaccttcttcagtgagacgggcgctggcaagcacgtgccccggggctgtgtttgtagacttggaacccacagtcattgatgaagttcgcactggcacctaccgccagctcttccaccctgagcagctcatcacaggcaaggaagatgctgccaataactatgcccgagggcactacaccattggcaaggagatcattgaccttgtgttggaccgaattcgcaagctggctgaccagtgcaccggtcttcagggcttcttggttttccacagctttggtgggggaactggttctgggttcacctcccctgctcatggaacgtctctcagttgattatggcaagaagtccaagctggagttctccatttacccagcaccccaggtttccacagctgtagttgagccctacaactccatcctcaccacccacaccaccctggagcactctgattgtgccttcatggtagacaatgaggccatctatgacatctgtcgtagaaacctcgatatcgagcgcccaacctacactaaccttaaccgccttattagccagattgtgtcctccatcactgcttccctgagatttgatggagccctgaatgttgacctgacagaattccagaccaacctggtgccctactccccgcatccacttccctctggccacatatgcccctgtcatctctgctgagaaagcctaccatgaacagctttctgtagcagagatcaccaatgcttgctttgagccagccaaccagatggtgaaatgtgaccctcgccatggtaaatacatggcttgctgcctgttgtaccgtggtgacgtggttcccaaagatgtcaatgctgccattgccaccatcaaaaccaagcgcagcatccagtttgtggattggtgccccactggcttcaaggttggcatcaactaccagcctcccactgtggtgcctggtggagacctggccaaggtacagagagctgtgtgcatgctgagcaacaccacagccattgctgaggcctgggctcgcctggaccacaagtttgacctgatgtatgccaagcgtgcctttgttcactggtacgtgggtgaggggatggaggaaggcgagttttcagaggcccgtgaagatatggctgcccttgagaaggattatgaggaggttggtgtggattctgttgaaggagagggtgaggaagaaggagaggaatactaattatccattccttttggccctgcagcatgtcatgctcccagaatttcagcttcagcttaactgacagacgtgaaaacaatctaaccagaaagctttaacgtctgtcagtttaaagctttctggttagattgttttcacttggtgatcatgtcttttccatgtgtacctgtaatatttttccatcatatctcaaagtaaagtcattaacatccaaaaaaaaaaaaataannaaaaaaaaaaaaaaaaaaaaacaaacaaaaaaaaaaaaaaaaagaaacaaaaaaaaaaaacaaaaaaacaaaaaaaaaaacaaaaaaaaagaaaagcaaaaaacaacagaacaaaaaaaggagaagagaggggggggcggggcccgctaaaacattcctccgcgccgggggcgggcgcaccaacaccgcccccgcacgccggctctgatggacaggagaggcgccgcccccatacgaatgatgagagacataatatcaaacacgaccaggcgggcgcggcgcatgccacaaaccacaaacaccgctggagaggaacaaaaccaaacaaggaggagtgacactctcagctggaacgacgaccaccacccactttgtgtggcgggacgccaaacacggcgacacaccacccccacaacaaaatacccagcggcgcggagaaacaacaaaccgcacggcgagctagaggatgcaacaacaccaacacgttatctgtgcggagcgacagaaaatagcgacaagaggagacgagagaaaaaaaataatcgacgggcggcttgatgaaataaaccacgcgcagcgacagccagagcaacgacacgagaacgcccacgaccacagcccacgcccacccaccccaacgccacggaacaccgaaacgagaagaagcagacagacaccgcagcaccaccagaaccgaacaccgccgacacgacagcagcagagtacacccgccacacgaacaagcacgccaacgcagaacgaccgacagacaccaccgagcacggaacgaccggcaccacaagcaggagacaacc

SEQ ID NO: 698537 - DNA, 1710 bp, Homo sapiens
  misc_feature (1680)..(1680): n is a, c, g, or t
ggtaccgcgaacggtgcgttacttacctcgactcttagcttgtcggggacggtaaccgggacccggtgtctgctcctgtcgccttcgcctcctaatccctagccactatgcgtgagtgcatctccatccacgttggccaggctggtgtccagattggcaatgcctgctgggagctctactgcctggaacacggcatccagcccgatggccagatgccaagtgacaagaccattgggggaggagatgactccttcaacaccttcttcagtgagacgggcgctggcaagcacgtgccccggggctgtgtttgtagacttggaacccacagtcattgatgaagttcgcactggcacctaccgccagctcttccaccctgagcagctcatcacaggcaaggaagatgctgccaataactatgcccgagggcactacaccattggcaaggagatcattgaccttgtgttggaccgaattcgcaagctggctgaccagtgcaccggtcttcagggcttcttggttttccacagctttggtgggggaactggttctgggttcacctcccctgctcatggaacgtctctcagttgattatggcaagaagtccaagctggagttctccatttacccagcaccccaggtttccacagctgtagttgagccctacaactccatcctcaccacccacaccaccctggagcactctgattgtgccttcatggtagacaatgaggccatctatgacatctgtcgtagaaacctcgatatcgagcgcccaacctacactaaccttaaccgccttattagccagattgtgtcctccatcactgcttccctgagatttgatggagccctgaatgttgacctgacagaattccagaccaacctggtgccctactccccgcatccacttccctctggccacatatgcccctgtcatctctgctgagaaagcctaccatgaacagctttctgtagcagagatcaccaatgcttgctttgagccagccaaccagatggtgaaatgtgaccctcgccatggtaaatacatggcttgctgcctgttgtaccgtggtgacgtggttcccaaagatgtcaatgctgccattgccaccatcaaaaccaagcgcagcatccagtttgtggattggtgccccactggcttcaaggttggcatcaactaccagcctcccactgtggtgcctggtggagacctggccaaggtacagagagctgtgtgcatgctgagcaacaccacagccattgctgaggcctgggctcgcctggaccacaagtttgacctgatgtatgccaaacgtgcctttgttcactggtacgttggggaggggatggaggaaggtgagttttcagaggcccgtgaggacatggctgcccttgagaaggattatgaggaggttggtgtggattctgttgaaggagagggtgaggaagaaggagaggaatactaaagttaaaacgtcacaaaggtgctgcttttacagggaagcttattctgttttaaacattgaaaagttgtggtctgatcagttaatttgtatgtagcagtgtatgctctcatatacaattactgacctatgctctaaaacatgaatgctttgttacagacccaagctgtccatttctgtgatgggttttgaataaagtattccctgttttaaatgnaaaaatataaaaactggagactagttctcc

SEQ ID NO: 698538 - DNA, 1679 bp, Homo sapiens
ggtaccgcgaacggtgcgttacttacctcgactcttagcttgtcggggacggtaaccgggacccggtgtctgctcctgtcgccttcgcctcctaatccctagccactatgcgtgagtgcatctccatccacgttggccaggctggtgtccagattggcaatgcctgctgggagctctactgcctggaacacggcatccagcccgatggccagatgccaagtgacaagaccattgggggaggagatgactccttcaacaccttcttcagtgagacgggcgctggcaagcacgtgccccggggctgtgtttgtagacttggaacccacagtcattgatgaagttcgcactggcacctaccgccagctcttccaccctgagcagctcatcacaggcaaggaagatgctgccaataactatgcccgagggcactacaccattggcaaggagatcattgaccttgtgttggaccgaattcgcaagctggctgaccagtgcaccggtcttcagggcttcttggttttccacagctttggtgggggaactggttctgggttcacctcccctgctcatggaacgtctctcagttgattatggcaagaagtccaagctggagttctccatttacccagcaccccaggtttccacagctgtagttgagccctacaactccatcctcaccacccacaccaccctggagcactctgattgtgccttcatggtagacaatgaggccatctatgacatctgtcgtagaaacctcgatattgagcgtccaacctatactaacctgaataggttaataggtcaaattgtgtcctccatcactgcttccctgagatttgatggagccctgaatgttgacctgacagaattccagaccaacctggtgccctactccccgcatccacttccctctggccacatatgcccctgtcatctctgctgagaaagcctaccatgaacagctttctgtagcagagatcaccaatgcttgctttgagccagccaaccagatggtgaaatgtgaccctcgccatggtaaatacatggcttgctgcctgttgtaccgtggtgacgtggttcccaaagatgtcaatgctgccattgccaccatcaaaaccaagcgcagcatccagtttgtggattggtgccccactggcttcaaggttggcatcaactaccagcctcccactgtggtgcctggtggagacctggccaaggtacagagagctgtgtgcatgctgagcaacaccacagccattgctgaggcctgggctcgcctggaccacaagtttgacctgatgtatgccaaacgtgcctttgttcactggtacgttggggaggggatggaggaaggtgagttttcagaggcccgtgaggacatggctgcccttgagaaggattatgaggaggttggtgtggattctgttgaaggagagggtgaggaagaaggagaggaatactaaagttaaaacgtcacaaaggtgctgcttttacagggaagcttattctgttttaaacattgaaaagttgtggtctgatcagttaatttgtatgtagcagtgtatgctctcatatacaattactgacctatgctctaaaacatgaatgctttgttacagacccaagctgtccatttctgtgatgggttttgaataaagtattccctgttttaaatg

SEQ ID NO: 698539 - DNA, 458 bp, Homo sapiens
ttttacctgttttagagtttcccacgtctgcggcgcggggtgttccctggactgcacctgctctgaagaggcgctgtgaactctgcatgctttctgacggcctggccagcacgaggtatcctcatgcgcagcccggagtccagccgtggccagtgtgggtgagaaccttgtcatgggcatcctatgatcagacaggtgggtcgcattttcatgctcctctcctctctgtggcagctggatgaaggacagatgtcttcctgaaatgcctcctggccccagtcatccctcgtggtgtatcctgcaggcccaggataggaaagaaagaaccagagctctcttaatctgctcccaggctgacttcagttcaccacaaggtctctgattgctggctcagtgccaggcctgtgctgggtgccagggactcagatatgagtcagactgaccaggcccccacgttc

SEQ ID NO: 698540 - DNA, 241 bp, Homo sapiens
gagtggctggggctacaggcacacagcaccatgcccagctagtttcggtatttttactacagatggagtttagccatgttgcccgggcttgcattcttattttgaagtaagtctttgaaatccagtgtgtattttagacttaatagcacatctcatttaggactaagccacatttccaatgctcagtagccaaaaggggatattagctaccatattagacaatgcatctctaaggggtgag

SEQ ID NO: 698541 - DNA, 723 bp, Homo sapiens
gcgtagagccgcgcgggaagcggccaggagtaccgcgcgggaagtcgggacgaggagtcgctactggcgtgcgctatctgctagctctggtctcaagttctgactcatcatctatttcatcgtgtattgcgacctgatgtgtctggcctgagttgtggtcctgtgggtcatgtatgcggaggtttgatgcggcagattagtatcaggacccttgtataagtgcctttgctgggtgccattccatggattctagatcctcctggtcgtcctcctgtgcatggtctcgttcatggtgcttgtcgttgagtggtgtgtgcggtgagaaccttgctgatgattaattccagtaatttatgtaaatatttgtgatcattgctcgatcatgtggctcattgtgtgagcgtgagtgggtgttgatggttgcggaagcaagtatccagttggacctatgatgatagataaccatgtacgagggagggaattgaagaaatactatgatagatcagtatgtatgaataataggatctatggactttgttcaggaactataggtccaagtgctaggggcgaggtgagtgaagtaggaagattggtagccgaagaatcggtgacaagaattgttatgacgcatggaagtgtggctggaggggtggcctgatgggtgggtgcataaggtaacaggataaagatgtgacgacatgtgtggctacagatgtgattaaa

SEQ ID NO: 698542 - DNA, 1055 bp, Homo sapiens
cttggtcgcttccctgcgccaaagtgagcagtagccaagcatgatcagtggctggcgagtcatattacaaaaccgagggcgatgaagaagcagagtgaagaacaagaacgagaaccttgcaagcaagctggcagaactataaatattcacggcacagacgatagctttgactttttatctgcgtctgatgccatccaaggacatatgattatgacatcatcacgagcatgaacgactgacgcttgaacaccattattgaacactgcagcaataccaagattggtaataccaacaacgatgctagctacaatcaagggtcacagaatccagtaacagccaggttgaactccgaggaaatcctcctttgagacctgcctgagaattggcttcccgttacattgagcattaaccccggaagggaaaataaggaaccgaagacaaacttctccaagactgaagaacttataataaaaagcagacctaagttatgtaaccggcttcattataaacaaagggggaaggcgccttggcgccaaccttaaaacttccgccaacgtcgaattggaccaaagaaaagcctagcaaaacatttccccttacggaaaggccctttgttggaagccccgaacggcattctgataacaaacgtggccgtgcccaaaggacaaaagggagggtgataaacctcgatacacaacgacagaaccgggcattgcgacgaccaccccagaagggcaaacccaacctttgcacattggggacgaccccccccaagccgggaagcggaactttcccctttggcaaacccatttaaacaccaattcccgaaaccggtttcgccaagcgcgcttgggcaaaaagcgcatttgtccacttgggaggaatggcagctgcatattcccttttgtgcttagggagcgccaacaacagcccccattttcccattactagccacacgacagattagggcaaacctatggacgcattaccccccaaaagaaacagtctgtaatcccatacaacgcggcgaaacattgggaaaagaggaatttccg

SEQ ID NO: 698543 - DNA, 298 bp, Homo sapiens
cgaggatgagttgctacctacgggcagtcttatgccatcgtagactggactgtgctcgcttgctgagcctggctgggcagtgcgtgtggactgcatgctgaccacctcgcgtcttcagatgactcgcccgccggtgaccacgactacgctctgccggtgggaaagcagaagcaggacctgctggaagaggacgactcgtgcgggcggagtctgtctccatgtggacaaggagtcaggtgtcggtggagttctgctcggcgtgcgcccggaaggcgtcgtcttctcttaaaatgtaggg

SEQ ID NO: 698544 - DNA, 1319 bp, Homo sapiens
gactagttctaatcacctgtgggctccacctgcctgcacctttagtcagcacctttagccagcacctgcgccagaccccagcaatggcgaaccatgcgcccttcgaaacggatatcagcaccctgacccgcttcgtcatggagcagggcaggaaggctcagggcacgggggagttgacccagctgctgaattcgctctgcaccgcgatcaaagccatctcgtctgcggtgcgccaggcgggcatcgcacagctctatggtatcgctggctcaaccaatgtgactggggatcaagtaagaagctggacatactttccaatgacctggtgatcaatatgctgaagtcgtcctacgctacctgtgttcttgtgtctgaagaaaacacaaatgccatcataatcgaacctgagaagaggggcaaatatgttgtctgtttcgatccccttgatggctcatccaacattgactgccttgtgtccatcggaaccatttttggcatttacagaaagaaaagtactgatgagccttctgagaaggatgctctgcagcccggccgggacctggtggcagccgggtatgcgctctatggcagtgccaccatgttggtccttgccatggattgtggtgtcaactgcttcatgctggacccgtccattggagaattcattatggtggacagggacgtgaagatgaagaagaaaggtaacatctacagccttaatgagggttatgccaaggatttgaccctgccatcaatgagtatctccagaggaaaaagttccctccggatggttcagccccctatggtgcccggtatgtggggtccatggtggctgatattcaccgcactctggtatatggagggatctttttataccccgccaacaagaaaagcccaagtggaaagctgcggctgctgtatgagtgcaaccccatagcttatgtcatggagaaggccggtgggctcgccaccacgggggacaaagatatattagacatcgttcccaccgagatccaccagaaggcaccagtcgtcatggggtcctctgaagatgtgcaggagttcctggagatctacaggaagcacaaagccaagtgaaggccggccttgcccctgccccagagcagagctcaagtgacgctactccattctgcatgttgtacattcctagaaacaaacctaacagcgtggatagtttcacagcttaatgctttgcaatgctcaaggtcacttcatcctcatgctataatgccactgtatcaggtaatatatattttgagtaggtgaaggagaaataaacacatctttcctttataaat

SEQ ID NO: 698545 - DNA, 340 bp, Homo sapiens
cctcacttcgcaaaccaaacgtcaacggaactgcgtttatgaaatacagctggatcgcacttgtcttactgctttgtgcctgcacgagcggccccaaccaccaggagcaactggtagagaagcgcttatgggaatatcagttgctcactcacctcaaccacttcaagtcctaccctgaagacgctcgcctgcaaaggctgaccggcatggtcagagtggcctttgtcgtcgacgccaaaggcaacctgatacgccacaaaatcgtcagccacacaggctcggatctttcgtcggggcagtgggtcgacgcggccggaatttagtagtagtaggcggccgc

SEQ ID NO: 698546 - DNA, 592 bp, Homo sapiens
  misc_feature (91)..(91): n is a, c, g, or t
  misc_feature (104)..(104): n is a, c, g, or t
  misc_feature (128)..(128): n is a, c, g, or t
  misc_feature (201)..(201): n is a, c, g, or t
  misc_feature (361)..(361): n is a, c, g, or t
  misc_feature (377)..(377): n is a, c, g, or t
  misc_feature (423)..(423): n is a, c, g, or t
  misc_feature (440)..(440): n is a, c, g, or t
  misc_feature (479)..(479): n is a, c, g, or t
  misc_feature (558)..(558): n is a, c, g, or t
  misc_feature (579)..(579): n is a, c, g, or t
aatttcgcggccgcgttcgaacaacggctgcgagaaagacgacaaaaaggggcttttcttcgccaaggcgtccttcgttggaaattgacantcgtcttttaaanccctgcgttggcaaatcccttgancgcaaccgcccgttgaatgccccaagggaaagaacagggcgaacctggaaattccaactaacttccttaaagnatcatccaactaattggatgattatccgaaaatgtttcattgtgggaagcagaacaatgtgggctccaagcagatgcagcagattccgcatgttccctttcgcgggaaaggctgtggtgctgatgggcaagaacaccatgatgcgcaaggccatcccganggcactggaaaacaanccagctctggagaaactgctgcttcaatccgggggaaatgtgggcnttgtgttcaccaaggangacttcactgagatcagggacatgttgctgggccataangtgccaactgctgcccgtgctggtgccattgccccatgtgaagtcaatgtgccagcccagatggtcttcggggcccgangaacttccttttttccaggcnttaagtattccct

SEQ ID NO: 698547 - DNA, 248 bp, Homo sapiens
gcaggattccacacgtaacgcattcacccactcccaggtaacaaaagccttcactacatctcaagttgggggacaaaaaacgggggaagggagtgtgcacgaaggctcatcattcaaaataaaacacaatacaaaagtattaaggcgaagattaaaacaattttgcattacataatttacacgaaagcaatgctatcacctcccctgtgtgaacttgggagaggactgggccattctccttagaggaa

SEQ ID NO: 698548 - DNA, 160 bp, Homo sapiens
  misc_feature (71)..(71): n is a, c, g, or t
ccaaggtgggaggatcacttgaggtcaggagtttcagactggcctgggcaacgtaaaaaattaaaaaaatngccaggcatggacatggtagtgcatacctgtggtgttagccactcaagaggctgagacaggatgattgcttgagcccaggaggatgagg

SEQ ID NO: 698549 - DNA, 492 bp, Homo sapiens
gtacactttcatctttcaatgtgagaatcagagtggttggtattctatagtagtcattttacccaagtttactacttaaaattagcccaggaagatcagttgagcctcagaggtcatggctgcagtgagctatgattgtgccactgcactccagtctgggtgacagagtgagaccttatctaaaacataataataaaagtagcctctaggccacatgcagtgtctcatacctgtaatcctagctctttgggaggttgaggtggtggattgtttgaggccaggagtttgagaccagtctgggcaatatagcaataccccatctctacaaaaaataaatttgctgggcatggtggtgtgcacctgtagtcccagaaacttgggaggctgagatgggggagatcacttgagtctaggagtttgaggctgcagtgagctctgattgtgccactacactccagccagggtgacagagtgagacccaatctccactaa

SEQ ID NO: 698550 - DNA, 829 bp, Homo sapiens
gggaaaaggtcccgcgagagctgagcagtgcaagatgtgtgacttcacactgataaaccagaccgcagtagattcaacggagagccttccacgctgtttgaccgagaccagggtgatggacaagaatcctgttaacagaccaagtgtgggagactgtgactgaagggccctgtggtccaagaatccactagccaaacgctcgatgatgctcatatggctcctggggaaaccctcgaagagtgatagacgcattgaacttcgtgaacacggttagctgggacatttgcagtcacgtgtatccctgaccacaattggctgtccagcaacatggttgggctcaaagtaaacaggaaggcatcgccagggtccatcccttaattgacgtgcacttgacattggttcggcataggggaagctgtccgagtggtggtatttggctcgcacagggaaaacgcgtaaaactttgggtcaacactgttaccatttgtgagttgacttgtgaaacattcccggggcactttgttttcgtgatggttcagactaccttgcaggttggacgcaacagacttgagccacgcagtgacaacggaacacgctcagtaggaaattgcctgggttgggcgcaagggggccgcccttgtaagggaaaccaaggcagaatgaggggtaggtaacttcgagacggtaattgcaaacgaaggccgtccggtcccagaaacttggacttgactgtacaaacttgggccaatggtagcagaacccatctacaccctagtggttcatccaccgcgtgaacaaggtttcaagaatgtgacccttattcccccat

SEQ ID NO: 698551 - DNA, 260 bp, Homo sapiens
  misc_feature (66)..(66): n is a, c, g, or t
cgctctcgaggtcgtcctggttggcaaggatggatacaacaggattgagtatgagccgggcacgcnggtatgggccgtcttttccatatatccacctggagacatgtgacggagccagtcgtctcagtacaaggcaacagtggagctaggaaaccagccacataagggataaggctgcgacccgagacaacctactcaaagaagtccctccaccggctctgttgtgcggctcggcactgcgagctgctgcaatcccgagt

SEQ ID NO: 698552 - DNA, 309 bp, Homo sapiens
  misc_feature (1)..(1): n is a, c, g, or t
ngataaatccaatccaacaactataggctgggaaataaaaggtcattccttatatttaagggaaatcccttctaaaaaaaccccctaatcagaactgtgatgctctaattagaaacaactcattgggccaactatttgctgctcaaagtttcttatttcttaaatgaaaaaaactcatcagttatattcatgtgatcgcggctaaaaagccagtaccttttgttcaaatgtggcttcatttgaaatttctcagattttccatgggactaattatgaatacccaattataaattaaaaactcttaaagag

SEQ ID NO: 698553 - DNA, 308 bp, Homo sapiens
  misc_feature (3)..(3): n is a, c, g, or t
  misc_feature (63)..(63): n is a, c, g, or t
  misc_feature (139)..(139): n is a, c, g, or t
  misc_feature (142)..(142): n is a, c, g, or t
  misc_feature (145)..(145): n is a, c, g, or t
  misc_feature (147)..(147): n is a, c, g, or t
  misc_feature (162)..(162): n is a, c, g, or t
  misc_feature (164)..(164): n is a, c, g, or t
  misc_feature (167)..(167): n is a, c, g, or t
  misc_feature (169)..(169): n is a, c, g, or t
  misc_feature (185)..(185): n is a, c, g, or t
  misc_feature (189)..(189): n is a, c, g, or t
  misc_feature (194)..(194): n is a, c, g, or t
  misc_feature (197)..(197): n is a, c, g, or t
  misc_feature (207)..(207): n is a, c, g, or t
  misc_feature (209)..(209): n is a, c, g, or t
  misc_feature (216)..(216): n is a, c, g, or t
  misc_feature (220)..(220): n is a, c, g, or t
  misc_feature (233)..(235): n is a, c, g, or t
  misc_feature (237)..(237): n is a, c, g, or t
  misc_feature (308)..(308): n is a, c, g, or t
agnaaccagatgtaacctaacccaacagcatctgaattggcagaggttcagtgggctggagtnttgtgctcctcccccacaccaagtttttataatacgaaatgccacaagaaaaagaacttcggtactgtttcctcancanatnanaaaaactgaacctantnatnanaacaaccacacaacanaatnaaaanctncactaactantncagaatntaantaaagaagaagcnnntntgaataactcgttttttctagagcccttataaataaaatcccccagtcagtgtttgcattatcagctagan

SEQ ID NO: 698554 - DNA, 122 bp, Homo sapiens
cggcacgaggacagagtctggccctgtcacccaggctgcagtctcagaaataaataaataaataaataaaaagacaatgagtattgtgttctgggagggtcacaagaataaaaataatgata

SEQ ID NO: 698555 - DNA, 315 bp, Homo sapiens
cgggagaacttgggggcctgggaacaagagcttgtttctaccaatgtgtctaaatcccaaaaccaacctgcaaccaagtctcaacttttaaaaatcggattttgaccaacaaagcaacatcttaagatgtacaagcataagtggtttaccatacactaaacatagctttaattgctggctactgctgtactgctcagatccaactccaagaacaaaaatgaaaactacccaaataatgcaagtggtagtactgtctttaggtttcacaggtattcttctgtacttatctacaaagtcaaaaagtataaacaccta

SEQ ID NO: 698556 - DNA, 107 bp, Homo sapiens
gtataaggttccccagcttagtaaggcaaggtttttatgcattttttagcctctagtgcaaccacctgttgtttgtacagtattttcaaattgtaggtttccaaacc

SEQ ID NO: 698557 - DNA, 112 bp, Homo sapiens
  misc_feature (93)..(93): n is a, c, g, or t
ggtcccccagctggaaaacaggtgggtcatactggagacagccaagagctgagtatataaaggagagggaatgtgcaggaacagaggcgtctncctgggatggggctatcaa

SEQ ID NO: 698558 - DNA, 332 bp, Homo sapiens
tcggcacccttcaacatctcatttcttcttcttgagtacaacagattcttcatcagtgccaacgtgaagtcccactctgattcaacttggcaggagacttagatagactcaaagcagatttaaaactgaagttagatcctgttgttgactcatcaaagcggaaaagattttttctcacagggctacttgccaatggagaagcatgtactgagctactactgacactatcatccaaagcatcttcccttaggtcatagttatcccattctaatgtgggcccagtgttttcagcattgggttttattgttgtgtctgaggcaccggcccacatt

SEQ ID NO: 698559 - DNA, 383 bp, Homo sapiens
aggtgcagacaggaagtagaatacattggtgagtataaagaggggggcagacataggaagccctcatgagtgcagggccgccacttgtccagagtggccacgactggggatattcttgaccccacaggcatcagggatgagccgcttttcagccaccatgtcttcaaattcatcagcatagaacttggtgaagccccactactttgagatgtggatcttctggcgggcaggaaacttgaacttgggcctgggccagggcctcaatcacatagctccttgttctgcagcttggtgcggatggacatgataacttggcccaaatgtgaaccctggccacagtgccctggggctttccaaaggcacctcgcatgcctgtttggagg

SEQ ID NO: 698560 - DNA, 188 bp, Homo sapiens
cttttccccggggcaaaaaaaaaaaaaaaaaaccaaaagggagataaatcccctctgtgagtttgttttattggcccctttttccccacctgtcttccaagtattatttttcctgttaaaaaattttttaaaaatgtgaaatgtaatgtttttccacccccaatatgaaatattttttttaaggaata

SEQ ID NO: 698561 - DNA, 185 bp, Homo sapiens
gagcctggacaggctttccagatggctgcggcggtcggtcggtgaggctttcccggctgtggtttggctgcgggcggattgggtcgtccgcggttttctcaggtagaagaagaaaggtgccacttttttttgaagacagactcgcttagtcgccagccacttaagctgagtgcattgtgatttcc

SEQ ID NO: 698562 - DNA, 398 bp, Homo sapiens
tcgagactcactttgcctgccgtgatatggtcacttgtggagtcagtggagttcctatcattttggcactgatgctgttttctcttgtctgcatttgaaacagtcactggtaataatatggttgttgaaaatgtgatcacctttatctaaagtgggagaagatacatacacagtatggcaaatggataaaatcattgtggcatcaactacttttaaagtagaaaagctatccattttatacaatcactgatacagtctatgtcaaaaaaccaacagaccattattcctcttgaagttagtttgattttatctttgtatggttgtctacaatttgttttcctgtaaatgcagatcgttaaaatctaaaggatagaatgcttacctataacagaacatta

SEQ ID NO: 698563 - DNA, 215 bp, Homo sapiens
ttgatctagagtatcccgaagcgcaggatgggttcagaggatccgtgggtatggagttggggtcgaaggccaggggatgtggttgcgatagtggtccagccactcacgccccgaagcaggtgtcatagggcgagatggggtgtggttggtgctcggcacgggtgctgtgcttggacttggggatctcacgaggctgtcgacgtcaggtaacggtc

SEQ ID NO: 698564 - DNA, 356 bp, Homo sapiens
  misc_feature (98)..(98): n is a, c, g, or t
  misc_feature (100)..(100): n is a, c, g, or t
acagataaatgaaagattaagagaattcgttactagccagaaacacctttaatagaaataataaaggaaattcttggctgcatgttgtggcttacgcncntgtatcccaacactttggaggctgaggcgggcagatcacggaggtcaggagttcaagaccagcctggccaacatggtgaaaccccgtctctacctaaaatacaaaaattagctgagcatggtgccacacgcctgtaatcccagctactcaggaggctgaggcaggagaattgcttgaacccgggaggcggagattgccgtgagccgagatcgcgccactgtgctccagcctgggcaacagagcaagacttcatctc

SEQ ID NO: 698565 - DNA, 214 bp, Homo sapiens
caactcctatactagcacgaaaacgggatcaaacaaacaccataggaaatcactcccatatccgataaaatcaccttccaccctatactacacaatcaaagacgccctcggatatacttctcttccttctctccttcatgacattaacactattctcacaagaactcctaggagaaccagacaattataccctagccaaacccttaaacacccc

SEQ ID NO: 698566 - DNA, 384 bp, Homo sapiens
aaaagaaaaaagatggatgcatgatcacacatgacacgtccagctccatgtcacatgtcactccccagcctcagacctatcctttgcatcctctctccacccttcttctgaccccttgtcctgcttggctccctgctaatgtgcccatgcctcgccttctcttcctacctccccctcctgccccatccccctgttccttgtctctcctgagtctgggagttggaactacccaggtcacagcaaggcttgtaggaagaagagtaccatggggatcccaggaggctaaggcccagccaagctctgtgctttggacatggagactagcggttgtctttctgggtttgcaaactttgtgaaatgagcatcgtctgctctgtatccttc

SEQ ID NO: 698567 - DNA, 182 bp, Homo sapiens
gggacgtatctgatcgtatgattcgggtggcatgtggttaacatctggactgggacgtgattcctacgggcgtagtacggcgtccggtttcgtgcacgactaggacgtggagtggagctagggctgcggtcatgcaggggactcatgaagtagatcgagtaggagtcgtgtgagcggtggga

SEQ ID NO: 698568 - DNA, 125 bp, Homo sapiens
gtaatcccagctacttgggaggttgaggtaggagaattgctttagccccggaggcagaagttgcagttagtcgagatctcgccacttaacttcagcctgggtgagaacaaaactctgtctcaaaa

SEQ ID NO: 698569 - DNA, 440 bp, Homo sapiens
  misc_feature (5)..(5): n is a, c, g, or t
  misc_feature (27)..(27): n is a, c, g, or t
  misc_feature (73)..(73): n is a, c, g, or t
aaatnggcaacgaagaaggcctgctgnaaggggctaccctggcccaggaaaagaatttgccaaaacggcaagnaagcaacttaccgcccaatgaaaggtcctcccaagcggaaactgcgctgccctacctgaaagctgcggaactggcaagtggtggcggctcttcacccaaggtgcgtgctaagaagggcctcctgagtagctgggactacgggtgcacaccaccatacatacctggctaattgtttgtatattttgtagaggtgtggtctcaccatgtcgcccaggttggtcacaaactcttgggctccagcaatcctcctacctcagcctcccaaagtgctggaattacaggcatgagccactgtgcccggccctttttgatttttagtagagacaaggtctcactatcttgcccaggctgaccttcctggccttta

SEQ ID NO: 698570 - DNA, 245 bp, Homo sapiens
acatcccttgaatacttttgaaatgaaaaaatagccataaattccaaaatgcccctagggcgagaaacacttcttccgtgagtatcctcagcagtcccaaataccctcagccaagctgcccagacttgttttcctttcctcacagtgatgacccagtccttgggagttcttcaagttctgggaattgttaagcaccatgtgaccatcaccatgtttcagaccagtgaggatgtcgagaaagggag

SEQ ID NO: 698571 - DNA, 282 bp, Homo sapiens
tcctgttccatctgtctctagtggtgtttacccgctagtggcactacacattcatcctaattgcagacggtgcaatgcaccgccgacttggcgtgatggacggcacacctatactctgcctttttactgctagactacaattgcgggtgtgcactttaaccttagactccggcaagttgccaccgtgcttgtgtgccatgttctttatccaccccgattatagcgcatcgttactgcctgactgggctaacctgtacgcttcatcaaaaagttgtgtcatca

SEQ ID NO: 698572 - DNA, 349 bp, Homo sapiens
tattctgtggaccctgaatgtgtgatatatagccaaacaactggtttgttttgtttcattttgagacagggtctcgctttgtcgccgagattggagtgcagtagtgcgaacacagctcaccacagccttgacttcctgtgctcaaatgattctcctgcctcatcccctcatcctgtgtaactgggatcacaggaggatgccaccatgcctagctaatttttttgattttttggtagagacacgatttcactttgttgcccgggccggtctcgaatttctgggctcatgcaatcctgccttggcctcccaaggtgctgggattacaggcatgagtcactgtgcctgacca

SEQ ID NO: 698573 - DNA, 1793 bp, Homo sapiens
  misc_feature (804)..(804): n is a, c, g, or t
  misc_feature (1068)..(1068): n is a, c, g, or t
  misc_feature (1350)..(1350): n is a, c, g, or t
ttgtgtgatggtgcctgagtttgcagtggtgtgtgttatgcgcgttgtgtctaatgcgtaaaggtggggttgctgcgatacactgcggatcgggtgttgctcactgtgttgtggtgttcgtaacgctcgtgtgtgggctttcgcctcgcctgggggggcgctggtgtgtttgtgtaacgtgcggttgcgtttgcgtcgggcaaattgtggtcgttatcgtttttaaccgtttcgtttggctaggtatgtcgccgcgccctgttcgtttatgacttaccaggcagctactgtgattttttttgtctgcctcgcgtggttatcaaacaattatcaacgtgagtatgtttaaaataggaagaggggtttttaaaaaaaaattacaaaagggggcgtctcggcgcgctcgattttttttgctcgccccccccccttggtgttgtcccacccgatagcttatcactctctgtttgtgtcttttctcccgccgcctttttttgggggctcccctcgtcctgtgtgcccccgccgtgcgaaacaagacacatggttgttgacgtcgtcgtctccgccgcgtggtgttgtcatcctgtgtagcccgtgttggacccaacaatggggttggtgcgcatcaaaatctgccacgactgttggtgtccgctttgatattatgggagaacgcccctctgtttattgacatatgggcggtctccccaacacacgagcggggggttttcaccacgaccgtggtggttgtcttgtgtgacgagtctgtgtgtggggcggcccgacgcgttggtaagatgngtgtgggagcctccctcgtctcctcccgtcttgtaataggagtgcgtcgcggcgtgggcaactgtattacaccccacgcgcctcagtgtttgcgtctgtgtgtgaggagtcgccctccttctcttgtgggggcccgtctcttttaaaacagggtttatgtgttaaatttgcgtcccctcctcccgctggttgtcccttctatcacggcagtgctccccccacaccggggggttcttcttttgtagcttccttcccccatcatcncctcctgcgtccgctcttgtatgaagaagattcttctctcgtgttttgtggagcgcgagcacacaccctcgtgtggtgcgcacgatgtagtccccctccatccctctctctcgtgggcgcacgatgaataacacacgcgctattatagggcgctttcgcggccaccgcgtctcacaaatgggcgcgatatcttctctctcatttatgtgtcccacactgtggagtgcccacactatacactctgtgtcccctcacctgcgcgtaccacacacgtgtatcacnccctctcggggagttatacacaccgctgcgcctcacttctcgctcatcttttctgtagaggatggcccacacattggcacaccacacataagggggtgttaccgagccctcgcgcagattttgtgagatccacggagacactcccccgcgattggggccacccccccttcttataaaggcttctgctcttgtgttccaccgcgtttaaagtgcctcacacgctgatttctgaggttctcacgccccgcgtggtaatcccgcgtctgggtttcttaatttaccttcacaattctccttcccctgttatcgacaatggaccacacaaggaaaatatatgcgcccatccttctcccacagccgcccttctccccctacaaatgagatattcatttctccacttatgtatatataccccccccccccccagaacacgggttttttta

SEQ ID NO: 698574 - DNA, 390 bp, Homo sapiens
gtgcaaacaattaatttccctcgggggccccggggaaaaaagttccttgggattgccccccccccttcccaaaaaccccaaataatgaactccttccttgaaaatttgctagtcccatggaaacaagtggggggggaactaaaccctctttcctcaggtgagggcaacttttgcagggggcccccgcctttttaaattataagtaaaaaaaaaaagtcctttttttcagggttgaacaagttgggttttgctcaggcctgggcaagcccccaatttttttctttaaccccgggccctttttaaatccaaagggttttcaaaggtgtttttaaatgtgaattaagttaaattaaattttaatctaaagtaaaaaaatagttctggaaatta

SEQ ID NO: 698575 - DNA, 797 bp, Homo sapiens
cttgcacctcaataggatgtgtttgcaccccacgccctctaaaaaacacatgtgatgcttgttagaaaccaaccacacaccacacaaccagccgtcttgttattacaaaacaaccaatgggcgtaccacttcctctttagtgaaatttcctcaacatacaaattattcctctgctatgaaggttttcatatgattgacagtccacgctccctcttttgtttttcataaaaaataccacacgccttcctctcaatggtggtgttttccaaacccaagaaaacccccagcctttattggattccgaccacctcgctttgagtaagaaatccccctctttttgttcccaacaaacttctgtttgatccaaataaagcccgaagttccccctctcgtccctattcctctctcgctaaggaaaatcaatactcactccctctgttctatcagccctagtccctccccccctctacgttccaatattgcacccctacccaaggaaccaaatcttttgtatgtgcgagggcgggtgatcaatacaaaaaaaagacaaccacgatattcttttgattatttatgcccgcaataatgcgagaatctccctccttcccatcaccctcctccacccacaatctcttttacgtcgggttcgctcctcctcccccctccttcctatcctcctcccctcccgagtgaattttcatcgtcagacagtgaggatccaccctccagagagaagaacaatacaagagatcgctccctctcccttgtggtcacaaaacaagaataaatagaactca

SEQ ID NO: 698576 - DNA, 329 bp, Homo sapiens
tttttttgaaaaacccccccctttaggttaacccacccgctcaaaggggttttaaaaggttttttttttccgccccatggatgtaaaataatatgttattacaccttcccaccctgaaacacccccggttgggggggtttgttttttgttttggtcaccagggtctaaaggagcttttaaaacccacaatttcttcttttaaaaatttttttaatgggggggggataaaaaaattccgcttaattcccccacctttttttggggggggaaaattttttccccaaatttggaagggggggttttccccccaaaaaaatggattccgggga

SEQ ID NO: 698577 - DNA, 120 bp, Homo sapiens
acaactccaggaatttgaactcggcaagccaccacagcttggatagccgtgtagccgattacctctctagatcgtcctctctgggcaggcatctctgaaaaaaggcagcagttccagtca

SEQ ID NO: 698578 - DNA, 594 bp, Homo sapiens
  misc_feature (522)..(522): n is a, c, g, or t
tgagctcggtaccgaatccggctctctgggaggctgaggtaggtggacattcaagcccaggagtttgagaccaacctgggcaacatggtgatatcctatctctacaaaaagatagaaaaattagctgggcgtggctgaggtgtgaggattgcttgggcctgggaagtgaaggctgcagtgagctgagagcatgccactgcactccagcctaggtgacccagtgagaccttgtctcaaaaaaaaaaaaaaaaatggtacggtataaagcaagtgtagttgccagaatatcgtcctattctctggatctatagagaaatttttataaacatttatactgggggtaaacttctctaacatagaaaatggtcacaaacacactttatggtagtttaaatggagtccataagaaagaggctgtgctgaagagtcagggaacgggcttagggaaaactcaaaaatgttgagttcagagttgactggtgatggagatatggacaatgatttagggaagagaagaactgntcttacagctgaggaatagcatgaggagagactgtaattgggatttagctggaccagaaagccggagggatc

SEQ ID NO: 698579 - DNA, 774 bp, Homo sapiens
  misc_feature (536)..(536): n is a, c, g, or t
ctttaccaaggtccaaagaaagatgcccataggagatcacacccttgcccccgttgatccccgctgaataacaagtctactccagatctaacctggtgtgccacgacatttgtgcgattgtagcactcttgattgttatatatttacctcaagttcttgaatggacgcacgaaaagagggactcctctctccactccgtgctataggtctctatgttatgtgctagttttacttctatttctctgtgtccagtcagccacagggtccggctccctgcaggaatacggggtacaacgtaaggtgttgtgtggcaagaaagcaactgactgatgaggggtaagatggaaccaggtatagccactccgggcagttgtcacccattcagaacttctttccgcagctgacagaaatgttcaggtatacctgtatgacgcttgttcatgcagagcctgtaggaagtggggctaaagtggcattcagtgatcctgtgctgtagacttttctttcttttcttaagccagaatcctcaggatgtncccgaatagctagccactggtatttagtggtggtttaataatatgatcgaaagtaacgatgcgagaagaaataacgcgaagaggaacccagatgcctgttatcttcagttttagaaatagcactttgagtaatttctgcgtaatccataaggaacttttgatgccggcaggaactgtgttagaactctggctgaacatttcatctcctgtgagtcagaagggctttatttctcccctg

SEQ ID NO: 698580 - DNA, 244 bp, Homo sapiens
tttttttttttgggggggggggggggccccaacagggggtttttttttgatttttgtttttgggggttttttggaagaattttacccagaaggggggtgtttggttttgggttcccttccgcccccgggggtttcccctttaaccccggggtttgtggcttggggtgggattttgggccccccctttttggttcccctctttttggtacccggggaatttttggggttttcccctttttagaga

SEQ ID NO: 698581 - DNA, 780 bp, Homo sapiens
  misc_feature (8)..(8): n is a, c, g, or t
  misc_feature (85)..(85): n is a, c, g, or t
  misc_feature (109)..(109): n is a, c, g, or t
  misc_feature (112)..(113): n is a, c, g, or t
  misc_feature (116)..(116): n is a, c, g, or t
  misc_feature (119)..(119): n is a, c, g, or t
  misc_feature (142)..(142): n is a, c, g, or t
  misc_feature (148)..(148): n is a, c, g, or t
  misc_feature (200)..(200): n is a, c, g, or t
  misc_feature (202)..(202): n is a, c, g, or t
  misc_feature (217)..(217): n is a, c, g, or t
  misc_feature (248)..(248): n is a, c, g, or t
  misc_feature (267)..(267): n is a, c, g, or t
  misc_feature (278)..(278): n is a, c, g, or t
  misc_feature (281)..(282): n is a, c, g, or t
  misc_feature (312)..(312): n is a, c, g, or t
  misc_feature (329)..(329): n is a, c, g, or t
  misc_feature (340)..(340): n is a, c, g, or t
  misc_feature (353)..(353): n is a, c, g, or t
  misc_feature (367)..(368): n is a, c, g, or t
  misc_feature (385)..(387): n is a, c, g, or t
  misc_feature (399)..(401): n is a, c, g, or t
  misc_feature (412)..(412): n is a, c, g, or t
  misc_feature (434)..(434): n is a, c, g, or t
  misc_feature (453)..(455): n is a, c, g, or t
  misc_feature (459)..(460): n is a, c, g, or t
  misc_feature (475)..(475): n is a, c, g, or t
  misc_feature (481)..(481): n is a, c, g, or t
  misc_feature (502)..(502): n is a, c, g, or t
  misc_feature (510)..(510): n is a, c, g, or t
  misc_feature (532)..(532): n is a, c, g, or t
  misc_feature (536)..(537): n is a, c, g, or t
  misc_feature (557)..(557): n is a, c, g, or t
  misc_feature (682)..(682): n is a, c, g, or t
gagggagnggctctttcacaactttacaaattatagaaaaatgatttttcctcttctttacagaaatgtcactcccaaatcggancgggccctattatggctaaaaccnggnnggnagnagggagcagagaatacagcaagnagggcnccggctctctgggtggcaagaaggcttttcctacacattaaagcccaggctnantctcaaagacctgtnacccctctgaaggaggctccatccacatggntctgtggcacactggggcnggcctctgtcntgnnggccagttggccacagaagacctgaaagcntggcactcgtggttgcnggccacagtcnaggcagctttgtnagactgagaacagnnggcgagcctatagctcnnntccctttctctnnnacagccagganagaggctgtggacactggccanacagtgcactaggtttagnnntttnnccttttactcagcanagactnttttgttaaacagctattaanaattaatnagaaaacaaacatttggttccntttnngctgttatcagcagttggtnatttttggttaaagagcagttttctcatcttgagttgctcattaagtctgttttttttatcaggcccctgactcctttctttctcatccatggttttttggggaggggggcaagtacagctatangagaaggctgtttgttgatttgagaaaactgttaaaatgttttgcactcacatacaaaggctgatggaattcaaaaatgatcccactgatttttatga

SEQ ID NO: 698582 - DNA, 1045 bp, Homo sapiens
ggacctcccagccccgggccgggcttcccacacagtgccgtgacccgccctactgctgccctgaccctgcacctctcgcaccctgacagccccccaaatgcttggagccacacatcccacccctgaggagcccatgtgatactggatgtgatgctggatgcaattactgccctgacaccttacaagcaactgccgcatcaatgctgggcttcactgcagtggtgattgtgggcctggccatgggcaagctctacgtgcaacgacttcagccagacgaccatttccctgcttcgaggccctacaacctgagcttcaagaacatgtgcaaactcaagcccctcctggagaagtggctcaacgatgcagagactatgtctagtggactcacagccttgcccagccccaaccagctgagcagccccagcctgggtttcgacggcctgcccgtgccggagacgcacgacgaggaccagcatcgagacaaacgtccgcttcgccttacagcaacgagttcttctagcgaaccagaagcctacctcagaggagatcctgctgatcgccgagcacgctgcacctgcccacggaagtcgatccgcgtctaggtctgcaaccggcgccagacggacaaccccctccaccctgcagaggcggcccatgcagccaggccacggaagccggccagctacagccccatatgcgccaccccaaggagcgatgcgtgcgaccttaccgagttcccaagactcacaccagtcttgaccacaccgtacctaccgtatctctcagctcgtggtcatgctctaccagcagcacactcatgaggtataattcagtgtgctgtctcctcaccacatgctctacacgccgacctggcgagctacaggacccaaccgaccgcgggaagccgcaaggatgataccgcccgcgtcacgactcggtatagctccgctcatacctgccccgtcatctcacaccacgcgatttaccccttgggcctccgcgtcagcatcgcgcctcaccctgtttggtaccctgagcaccaccg

SEQ ID NO: 698583 - DNA, 215 bp, Homo sapiens
gtgatctagaggatcccgttaggggtggggtagaaaactaccagttaggaaactatatctgttccctttatttatttagacggaatctcattctgtcgcccaggctggagtgcagtggcgccatctcagctcactgaagcctccaccgcccgggttcaagtgattctcctgcctcagcctccggagtagttaggactacaggcatgcaccacctg

SEQ ID NO: 698584 - DNA, 209 bp, Homo sapiens
tgccgcgttctagaggatccctcaagtacttaagcaataaagggtattataggttcacataactgaaaagtccaggggatattctagcttcaggcacggttggatccagggcacaaacgctgtcatcaggattcaagtctctccatattgtggctctgctttcccctgcactggcttcattctctacatggtaggccctgttactttga

SEQ ID NO: 698585 - DNA, 209 bp, Homo sapiens
  misc_feature (5)..(5): n is a, c, g, or t
  misc_feature (150)..(150): n is a, c, g, or t
ggtcnaccacgcgtccgcggacgcgtgggtgggtgtgtggtacatgtgtgtacatatatgtataatatatatctccagtatatattatatatatctatatcatatttctgtggagggttgccatggcaatcaactgcagtacatatgtanttctttccatcaccctaacctctcctgcgcattcacacaagagtttcttgtaagccatc

SEQ ID NO: 698586 - DNA, 329 bp, Homo sapiens
gtgcaggaaatgctgggctgaggtggggaggccaggctgggaggccatcactagtggcaggcctcgggccagagctctgagcctggggtcctccagagcttaggtgcctatgagaagaggcagccgggaagcagagcagtgggcagctgtgcagccatgggggcctgttgggtctgcgaaggaggaaggggcgtgaggaagcagggccacgttgggagcagggtgaggcctggatggtgctgggaccaggtgatgaggggtgttgggacctcagcgggactgcttggggtgtcgtcggattggaggtgccagggggcatgtgggaagtg

SEQ ID NO: 698587 - DNA, 528 bp, Homo sapiens
gtccgtgctggtggaggggttcctttatgctctgacactcaccttctagaagcctgcattttgaattggtttttctgtctactgcagaatatggacagatctattttccaagcctctgaatatctcaaaacatctttagttgtctacacattcaagagtaatttgatagatataaaattcttggaaccaactgttcgctcaaaatcctgtaaaaggtacagcactaccttcaagaatgtagtgttacaggctgggtgcagtggctcactcctgtaatcccagcactttgggaggctgaggcaggtggatcacctgaggtcaggagtttgggactagcctgggcaacatggtgaaaccccgtctctgctagaaatgcaaaacttagtcgggtgtggtggtgcatgcccgtagtcacagctactccggaggctgaggtgggaggatcgcttggacctgagaggcagaggctgcagcgagctgaggtctcaccactgcactccagctgggtgacagagcgagactgtctca

SEQ ID NO: 698588 - DNA, 160 bp, Homo sapiens
gatggctcacgggaacatagtcaccctcatatgtggaacagtttggatataagctcctaagtgcaatagtcatctcccggtggtttgaaccgaggtgtccatcttccatcctatactgtcttctttctctcagggatttcttgtagcctctggtctccat

SEQ ID NO: 698589 - DNA, 432 bp, Homo sapiens
  misc_feature (292)..(292): n is a, c, g, or t
  misc_feature (305)..(305): n is a, c, g, or t
ttgtgggggttaggaggaagacagataataagttcctttcccaataaattctcactttgggaggatgaggcaggtggatcgcttgagcccaggagattgatactagcttgggtaacacaatgataccccatctctgcaaaaaataaaaaattagctgggcatggtgatgcacacctatagtcccagctactcgggaggctaaggcaggcggatcacttgaacacagacgttgaggctgcagtgagccatgccactgcactccagccttggtgatacaaccatactctgtctnaaaaacaaaacanaacaaaacaaaagaacaacaacaaaaaaacaacactctcaacttaggtgttagcttaacagaacttgtttggtggttatagttcaaattgtgaattattcctcaattgcttcatcaaatatcctctg

SEQ ID NO: 698590 - DNA, 920 bp, Homo sapiens
  misc_feature (1)..(1): n is a, c, g, or t
nacccgcctccagcaaaacagaagtagaaaaaagaaggaaggaggggaaatacacactcccaccgtcccgaggtacaccgttccttggccaaacacatgcgaagcacattcggaagacaggtgacaaacaaaggggtccgcccaaagattgtttcccgcgcccaatgcgcccgcccctctcgaagggatacggcccccgcgccggaaaaggtacccgctgtaaaagggtgactactccggagtagggtaacaaagagcttttaacagcgaaccgtcttcaagacccgcacggcgcttggtaattgtcccccaccgaccggaggcaatttttttcttgtaggcgagatatctatttccctccaagtggtgccgcccccgcgtcccccgcggagaggaaaaaatatatttgctttgtatggctgctcgccgatacaacagacaaaatctcccaagaggccgttgagtgtcttgtacgaaacaaacatcttggaaagccacaggcgagcaacaaacacaccgggggaaataggttgagataacttcgacgcaagcacccagagctattttgagttcgccgtcttcaaaataacaagatatggggtggggccccgcccccctgccgaggcattagtggcgtctcctaatgggggccacgcatcggcactttctataccgggtcttacaagccccactccccaatctaggttagaagtttctggcggacccatctattaatgatgcagaaagtctcagcaactattgccgattacatgatggccacacacacaagaaccataaatgtgctccccgggcgaggcaaaacaagggctggccccccttgttgtaactagccacaacaaacaaggtttcaccaaaccccaaggtcacaccccaaaaaacaccttccacaaccccacatc

SEQ ID NO: 698591 - DNA, 141 bp, Homo sapiens
catactgtatcctgtatcaatcaatacaatttatgatacttctccattttccagatcatgggtggcgctggacaagatcaaaaactcttcataggaaagaacatccttatgaaccatgaaattcaagcttgtattatttga

SEQ ID NO: 698592 - DNA, 326 bp, Homo sapiens
  misc_feature (11)..(11): n is a, c, g, or t
  misc_feature (50)..(50): n is a, c, g, or t
  misc_feature (170)..(170): n is a, c, g, or t
  misc_feature (181)..(181): n is a, c, g, or t
  misc_feature (258)..(258): n is a, c, g, or t
  misc_feature (294)..(294): n is a, c, g, or t
aaaaattaganacaggatgatcagatgttgccgcagttgcatttgtgggnacctacaaaaaagaagccaggagtggaagacagatttgtgtacacccatattcatagcagcattattcacaagagccaaaatgtggaagcaacccaagggttcgtggacagatgaatganaaagcacactncagttccttcatacaatggaagactattcagccttcaaaaggcaggcacttctggccggtgcggtggctcacgcctntaatcgcagcgtcttgggaagaccgaggttggcggntcaccttgaggtcagggaatttcaagaccagc

SEQ ID NO: 698593 - DNA, 188 bp, Homo sapiens
ctggggatttagcgaggtgatgcctgttgggggccagatgccctcctaatttggggggtatgtggctagctggcagtggtttataaggctcacataaaatcctgccgaagaaaaaaacttctgagcctaataaagtaggattatcccgctatcgaaggcctcttttgccagtaatactcccacgtatg

SEQ ID NO: 698594 - DNA, 786 bp, Homo sapiens
atagtcattatgatgcttttaacctgtacttgcatttcaaagcgtatcaagatataaatggagattctaaagtagaaatagatatgtattccatgtgttgtccaaagtactcacttgtctactgtgtgtttcacagacagttgaatatattaaagttagttccatattttctgtttcagagacaaattttggtcaatggaagactgttcttaaaatcaccttttgtcccgaatccaatttttagagtggctagtagtttcttcattgagaagtttgtaagcactccggtcagtaagaatgcccactccaagttttgctgactagtgttcatcagtcaaagccttgaaagcatgctagcaaatgctcgtttgtttgtgtaggtatttgtcgcatagcatgcagttgactccttatctaagtttttcatgggagacttccttcatcacatcttatgtgtgaaatcactttctgtaggtcaaagtatagccaagaagccaattttatcggtgccacagctaaatgtgtaaagctactggtgagtgaccacaaccattatacatgctggttaccaaacataaatgctgaacattccatattattatagttaatgtcttaatccagcttgcaagtgaatggaaaaaaaaataagcttcaaactaggtattctgggaatgatgtaatgctctgaatttagtatgatataaagaaacttttttgtgctaaaaatactttttaaaatcaattttgttgattgtagtaatttctatttgcactgtgcctttcaaa

SEQ ID NO: 698595 - DNA, 266 bp, Homo sapiens
tatttccacaggacctcactgttgacatctttgccagctgcatggccttgacgtacatggcactagcatacgtgctatactctattcggtgctgatcgcgtttccgctgggccccatacgagtgatttcgactcctgggacacagctcaacccacctcctggtttccaccctccttagcgctctgctctttgtaactcttcttggaatgcgctttgaactccatcctctcctctgttcactagcttgcttccatgtgtttcagagt

SEQ ID NO: 698596 - DNA, 398 bp, Homo sapiens
  misc_feature (8)..(10): n is a, c, g, or t
  misc_feature (95)..(95): n is a, c, g, or t
  misc_feature (150)..(150): n is a, c, g, or t
  misc_feature (167)..(167): n is a, c, g, or t
  misc_feature (178)..(178): n is a, c, g, or t
  misc_feature (181)..(181): n is a, c, g, or t
  misc_feature (192)..(193): n is a, c, g, or t
  misc_feature (195)..(195): n is a, c, g, or t
  misc_feature (203)..(203): n is a, c, g, or t
  misc_feature (214)..(214): n is a, c, g, or t
  misc_feature (220)..(220): n is a, c, g, or t
  misc_feature (248)..(248): n is a, c, g, or t
  misc_feature (253)..(253): n is a, c, g, or t
  misc_feature (256)..(256): n is a, c, g, or t
  misc_feature (259)..(259): n is a, c, g, or t
  misc_feature (274)..(276): n is a, c, g, or t
  misc_feature (280)..(280): n is a, c, g, or t
  misc_feature (321)..(321): n is a, c, g, or t
  misc_feature (352)..(352): n is a, c, g, or t
  misc_feature (364)..(364): n is a, c, g, or t
  misc_feature (377)..(377): n is a, c, g, or t
tggatccnnngggctgcaggaattcggcacgaggcggcccggcccagcggcctccacatgggccatggagccttcctgcagcacgtggtgctggncggcctgacgccctcctctgcattctcagcattatgctgctgccggagaccaagngcaagctcctgccccgnaggtgcctccnggnacggggagctnntnctcgccgngccttccctgntgcggnagccaccccctacccgctgtgaccacgncccgntgnttnccacccccaaccctnnncctntgagcgggctttgagtaccctggggggaggctggcccacanagaaaggtggcaagaagatcgggaagacttnagtaggggaggnaggggctgcccanaagtctcagaggcacctcacg

SEQ ID NO: 698597 - DNA, 181 bp, Homo sapiens
ggtatctagaggatccctctatctatcagggacagctagctaaggtgaggtagaacagagaggaaaaggggggtcgaagtatagataagataggaaaagaaagacaagaaagggacgtgaacggataaaagaaaagagaaacaaaaaagggaagaaaaagattttaagttcagtagtcagg

SEQ ID NO: 698598 - DNA, 563 bp, Homo sapiens
  misc_feature (67)..(67): n is a, c, g, or t
  misc_feature (126)..(126): n is a, c, g, or t
  misc_feature (171)..(171): n is a, c, g, or t
  misc_feature (370)..(370): n is a, c, g, or t
  misc_feature (429)..(429): n is a, c, g, or t
  misc_feature (486)..(486): n is a, c, g, or t
  misc_feature (546)..(546): n is a, c, g, or t
  misc_feature (561)..(561): n is a, c, g, or t
acgaactctcgctctgtcaccagtctggagtgcagtggtgcaatctcggctcactgcaacctctgcntcctgggttcaagtgattctcctgcctcagcctcccaagtagcagggactacaggcgcncgccaccacgcccagctaatttttgtgttttttgtagagacggantttcaccgtgttggccaggaaggtctcgatctcttgacctcgtgatccgcccacctcggcctcccaaagtgctgggattacaggcgtgacaactggcgcccggcctgaaggacaaattttcaagtgtgttcccaatttctttctttcttagggagagaaggcagaaatgggaagacaacacaaaacacaaagacgtttntatttaagcaggcgttttcattggaagcattggatgtggtttcagttagggcttcagantctcaaaaagggaaggataatttcagtgagaagtttggagaacacatttatttcctngtacaagggcacaccaaaaaaatttttattcaattactggaacatttaattttctttaantggggaatccttttntt

SEQ ID NO: 698599 - DNA, 121 bp, Homo sapiens
tactatatgactgacagagtagatgatactcttagttttgaaattcgaggataacgtttctggatttaattcatttggcaactggatgtccattgaaggttttagagcaaggggaggaacg

SEQ ID NO: 698600 - DNA, 419 bp, Homo sapiens
  misc_feature (103)..(103): n is a, c, g, or t
  misc_feature (207)..(207): n is a, c, g, or t
  misc_feature (272)..(272): n is a, c, g, or t
ctgcggagtgcatgtctactgaactgctgacatgtactgctgacctgagaaagcagccagactgagcagcagttgacaggacattcaagcgtgtgctggtccngtcactgagctcatcaggctgctgagccatgaagggaacagaatgtgtagacccagaggacccacagtcattgctgagaatgagctcctgggagctgcagccgncattgaggctgcagccaaaaagctagatcagctgaagccccgggccaaacccaaggaggcagatnagtccttcaactttgaggagcagatactagaagctgccaagtccattgcagcagccaccagtgcactggtaaaggctgcgtcggctggccagagagaactagtgggccaagggaaggtgggtgccattccagccattgcactccggg

SEQ ID NO: 698601 - DNA, 216 bp, Homo sapiens
gcgttgcgtcgcttggacgcgatcgcgatgtgatttgtattgatgaatgcgtaatgcatcctgaccaggtcgttgtacgcggggaagaaggccctgacaggtctggtcggaggcgttacggtgaccagttgcagcttgccgagcagcacccctgtcgccgtgagcgtggggtcggtcgcggacttgggggcgtaatgctcggcgctcaaacggaat

SEQ ID NO: 698602 - DNA, 134 bp, Homo sapiens
caagtgtgatatgtcagagtatctaatgaggaatattccaatgctatgcgtatcaacaattgttccctagtcagttagacgtaagagagaaaagggattttctgacaatccccctcaaacaaaaattaacccac

SEQ ID NO: 698603 - DNA, 426 bp, Homo sapiens
tctaagatgcagacaccctgttgggggctcctgacgtcgctctcacttgttccagaataatcaccttatcgcttttaagattggccaggagaatgagcagaatccggtttctcactgttccccgtacaactggcatgatacaggactatcgtgacaggacacggtaatttggtttcgcgggatctttaccgccccgtgatgcagtacggactgagactggtgcgggactacatatactccatgaggctgtagacatgccattgtataaagcgcagtacaaacttgcaatgtctaaagcagggttgactagcactaaaccatatctggtgtaagcatttaggacggataaatacgctcgttagttcgtctgttgatactatcggtatgactcgatcagtctctgttggcactggcgcagattttgcc

SEQ ID NO: 698604 - DNA, 128 bp, Homo sapiens
gttgaaagacagagaagcgaagacagagacgtggaaaggcagggagagagacacggagagagacgcagaaggacaaaaacgtgagagagacgcagagagacaagagacgttggagagcaccaaagaga

SEQ ID NO: 698605 - DNA, 596 bp, Homo sapiens
gatgtggccaagtgtggtggctcacacctgtaatcccagcatttgggaggctgaggcgggaggatcacctaagtgtaggagttgagggtccagtgagctaagatcatgccactgcactcatgcctgggcaacagagcaagactctcttaattaaaaaaaaaaaaaaaaagctgggccacaggggtttatgcctgtaatcccagcacttggggaggccaaggcgggcagatcacctgaggtcaggagtttcgggacaagcctggccaacatgggcaaaccccggtatgtactggtactaaaattttaaaaatattagccaggcgtgattgggtgcgggctggtagtcccagctactggggaggctggagtcacgagaatagctggaacccatgaggcggaggttgtggtgagccctaaatttaccagccatgggcattccagcctgggacggacagaagcaagaactcttaatctcaaaaagaaagaaagaaattcccaaatatgttgggggagcagtggttggggggcacagaatttgggggcggagaagttacagtggttgaaaaaatttcgagcattggggggggaacacagtg

SEQ ID NO: 698606 - DNA, 326 bp, Homo sapiens
  misc_feature (139)..(139): n is a, c, g, or t
atccctttatgccaacccccggcctggtggggaacccccgtaatcccaacttatggggaccctgaggaaggaagatggcttgaaccctggaattcaaggctgcagagagctctgattggaccactacactctagcctgngcaacagggcaggacccatctcaaaaaaaaggaggaagaagcataaaaagaagtaagcaggccaggcacggtggctcacgcctgtaatcccagtactctgggaggccaaggcgggtggatcgcttgaggtcaggagttcgagaccagcctggccaacatggcgaaacgctgtctttactaaaaatac

SEQ ID NO: 698607 - DNA, 82 bp, Homo sapiens
cactctacatcgactctgctgctcatgggaagaacagaattgctcctgcatgcaataattcaataaaactgtcttgtgagct

SEQ ID NO: 698608 - DNA, 256 bp, Homo sapiens
gggtctccagtggcccaaaaagaagcgggggggtcccgacaattttgagaagcaccaaatccaaggtaccggggggaggggctcggggcggcacgggacaaaggagggcgcgggaaaaggggcgtggggcttcgccaaacgggggacaaagagactcgcgggaatagcgccccccccggcggtggaaccggcccgggaaccccggggcggccacagggaggccgaacacggagaggggggaggccatccaagaggg

SEQ ID NO: 698609 - DNA, 273 bp, Homo sapiens
tgagtgcagacacgagacaccttcaactccatcatgaagtgtgactgtggacatccgccaagacctgtacgccaacacggtgcttgtcggtgcggcaccaccatgtatccgggcattgctagactggatgcagaaggagatcacctgccctggcgcccagcaacatgaagatcaagatcatcgcacccccagagcgcaagtactcggtgtggatcggtggctccatcctggcctcactgtccacctaccagcagatgtagattaacaggcagg

SEQ ID NO: 698610 - DNA, 177 bp, Homo sapiens
  misc_feature (75)..(75): n is a, c, g, or t
  misc_feature (100)..(100): n is a, c, g, or t
  misc_feature (114)..(114): n is a, c, g, or t
  misc_feature (154)..(154): n is a, c, g, or t
aaaacaaggcaggagaaaaggaataaaggaacaaaaaggatgagactttttttttttaaaaggcaaacctaaatntagtcacatggatacttatattaantgttaacactccantgaaaaggcagattgtcagactatataagaaaagcaaggnccaagtaatgctctctaccaaag

SEQ ID NO: 698611 - DNA, 311 bp, Homo sapiens
gtatccctttgatagcgagaaagtttaagagagcagtggccgtgtgagtttgagagtcttttagagaggggctgcaaagaagaaggtcgtccacatattgaagatgactgggagacaggtttaaggaagtgaggtttcgggctagagcttgtccaaagaaatgagggctatccctgaagccctgagggaggacagtccatgtgagttgttgtgactggagggtgtcagggtcagtccaggtgaaagcaaataggttttgggaatcagggtgtagggaaatggtaaagaaggcatcctccatggtgctgagg

SEQ ID NO: 698612 - DNA, 614 bp, Homo sapiens
taagtctgtggcctatagggtactgtgtcgactctactaagcctttaatggggtcgtgcattggttatgtcttactctttgtttacccaggtttgttacattgctaggcttctagttagttccactttcgaattattgtcgctctaaaagtctcttaccaatgttttgaaacttggacacataataaatgtactgaaatatgcataggcatatctccagctacaatatggcccttagaaactgatagcgatcgtgtggatcagccatgtgagcatgaatggagcagagagccttgggtgaaatggcttgccacttgccatgtgggcataatggccactagggaaagtaagttgcactcagtgtatagtatcttcactatataaaaggaggccttgctcgcatttcaagtttgcataagtaccctgtgtactgtgagacaatatgtgtggagacctactgtacagtagtgtttgcccctcttcaatctggggcacattcatcttaaatcttatagtatttatccacccctaaccccagactgagatactgctcccaggggcctaggtagctgccagtccgtgattttaattattaactccttgagggttaacaag

SEQ ID NO: 698613 - DNA, 120 bp, Homo sapiens
gagaagctcatcaagcgccacgcaggcatttgcacaagctctgcagcaacctggccatgcagcaggttctctgccctggcataaggctgacttacattgcgagttactggcagtgctcag

SEQ ID NO: 698614 - DNA, 595 bp, Homo sapiens
agtggcctcatcggcgggtggctccctggcagcccaggggcaggtgaagtttctggaccctcaaacccccggaactggcctctcccctacttctccaggtatggcggtctccccccttcacagccagttttccccaaaaagtcacctctacggtccatctggtctcccgccccccacgggctcctcagcctgggggcagacttcctctctccatacccaaatggaaactggctcccaccagggtcaccggcggcctccagggccttcctccccagggatgctgggccagcactcctggctgacctcagcgggcattgggtttcttggctccttcttccgtgaaaggctcctccccaaagctttaggacaacacttacgggttttcccctcctttctcagatgggcacctatttcaacccggccgccccagcctcccaaataggggacctttgcagggcggtgtcttcagcctccttcccctcggtgcctcaccattcccaagccaccatcacactccacactcaccgtctcctttcctgacccagatggggacatgtaacaggccctgcccagtgtgcatccctccagaaatccg

SEQ ID NO: 698615 - DNA, 650 bp, Homo sapiens
tcataaaggttggaaggggtcttccccacccacttgtagactttcggcccccccactggggggggaccaccaaaaagaacccccccccgtgtttaaaatttttgagaggggttgtgggagagacacacacagagagttctctggggagacacttctttggtggggcccacacagtggtgtatataagagaagagacacacatgtccccccccacaacctgtgcgcacggggcccccacaggagaagaagcctttttaaaagcgccctgagaggtctcttcggagaaggtgtggagaggaagcgccaaaccccccctgcggtggccccactggtcggggccggtccacccccgagaggcccggccaccaacgcccgtattttcggagatcccttttttttttttttaaatttttataactttggtgtttcaccttcaatgctctgaatactgaataaccactgagatgacctgaatagtttagtccacgaatttttaccacgaggaatacactctaatttttatcacttaatttggggtttgaaaaatttttttttacaccttctaatttctttatttctcacaagcagataatttttctgtgtgaaaaagttttctttttttaatttaaggtttaaaattccttttccca

SEQ ID NO: 698616 - DNA, 254 bp, Homo sapiens
tacgtaaaaaggggccattaatcatgcctaccacaaatgtatatcatttaactgcatgtcattacaatgattatatacataaaagataaatgaggtccttataactacagagtctactatacttcacactcttcctcatgccctctcccactttcttatatgttactgaaagtgagtttcttacatcaagtgtaaatccattgcacagttaattctaaggcctttagatgtccctaattcctcttctttcggag

SEQ ID NO: 698617 - DNA, 130 bp, Homo sapiens
gcacagtaccaaaggatagtgcagaccagtgtgagagacaactgtatgtaattatcgaaatccactttagacactggcatgatttataccaacaaagactgctacacaccgacattacactgagaccact

SEQ ID NO: 698618 - DNA, 118 bp, Homo sapiens
taccggcccgcatagcagtgggccaaatgcatcagctattctctgtgctgctaggtgtaatagattaaacttcaatgcacctgggctcttttcatgggctttgcctgtcacctttaca

SEQ ID NO: 698619 - DNA, 376 bp, Homo sapiens
ctggggactcctccttagagaggcaggcatacctattcaaattccctcccgagtgtctggtggcctcccctccaggcccagaggtcctgaggacaggaaccagtttctcatctctgaatccagcacccagctgggggcccgggcatgggactcaggactgtttgctgactgaatgaatgactggacgggccaggccccaagtgaatgcacagagtggcagcggccggactgaacatctctgggaccagggccaggaggagtgagggccagacctgggggggccttggcaccattgggagtggacccctctgccgatggggaggagatggagagcccgaggggcggaggtttgttcaaaagtccccgcaagcgagtg

SEQ ID NO: 698620 - DNA, 199 bp, Homo sapiens
ccagactgagctggagctggaatctgtcttcctattgactctacttgtttaaaagcggctgcccattacattcctcagctgtccttgcaggtaggtgtacatgtgactgagtgttgaccagggagatgaagccacctcagaggaaggcagcatgcgtcctttatcatccctgcatcttgctgctgagactgtggatata

SEQ ID NO: 698621 - DNA, 698 bp, Homo sapiens
  misc_feature (105)..(105): n is a, c, g, or t
  misc_feature (125)..(125): n is a, c, g, or t
  misc_feature (471)..(471): n is a, c, g, or t
  misc_feature (698)..(698): n is a, c, g, or t
agcaagcatgtctgaatttcttggaatcttgaagatggggaagtagaacagcaaagaacatatagtagtgggcacaatcgtctggatttccatagtgataccggnttacctctccggccacaagnaaatgggaagtagattgtggaagaatcaaaagggatcctggaatgggctaagcacaaaaaacccattacaccaacattggaagagagttttctggatggttccatggaagggaaagaaaagcaaggtggatgaaaactctgggaaatcttccatggtcatggaaggcactggggtttaattggctgaacaaatcaaaatgaaattcactggcctggtatgtgctggtttggtatgaacaaattatgtgaacacgataaattaaagaaagaaatttatggttcgaaacctctcctggctctcaatctagatcaggcatggcatgtaactttaacttctctattagancactatatggttccataggaattaaggctggttaaccaagagctccgcgggaaatggcaggcaaacaatttacacaacagggggggaattctcggcttccccctgtgcaaacggaaggaaattaactggaaggacacacaaatgggggacacggccaatgggatttcagtggaaatttaacttccaaaggagggccttggggccggttgtggtctccggggggtttn

SEQ ID NO: 698622 - DNA, 234 bp, Homo sapiens
agggaacctatgtaaaactgactgataagcctcaagttcccaaaatttgttttgttatatttattttatttattttttgagacagaaacttgctctgtcgcccaggctggagtgcagtggcatgatctcagatcactgcaacctcgcctccctggggcaggagagtcacttgaacccaggaggcctcggaggctgcagtgagccaagatcacgccactccactctagcctgggc

SEQ ID NO: 698623 - DNA, 252 bp, Homo sapiens
gtgtccctatactcatttagtgacacagagattgtacaattaccttcttaatgacttcattgactcactggatcacacatgatgcatagttgtcacaatttacctgtacttatagtatccaaaattcctcttgttattggtctctagttctattccattgtggtcgcttgctgctgcctgatggtattcaacttttttaatgttttaagacttgtgacctaacatatggtctatccttggcggtaaaagctt

SEQ ID NO: 698624 - DNA, 428 bp, Homo sapiens
  misc_feature (137)..(137): n is a, c, g, or t
gaatcgatcaccatgaaaaatcaagtgcaagtgcatggcgagcacgcccaactggcggtggatgcactgttaatcgcttccggtcgtcaaaccgctaccgcttcgatcataccagaaaatgccggtatcgcagtaancgagcgcggggcaaatatcgttgacaagcgattacataccaccgcagacaatatttgagcgatgggagatgttaccggcgggatgcaaattacttacatatcactggatgaataccgcatagtacgtgatgagatactgggagaaggcaaacgtagtactgatgatcggaaaaatgtgccttattccgtatttatgacaccgcccctgtacagggttggtatgacagaagaacaagccagagagagtggtgctgatattcaggtggtgacattgcctgtagctgcaattcc

SEQ ID NO: 698625 - DNA, 345 bp, Homo sapiens
tgagtactgctaacattctccaagtgttttcattggtctgagcgccgctcccatgtttcctatctctcagctgtccctcgtgccctgtgtgagattgttcatcgctaagagggggctcagatggtgcggcctgagtgtgcggccggcggcatttgggatacacccgtagggtgggcggggtgtgtcccaggcctaattccatctttccaccatgacagagatgcccttgtgaggctggcctccttggcgcctgtccccacggcccccgcagcgtgagccacgatgctccccataccccatccattcccgatacaccttacttactgtgtgttggcccttatcgag

SEQ ID NO: 698626 - DNA, 103 bp, Homo sapiens
caagctctttggggagcaaggaacagatctgttctacatagaatctccaatcagagctgacggtggctcaggagacaggctacaggatggcgatcagagagaa

SEQ ID NO: 698627 - DNA, 821 bp, Homo sapiens
  misc_feature (148)..(148): n is a, c, g, or t
  misc_feature (342)..(343): n is a, c, g, or t
gcggcacgaggctcagtttctctaccttgtttggagggtagtcagaggcctttatgtcactcatattcctgtggatgctctttgggagggaggggcccatccagctgggctgtgtgtgtgtgtgtgtgtgtgtgtgtgtgtgtgtgtnatatcacgcagtgtattataatgtggggaagatcaactagtgattgtagaagctgtaggtcatactgcagtggagaggaagactatctattactattactaaactattgctgagagtctccgctggagagggagttgttattagacacgctcctctaccagaggggggctggaagctccagttatcaccaagtnnaccaatgttattatttccgttgctccgtaggattatgtatgttatatcatcagtatgtatgtatctatcatgataccgaggtgtggccatcagcagtctacttgtgtggcaagtgggaccacacaatctagcatactatattatataacggcgtctgatgctagttggtatgtacaccgtcgacaaagacgttgcgtctatctctattactatcgtggcgtggaggcccctgttgaaagtgacacgccgttgtagtgctgtgcagtgaatcagacccgtgtaataggagtgaatctccactgcacttaacagtgaagagatacaaagagaatctagagagagatctatatttgaatgagataaaagctggcatagaaacagtgatttagatgttatgaggttggtggcagagattccacagataagagcacctaaaaatgagatagagaaggggaggaggcccccctgtagaccatag

SEQ ID NO: 698628 - DNA, 706 bp, Homo sapiens
gggactaaaaatcctaaaaaaaaaatttataaaaaaaaaaaaaaataaaaaaaaaaaaaagaaaaaaaaaaaaaaaaaaaaaaaaaaaaaaaaaaaaaaaaaaaaaaaaaggaaaaaaaaaaaaaaaaaaaaaaaaagaagggaaataaaaaaaaaaataaaaaaaaaaaaaaatcttgtggcccccagggtccaatggaatttagactccagaaatttttttgaatccgccagaatttgagtcctattggcgaatatcccctattagggggtggaatgaaattagacggcccgtggttaaaaaatctttgaacggggaaaaccctggtggttcccaatttaattcttttatacccaaaaccctttttgccaagtggggaaataggtgtagggggccaccccgtttccattttcaaaagttgggccatgtcgaatggccacttggaactggaacggataaatttttgtacaaatccgggaaactttgataaaacctgcctttttaaaccctggccaaaagggaaaaccctctttaatgaaaaaaatccccgcgaaggggtacaatgtcctcctgtgggacaaagggtctccttataagcaaggtggtccaaacttaaaggggacaaacacccttttaaggctaaggccccttaatgggcattttccctataagttttttgggtccaggggcgccttattattgccc

SEQ ID NO: 698629 - DNA, 341 bp, Homo sapiens
  misc_feature (2)..(2): n is a, c, g, or t
  misc_feature (145)..(146): n is a, c, g, or t
  misc_feature (161)..(163): n is a, c, g, or t
gngtccgataaatactagtcacaataagggtattttttttgggggtggagtaagggggagactgatgctagtccttgttgtattttgttgggctgtccttgtgtattttcaccccagcctgtagtcctcctcacttcaaggggannaaaaaagggagcaannnacccaaggagagggggttggggctgggctctggaggctcctccccttctttctcttccttccgcctcccccgtgcccccagcatgctcttgtcactgtctctgaatgggtatttgcctggctttgttgcttctctatctgtatttagctgcagtgatcctttagcatggttggctcag

SEQ ID NO: 698630 - DNA, 514 bp, Homo sapiens
ttctagaggatcctatcagtttacacaaaaaactagctgggcgtggtggcgggtgccgtgtagtccctagctacttggtgaagctaaggcaggtagaatgcttgaactcgtgcgaggtggaggatgcagtgagccgagattgccccactgcactccagcctgggcgacacagcaagactccatctcaaagaaaaaaaaaaagaaatcctgttctttttcttttaaacagctgtgttctagaaaacaaaataccctccaatacttgaagcatttatgtccccagctaatactacatgcagactactagaccgttagaacaaaaacacaccttacctaatagggctctctgactcaaagggtactgtaataaatactgctgtatataagctgtgctttaccgataagtgggatgctataagagtggaagcctttagttgactattatcttgtccatcgtcagaatcaatacctctaatggtatctgtagacaggtgtgatgctaatactcccagat

SEQ ID NO: 698631 - DNA, 257 bp, Homo sapiens
  misc_feature (105)..(105): n is a, c, g, or t
  misc_feature (107)..(107): n is a, c, g, or t
  misc_feature (131)..(131): n is a, c, g, or t
  misc_feature (150)..(150): n is a, c, g, or t
  misc_feature (208)..(208): n is a, c, g, or t
  misc_feature (235)..(235): n is a, c, g, or t
tgcacatggcctcccgtggggccagtgggaagctcaaaccacgcaggtcccacctgcacacatgagctcttctctcaccctatgacctatccccaagaaatcccngnttacccacctccatcctcacacangccactcaagacttttctngaccagcctgcgtgctggagtgctgcacccagaagcactcataatgggtaacaggtgnatgcatgccctcctggggtgtgtcacntcatccatctcaacatgcgcac

SEQ ID NO: 698632 - DNA, 330 bp, Homo sapiens
tcatgccccaacaaaggcaattgaatgctaagtctggatagacttcagcagtggtattgttaaaaccactggattgactgggcttactacagggccaatgtggccaagctggttggtgatattttgaaaaaagtataatgcctaaattctggctaggataatccaccctggtggaccaggaggaaaggaggatgtaaagctgttagtttgtgttggatcagtcaggatccaggtataaacagtggagaataggaacataattcctttgaccaataccattatacttgaatgagtctcccaaaaccagcggcaaaaagaccgtcggccccc

SEQ ID NO: 698633 - DNA, 289 bp, Homo sapiens
tcggcccactgcaggttgtctcctttttcttaaattagagatgaaaaaggagacattacaactgataccatagaaattcaaaagattagtggctactataagcaatatatgccaataagttggaaaatctagaagaaatggacatttctagacacatacaacctaccaagattgaaccatgaagaaatccaaaatctgagcagaccagtaacaaacaacaagattaaagccgtaataaaaagtctcccaataaagaaaagcccaggacctgagtacaacctgccggtgg

SEQ ID NO: 698634 - DNA, 213 bp, Homo sapiens
tgttgctggagagtctggaggaacgttgtgtacagtctcacgcacgtggacccacgatgacggtgacggggcgcgtggcgctggtggacttggggagggtggatcacggcctgggctgtgagtgctgtgtctggctcccgaggctggccgagtagaaaggaacatcttgggaggctgtgtcttgatgcatcgtgggtcagactgttgccgtgg

SEQ ID NO: 698635 - DNA, 3873 bp, Homo sapiens
gcgggctgaggcgtacgggtcgcacgcagcgccatgcgaggcccccctgcctggccgctgcggctgctcgagccaccgagccctgccgagccaggtcggctcctgccggtagcctgcgtgtgggccgcggccagccgcgttcccgggtccctatcgccgttcactggcctgaggccggcgcggctatggggcgcggggcccgcgctgctctggggcgttggagccgcgcgccgctggaggagcggctgccggggcgggggtccgggcgcctcgcggggcgtcctgggcctcgcgcggctcctggggctgtgggctcgcggccccggcagctgcaggtgcggggcttttgccgggccaggcgctcctcggctcccgcgcgcccggttcccgggcggtcccgcagccgctgcctgggcaggggacgaggcctggcggcgcgggccggcggcgcctcccggggacaaggggcggctgcgccccgcagcggccggactcccggaggcccggaagctcctggggctggcgtaccctgagcgccggaggctggcagctgcggttggatttctcacgatgtccagtgttatctccatgtctgcccctttcttcctggggaagatcattgatgtcatctataccaaccccactgtggactacagcgacaacctgacccgcctctgcctagggctcagtgccgtgtttctgtgtggtgctgccgccaatgccattcgtgtctacctcatgcaaacttcaggtcagcgcattgtgaataggctgagaacttcattattctcctccattctgaggcaggaggttgctttctttgacaagactcgcacaggagaattgattaaccgcctctcatcagacactgcactcctggggcgctcagtgactgaaaacctctcagatgggctcagggccggggcccaggcttccgtaggcatcagtatgatgttttttgtctcacctaatctggccacctttgttttgagcgtggtgcctccagtgtcaatcattgctgtaatttatgggcgatatctacggaaactgaccaaagtcactcaggattccctggcacaagccactcagctagctgaggaacgtattggaaatgtaagaactgttcgagcttttgggaaagaaatgactgaaatcgagaaatatgccagcaaagtggaccatgtaatgcagttagcaaggaaagaggcattcgcccgggctggtttctttggagcaactgggctctccggaaacctgatcgtgctttctgtcctgtacaaaggagggctgctgatgggcagtgcccacatgaccgtgggtgaactctcttccttcctaatgtatgctttctgggttggaataagcattggaggtctgagctctttctactcggagctgatgaaaggactgggtgcaggggggcgcctctgggagctcctggagagagagcccaagctgccttttaacgagggggtcatcttaaatgagaaaagcttccagggtgctttggagtttaagaacgtgcattttgcctatccagctcgcccagaggtgcccatatttcaggatttcagcctttccattccgtcaggatctgtcacggcactggttggcccaagtggttctggcaaatcaacagtgctttcactcctgctgaggttgtacgaccctgcttctggaactattagtcttgatggccatgacatccgtcagctaaacccagtgtggctgagatccaaaattgggacagtgagtcaggaacccattttgttttcttgctctattgctgagaacattgcttatggtgctgatgacccttcctctgtgaccgctgaggaaatccagagagggctgaagggccaagcagtggccttcatccggaatttcccccaagggttcaacactgtggttggagaaaagggtgttctcctctcaggtgggcagaaacagcggattgcgattgcccgtgctctgctaaagaatcccaaaattcttctcctagatgaagcaaccagtgcgctggatgccgaaaatgagtaccttgttcaagaagctctagatcgactgatggatggaagaacggtgttagttattgcccatcgtctgtccaccattaagaatgctaatatggttgctgttcttgaccaaggaaaaattactgaatatggaaaacatgaagagctgctttcaaaaccaaatgggatatacagaaaactaatgaacaaacaaagttttatttcagcataaggaagcaattactggtaaacaatatgagactttaatgcaaaacagtgttgcagaaaaaaaactcagagactatgaaatacataaaccatatatcaagttatttgaaaaatacctatttttttccaaagtgtgtaaaagattgttttgaaacgtacctgttctcaagatctttttattcagagttttaataattgtaactttttaaatgtctatagcactgaagttattttcaggttttgtattttcttttcttgtggaatattttaattaatatagcatggcaatattttaattaatatagcatggcacctcattttcttttgcctgctgttaaagattgaagctattgtcaaatgacaactttaaaaaggcaattataaataaaaagcctgattattttaggccagtttaccaatcactgtgtaattcttctggtagtattctacctacttttaagtctaattttacagatagaataatggaaattgaaaatttaaccctttattccgataatctcatgaagcaaacctaactatttaacatcagctggaaagaagggaacatttatattgcccatctcctgtgtcttcaaaggtgtgagagctgaggaatatgtgttcctatgggaactatgtttgaatatgtgcagttttcaacattttggcacatgaaagcctgacaagtttttaaaagggcagaagctttattttttgaacaggaaaacatgttttttaaattcacatgtttgtatgagtacttttgcgaagcaaggcatgaactgctaggtattattaagaatgaatgatttttgcatttaagttgtttgaaggcatgtattttgaaaaatatctgttacaaatttataatttcaagacaaattgaatcttattttataatacttttggaatttcattaataaggctaaaatttgaggaatataactaattttcagccttaagacatttaagtttggaagtccttgctattcaacagaataacaagaaaacttcagaatgtatcactctcctgaaaagaagatattaataagcccttttatttatggttatagttttatttatagtctcaaaattcctaaagcaatgctacaaccattgaatttgccatattttgtatcagtgctgttaatttgctgttgcctcaagaaaaagtgctttttctccatggatgaggctagaccctaagaagtaattaagtcaatgtaaatcaaatggaagttttcccatgaactaagcatttattagttccctgattagactggaagaagaaaccactatttcatgaaaagcatggaatattatattttattgttcataattaatgaataaaattgatatgaatgaatatagtgttctttgaattagtaaacagtacatctgtgacaatcatttttaacaagctctacttgtgttctttataaagtgtgattttcagaaagcaaacaacacaattacaaggttgaatctgaggaaaataatccttgtgccatagaagtatttacgaaattgcatttcattgttatgttttattttctgatacatgatgttcaattttatctttaggtaatattttatatcatagattaaaatttatagtgaactttaaaaa

SEQ ID NO: 698636 - DNA, 2907 bp, Homo sapiens
gcgggctgaggcgtacgggtcgcacgcagcgccatgcgaggcccccctgcctggccgctgcggctgctcgagccaccgagccctgccgagccaggtcggctcctgccggtagcctgcgtgtgggccgcggccagccgcgttcccgggtccctatcgccgttcactggcctgaggccggcgcggctatggggcgcggggcccgcgctgctctggggcgttggagccgcgcgccgctggaggagcggctgccggggcgggggtccgggcgcctcgcggggcgtcctgggcctcgcgcggctcctggggctgtgggctcgcggccccggcagctgcaggtgcggggcttttgccgggccaggcgctcctcggctcccgcgcgcccggttcccgggcggtcccgcagccgctgcctgggcaggggacgaggcctggcggcgcgggccggcggcgcctcccggggacaaggggcggctgcgccccgcagcggccggactcccggaggcccggaagctcctggggctggcgtaccctgagcgccggaggctggcagctgcggttggatttctcacgatgtccagtgttatctccatgtctgcccctttcttcctggggaagatcattgatgtcatctataccaaccccactgtggactacagcgacaacctgacccgcctctgcctagggctcagtgccgtgtttctgtgtggtgctgccgccaatgccattcgtgtctacctcatgcaaacttcaggtcagcgcattgtgaataggctgagaacttcattattctcctccattctgaggcaggaggttgctttctttgacaagactcgcacaggagaattgattaaccgcctctcatcagacactgcactcctggggcgctcagtgactgaaaacctctcagatgggctcagggccggggcccaggcttccgtaggcatcagtatgatgttttttgtctcacctaatctggccacctttgttttgagcgtggtgcctccagtgtcaatcattgctgtaatttatgggcgatatctacggaaactgaccaaagtcactcaggattccctggcacaagccactcagctagctgaggaacgtattggaaatgtaagaactgttcgagcttttgggaaagaaatgactgaaatcgagaaatatgccagcaaagtggaccatgtaatgcagttagcaaggaaagaggcattcgcccgggctggtttctttggagcaactgggctctccggaaacctgatcgtgctttctgtcctgtacaaaggagggctgctgatgggcagtgcccacatgaccgtgggtgaactctcttccttcctaatgtatgctttctgggttggaataagcattggaggtctgagctctttctactcggagctgatgaaaggactgggtgcaggggggcgcctctgggagctcctggagagagagcccaagctgccttttaacgagggggtcatcttaaatgagaaaagcttccagggtgctttggagtttaagaacgtgcattttgcctatccagctcgcccagaggtgcccatatttcaggatttcagcctttccattccgtcaggatctgtcacggcactggttggcccaagtggttctggcaaatcaacagtgctttcactcctgctgaggttgtacgaccctgcttctggaactattagtcttgatggccatgacatccgtcagctaaacccagtgtggctgagatccaaaattgggacagtgagtcaggaacccattttgttttcttgctctattgctgagaacattgcttatggtgctgatgacccttcctctgtgaccgctgaggaaatccagagagggctgaagggccaagcagtggccttcatccggaatttcccccaagggttcaacactgtggttggagaaaagggtgttctcctctcaggtgggcagaaacagcggattgcgattgcccgtgctctgctaaagaatcccaaaattcttctcctagatgaagcaaccagtgcgctggatgccgaaaatgagtaccttgttcaagaagctctagatcgactgatggatggaagaacggtgttagttattgcccatcgtctgtccaccattaagaatgctaatatggttgctgttcttgaccaaggaaaaattactgaatatggaaaacatgaagagctgctttcaaaaccaaatgggatatacagaaaactaatgaacaaacaaagttttatttcagcataaggaagcaattactggtaaacaatatgagactttaatgcaaaacagtgttgcagaaaaaaaactcagagactatgaaatacataaaccatatatcaagttatttgaaaaatacctatttttttccaaagtgtgtaaaagattgttttgaaacgtacctgttctcaagatctttttattcagagttttaataattgtaactttttaaatgtctatagcactgaagttattttcaggttttgtattttcttttcttgtggaatattttaattaatatagcatggcaatattttaattaatatagcatggcacctcattttcttttgcctgctgttaaagattgaagctattgtcaaatgacaactttaaaaaggcaattataaataaaaagcctgattattttaggccagtttaccaatcactgtgtaattcttctggtagtattctacctacttttaagtctaattttacagatagaataatggaaattgaaaatttaaccctttattccgataatctcatgaagcaaacctaactatttaacatcagctggaaagaagggaacatttatattgcccatctcctgtgtcttcaaaggtgtgagagcaatttgggttaatgattttctgcagctgctcaaaacagttggtactaacgtcatcg

SEQ ID NO: 698637 - DNA, 268 bp, Homo sapiens
gctttattattatgggttgtttgaaggggaaaaaagtttttgtagattggggacccccatgtaagaggtattaggctcccccccttcccctccaattattactcctctaaatgaatactccttaaaagtgatggggcttctgtttgttttttgaattgctaatccaaataaatatttgcctatacctttttatcctcattttaattttaccctgaaaggtccttaaattatgctgataacctttgaataaattgtgatcccaaagcta

SEQ ID NO: 698638 - DNA, 136 bp, Homo sapiens
gggagaggttgctcgagaacaccgggcagagtgaacggatcacgaagcggttgccggattcgagcgtcatgaaatccacgccgcgatcgagcgggcgcagccagcgattgagcaggtcgcgcggctcgacgcgctg

SEQ ID NO: 698639 - DNA, 243 bp, Homo sapiens
  misc_feature (19)..(19): n is a, c, g, or t
  misc_feature (46)..(46): n is a, c, g, or t
  misc_feature (131)..(131): n is a, c, g, or t
gaactcctgacctcaactnatccgtccacctcaggctcccaaaatnttgggattacaggctggcctgtagtcaccgagtctggccccccaccacccctgtttgtttttttaagacagagtctggctctgtnactcaggctggagtgcagtggcacaatctcacctcacagcaacctctgcctcctgggttcaagcaactctcctgcctctggcctcccaaagtgctgggattacaggcgttag

SEQ ID NO: 698640 - DNA, 661 bp, Homo sapiens
taaatgtttggccacacagagagaaagagggctagggggtgggaaaggacagatctcacagacgtgagcaggacaggaagggacttcagaaggggagctgaaaagagggtagggagagacaggctcaggagaggggaggggtggggattgtggaaagccatttcttagagtttcaggcagtgttctgggtcagcctcaggttcctctttctttaccctcgtccgtgccgggcactttctccttatcagggtgtgtggttctcattcttacagcttctcatatgtgttctcttcttctcagcttgtggcggtgcctcctccccagatcctcgcgagtgggacggcggtgggccgtgggtggccttgtggccagccacgcactctcctctgtggcacgacacggggcgtgtgtggtgcgcaccgccacgacacgcccaggtgtgaacaggccagcccgggcgcaccactctcgcgccgtggtgttagagagcggccctctctctctcttggtgcgcgtggggcgcccttcttctcgagcccctctggggggaggggccaccgggcgagagctttttactcgaggggggggaaaggccccttttaggggtggggccctttttgctggggctctctccagccgtgttcgccgcggcgcccttctt

SEQ ID NO: 698641 - DNA, 115 bp, Homo sapiens
tgcaggatatgcacgcgtacagcacaccgacacctaccattgtaacgtagactaataatagcagccttctgttcttctgagtacgtgctaacgtgcctatgtgtacttatgtgac

SEQ ID NO: 698642 - DNA, 370 bp, Homo sapiens
gcgcgaatccaggtagcaagtcatgagggtgacggagttcgcagttacatggaaggttgagttcagtgcggctaccgttcatactgagttgcgaatagacatatgctgtaccctgttaggggagcctggtgtcagctccagcgaagcaagaattgaggtggtacttcaatttggtccacagtcgggatcaggaggggcatcaggcggcgttgattggtgaagtagactggatacaaactctgctccccatcctcgagatatctgatagagcatttacaaagaggttttcggccaggaagcagggtcagggatgttcacggaagtggctgtgcttggaagatccaggtactgtggctcatctccctcctca

SEQ ID NO: 698643 - DNA, 144 bp, Homo sapiens
tcctactcagcatcccaaacagctggaactacaagctagcactaccacgcctggctaatttttctgtttttagtagagatgggattgcttgagcccaagagttcaagagtagcctgggcaatatagcgaatctcgtctctacta

SEQ ID NO: 698644 - DNA, 289 bp, Homo sapiens
cggatctatgtgctcagaggagcatctgacatcatctagaggcccgtgacaactggtacacacacctaccaatggtgcccctcccacatggagctgtgtgcctgcctgctctccaagagccctcagccaacaagcccctctcccctcgttttcctccttgcctctgtccaccgttttctccgcccgagttcttgcaggctccgtggtgacttggtgcccacgtgactactactgaacaggacaaatcctggtcctatgcttggcatggtaaaatccttgtcccatcttc

SEQ ID NO: 698645 - DNA, 395 bp, Homo sapiens
cacgaggcggcagcatcgactgctgcgcgcgcgattcgacctggaacacgccgatggtgtcggccttgcacagcatctcgtaggtgtcctcgtcgtcctgcggaatgtcctccatgcggcaaggcagttgcggatgcgcgggattcgggttcgggatcatcgccagcgcgcggcggatcgcggtcagcatgccgagtgccagcacatcgaccttcagcaggcccagcgattcgagatcgtccttgtcccactggatcacgctgcgcttctccatcgccgcgttctcgatcggcaccagccgcgacagcttgtcccgcgcgatcacgaagccgccgacatgctgcgacagatggcgcggaaagccgcgcagctgcgtcaccaggctggcccactgg

SEQ ID NO: 698646 - DNA, 114 bp, Homo sapiens
cacagtaggaggtacaaccagaagtactgtagaggagaggccgagttctcaggaagcagcaggcacgtgccaaggtggaagccagctgcaggcaggggaagaaggaggccctta

SEQ ID NO: 698647 - DNA, 134 bp, Homo sapiens
ggcttgctgtaatgtcccaggaacccttttaaaaggggttctgtaatagcatattgtaaatgccctttgcagcagttggaaaaaaaagtgttgtgtgatttgattgaaataaaactaaatgggttgtcctccta

SEQ ID NO: 698648 - DNA, 284 bp, Homo sapiens
ttccacccatttcccctccaaaaggttaataaaggtttgttcctcagcacccccccgcccaacccggggtttccatacggtttgttcacaggccctttttaggccggtggtgaatgctcacttacattgaccgctgcgagggaattgttcggcgagggctgcccattttcaaatcaatgcctgctcagaacaacaaaaagggcctcaaatgtattggtttccccaaaaccattgttagggttttgtgaagcatttttgaacctaataaaaaatgtcaaaagtca

SEQ ID NO: 698649 - DNA, 340 bp, Homo sapiens
accaactatgctgaactccaggttggagtacaatcgcacaatcgcggtcaccgacactctgaagctattctcctgcctcagcctcccaagtagctgggattacaggcatgcgcaccatgcccggtaattgtatttttagtagagacagggtttctccatgttggtcaggcaaatctcaaactcctgacctcaggtaatctgcccgcctaggcctcccaaagtgcttggattacaggcgtttgccaccgtgcccagcctttttatttctttgagacagtcttgctctgtcacccacactggagtgcagtggcacaatctcggctcactgcaacctctgcct

SEQ ID NO: 698650 - DNA, 844 bp, Homo sapiens
  misc_feature (15)..(15): n is a, c, g, or t
  misc_feature (188)..(188): n is a, c, g, or t
  misc_feature (233)..(233): n is a, c, g, or t
  misc_feature (248)..(248): n is a, c, g, or t
  misc_feature (298)..(298): n is a, c, g, or t
  misc_feature (309)..(309): n is a, c, g, or t
  misc_feature (345)..(345): n is a, c, g, or t
  misc_feature (357)..(357): n is a, c, g, or t
  misc_feature (484)..(484): n is a, c, g, or t
  misc_feature (526)..(526): n is a, c, g, or t
  misc_feature (531)..(531): n is a, c, g, or t
  misc_feature (541)..(541): n is a, c, g, or t
  misc_feature (543)..(543): n is a, c, g, or t
  misc_feature (553)..(553): n is a, c, g, or t
  misc_feature (557)..(557): n is a, c, g, or t
  misc_feature (563)..(563): n is a, c, g, or t
  misc_feature (571)..(571): n is a, c, g, or t
  misc_feature (583)..(583): n is a, c, g, or t
  misc_feature (608)..(608): n is a, c, g, or t
  misc_feature (651)..(651): n is a, c, g, or t
  misc_feature (691)..(691): n is a, c, g, or t
  misc_feature (698)..(699): n is a, c, g, or t
  misc_feature (720)..(720): n is a, c, g, or t
  misc_feature (733)..(733): n is a, c, g, or t
  misc_feature (742)..(742): n is a, c, g, or t
  misc_feature (774)..(774): n is a, c, g, or t
  misc_feature (830)..(830): n is a, c, g, or t
ttcgtggtgggtgcnttctgggttttaccacatattttaatgttaaaagttaaattattctttacatgcaagtagtgtgaataattttctccacatgggaacactaattataaaaagatgacatcccacatgggttaagtgtctttttaattgaaaagctaactgtccagttacatttctcccaaaanaccacaaactgggtagtaactgagtctctaggcaatatatttaanactaagaggattaanaataaagaaaaagaaaacaagtcctcagatgcaatgaagggggccctgcnacatacaggcnaatcaatacagtggtactccttgactgcagggggcngggggacatccnagtggctcccctcagaacatttacttcaagaagcctttttccagtttccaactcatgaataaagataatattttgttaattctattccagaaaacttttttgcaagttgttttaaatacaatgccancttttaaaaggtcactaaagttaacggggcaataaacgaggngggcnttgcgttacnanaagggggggngggnattttnggtattgnggggcttgcggntctccgcgggagggttccccttggncatattggcaacagtcttgcatgtaacatcaagcaaacctttnatgtctaagtagtttgcagccagaatgagttcaaaaagtnttccttnntcaactttcaggaattcttgntcccaaacagggntatcatctnttcgcttttctttgttctcatcatcttcaggngggggggggtcatccttgtggtgggtgcacactgaatgaccttttttaatattgcngcattcacatttgg

SEQ ID NO: 698651 - DNA, 156 bp, Homo sapiens
tgcgctcacaggatcagtggaatgggctgaggatccgctttttcctgcagtagatcaaggccactagagcagcaacaatggctgctacagcggtcgcaatgaccacagccacaatgatccccattggtgaagaccagcacgacgaattccacgacg

SEQ ID NO: 698652 - DNA, 923 bp, Homo sapiens
ggtctactacggtcaatgctctgaaatctgtgagagcaatccacagttgcatgcccatcgtcctagaatgaattcccctaaaaatctttgtaatatgccccgtatttaccctatagcactcctctatcccctctagagtcaatatagaattagataatacacatataaagtgttttggggaggggttgtggacctaagtggataattttttgagaccacgtttatttggggacgcgacgactcggtgaggttatacatcattgacttgaggttccaccaatagagtacatctgcggagaacttaggtaggtgtgttaggtcagtcttaacaagaaataaaacgcccatgggaataacgccttgccgtggaagaaaactctgacaataatgatatggagtggatttagaaggggagaagtagctaggggagttcatgatgggacagtcctataaaaaggcccgcacggggggtttctaattaattttaaaccttttcctcagtgctccatgatacttttttttgagactccatatcattgcttattttaacctttttccaattttagagggatttgttactagtcgatcaattagaatgaacctatgcacatttttatgtacacatattcagttatatattgcttcctagttgcattatatgccaatgccattgtacctgggcttgacctaatacttggtcactgactttttaacgcacataggcttgataacaggtggcagtactctactacccgagtgcttccatttcagcactcgaggctgctttgctcatccatgtgcttaaaacggcatagctttgttcgtagaaagattgcacggtgccccacgttaagaagcttcgctccaaacaccctttgaacacgaggtataattttcaccaatatgtcccagccaactttttt

SEQ ID NO: 698653 - DNA, 234 bp, Homo sapiens
ggggggggggggcccccaaaaaaccgaaaaacccccccccccacccccttgttttttttttggggggggtttttcccccgaaaaaaaagggggggttttcttaaaagggggttttaaagccccctttttgggccccccctttttggaaagagggccccgccttttaaaaagccacgtaacaaaaatgttttttgttttttttttccggaaccaaaaaaaaaaattttgggggga

SEQ ID NO: 698654 - DNA, 472 bp, Homo sapiens
taaatacccaaaggaaactactttgatacaggaggacatagaattacatattttactgacaatacattcctgaatatctttacataatagcaatcttaacttgcttttatttgaatagaaaagcctttcgtgcagagtttttttttttttttaacatcaggaaacccttatgaggctaacaatagacttcaagattctgtgaacttcctgaaattttatgcagagtactgtgtgtacgtgcatgtgtacatttttcttgggtgagtggttgtgttttccatcaggaattcatgactcattcgttgagcaaatagttattgggtacctactatatgccaggcgttactctagataatggggttatatacatcaacaaagtagacaacaatccttgccttcatgggatagacgtgtagatggtataaaggtagatatctgttgatagaagatgaatggtagaaaataagtaaaa

SEQ ID NO: 698655 - DNA, 621 bp, Homo sapiens
  misc_feature (26)..(26): n is a, c, g, or t
aaggtcgctgttcaatcccaggttgnagtgcagtggtgtgattatagctcactgcagcctcaacctcccaagctcaaatgatcctcctgcttcaggctcccaagtagcagggactacaggtgtgtgccaccagagctaatttttaaattttttatagagagatgaggtctcgctgtgttgcccagactggtcttgaactcccaatatcaagtgatcctcctgcctcaacctcccaaagtgctgggataataggtgttagccaccatgcctggccttgtctgctttgaaataaatttgtactcaaggctactttgtaataaatttgtacttttagcatcagtgctattgctttggttttaaatcttagaataaaactgtttgaaatttctgtacaaacaaacaaagctgtctgttaactgtggactggaaatttggggcctagcacacatcggcatgctgaaaatggaaaccacagtatatgtgaccattggcaaacatagaccatggtttggagtggagagaggaagggaggcagccatggagaagtttactatagtaccaccttttccctgcttcttggtttcatgtttacaaatgtaattttttggggacatgtaatta

SEQ ID NO: 698656 - DNA, 127 bp, Homo sapiens
actcaactgggcactgagtgagacaacgatctcccaagcaaacagcaacaagccacaactaattacacagacgctatccatcatacaatactatgtcgaacaccgtatgagttcgaccctagaattt

SEQ ID NO: 698657 - DNA, 194 bp, Homo sapiens
gccagactggtcttgaactcctgggctcaagtgatctgcccaccttagcctcccaaagttctgagattacaggtgtaagccaccgcgcccagccaagggataactgatactctattctaaaccattgtcaccagaataaaacagagggctctgcgttccacatcttaaaatatttcctaagaagctgacaatct

SEQ ID NO: 698658 - DNA, 959 bp, Homo sapiens
  misc_feature (48)..(48): n is a, c, g, or t
  misc_feature (63)..(63): n is a, c, g, or t
  misc_feature (72)..(72): n is a, c, g, or t
  misc_feature (74)..(74): n is a, c, g, or t
  misc_feature (82)..(82): n is a, c, g, or t
  misc_feature (100)..(100): n is a, c, g, or t
  misc_feature (148)..(148): n is a, c, g, or t
  misc_feature (218)..(218): n is a, c, g, or t
  misc_feature (345)..(345): n is a, c, g, or t
  misc_feature (422)..(422): n is a, c, g, or t
  misc_feature (458)..(458): n is a, c, g, or t
  misc_feature (571)..(571): n is a, c, g, or t
  misc_feature (596)..(596): n is a, c, g, or t
  misc_feature (608)..(608): n is a, c, g, or t
  misc_feature (892)..(892): n is a, c, g, or t
catcagaggagttacattactcgttcagaaccatttaacaagtgcaanaatggctttgattgnactggtgtnantcatcctnttctaaagcaattgctgnacatttctcaacatgagggtgggcttggtttatctggtgcaaaggccnactaccgtggaggtgaaatccgagaacagaatggagacagtcttgtccatgctgcttttgtagcagaaangtgtgtcgcgggaagtgcagaggcaaatgcatttagtgttcttcagcatgtcctcggtgctgggccacatgtcaagaggggcagcaacaccaccagccatctgcaccaggctgttgccaaggcaacncagcagccatttgatgtttctgcatttaatgccagtcactcagattctggactctttgggatttatactatctcccnaggccacagctgctggagatgttatcaaggcccccnataatcaagtaaaaacaatagctcaaggaaagcctttccaacacagatgtccaagctgccaagaacaagctgaaagctggatacctaatgtcagtggagtcttctgagtgttncctggaagaagtcgggtcccaggcnctagttgctggntcttacatgccaccatccacagtccttcagcagattgattcagtggctaatgctgatatcataaatgcggcaaagaagtttgtttctggccagaagtcaatggcagcaagtggaaatttgggacatacaccttttgttgatgagttgtaatactgatgcacacattacaggagagagctgaacgttctctcagcccagagcagcaaacacatgaaagtcagaagtctctaatatatcatttgtcttttttccagtgaggtaaaataaggcataaatgcaggtantattcccagctgacctaaagtcaataaacattctgtttaagtgttttcttacgttttctcaatgagt

SEQ ID NO: 698659 - DNA, 272 bp, Homo sapiens
  misc_feature (28)..(28): n is a, c, g, or t
atccctgagaatccaaaattccccgggnccacctatcacaccccatcctacaaaaaaaaaaaaaaaaaaaaaaaaaaaaccgttgtggcgggccgcccgtgggcccctgcgaaaagagcttttcaaaaccattgcggttggggcgcgcgcggggccccccagaagggtatcaagtggaaccaggtggctcctagtcggcgtgtgtctcccaagagagagacactcgcgggcccgagtgaaccacgagggccgtgggattctcccacaccaaa

SEQ ID NO: 698660 - DNA, 958 bp, Homo sapiens
  misc_feature (48)..(48): n is a, c, g, or t
  misc_feature (63)..(63): n is a, c, g, or t
  misc_feature (72)..(72): n is a, c, g, or t
  misc_feature (74)..(74): n is a, c, g, or t
  misc_feature (82)..(82): n is a, c, g, or t
  misc_feature (100)..(100): n is a, c, g, or t
  misc_feature (148)..(148): n is a, c, g, or t
  misc_feature (218)..(218): n is a, c, g, or t
  misc_feature (345)..(345): n is a, c, g, or t
  misc_feature (423)..(424): n is a, c, g, or t
  misc_feature (427)..(427): n is a, c, g, or t
  misc_feature (436)..(437): n is a, c, g, or t
  misc_feature (445)..(445): n is a, c, g, or t
  misc_feature (457)..(457): n is a, c, g, or t
  misc_feature (570)..(570): n is a, c, g, or t
  misc_feature (595)..(595): n is a, c, g, or t
  misc_feature (607)..(607): n is a, c, g, or t
  misc_feature (891)..(891): n is a, c, g, or t
catcagaggagttacattactcgttcagaaccatttaacaagtgcaanaatggctttgattgnactggtgtnantcatcctnttctaaagcaattgctgnacatttctcaacatgagggtgggcttggtttatctggtgcaaaggccnactaccgtggaggtgaaatccgagaacagaatggagacagtcttgtccatgctgcttttgtagcagaaangtgtgtcgcgggaagtgcagaggcaaatgcatttagtgttcttcagcatgtcctcggtgctgggccacatgtcaagaggggcagcaacaccaccagccatctgcaccaggctgttgccaaggcaacncagcagccatttgacgcccccgcacccaaccccagccacccagaccccggaccccttggcatccacacccccccccannccnccccccccnnagaccccnccaaggcccccnataatcaagtaaaaacaatagctcaaggaaagcctttccaacacagatgtccaagctgccaagaacaagctgaaagctggatacctaatgtcagtggagtcttctgagtgttncctggaagaagtcgggtcccaggcnctagttgctggntcttacatgccaccatccacagtccttcagcagattgattcagtggctaatgctgatatcataaatgcggcaaagaagtttgtttctggccagaagtcaatggcagcaagtggaaatttgggacatacaccttttgttgatgagttgtaatactgatgcacacattacaggagagagctgaacgttctctcagcccagagcagcaaacacatgaaagtcagaagtctctaatatatcatttgtcttttttccagtgaggtaaaataaggcataaatgcaggtantattcccagctgacctaaagtcaataaacattctgtttaagtgttttcttacgttttctcaatgagt

SEQ ID NO: 698661 - DNA, 523 bp, Homo sapiens
  misc_feature (363)..(363): n is a, c, g, or t
tgaacattggcgttactctctgctatttgagaatcaggggctttaaaatatatcttaatatcttcttcctctttattcaataatttcgggcgtgcacttacacactcataacagccaaatatgaggcacaaaaatgttacaatcagtttgaaagcagcatcaattaatggtagattctattcacattccacaacccagaccaaatttttttcctattacgcagatgtgctgagcactttccagattgcccctgttggccaaaagcagcctgttacatcctggaattaagcacacttaaggtatttgagacaatttattaatgaaaatttcctttgcagatttgacaaatgttggcaatatttntttaaaagttaaatcatattgctttcatgaataaattaaaatataaagtcatggatgcaaacagatgttacatatacacattctgtctctccagatgaagagaacatgcaaaaccatttaataaccaaaatatcaagtaaaattagttcccaaacgggca

SEQ ID NO: 698662 - DNA, 432 bp, Homo sapiens
  misc_feature (393)..(393): n is a, c, g, or t
  misc_feature (429)..(429): n is a, c, g, or t
cttagttatagattaaaagaagttaatcacttatgtctttagatgaatgcacacctacacatagacatagagcttagaaggtatataagctctggaaaactttataatttttaattggcctggtgataatttccaggccttctccctgtaactggttacagaaataaaaactctcttcctccccagttcatctgcatctcgttactgggcctcaagaaatagcagcccaaccttcagtttgacctggggaacaaaacgtgggcaagccagccagggagagaccgggatgggtgctgtgttcagcccaccagtggctttgcggatgagtacagtctttcagggaggggtcccaaggcagctgccccgtgcagatttttcccggggggaccctcnccgagggtctctcccgtgttgcaaaactgtcacgtncct

SEQ ID NO: 698663 - DNA, 279 bp, Homo sapiens
gatctagaggatcccggctacacttgcacaggtctaacctaccagaccggcattaaaattggggggggggtgccgtcggagcagcacccaccctccgagcagtacatgctcagacttcaccagtcaaagcgaactactatactcaatggatccaataactggagcaagggaacaagtcaccccaggaataccagcgcaatcctattctagcgtccatctcaacaatagggttaccgccctcgaggtgggatcaggacatcccgagggtgcagccgctat

SEQ ID NO: 698664 - DNA, 804 bp, Homo sapiens
acagtatatttaccttgtacttactttaatatagccattttaatgaatgagctcgcttgttcatctcagactcttacagtttcgtttctgttttaattctaacagctctgtcaggattgccacaattccagcctggtgggcactattaatggaaacagtacattcacaaagagagtcgctggaatgggagtgaaacatgcggtcggaattcgtttccctggaagatcctcagtatccaaggaccaacagttctttgctatacagaggatcataaaatacatttggtagatgtaggcccgtaacgcagaacccaggtgtccgagatgaggttggttataccacatttgcataagttagcgcttggtgataaccaacgttagcagatggtggattctaaaagactggtactttgctacgcatctttatttgaagcctacagatgcactttcctgtgtgtttcatttcagaggatttagtggtctaatcactttatacctggtctcagatgtgtacggactgacatgtgaacgaatctctctccagagcatgacggttattttaagttccatgataaaatgaatgttcaacatagcgttgatcacaagacgtccaggagcctctaggctccattgtcgagtgtgcgtgcaagcttagtgagtgaagattgtggaccaaagttttgagcaaaagatggggcagttggaggaacatcaggtgccatgtggggcatgtatttcagagaaagaagtaaagcgggaaagaagcccgcagtaacactaagagggacctccagcgcatggttct

SEQ ID NO: 698665 - DNA, 377 bp, Homo sapiens
caatgcctggggccgtttgcccgtggacctggctgaggagctgggccattccgatgtcgcccgggacctgggggcggctgcggggggccccagaggcagtaaccatgcccgcataaatgccccggaaggtccctcagacatccccgatttaaagaaccaaagagggttttagaaaacctccggaaacttagatcatcagtccccgaaggtcctacagggccccaactgccccccccccaaccccccccgcttttgtagtttttatttaaaaaataaagcttttaaaaatgtcctgccttttaacgtaaatatatgccttccccccctaccggaaatggccctttatatcattttttatatatttttataaaaatgta

SEQ ID NO: 698666 - DNA, 192 bp, Homo sapiens
acatgggactggcattgatattctattatattaatactgagatagcttttcccagattttgaatagctcaatctcaacttttttcttaatagtattttcatgctctgcctagtgtcgattaatcaattagtgatcaaaccagtaatcagcccagtcctgcctttagacgacgccttgctatgatagccaggt

SEQ ID NO: 698667 - DNA, 178 bp, Homo sapiens
  misc_feature (88)..(88): n is a, c, g, or t
tcgttccacttcatggttggtgtttctctaaaataaattcccactgcaaaaggcaatatcaacatagttcagactcttacattttaangagtttctcctcctaccctaacagctgtctggcaaggccctcactgagcctcgttctggagcctctaccctcatagaagtttttcccctc

SEQ ID NO: 698668 - DNA, 336 bp, Homo sapiens
gctcttcacagcccagattaacacaggcaggggagagggatggcaggaaaaaggattatccccttcctgcaggctgggagtcatgaggagttgttcattctcattccataggatctcttggaaagattgccacatagacagctatttccttatgtaaagttgggagatgtgtcaatagagagaggttattcggccagtcaaaacacactcagcccactcgtcctctaaatatttaaccatctagaatggcaaacactgctttatagcatgtaataaattatgtactgagatgtggagctgctttatgatggtgtgagactccatctcaaaaaaaaa

SEQ ID NO: 698669 - DNA, 110 bp, Homo sapiens
tagaggcatcaaaaaagagtatatttatgatgcggacgcttgagttctcctccggtgagtcagacgcaccgcacccccccccccggcgtagggggaagcctacaccgtaa

SEQ ID NO: 698670 - DNA, 838 bp, Homo sapiens
ccaatacactcacaagcactattacaaaaaaaaaaaagaaagttggggctactttgccaaccgttaagggtacaaacgcatgaacatggctcacagctgcctcaacctcttaagctccagcgatcctccctcagcctcctgagtagctgggaccacaaggatgcgccaccacccctggctagttctgttcatcttttgtagggacaaggcctcactatgttgaccatgactcaagcaaaccttctgcctcagcctaccaaagggctttttttacaggcgtaagaggcacacagccaggacacgatcttggttcataatgccattatccaacaaagggaacggggcacctcttgacacaacagcctgaaaacacggccccggtctcgacatatgaaatatgaccccgtcgcattttaccgaccccccaaagataaaaccccaacatacactccccaccgaccaacacacagtagcccaaccgtactctcgaattcaacctcacccccccgcacaagatacttaacggagacagctgcgactccccgacaacctcaccccccaaactccaacccctctaccccctagatccacacacggtattccgcctaccccaccactaaaacccttcataaagctcaagcccgcgactagaacacaagccacccactcaattaccacaaagcacacctcccacccctcatccgagctcaatatcaggcagacgagcacaccaaacaagagaaagataccgataacaaaaaactaacccaaaaagatctctccaaaaccctcgatatatctgctcgacatcgattatccacaattttatcatccacaa

SEQ ID NO: 698671 - DNA, 940 bp, Homo sapiens
ggggtgtgaggctcggtatcgcgcggggttccagttgggttggcgtctggcggtgtgctgggtctgtgacttgtgggtttgctgcttgggtggggcactcatttggtgtgtgcgagccgctcttgtcccgcgtcaagtgttgttgctccgcgtccatagttggtggtgcgctggcccccggggggctaggatttggcttggttgcttctgtacccccggagtttcttttttctctcgtccggatagggcgcgcccgttggccgcgtgtctgcaactcggttcctgtgggttgtgtgtggtagcgtcggcagccttggcgttgttgtggtgcgcccttcgtcctagttgcttttcatgagggcgtgtttcgtccatcctgattgggtggtgctatctctgatggtggccccgcttgtttcggggggacaccacttggtgagtcgccactcttgttgcctggtgcctgtggccgctttgaattttcgcctgcggcggcgtgtggactgtttgcgtgtcgccgaagccggattttcggtgggcattaattggtgggttcggcccccgtcgctttgttgttgaggtctgccccgggcgtgctgattcgcccctgttggattcgttctggggggctccttttgccccgccggcgtacacattttttactcctggcccttttggactcaccatgttgcgttcctggcgttaaacgcccttggctattgggggatggataaccggtcagctcacccctcacacgacgggcgaggatacacacacgagcgatccaagtacgattctagtacatcaccgcacgtccagcaactagcgcgcggctacgctccgctctccagccgcaccagccgcgggagccgagcacgacgtccttgcacgaggagcggccgcacaacatcggactacagacattatcacgaagatcatc

SEQ ID NO: 698672 - DNA, 325 bp, Homo sapiens
tgggaacggtattccaatgattatgataccacatagaagagacaggacttcaaccctgcttcaatctcagattagaaactctactttggctgtgagcagtggctcatgcctggaatcccatcactttaggaagccgaggcaggtggatcacctgcggtcaggtgtttgcgaccagcctggccaacatggtgaaatcccatctctacaaaaataactattaaaaattagctgggtgtggtggcggaaacctgtaatcccagccagatactggggaggctgaggcaggagaatcacttgaacctgggaggcagagattgcagtgagc

SEQ ID NO: 698673 - DNA, 396 bp, Homo sapiens
gggaaccacgccccgggggggggggggtgggccccctccctattattccccctttttttttccaaaggggggggggcttttttccccttttttaggaagcccctttggtttcggggggtttaactttggcccccccccccaaatttttttttgttttttctttttcccaaagggttagggggttgccccccctatttaagggggggggaaaattttttttctttcccccgggggggtttttttttgggggcggggtttattttttttcgcccatcctttttttggggaaaagggttggggaagggggatttttatccccggggggcaaaatttaaagggggttttttagggggccctttttttgcctgaaaataaaaagattttttggtggggccc

SEQ ID NO: 698674 - DNA, 91 bp, Homo sapiens
cttcaagtgactgctggactctgctgcagcggggtctggcacgcagggcgtgcgtgacagcgtcctttgagccccatcactctgtctgcat

SEQ ID NO: 698675 - DNA, 252 bp, Homo sapiens
gtttttttgaataaaaaacatttgtccattcctgatacgggggccaagacccagggcccaggggacggttttcaatttaaatcccgggggctttttttctacttttttgttaaaatcgggattttggggcttgccccccccaaatgagaagttaacccccctttttggggagggggaaaaaatttgggtccaaagtaaaaaagtatccaattatgggcccccctttgggtaataaaaatttgtttaaagtta

SEQ ID NO: 698676 - DNA, 499 bp, Homo sapiens
  misc_feature (270)..(270): n is a, c, g, or t
tccggattaaccaggacgaagaagaggaggaagccgaggatttaatttcctttatctggaaaattttgtatgagttcttgaataaaccttgggaacccaaatggtggtttatccttgtatctctgcagtgtggattgaacagaaaattggaaatcatagtccaagggcttcccttggttcgcccctcatttatttggaacctgacttctttttttttcggcttaaaaatttcaattctcgtggtaataccagagtagaaggagagggtgnctttccccaacttccaccccttggggaggcaaattcgggtgtggaggtgtgggctaaaggtagtgcctgttttattttaaaaagtgggcctgtcagttggatctgttgcttttttcaatgattcagggaaacaaatgggcttttttccttccttaaaaaaaaacccgccctctttttaaaattttttgtgggaaaatgcctgtcaataaaatgcgggtttttgggccca

SEQ ID NO: 698677 - DNA, 105 bp, Homo sapiens
acgtcgtcgacccggtcagtgtttacgtagaatgtgccactgaagtccactgacccaaactcgtcaaaacccggatgcaacgccattaaggtttcgttagaaaca

SEQ ID NO: 698678 - DNA, 101 bp, Homo sapiens
caaactgacaataacaagggcctcatctctgggctccagaatacatcctgaagaccccaggcagaaatactaggaaaaccaccctatggaactgatgctac

SEQ ID NO: 698679 - DNA, 910 bp, Homo sapiens
  misc_feature (910)..(910): n is a, c, g, or t
gatggagggcaagccaccaccacctcccatcaagtacacttgcattcaagagcccaacgaaagtgatctgccttatcatgagatggagaccctctagtctcgtgagacttgccccatggcagaactctgctggaatcctattgagaaggtagacattgtgctttattaatatagtcgctcttcagccatgcctttgctgcagctgaaatggaagtcagaagtgagtgacctgttttcccagcaactcaccctctttcatctccaaacgcctgaagcttaaccaagagtgagaggatatgtcatgttcacactcaatgcaattcgtagtggttttcttgcttatgtaagaagtacatattagtctgccatctttaaaaaaaaatacagtattttcatttaaattctctgatggagggacaacaatggtttcaactgtatgcccatgcctgatcctcttatttgaacatctatcaacattgtaaactctttgccaaaatcctggggcttgctgcattccctaagataattacaggaaacaagaaaatgtaaaagtgctaacaaggctggcagtatggagaagtatggttagtcttcatatgaaattctgtgcttattttcatggaggaacagcatacttgcccaggaaccacatttcatcctcttcatggtttctacatgtcagccaagatctggcaatggacagtgaaaggtccagagaaaataggcaaaacagtagctagaagataaaaatcctggctaatttagcaaggtctggtgcccgggtgcaccaagggcaatgttagaagggtaccaccattatacgtcttaagggaccggacgggtggaaaaagacacggaagcacattgaggagaaacctctggactgcctcgcgtcgcgtatgtctcccgn

SEQ ID NO: 698680 - DNA, 172 bp, Homo sapiens
ctactactcactctcactgcccgataactatcaaactcctaagccaactacttaatatgactggcttacacttatagctgttctagtacagatacctcttgtacggactccacttataacgcccttgaagcccatggtcgaagcccccgctcgctgggtcaagtagtccttg

SEQ ID NO: 698681 - DNA, 105 bp, Homo sapiens
gggggacaacacgacggtggcggtcacgcgaaggacctggggtaggtgtctccacaggcccagtgccctactgtacaacagcctcagccaccctgccacaacctg

SEQ ID NO: 698682 - DNA, 115 bp, Homo sapiens
gccgcctagcaacttcagagagaaaatacaaaacaagaaacagatttggttcaaatgcataaccaggggcgggggttttgcattactgataacattgttacagaaggaagttgct

SEQ ID NO: 698683 - DNA, 252 bp, Homo sapiens
gtgctccgaggattccagcactcgctgatgaggcatggcggattatgggaatatgaatttgctggagtgggaggcgtgtgagagaagaggagcaagaagtctcacagggaatgctttatgtagttgcagttgcatcttgaccttttggcttgggactgttcttttgacgctattattcagaagaactttcattttgaagtaacagtttctacactttaccatttaacaggaaatgcctcatcagcgatggct

SEQ ID NO: 698684 - DNA, 116 bp, Homo sapiens
gtaatacggccaaagcttccatgaatggctatgcctggcatcttccatttccatgctgtggcaactttggggatgtgggtggacgtaggtcgtaggatgaccttgctgcccactca

SEQ ID NO: 698685 - DNA, 1041 bp, Homo sapiens
gacgggggtttcaccatgttggctatgattggtctggaactcctgacctcaggtgatgttgactccttgtgcctcccaaagtgctaggattacaggcgtaatccaccgtgcccggcctgttacttgtcctcttaagatgtcttgagagcctcatgcgtccactgtttggtgacaggctatctggctactctggaagataagccgggactgcccaccagcagccaccctttctccctagtggggcactgggagactgtcccctgctgagtcctcacctctccctgctctcagcacaggatccatgtgtgcttttcctccctgcatgcactggcttccgggacgttcagatgacgaacacactgatgtgctgcgcatgccttcccctgtctcccctcacataaccactggggtcccgagatgcgacggggccttgtcacttcctgggtcccctgctggtttacggcgctgcttcttctgtagtcgcctgctgatccccacttggttttcaccttgtgaacggcttgcacgtgctcacacacttatgtgtcccacttattgaacactatttctccggtgacgatgcccaacgcggttgctatagtcacttgctatcccaccactgtggccccctttgcttgatatggccccctatgacttctagcgcgcttgggttgcctgccttcctttcatcacccgtggagccacactctaactcccctcagtgatcacgcccgtagttatcttcacacctcttttcgttattcactttcccttacatatgacttgcccgtacccattctgtccccaatccaccgtgtaacatacttcgcacccaacaacgccagcgctctccgctcatggcgttccccaatgggcattccccatcaacattgtacacatcttgaggaacagcgaagcccagtgtagcttatttcccacgaacgtctgtcgtgtccatattccgctctggctctgtcgcgcctcagaggtactcccacgatgttctactctctcgaatacagcatatgtcaccaccctcac

SEQ ID NO: 698686 - DNA, 125 bp, Homo sapiens
catcaacctatagtccttcctatatgatataactcacaacctagtcataaaattcaatatcatctcactgcccagaatataaaattctgagcaacaattaatatgatagttacacaataatttat

SEQ ID NO: 698687 - DNA, 592 bp, Homo sapiens
tcatcccgggctgtaggaatttggtacgagctctctctgtgcctgtattgtaacgtgcggaagaagcacgcgcacttttaggaggaggaggagaagatttatgtttgtttcatttttctttctctattcttttttctctcttttttttttcttttttaattcttttttgttttttctttttcttttttattgtctcttttttcattgcatttttttttttttttagcttttttattttctctttcatcttttctcttctttttttttatcttttttttactttttttatttatcactttttcttctttactatatccttttatacttttttttattttcttttttcctcattttatttttatttttttttctttatttttttttttctttttcattttttatcctcatttttattcttttctttctttcttttctcttttttttgttatttcttttttttttcttttttttattttatcttttttttctcctttattctcttttttcatttttttttacttttcatatttttctttatttttttttttctttttatttctattctcctttttttcctcttttttttttttct

SEQ ID NO: 698688 - DNA, 124 bp, Homo sapiens
agcgaagaaatggtcacccgatttttaataatgcccagggcacggacaggggattcggcatgccatggctgttcccagttcttcccgaagaattgagtgcggccttcctgtgctacgtcgagtg

SEQ ID NO: 698689 - DNA, 324 bp, Homo sapiens
gagaaaggtcacctctattgccaggctgccaagctggagtaccgtgatggcactaagatcactacaagctccaactcccaggtacatgccatactgccgcctaagcctcccaaagagctgggattacaggtgtgagccaccgtgcccgggcttagatgtcgaattttcccaaaagagaattctttgagttctgtatcagttatttttgagtaagaaaagtgtcatgtacctacataggtataatttgcatttgctgtacaactcttgtttcgactatacacatagatatgaggagtatagctttagtagagggttaattgcggg

SEQ ID NO: 698690 - DNA, 125 bp, Homo sapiens
cacgaggaggacctcctgcagacagactcctgcaacacctctctgcttctacttcacgtgtgccacgcctttctaatttggagtccagacaccacctggatgtgttagacctccagcacccaatc

SEQ ID NO: 698691 - DNA, 663 bp, Homo sapiens
tgtatgattattttatttataacccaggtcagcagctcattccataatacatatcagcatgttaagaaagaatgtggcccttaggtctcagactgctctgtgttcaaatcgctctccataaaattcatttctttattgcatcaaatgtacatattttcggtgtacatgtgattcaattgcataccattccatttcgtcatcgacacattctgcattaatggttaattcccacaagcatcgaacatcacaggtcaatcggggagggttaagcccatcgcctctcaacagtcatcttcgttattcatcactaagggcaaccaatttctgaatctgcatctgtctattcttacttaggtctcatctcctggtcacaagtaacgcacccgaaattaagcactctcactctgcgttcaccacgctcacttacagttccaaacacacctaacctgggaatttccctttgtgtccaaaccgaaccagccatccaggcaattccctttctaactctttcccttattctttaaaccttacccacacatgagcggtttcacttaacttgatcaacttaaagcaccaccaaaattgtcacagttccacaaacctttttaccttgggttctcactttatggacattcgttctgttcacagattagaccttaaacc

SEQ ID NO: 698692 - DNA, 364 bp, Homo sapiens
cacgagggaattttcctaccaaagccagagcaataacaaaaacagctgtgagctcagaacttataaccgaagtgggagagaatcacaagtatttcaagggaactttatgattacaacctggagattcagccctcttcatcaatggacttcacatggatttagacacacaggatatattcagtctgtttgatgtgttgaggaatgaagctcgggtaatggagggtctgcatagattgggaatagaaggcctttctctgcataatgttttgaagctgaacatccagccctctgaggcagactatgccgtagacatccggagtcctgctatttcatgggtcaacaacctgtaggttgatagcagata

SEQ ID NO: 698693 - DNA, 403 bp, Homo sapiens
catggttaaactaaaaatacgaaaaattactccggcgtggtggcacacacctatagtcgcattgtgtctgtaattggcaggttcttggtctacactgacttcaaaaacgaagctgcagaccctcgcagtgaatgttacagttcttaaaggcagcgtgtctggaatttgttccttgtgatgttcggatgtgctgggagttttttccttctggtgggttcgtgatctcactggctcaggaatgaagctgccagacctcgcggtgagtgttacagttcttaaggcggcgtatccggagttgttcgttcctccccgtgggtttgtggtctcgctggcttcaaaagtgaagctgtagacctttacagcgagtatcacagctcacaaaagcaatgtggaaccaaacagc

SEQ ID NO: 698694 - DNA, 91 bp, Homo sapiens
gtttccttggcatcaccatcacctcaccacctccacacacttacaaggtgcccgtgtggtcgacgcggccgcgaatttagtagtagtaggc

SEQ ID NO: 698695 - DNA, 206 bp, Homo sapiens
tcatgggcgtgctctgtcctgtgggtctgatgacattacccgagcgctgacagccgctcaagggcgcaaatgcattcgatcgtttgcgagggcaacaacctgaaaacagccgtttgaatcaccggccaatgctgaataggaggccaaaacagccggcagttcaacccaactgcccgatgaccacccgatcaaacggtgggagcagc

SEQ ID NO: 698696 - DNA, 152 bp, Homo sapiens
catattcaaaaaatgtttccatattaagcccagagctacatttatatgaggattaaaaaaataggatttaactgataggtagcacaagatgaaagtggagaatttagattggttccatgcctctacaatgaggaggcatttaggatggtcaa

SEQ ID NO: 698697 - DNA, 121 bp, Homo sapiens
caatcttccttctcgacactatgaaaatgtcaacagtcagtttcaatttgtcgagggaattatcaattttggtcacagtctttttgatacgcagtgctgtgagtcttgcggatgcttaagc

SEQ ID NO: 698698 - DNA, 643 bp, Homo sapiens
tttacggatattttaaactctgttagagacttgcctcagtgtatccctattagggttctgctttttgatctcatctctacctcttacagggctactctttgctggcacaaacgatagcatatccaagacatttaaagcttacctgaatacctgcgccttccatgacgtgcagaccctgaagcagatctatctatagcagtatactagcacatagcgtacctagttgagtctctactgtgttcttctgttaacttagaggttgcaaatcagacaaacattcacctaacaccccgatggacaataaccacatcatatctcacatgatacaggtcgatacaaaggctctcatttacaccatttactctggcgtcttgcacgggcgaccttgcggcgacgctctgagcgagccgacgctacacgaccaattgaacttacaactcacgtctatcaagcactggcatcacgaccaccacctggttgcaaccacttcctgggcccgttcctacacccagttggaaccaccacttaacacatgctctgccaccgctgtaaccactgggacccacagcaacacacagaccacacaaacgaaacggcgaccgggaccccgcaccccagtagaccagcgctcaatcccacccca

SEQ ID NO: 698699 - DNA, 349 bp, Homo sapiens
gaaaaaacatattgacttgaatggagggcatagaatgctacctctgggtacctgcttggctagggttttggcctgtgagtacgaaaaactggtagcctaagttctcaagttacgacaacccttcttctgcatgacataccttatctctcttatacatgttggtatagcctgctactagtatgtatcggtttagggaaccagtcatcataaagtactcgtaaggattctacaaatgctacatgatttctgggaatgtggtccttgagatactttcagcatacttctgtgaccacatgttatcaacatgtggaagttcctcatagcttcatgaataacctctgcgcttgtt

SEQ ID NO: 698700 - DNA, 223 bp, Homo sapiens
tgcttacaactctgaaccaacgtcccccagtgcgagaaagtgggtcatctggatgtatcacgaaaggtgctcactggaagagtgcagccttcatagagaagtgcatccggcttccttaacagtgagtctaaccgtgctcctacacacgaaatgaagcccaaatcgtacatcacacggtcatgtatttcaatctggcatgaccagccgctcctcgtttcgagag

SEQ ID NO: 698701 - DNA, 1040 bp, Homo sapiens
gtgttggtgtgtgcctgtagtcccagctactagggaggctgagatgggaggatcgcttgaacctagcaagtcaaggcggcagtaaatggagatctgtactccagcctgggcaacggagcgagaccctatgtcagaaaaaaagaaaaagccacccagcaggctgagcgtggtggctcacgcctgtagtccctgcacttgggaagccaaagcaggtgaatcacttgaggtcaggagttcgaggccagcctggccaatatggtgaaaccctgtctctaccaaaaatacaaaaattggccgggcatggtggcgcttgtctgtggtccagctacagctactccagatctgggctgaggtgggagaatcatttgaacccgggaggtggaggtgcaggagctgaaatacacgatgtactcctacctgggtgacatgggtgagaccctaatctcacgaacaaacaaacgacaaacacccagcaagcaaacgattgcgtgacaaagtccacaggacccccaagtactgacaaaatgccagacagtgtatggaacgggcacctggaggagaggaatgacccacacaagggacacaggcagcgcacatacacagcaaaagggcacatgggaagaacaccaagcgaacaagggcacacagacagggtacatgaggccactgaaagagcacacaacaactaacaaggagcaaaacgaacgacaggggagactggaagaagccaccacggtgtagcgaggaccggaggcgcaccgaaggagaggagcggcgcgaggaggccgggaacaggacaggaaaagaggagagggacagacgaaagagacgaagaacaggagaaaagaagcaagaggacacaggaagcaaagacaggcagcgcacagcagccaggcgaagacagaagaagagcgaaaagaacgacgaagagacgagagaaaaagcacacgcggcaaacgcacagcgagcgacgcgccggagacctctcagagcgcgcaaaagagcaagagagaaagaagcaacaacaaggagaaaagaaa

SEQ ID NO: 698702 - DNA, 324 bp, Homo sapiens
tgacatcagagtgtgcgccgggccgagtcgccaaattggtccccgtcgccgacctccgcccgcgagccgtctgcctgtttcccctttccccgcccatagttcacttcacacgaagtggagaccatcggcgcctgatcggctgtgttcctcccgtaggcccaaggttcgcatggacaagactgctagtaggtccgtggattgatatatcgtcaatctccgtaaacgaaccggaagagcaagacaataattggcagaaaccattgcgtgcctgaatgcatggagccaactttgatggcagaatagcaattacatgttactctgaaa

SEQ ID NO: 698703 - DNA, 840 bp, Homo sapiens
ggtctgccaggagctacggccggaagatggcggcggccgcagagttgtcgctactggagaagtccctgggactgagtaaggggaataaatacagtgctcagggcgagcgaccagattccagattcttctagacgaaagcaatggtccaagtctaacgaggattgacgtactatagcagctcagtctagtcatagcatagccatacaaaggaatatttgctggggagtactgcaggaagaaaaagcataagtcgctctcagcgaggtggttagaatacagggtcactcaggtagatgggcactccagtaaaagtgactatccacacgactgttgaaggatcgttaattcatcatcttgaagataaagtctaccttacaggggtataactttacattgagcagatatactatgtactatggacttcatcgctttctagttgacgctgacagttcaagaaaaggagacaaatatcttaatgtgtctcgcgtggtttgtcacatgcagcattatccaggcatcaggcaacgtctgtctagtgtgtcttcatcaagaacagactatatactaattcccactagaaggctggtccatggccataacagaagatctattaagaactgtcttggctggaacatgttctctagaccaccgggactaactgtgaattaatatcaggcatcattattgctcgaacgtgaaggactccggagtgtgacctgggtctgaaggttgttggtccttagcgcacgtttgcactttctgtcacatccatgcctaacagggggatcctttattaaccggccgggaggctttccaagtggcccggcgcaaaaaaaaaac

SEQ ID NO: 698704 - DNA, 414 bp, Homo sapiens
  misc_feature (398)..(398): n is a, c, g, or t
gcgcgatctcagatcactgtagacactgtgtctcagattcaagtgagactcctgtctcagactctcgagtagctgtgatatacaggcatgcgctaacacacccagctaattttggatttttaggagagaccagggttctctcatgtgtcgacaggctgtgctcgaacttccaccttagacttccaaactggtgggattacaggtgtgagccaccgtgaccaggcaatgtgccttcttatagtggctactcaatgggctttggtctgtccagtgataacaatgggataacgcctgctacacatattcattgtgaaaccctttccctgtgctgagattaaatgagactctaagagtattaaatagtgtattttccttgacaggctaacggttgatgaatntaaaggcttatgtgtt

SEQ ID NO: 698705 - DNA, 352 bp, Homo sapiens
  misc_feature (60)..(60): n is a, c, g, or t
cttttttattattaattgttttctttttaaaatcagttcataaggcttttcaagggattnggtacagaggctggggatggtggcttgcacctgtaatcccagtgctttgggaggccaaggtgggagaattgcttgagcacaggaattcgattgtagcctgggcaagatggcaagacccctgtctttacaaaacattaaaaaatcagcatggcatcatggtgtgtgtctttagtcccagctacttcggaggctgaggccacagtatcccttgagtccagtaattcgaagtggcagtgagctatgatcctgccactgcacttcagcctgggtgacaaaatgagaccctgtctct

SEQ ID NO: 698706 - DNA, 991 bp, Homo sapiens
ctgcacagttcacagaagcctgcgagcccgtcaagaggcagccgaggtcccagtgcctgtccacgctggtccggcccgtcttcggagagctcaaagagaagcacaagcagagcggcgggagcgtgggtgcgctggaggagctggagaacgccttcagcctggccgaggagtcctgccccggcatctcagacaagctgatggtgcacctggtggagcgagtgcagaggttttcacacaacagaaaccacctgacatccacccgctgaagcgcactgctgttcagataggggacggaaggtcgtttgtttttggttctgagctccataagaactgtgctgacttggaaggtgccctgtgctatgtcgtgcctgcagggacacgtcggatcccgtgggcctcacatgccaggtcaccaggtcaccgtctccttccacccctgcagtgtgctgttgtgcacgtcagggacgctgttctctatgcccactgccctcctccctctcctggcccagcagtattgctcacgggggctccagcagccggcgtggccctcatgactacgcctgggtcttctgcagactcatgcagccctatggcccgctcagaccaaggcgcagagcaactatcagggcagctctgcctcctcctcccatgaggtggggagaggcaacagggcagcccccagaggagtgtcctggccgctgtcctcccggggcccatgatggccatagatttgccttgtggtgttggatcaggtactgtgtctgctcataagtacttgtgtcatccagaatgttttgttttttaagaaaattgaattacttgtttcctgaaatattctgaggttaatatgttagttttcatagaacattgagaggcccctgccactttcaataaagacctgacttggagacaaaatacttgcaaatataatgattctaggaggggcccggtgcccaatccacctgttagtgagatttataacaatccactt

SEQ ID NO: 698707 - DNA, 105 bp, Homo sapiens
  misc_feature (105)..(105): n is a, c, g, or t
tccaaaggaattttctggcaactgatgggcttttttttaaccaacaaagggcaacaaaccttacaatccacgtttgattcacctattaacttagggtttattttn

SEQ ID NO: 698708 - DNA, 209 bp, Homo sapiens
  misc_feature (194)..(195): n is a, c, g, or t
  misc_feature (197)..(197): n is a, c, g, or t
  misc_feature (202)..(202): n is a, c, g, or t
gtaatttagatttttatgaggaatgagtatctggaaatattgtagcaatacttggtttaaaattttggacctgagacactgtggctgtctaatgtaatcctttaaaaattctctgcattgtcagtaaatgtagtatattattgtacagctactcataattttttaaagtttatgaagttatatttatcaaattnntnttttncctatat

SEQ ID NO: 698709 - DNA, 200 bp, Homo sapiens
cgaccaggactgctgagacagatgacaacgggcttcaaaaacttttaggttacaggattgttctaactcctggggtcaagcaatcctcctgccttagcctcccaagtagctggggctacaggcacacatcaccacacccggctaattttttttttaagagacggggtcttgccatgttgcccaggctggcctcaaattct

SEQ ID NO: 698710 - DNA, 507 bp, Homo sapiens
aactcaaattctaatgagcatctccaccatcccctgaaggagaggaatcaaaacccatcataggattatcgcccccatcacctctttcaatgccacttttcttcttttgaatttgaactctggagttactgttctacagtttggcggggacggggcttgggggttttctcttttggttggttccccttccttttcccttttttttttttttttttggtggctttgcggtaggatgctctgatctgacctttgacatggacccaaaggtgctaaatgctcttgttgacttccaacagatgggatgggggaaacccagcagttcttggtaaagtcctttgtaataatagtttgatttttttatttcgaaagaatctttcattttcccaaggaagcttttttccttttttgcccaggttccttatcccctgctggagatggcttattttgcattcaagcagactatggtgcaagtttgtttcatctagttaactggaaattattgcttta

SEQ ID NO: 698711 - DNA, 1009 bp, Homo sapiens
  misc_feature (984)..(984): n is a, c, g, or t
tccccgcgggccccaaattttgtggggggggggaaaaaaaaacgggggggggggggtgctcctctcccccccccccccccccaaaaaaaccacccctactgagaggggaacaaaaccacccgcacagacgagcggcggtggtcccacaagagacaaagtgtgtggggacaaaaagataggggtagggaactctactagcgggccccccagcacgcagacgcgtcgcaggggggggggcactctccgtctggtcacacgccgcattcgattgtgcacagaaaacgccgcggtgtcacaccagcagaaggagccgcaggacaacactaaatcaccgcgcaacaacacacccgccgcggagggggggtcatctaccaagagcgcgcgggtcgcatcgcgcgcgcgggtgggaagtatgacgcaccccgaggagagctgggacaacaaatagagttagccaccgcgctggaggtggagcgacgaggtggtgtgtctccacgaaagagagagcgagtacctactcagagcgtcgaccggagagagtgcaatggaggtgcgtcatcactacacccacaccgccagaccacccacgcggcgagagatgagtgggcgcgccgcgagaaggaaacgacaacgaaaaccacctcgcgggagcaggcgcccaagacgagagagaggagacagcccgacgcgcgcggtcgagcgcgcgacaagaccgcacgaccgcgagaagaacaaaaacacctctctcgccacgcgcgccggggaggtacgaaacgacccgcggcgaatgcaaaaagcacaccccgcgcggaccggacgagcgtgcgcgccgccggagagccgaaccagccacaccgttggtcggcgcgacgcctcgcagtgcactcacccacaagagacattgtgtcgctagaacacaactgtcgcgccaccgccgcgcgtagtgacaatacacaccaccagcgaacagcaagtagatgacgngcggccacctcacgtaggagtgccc

SEQ ID NO: 698712 - DNA, 920 bp, Homo sapiens
  misc_feature (659)..(659): n is a, c, g, or t
  misc_feature (920)..(920): n is a, c, g, or t
gagcgtaggtgctatcaccgctggcgtcggcggcgtcgtttcgagggcagggagaggatccggttctgggaaagctggagacagtggtggtgactgaagaataagctttagcagaggacttaccgctagtttcgcgaagcaatatcttacctccaggcggtatcatggacgagctgtgcttggtatcagagacagactggttgcctaatctcccaggattgggctctttagttaacctgggtgtcaatgcccagagtctttgcgactgctggatcatcgggtgcggatgagatctcatgtggctggtgcacctccagatatagtgctctcgaaacagggtgggctgagtgaaactatggtacccttgtggacctctggatcagaggttccagcttccggggagacataggttgggatgtgacctctaatgggagcatgttcatgagaagaaaagtgtggttcataagagttggctgatgtactaggagaacctttatctggggaaggacatgagttgtgatgggacggtatgtgaatgaactttcaggtaggatgcactgtgaaggagaaattaaggtgcagaaatgacttggagtgcagagtagagtgtggcatacgaacgtgtcgagaattgctgcgcaacgatttgatcatgtgtncgggtagctaatggcaactaatgattctgactgtaacgtgagataagatgcttgacggttgggtgacaacttgcatgggggacaggcttttaaaagtttcatgtggggaatggctgtcctcaacggggttggggaaaatggcagaacgggggttgggacaacaaatttggggtgaagagacatgttttgaaggtggggaggtaatcgggcaatggtttaccaatatgagaaatgtgtggtggattttctggtggtgttagn

SEQ ID NO: 698713 - DNA, 147 bp, Homo sapiens
ggggagtacggtctaaagggggttcagaagggaaggatccacaagttagtgacaggcaatgccctccataatagccttatctccccggctccacttggcttaaggaggtggttctcgggggagggggatctcaagacgaagcgggtg

SEQ ID NO: 698714 - DNA, 100 bp, Homo sapiens
gggaggaatgaggcatccgctcactccagcgtcagcccctctagtcgaagaaagaggtaatgagaaggccaccttacatctgtgccatatgctaatgtgc

SEQ ID NO: 698715 - DNA, 117 bp, Homo sapiens
atgaagcaaagtctgcgtgcaatcattgcatactccagacctgagggacggtcgtaggatgcactgaagactttggtctggtctggcgtcgagatgaccgccagggcatacacggtg

SEQ ID NO: 698716 - DNA, 497 bp, Homo sapiens
tcagccacgcctaagtgatcttatttcatcttgacactaaccttggatatttgaaatagaattattcatttacaaaggaggaaaatgagattcagacaagctaaatacatgccaaagccacataactaccagcggcagagctcagtctgctttccaaacccatgcggctcccttcatcaccgtgactcacccactttatcccccaacttcgaggaagtctcttctgatcacccaagaataatgtctgcctccttagaaattttgtagccgttggtgtttcaattttgggagtgacatctaattgtcacacactgtttcacatgctagctatctgtgcacgtatctagacaagcctgcttaggctgtggctcctggaaggcaaagaccacttcttgtgtttatctctatcccatctactaacaccacactctgcacatgataaatgtttaatatatgattgattacaataaaaacgtgttaaaaaattgaaaaaaaaa

SEQ ID NO: 698717 - DNA, 106 bp, Homo sapiens
gttacatggctgctgcccatatcgtctgggtcaacagaagaacacagctttctttagaaaaaacatttactttaaaaccaagcaccttgatttagatattttagtg

SEQ ID NO: 698718 - DNA, 442 bp, Homo sapiens
ggcccctatggcggtggaggccaatactttgcaaaaccccgaaaccaaggtgggtatggcggttccaccaccaccagtagctatggcagtggccgaagatttttattaggaacccaagcttagccggagaggagagccaaaaaagtgccagggaagctcccggttcccccagatttgtgaactcaccccagcccagggggggcagggcctagctgctccaaaaaagacatgttttagaccaaaactcctggggatgggccaaaaacccgggggcgggatttggggctaattggataaccgggtattttagtttttgttttgtggaaaggggaaagccttccccccaaggggtttaatggagatttttttttttgccccccccgctgttgattgctaaatggcccagtctggtcgggcccctgaataaatgtcttttttttta

SEQ ID NO: 698719 - DNA, 651 bp, Homo sapiens
gagacgccgcgccggctggacgctgtagtggcttcgtctcggtttctcttccttcgctaacgcctcccggtctcgtcagcctcccgccggccgtctccttaacaccgaacaccatgccttcaattaagtggcagagtctgatggagagatatttgacagtggatgtggaaatgtgccaaacaatctgtgactattaagaccatgtgggaagatccgggaatggcatgatgaaggcagatgatgacccagtttcctctaccaaatgtgtgacttggcagcaatatttacacaaaaggtcatcccaggtggttgcacccaccaaagggatgaccctcgctcctcctgaagatgatgagaccaaagaaaagcgaacagatgatatccctgtttgggaccaagaattcctgaaaggtgtgaccaaggaacactttttgaactcattcgtggtgcaaacttacttagacatccaaaggttgggtttgatgttacatgcaagactgtgtgccaatatgatcaaggggaaaaatccgtgaggagattcgcaagaccttcaaatatcaaaaaatactttactgacgaggaggaagcccaggtacgcaaagagaccagtgctgtgaagagaagtgaatgttgtgctgacactgtaacact

SEQ ID NO: 698720 - DNA, 991 bp, Homo sapiens
caagattctgcaggagtacaaatccctccatcgatatcattgcgcactgctgtggatatggatgaatctatcctgaggaagacaatttgaacgtgttccgcgcacggaaacatacagcgtctcttgtttcagtccattccatgttgctgagagtcttcttcaggtcatatggggaagctggtaccccgtgaaaggagaccatcaaaggattccattcagattctggcatgagtgaattatgacgcagtctctcccagtaacagggctctatctactaatgagtgcggaacccacttggaaagaatgcgtgtgtgtaatacacatggcttgactaaggctggtcattgagacgagcatttcatcagtgaggtgagtctctctgctccgtcgtgtactggtactctcatcctttgacccctacaccacaaaaaagacttacaatttattcatgtggtaggccttgcacaagaggccgtatgagtagatagatactattgcttttctgaagcaggtattctacaggtttccaatacacaatgtacacccgcatcaatttataacatttcacttcatcttgcccttcattaatttgcaagccctagcagactccaactcctattcttgcacgaaaacgggggtcggaacaacccctaggaatcaacgtgcccattccgataaaatcaccttccatccttactacacgatcaagacgcctcggttaattcttcttcattctctccttaatgacattaacactagttctcagcagaacctccttaaggggacccagacgaggtatacctaactatccgttgagagaaacaccattcgcaaataagcccgaatgatatttcctagttcgggaaaaaaattcgatccggcctaagaaggaaggaaggggcctgtcctgttaggagacaaacttcctggataattcatatataaatacagggggggagatatatatatttgggcgatatttttccgaccc

SEQ ID NO: 698721 - DNA, 656 bp, Homo sapiens
  misc_feature (72)..(72): n is a, c, g, or t
  misc_feature (82)..(82): n is a, c, g, or t
  misc_feature (506)..(506): n is a, c, g, or t
cctcaacggcttcgcaagcgggtgggttatcctggaggcttagtcagcttcatagggacccccccccgtganaagaaagggntgggccagggccagttgctggacagctggaagctctgggctacacaaggaccaggaaattcagaccctaaaaagtcagattggggggccccccaaggccctggaggtttccaagggtgaggagattcagcaaaaggtgcaggacctggagacccgcaattcggagttggagcaccagcttcgggcgatggagcccagcctggagaaggcacgggcaaaacgggaacgggggcgggtttaggtgggccgggcagcccaactgttggacgtcaggctgttttaattgagttaactgggtaagggcctggcccccctggcttagggtgggcccttaaccgggggtggttttttattaacaattccggcctgggatgcgggccaggctgcaggcggcaaaattgggcccctttgtcctggaaagggantggggggtccccacttaaccctgggtgggccgggccgggttgggttggggtgggccccagttgggtttggttgttggcagctttgggggtgtttttgagcttttcattgggtagaatttttagatccccccattacatttttaagggtga

SEQ ID NO: 698722 - DNA, 123 bp, Homo sapiens
tgaattatgttggtctgaatctagagtgatcccgttcgtggcgaggtgcgcacgcggaggaagaggaaaggcacgggcgccgtcgcctacgcacgtgcgtagagcacggcgccgtcctacgca

SEQ ID NO: 698723 - DNA, 747 bp, Homo sapiens
  misc_feature (3)..(3): n is a, c, g, or t
  misc_feature (104)..(104): n is a, c, g, or t
  misc_feature (113)..(113): n is a, c, g, or t
  misc_feature (120)..(120): n is a, c, g, or t
  misc_feature (157)..(158): n is a, c, g, or t
  misc_feature (171)..(171): n is a, c, g, or t
  misc_feature (190)..(192): n is a, c, g, or t
  misc_feature (224)..(224): n is a, c, g, or t
  misc_feature (230)..(230): n is a, c, g, or t
  misc_feature (267)..(267): n is a, c, g, or t
  misc_feature (335)..(335): n is a, c, g, or t
  misc_feature (337)..(337): n is a, c, g, or t
  misc_feature (339)..(340): n is a, c, g, or t
  misc_feature (357)..(360): n is a, c, g, or t
  misc_feature (394)..(394): n is a, c, g, or t
  misc_feature (396)..(396): n is a, c, g, or t
  misc_feature (406)..(406): n is a, c, g, or t
  misc_feature (408)..(408): n is a, c, g, or t
  misc_feature (416)..(416): n is a, c, g, or t
  misc_feature (421)..(421): n is a, c, g, or t
  misc_feature (424)..(425): n is a, c, g, or t
  misc_feature (442)..(442): n is a, c, g, or t
  misc_feature (467)..(467): n is a, c, g, or t
  misc_feature (470)..(470): n is a, c, g, or t
  misc_feature (508)..(508): n is a, c, g, or t
  misc_feature (515)..(515): n is a, c, g, or t
  misc_feature (544)..(544): n is a, c, g, or t
  misc_feature (548)..(548): n is a, c, g, or t
  misc_feature (563)..(563): n is a, c, g, or t
  misc_feature (586)..(587): n is a, c, g, or t
  misc_feature (598)..(598): n is a, c, g, or t
  misc_feature (604)..(604): n is a, c, g, or t
  misc_feature (612)..(612): n is a, c, g, or t
  misc_feature (614)..(614): n is a, c, g, or t
  misc_feature (621)..(621): n is a, c, g, or t
  misc_feature (660)..(660): n is a, c, g, or t
  misc_feature (675)..(675): n is a, c, g, or t
  misc_feature (702)..(702): n is a, c, g, or t
ttnaggcgcagattaaaaatagagttctctgcatctactactcaatttacacgaaaggcggtgctatcacctcccctgtgtggacttgggagaggactgggccnttctccttngagggcngtggggtggcttttagggtggcaaggggcttcctgtnncaatgcgtctccnctttggcctgactattccnnnaacaacgaatgtgcaatcagggtcctcggccnccttgnggacgtttgggggctgctcgcgccaaccggctgctgncaccttcgaccgttccgagtttttagaagtcctgcgtcaagccagaagaaaaaaaaaaaaaaaaaccnancnnggggggggggggggggnnnntaaaagccaatgccaaatctcaatctttgttttncnggcgcaagtnanggtttttntcaanganngggggtgtaactgcaanctaaagtcaatatgtcccgcctaanaangcattttcgcgggtgggacgaatgggagggggccgggnctcggtnataactccttgctttgctagattccacantctngctgggaagggtggnacaggcgagggccagggattggnngccggcccgantccacnacgggagnanctttgcngctcaggggggaagcaattgaatccttgaatctttcatntggtgctggggggcnaggggcaggtgattctcctttctgcantcctggtcgggcaatgccaggggtacatggtgggtgccggccaga

SEQ ID NO: 698724 - DNA, 106 bp, Homo sapiens
tcttatgaataacatacaagtccatttgatggctgctataaatattaggatctctgcatacttactacaaatacaatgcccaagagtcaggaaatcagcctgaaga

SEQ ID NO: 698725 - DNA, 574 bp, Homo sapiens
ttcgcagcccacaggtatatgacgcagcataacaaaaatctgaagctgggatcctttaatatcacatcggcatccaagacctatctccctctacacatctagaaaaacaatcatatatccccacatatgctttaaaaatctcaggcctaaaaacaagacatggatcctatcctatcttaagcaaaagtaacagaaaatggtgaaagaaaatgtcagttgcacgccagccaggtgcgggcagagtccatgtttcgaaaggtaacactggcatgactgactcaatgtcggacccaggtaaattaaaaagtggtacatcaaaatccataaaacaggctgggcgcagtggctctcacctgtaatcccaggacttggggaggccgaggcaggcggatcacctgagatcgcaagtaagagaccaacctgaccaacatagagaaactctgttcctaataaaaatacaaaattagccaggcttggaggcgcacacctgtaatcccaggtactcaggaggctgaggcaggagaatctcttgaccccgggaggcagaggttgcagtgagccaagatggcgccat

SEQ ID NO: 698726 - DNA, 799 bp, Homo sapiens
  misc_feature (374)..(374): n is a, c, g, or t
  misc_feature (398)..(398): n is a, c, g, or t
  misc_feature (401)..(401): n is a, c, g, or t
  misc_feature (411)..(413): n is a, c, g, or t
ctagtaggtagggttagtaggtagggctagtaggtagggttcgtaggtagggttagtaggtagggctagtagtgtagggttcgtaggtagggttagtaggtagggctagtaggtagggttcgtagtcgggttcgtaggtagggttagtaggtagggttcgtaggtagggtaagtaggtagggtgcgtaggtagggctagtaggtagggctagtaggtagggttagtaggtagggctagtaggtagggtagtaggtagggctagtaggtaggtctagtaggtagggttcgaggtagggtcgtaggtagggttcgtaggtagggttagtagcgcgtctgtgctgcttccacctggtgcttcctgttcccaaatcanaagggcctgaaggtggtccctgcnttnctctttctcnnnctctgtgtctcagatggcgatttctgctgacagctgccacgtaaaatgcttcactcaacagtcctcatgtgcccagagatgtctatagaactgtctcgacttgcagcgcatcccctgtcccctcccaaggtcctgcaggatcgtggttctctgctaaagttcagaattccggggaagtgtccgaatccattttatactccaagaagactggtaagtcgctacttggaagcagcttcaaagcacatgaacggcaccaaactgacttaacgggttcgccctcacccgaggtaaaaccagatcttcattccccttgtaaagggaaacttgggcgcagcaaaggtctgcggtatagcactagcaaccagtgcttcaacctttggcactgg

SEQ ID NO: 698727 - DNA, 416 bp, Homo sapiens
  misc_feature (167)..(167): n is a, c, g, or t
  misc_feature (406)..(407): n is a, c, g, or t
tgtttgtaaaccaaatgcttcttgagagcaaaagaaaagtctttctgtgtgggaacacaagatagtaaacttatttaaaaaaccttattagtagaattagtggaaacacttaggttaaaagtgaatcttgtccatataaattatattcattggccgggcgcgggtgntcacgctttgtaatcccagcactttgggaggccgaggcgggcggatcacgaggtcaggagttcgagaccacggtgaaaccctgtctctactaaaaaatacaaaaaattagccgggcgtggtgcgggcgcctgtagtcccagctactcggagaggctgaggcaggagaatggcgtgaacccgggaggtggagcttgcagtgagccgaggtcgagccactgcagcctgggtgacaaagcgnntccgtctca

SEQ ID NO: 698728 - DNA, 140 bp, Homo sapiens
caggtaaacagctatgacaatataaaagacgtgacaattcacaaggtggaggcaggacagaatgtaggtcgcggcaagtaaagaaaatatagacttgaaagagaggcctgacatggtggcttatgcctgtaatcccagca

SEQ ID NO: 698729 - DNA, 319 bp, Homo sapiens
tgtgggtagcacaactagggtcagttttgcaggtgtaagccatttaccaagatagttgtaggtaaagaagggcagatttattagagaaattgtgaaaatatgttgcatgtgggcagctcagcagagaaggggctacctgcaaagaggcaagggctggaggaaagttttatagggtcctgctgaagggtgctacgtgtggaatgaggtcattgtgcccgcaggttgtttgtgattagctgtctctaacaattgttcatacaataattgttcattattgttctcaacttggggctctccccaacctggggacccttcctta

SEQ ID NO: 698730 - DNA, 249 bp, Homo sapiens
  misc_feature (155)..(155): n is a, c, g, or t
tctgagctagggtcactaagaattacagcagatgctgttttcttcttccagagaagagaatgcccttctcccctgcccatcacttgaagctgaaacttgaagtatcacttcctactcaataggccaaggccatacacaatgatttagataatggnctgaaagactgcctggaatctaaacccagctttgacacatttactagctagctgtgttattttgggcaggttatttattatttattgtatgtcg

SEQ ID NO: 698731 - DNA, 309 bp, Homo sapiens
ttcaattgggggctactaattgatttgttgcttggatttcctgagaatttctctatttgtaggaagggttttttctttttacggtctgttgatgacaattactttatgggtgtgatgcaccgatggtacccaaggaatgtgttggggaatttcgaaaggaaaccttttctttcttttatctatgccaaaggaaactttatgctgcatgtttagaaccaacattaacagatctcttctggagtgaacagatctagctgtcttggatacaatattttgtgggaaaatgaattacctgcaacatgagtgatt

SEQ ID NO: 698732 - DNA, 859 bp, Homo sapiens
ccctcgccaccactgtcaagctgggagcgggggggggggtcatggaggaggacccttggcttccgtcgtggttcgtctcggtgtctcaagcaggagcagtacggtgcagggactggaggctctggggcgcggaggcgcggcgggctgcagcaggccccagagcgacttgatgaccccctcaccgactgacagagctacgcttcccctcttatagcaaacaccagcagcgcgagtcttggcagggatggggagcggggaggctccaaatccgactccaaccacatgaggaggtcactccccatccagacaaaccctgacacgaacggactccgagtcccacggaaggctcgacaagaactacaacggaaggcaaactcccatgggaatggagcggggccgaaaacacgcgggacgcggagtactagccacagcactgaaacaacacagacaattacaagagcaaatgaagcacgcaaccgtctacataccacagaacagagacaaacatgacaaagcagagagagcacaccaaagaaacaaaacaaaaaaaagacacacaacaaacaacacacacagcgtgcggtccggggcgggcgtcctcccggccgggcggggcggggggggagggaaaaaaaaaaaaaagaacaacaaaaaaaaaaagaagaaaaaaaaaaaaaaaaaagagagaatagacgcacagaagacggtacgcgcaggcgccacggcaaggccgacggccgcctagccatagagcggcctcatcacgcgcgcgacggtcagtaggctgggcgaacatggtgtgacacagagcgtacgcaatcgggggcgacagcatgactacagggagtccctgcacaag

SEQ ID NO: 698733 - DNA, 637 bp, Homo sapiens
gctattctccataggaatagtcgcccctgaggactgattcccatctacaaactgccccagtctacataactgtaggaggagcagaaaggccctgctgccaagggcggtgactgcttccacagaaactctggtaaatagtgagtgtggctgtgcagctgcggagccagcttcctccacatgagggctaaactgaatcctgtctgagagcccagagattggtgacgcagacaatgacagccaattgggaactgccacttaagaggacacacttgcttgggaccaacgggactagggtggagggtataaagggtgctccctgagaattaatcaaaagagctttctgccgcattctcaccggctcctggagtctgagcagttgattcgccccttctcacccactgcccccaaggggacgcagggcaggactgaggactcaagcaacacataaccacagtcccttcccaaggagggctgtcccttaagctactccacagtcacagtcacttcccaaggaagactgtccacaacacagtcacttcctacgtttttcagttctattgtggagctgaaatttcaaccagacctaaatatgtcagtgatgaacaacacacaggacaatggcccatgagattatacc

SEQ ID NO: 698734 - DNA, 220 bp, Homo sapiens
gttcgcgagactcatctgtactctccctcccttagttctgactgacagtctacacaatgtccatggatgatcaaaccctggagaactggagcagatcaacttactgacctgacattgtcatacttgcaaagaaatgtgaaccatcaggaccgttctccggttagctgcaacgttggagcatttcttcatcaacaggatacctctcatgaccccttacatc

SEQ ID NO: 698735 - DNA, 790 bp, Homo sapiens
  misc_feature (567)..(567): n is a, c, g, or t
ttgggtttccccacacaacgtcgatttatgatactatggggggcaacaaacaaatggggcctattacatccaagtatattttcatgcccaggcgtagtaccttatgttccagattgaataaataattcatcaccctggtgtattattcttccatggcaatgcctcccatgttcgctcctcgttctcgggaccagtgattaatcccgcatcagttctgtcgacacggctttatatgcaagaaagcgtccacgcaatttaggtctgagagagtatttataattacgcatgtcaaaacttttacttgaagaatatgtagtagaattagcgttggcggggtgttcatgcccccccgcgcccacaaaaaacacacaaccaaattgtggttctgcacactccagcatcgcccagactcttaacactgaccattgggaggtgtccacacaatcggagctgtcttgcacccactccactagtggaggtgactcggctccctcaccacgcaaatttgactctctcgagtgagacataagtacagaagtctgttgctaacgcactcctcgctctatntttctaataattggcgtggagtagatttcccacgcgcatgggttcggcgtctaccgccgctcgtatgaattcccacaccaccactctgcgggcgtgcacgagcagccagcctcgcgtctgtactctttaggcacgcacggatatctgcgagacgccaccctgcggcctcctcactgtagggaagatcattgtctttctaccgtaaataaaaagaccaaacaat

SEQ ID NO: 698736 - DNA, 518 bp, Homo sapiens
tgtttttgagcccaaggaacaagtatttagtcatgattgccactcgttataggctctgttaacagtgtaaagaaagttggaagttctctcctgagaagaagtaacttcaatgcggaaggacccgggcttctcatgtttctctttgtatcccgaccgccgggaactgccttacctgcagctacaaagtcctgcaagtgaggcttagacccagatcttgtgaactgttttcacatttccccatggatgcctagcaagggactgggactgcctgatccgctttggtcaagagcacgtgggtggcctgtgtgcaggcttatcatcaataattgcaggacttggtggagtatggttgaacaggtgctcagactgcatgcgtgtctagcgaggccatcctgaagctgcatgggagttgtaaaaaagttaccaacaagtttttagttatttgaataggtttttgaatagatttggaatgtgggaagcacttgcagaaataaacgtcttaatgactaaaaaaaaaa

SEQ ID NO: 698737 - DNA, 180 bp, Homo sapiens
actctgctgagaccctccgttcacattcgagcatcagtgccaggcggcactgcgctccaaaactcacaccctacttccttctgcgcaagcggagcctgcgcaccttgctggaataacacagagccttagcatagcaattgcgctgcccgctctataccaagatttctacaaagaatataa

SEQ ID NO: 698738 - DNA, 346 bp, Homo sapiens
ccccctgggggggattgtcttcccatgtttaaccccggtttaataaataaaaattggatttttttggtcctttatataaaatttgatcccctgggggaatttccccatcccggtcccatttttttggcttttataattcccatggtttttttttttttaattaaatcccaagttacccttttaattggtgggctggtttttttcctttttttgaaggtttagccttttctggggtttttttgtgaatcctcccgcccttccaatttgttttattattgtttgatgaaaactttttttttgggggtggttctggagttggttgggccattaaagttttcttttttta

SEQ ID NO: 698739 - DNA, 586 bp, Homo sapiens
ttaaaatgactgacaagttgctatgaggtgtccatagagtgttcaaggtcataaagacagtgtgtgagagtctatattaccagtgcttacattcttattcaaagtctatcacagatgtacacagttggagtaagaatagtcatagctgtgtagaatactggcatcttcatcatcaaaggacaggtctatgaaccagaatatagagcttgccaactgctgacactgcaatgtctcagtatctcgtggacatcatatccgttctgcttccgttctcgtagctgaagtatctcccaaaatgtgtgttcatgcaggggtatgcatgtatagtcgtcgcaataaactcagattatttacattaggtcaggtcatactttgcaaaactcgtctactatcaagactttatgtgcgaaatctctcatgatgtagatatagcttcgttgcactaacagacagtgtgtttaagccctgttgctaggtcgccggagttaggaaggaccgtgtgtccagttggcactttccgtttcatatgcatactctgagttaatagagtggtgtctgtgtgtcgacagcgaagaggagtgcatag

SEQ ID NO: 698740 - DNA, 128 bp, Homo sapiens
gaagaggactctgagatcatcagcgatgacatcagtgacatcttccgcttccttgacgacatgagcgtgtgcgactcgctgggcgtcatccaatcgtcgtgctacaacagcatcggatctctctctca

SEQ ID NO: 698741 - DNA, 626 bp, Homo sapiens
cccggctgggggaactaaactttcatcctccatctcccggtcccggacggccccctagaacgcgggcaagagtccgtgtgagaaccgggacacctgtcctgttgaaaagggggacgcaaaagctgaaaatgcccggaaggatatggcttccttgaactgcgggacgtgtagctgcagctgtggggtggaccatggaaacagctccatcagaagtaccagggaggactctgacaggcctggcctggatcagcaggaagaagagatggaagcaacgccatggaccttcacgtccttcagagtggaccataggggctggcagctgaagaaggtgacttggcccctctctagagggtgaacgcaggatcaattcaaggccatgaagtggatgcagctgggagagcctgcttggtgcttttaaacctcaacatgtcaaccgcaaatacctcaaacactgctcacaccgtggtaaaatctagttgcgaaacctgtcccgtggcagccttctccatcccaggtgcccaggccccatctcctgggagcaggcagctctccccaccccgattcatgtccctcctacagcccaaggcaactccctgccaccttggtgaatgaagcacatcatgctg

SEQ ID NO: 698742 - DNA, 752 bp, Homo sapiens
atgtatatttcagtgtagctagaagagaggaatggtagtgttcctagcacaaataacagataaatgtttgagttggaggctatcccaattaccctgacttgattgttctaccttgtacatatatcaaaatatcatatgtaccttcaaactatgtacaactatgatatatcaatttaaaacaagaatctttgggtgggcattattattagtctttttttatagatgaggaaaccaagactaccttgtatgttttcacacaagtagaaggcaaactcaggacttgcatccaggttcgcctcaagctaaggtcaatgtggtagtccagtgtagtaagttaagtaataggtattttgaggcggaatgttgttctgtcactcaggctggagtgcggaggcgtgatctcagctcactgcaacttccgtctgccgggttcaggtgattctcctgcctcagcctcctgagtagctgggatttgcagaacactcaacacaagcccagctaattttggtatctttggtgggagatgcagttttcaccctgttggccagacttggtcacgaaaaatcctgatctcaggtgatctgcccgctttggctcctaaagggctaggattacaggcgtgaccattgttgccggtcacaaagctaaggccatgggtttaaccaatgtttagcatgtacaggtgaaatgcctttaagtttgagtctcagaaagccttagtggttcagacattttatacttcataaattata

SEQ ID NO: 698743 - DNA, 1024 bp, Homo sapiens
  misc_feature (3)..(3): n is a, c, g, or t
  misc_feature (6)..(7): n is a, c, g, or t
  misc_feature (12)..(12): n is a, c, g, or t
  misc_feature (16)..(16): n is a, c, g, or t
  misc_feature (19)..(22): n is a, c, g, or t
agnggnnggtcntcgnagnnnntgggacgcgactgcagttaccgagtttctaaggcctcgtcccctgacgggaaggcggcgttggggggcggctgggtttacccttcgaggagttagaaaacaccaggaaaagggttgttcccacctggaagagaaatgctagagcaacacaccatcttcctcaacattatcatctgtctctggatgacaatgaaattcacaggacactgattgtctttttatcccattggacatcgtgatagtctacaatactgataacaccatgatgataggatctgaagacctggaagtaccagaggcagggtttcgccatgttgcccaggctggtctcgaactggacgcaagcaatcctcctgccttgacctgccaaagagctgggattactggatcagcaggaagaagagatggaagcaacgccatggaccttcacgtccttcagagtgtgggtgggcttgggctttgcagtgagagcaagtatcacccaggatggagatgggaggtaatgggtggccccgacaggtgcctcctactgctggcagcaaggagagagtgaagaggcagaatttccttggtctagactagagtctgggtcatgggcatggcagtgcttgagcttttgaccagaagcaagtggacatggatttgagcttcgggtaagaagggagacttctctccagggaccataggggctggcagctgaagaaggtgacttggcccctctctagagggtgaacgcaggatcaattcaaggccatgaagtggatgcagctgggagagcctgcttggtgcttttaaacctcaacatgtcaaccgcaaatacctcaaacactgctcacaccgtggtaaaatctagttgcgaaacctgtcccgtggcagccttctccatcccaggtgcccaggccccatctcctgggagcaggcagctctccccaccccgattcatgtccctcctacagcccaaggcaactccctgccaccttggtgaatgaagcacatcatgctg

SEQ ID NO: 698744 - DNA, 857 bp, Homo sapiens
  misc_feature (3)..(3): n is a, c, g, or t
  misc_feature (6)..(7): n is a, c, g, or t
  misc_feature (12)..(12): n is a, c, g, or t
  misc_feature (16)..(16): n is a, c, g, or t
  misc_feature (19)..(22): n is a, c, g, or t
agnggnnggtcntcgnagnnnntgggacgcgactgcagttaccgagtttctaaggcctcgtcccctgacgggaaggcggcgttggggggcggctgggtttacccttcgagagtccgtgtgagaaccgggacacctgtcctgttgaaaagggggacgcaaaagctgaaaatgcccggaaggatatggcttccttgaactgcgggacgtgtagctgcagctgtggggtggaccatggaaacagatcagcaggaagaagagatggaagcaacgccatggaccttcacgtccttcagagtgtgggtgggcttgggctttgcagtgagagcaagtatcacccaggatggagatgggaggtaatgggtggccccgacaggtgcctcctactgctggcagcaaggagagagtgaagaggcagaatttccttggtctagactagagtctgggtcatgggcatggcagtgcttgagcttttgaccagaagcaagtggacatggatttgagcttcgggtaagaagggagacttctctccagggaccataggggctggcagctgaagaaggtgacttggcccctctctagagggtgaacgcaggatcaattcaaggccatgaagtggatgcagctgggagagcctgcttggtgcttttaaacctcaacatgtcaaccgcaaatacctcaaacactgctcacaccgtggtaaaatctagttgcgaaacctgtcccgtggcagccttctccatcccaggtgcccaggccccatctcctgggagcaggcagctctccccaccccgattcatgtccctcctacagcccaaggcaactccctgccaccttggtgaatgaagcacatcatgctg

SEQ ID NO: 698745 - DNA, 90 bp, Homo sapiens
aattcaagcttctaacgatgtacggggacatgtttcttgtgaagggaaaataaacaaggtccagttttattttactagatagcaaaaaaa

SEQ ID NO: 698746 - DNA, 99 bp, Homo sapiens
gcggccgcctactactactactactgctcgaattcaagcttctaacgatgtacggggacatgtaaaagacaaataaatgatgacttcccccaaaaaaaa

SEQ ID NO: 698747 - DNA, 422 bp, Homo sapiens
  misc_feature (294)..(294): n is a, c, g, or t
cccggctgggggaactaaactttcatcctccatctcccggtcccggacggccccctagaacgcgggcaaggtatctaggccgacggcccctcatggggacccaggccttcttactcttttgggggtacattcaaggcttagaggccaccccagacaccatctccggaagagtgacgtcggaggacgagggggcaacggaaaggtcaaaaagatctctgatggatttgttgactcctctgtgggagaaaggcttggtctactgcaggtgttaacgctaagccaggctggagctgnggacgtcagtttcctcagctccccgctgttcgcttcgaacgtgacctcgacgtctgctctccccttccctttagctgacaatgtgacagtgcttgaataaaagtcagtctgacaggaacggtaaaaaa

SEQ ID NO: 698748 - DNA, 239 bp, Homo sapiens
  misc_feature (25)..(25): n is a, c, g, or t
  misc_feature (57)..(57): n is a, c, g, or t
gttccctgcaggctgtatcatttgnaaatattttctcccattccaaaggctgtctgntcactctgttaattatttctcttgctgtgcagaagctttttagtttagtcccatttgtctatatttgtttttgttgcctgtgctttgagatcttagtcaagaattctttgcctagaccagtatctagaagaagagttttctctaggttttcttctagtattttcatagtttcaggtcttcct

SEQ ID NO: 698749 - DNA, 337 bp, Homo sapiens
  misc_feature (209)..(209): n is a, c, g, or t
ctggaagagggccttgggcaaggcgtgaagcgattctgaatctggttcctattgttttttattttaaatggagttgtctatttggagtcaaggcaagagtgtttagtcttggccctcctattacagatctctgatggatttgttgactcctctgtgggagaaaggcttggtctactgcaggtgttaacgctaagccaggctggagctgnggacgtcagtttcctcagctccccgctgttcgcttcgaacgtgacctcgacgtctgctctccccttccctttagctgacaatgtgacagtgcttgaataaaagtcagtctgacaggaacggtaaaaaa

SEQ ID NO: 698750 - DNA, 321 bp, Homo sapiens
  misc_feature (3)..(3): n is a, c, g, or t
  misc_feature (6)..(7): n is a, c, g, or t
  misc_feature (12)..(12): n is a, c, g, or t
  misc_feature (16)..(16): n is a, c, g, or t
  misc_feature (19)..(22): n is a, c, g, or t
  misc_feature (193)..(193): n is a, c, g, or t
agnggnnggtcntcgnagnnnntgggacgcgactgcagttaccgagtttctaaggcctcgtcccctgacgggaaggcggcgttggggggcggctgggtttacccttcgagatctctgatggatttgttgactcctctgtgggagaaaggcttggtctactgcaggtgttaacgctaagccaggctggagctgnggacgtcagtttcctcagctccccgctgttcgcttcgaacgtgacctcgacgtctgctctccccttccctttagctgacaatgtgacagtgcttgaataaaagtcagtctgacaggaacggtaaaaaa

SEQ ID NO: 698751 - DNA, 139 bp, Homo sapiens
gcaaaaaccattttcaagaggctgtctgatatgttaaatactccctctcccagatgattgaagtcaatatataactagtctatactattatgtcactatacacagaaatgttagagttaaaaaataaaagtacacaggc

SEQ ID NO: 698752 - DNA, 113 bp, Homo sapiens
aatgcagcggactcggcaggagaaggagataagagacacattctgaatgcagagaatgacaacactaacaaaggcattgaaatagaggagggtatcataacgcaaggtgacat

SEQ ID NO: 698753 - DNA, 113 bp, Homo sapiens
ctgtaaaatctttaaaatacgagatgcactcgactcagatgtgaaagtaataaagtatacaaagacatgttgttctataaaactatcttcgtaaattatctgtctgacggatg

SEQ ID NO: 698754 - DNA, 285 bp, Homo sapiens
catggatgaaccttaaaaatattatgcttgggtccagagtttcagtatgggaagatgaaaatagttctggaaatgtatgacgttgattattgaacaacaatgtgaatgtacttaatgtcaatggaatgtattcttaaaaatggttaaaatggggccaggcacagtcgctcatgcctgtcatctcagcactttgggaggccaaggtggaaggatcgcttgagtccaggagtttgaggttgcagtgagctatgagagcaccagaacagtctagcctgggtgactttg

SEQ ID NO: 698755 - DNA, 1376 bp, Homo sapiens
attctcggacggccctgacgcagccatggcggaggcggctttggaagccgtgcggagcgagttacgagaattcccggccgctgcaaggggtgggagctgccctggggtcaggtgtgagcagtgattactggcatctgggcatgggctgagtgtccattcctctagagccacagtgggctccacagaggtgagtgtggccgtgaccccagatggttacgcggatgccgtgagaggggatcgcttcatgatgccagctgagcgccgcctgcccctgagcttcgtgctggatgtgctggagggccgggcccagcaccctggagtcctctatgtgcagaagcagtgctccaacctgcccagcgagctgccccagctgctgcctgatctggaatcccatgtgccctgggcctccgaagccctgggaaagatgcccgatgctgtgaacttctggctgggggaggcggctgcagtgacttctttgcacaaggaccactatgagaacctctactgcgtggtctcaggagagaagcatttcctgttccatccgcccagcgaccggcccttcatcccctatgagctgtacacgcccggaacctaccagcccagcgaccggcccttcatcccctatgagctgtacacgccggcaacctaccagctaactgaagagggcacctttaaggtggtggatgaagaggccatggagaaggtgccctggatcccactggaccccttggcgccagacctagcacggtaccctagttacagtcaggcccaggcccttcgctgcatggtgcgggccggtgagatgctctatctgccggctctgtggttccaccacgtccagcagtcccagggctgcatcgcagtgaatttctggtatgacatggaatacgacctcaagtatagttacttccagctgctcgactccctcaccaaggcttcaggccttgactgatggagcactggtgaacacgaccaagcacgcctcgggggacggagccagcccctccctggccaggtcaattctcgagagagcctggagtgtgcatgctggctgctggccccgggtccagcatggcttgagatcagctttggaggatcttggaatgtggtcataaggactcaaggtgccaggcaggtctgggtgagggttctcaggaagttgccacacaggtgagcagagtggggatcaggtgcagcggcacctctccccagcgctgtgatgttgggcgagtcactgcgtctcgggcattggtgtcctgtcagtaaagagataataatggctgtacctcgcggggctgttgtgggcttggagatgatgtctatgaggaccagcatggagctggcacacaggacatgttgaataaaaggtagctgtg

SEQ ID NO: 698756 - DNA, 174 bp, Homo sapiens
atcgtgctggtaattgggagttagagatggtagcttcccgactgccccattcgattttgttctgcactgtcattagcccagttttgctcacttgcttgcttgtatgtacattgcgacaagaagaacttgctttctgtcgccagataaccaagctgctaccacaggaggcagaca

SEQ ID NO: 698757 - DNA, 343 bp, Homo sapiens
gtgaggtcatacccagccatttgaagctggaattttaaccaaagcaatgactttgtaccagaacccatgtccttaccttaggaaatggtggccttacagtgacaaagagaaggatatagaaactttaaagccgagaaggccaaaccaagaatggggacactgtgcagagaatattatgagagaccaatactagaggtcagggaagaggagagcaataagagaggaattcagaaagggatatttaacatccatggagaacaactcactctagtttgcagctgtatttaacatcctcaatgtcacaagttttcacacaagggcatttgaaaggttaaaagttact

SEQ ID NO: 698758 - DNA, 490 bp, Homo sapiens
ggtttgctgtggctgtgcgggttctggggctgcggtgatgccggtacacctctcggtccttgcgaggaccggagagcatggacgatgtgccgcagccgttagggtggagtcacgggtccagttggtcgactgtgaggatcttgtccccctgccctgaggatgcggctgcggtgcccggctggtcgcgcgcagtgcgcattccttcagttggggtacctcgtgaacccgcacatcatccagttagggtccccagaagcacgggcgtgttgtttgcccggccaggatgcttcatcttccggatcgatccgggaatggggcagaggcaggccgggttggtgcgactcataaacaagctcttcaagacaacctggttgaatgtggagtcggtacttctggccagaaagctgtataacttgaccaagagcctcaggtagatatcctggctcttgggctccatgcgccgaagctttcggtccttgttatggcggat

SEQ ID NO: 698759 - DNA, 1981 bp, Homo sapiens
ccgggtccaaaacctccatccggagccggcaggagaggagaacgatgtttaactcggtcaacctgggcaacttctgctcgccgtcgcgcaaggagaggggcgcagatttcggcgagcgagggagctgcgcctccaacctctatctgcccagttgcacttactacatgcccgagttctccacggtctcctccttcctgccccaggccccctctcgtcagatctcctatccctactcggcccaagtgcccccggtccgggaggtctcctacggcctggagccatccggcaagtggcaccatcggaacagctactcctcctgctatgcggcggccgacgagcttatgcaccgggagtgcctgcctccttccaccgtcaccgagatcctcatgaaaaacgaaggctcctacggcggccaccaccaccccagcgccccgcacgcaacccccgccggcttctactcctcagtcaacaagaacagcgtcctgcctcaagccttcgaccgtttcttcgacaacgcctactgcggtggcggcgacccgcccgccgagcccccctgctccggcaagggcgaggccaagggggagcccgaggcacccccggcctcgggactggcgtcccgggctgaggcgggtgccgaggcggaggctgaggaggagaacacaaatcccagctcgtccggttcagcccactccgtggccaaggagccggccaaaggagccgcccccaacgccccccgcacccgcaagaagcgctgcccttattcgaaattccagatccgggaactggagcgagagtttttcttcaacgtgtatatcaacaaagagaagcggctgcagctgtcccggatgctgaacctgacggaccgacaagtgaaaatttggtttcagaacagaaggatgaaagaaaagaaactgagcagagaccggctgcagtatttctcgggaaatcctctgctgtaacctgcagaccgggcccttttgggggcggggggaggggaaaattattttattttatttttattttttattttctaactcgtcttctttccgccggtggaaaactggactgtggccagggctggcccccaccgctgtggccggcactccattccggaacctcctggaccctctatctgactctcgctgtgggacagggaccgggcctggaaagggggtgaagggaagtgtctgatgcacggcgagtgaacaccgttggcgccgaggccaagactttgatttaaaagaaaacacacctcggcgacaatgtcttgctgctcggattaggtgggggaggggcgacagtagtgagcgcgcctgagccgaacaatcctcgaactaaaagccttcccttgcccatgtgaaaagatccgctaagacagatgtctgccagcggaaacttctcgagctcccccctctaccccgccccaccttgccccactactttagggggcagctaaatgtgatcctgccttgctgtgaaatttctgtaccttcaacctggtgttaggtgtgcaaagtccgtgtcctacctccgtcttcgccaaggccccgcccgagcctagttgttctccccctgaatgtgtagaaccttcctttgaaatttcttaatcggtgcattgaggtttccacatctttttccaaagcagtgcccacttcatggatttatagctatagtctatgcagtcgttacctctttttttttttttttaagaaaattgaagattggggtggtggaggcagtagggagatgggattgggcacctcccccgtgctggggcctggatttttgtaaataaatttcccaagcgtttctttccacctggagggaaagggggggacgcccccagtgagattcaaatcacgcatctctactcctctgcgtgagtgcgtgtgtacatgtgcactccccaccctgctcccttcccagagggattgctgtgaaatttttttggtggcaaataaagataaatttcattctgttc

SEQ ID NO: 698760 - DNA, 415 bp, Homo sapiens
  misc_feature (342)..(342): n is a, c, g, or t
ctgagcaagagagacagactctgggtcaaaaaataaataaatacagtaaaataaatcgcatgggacgaaaggtttcgtgggtagaaaagcatataacaaggaaatctgttattatttatatattgtaatcaccaacagaaacgcgtcttctaacggcatatttccttgcattttggttctcatatttttgtaaaaaacaaagaaatgaaaacaaagtgcccttatggtactgttctgaactagaagatttgaatttcagggccactaggagagtttcctctgccccccttttaaaaaatgtcttcaggcctaacaaatgttaacatctattgttatgaattnttttccttccacagtgtgaccttggagatacctcatcatatcacacaaagagatgcagatagatctttgagca

SEQ ID NO: 698761 - DNA, 142 bp, Homo sapiens
agaggctcacctgggcagtgtgggtgctgttccagtctgtcagatgctcacctgagggtggggtttctgttccaggctgtcagatgctcacctgtggggtgtgggtgctgctccagaccatcacattcgcacctgggggtgt

SEQ ID NO: 698762 - DNA, 109 bp, Homo sapiens
tgggcaactgagacaccacttgggaacaccgagccccccaagggcaggttctgggcctggtccacctaagcctggtctccacctacctccatgcacagtaggggcccag

SEQ ID NO: 698763 - DNA, 1186 bp, Homo sapiens
gggtagacacatcggagagcgctgctgggcctgttgtgtaagtgcagcttgtgtcactggactagtcttctaggcatatccggcgcatgtgttgccgatgtggggtcctcgagcgggtccctggtgcctggccggaggccgggggcgttctggtgggcctcttgatctaggtcgtgcctgcatgagggggtcgtgtcgtccaggtgatccggggacgagtgggcccatgtgcaagattaggtctagccatgcggttacttggaccaagcaagtgcctgattcccagcgtgcaaagagacaagaccggattcctggtggagaagcgctgctggggacatcgccttgggtccccgtcaaacagattccccattgaatctcttcattcatgttccattgggcaggcaatacttatctcccattctttcccgtactattgatcggtgtggtatggattgggcccttggagaacccaatttcaagggcactttattgggcccatttttcaaggcccacacttgtcacaacggagtgtttcacagacacacgttccaaggcgcaagaaaagttctctttcaagcgggacttggggtcgtaaatcctcaattgggcgaaactcttggagtggggtttctggcgcaatctcgggcttggtctaaccaacgggtttgcccaagtacccactgtgggacactttgtttttaaaccctttaacacaaatttggccatttcgcggcaattatgggcggataaagcgccctttccacattttggaaaggcccccctccttgtgaaggaagacaatttgggcagatttccaacgtagggttggcgacaaggaaccttgcatcttattggtgaacacaccctttggtcacactacaagggcccggtgcgtccttggtgttgcgccgctaaacatgagtaaatctcggggagggatcacattgaatcttctaacacagtttcccgccttttcgttttaaaagagcccccatgttgtgggtatcccataataaaacggaaattaaacgtctccgtttataacagggctaacattttccacccttattaattgtgttgttatacacaaaggtagatgaccaccaaaaaaagagctctcgtattatatcaaccaccagtgtgatgtggtagtagttagcaacaaagggacgtgcctcttcaggta

SEQ ID NO: 698764 - DNA, 178 bp, Homo sapiens
gtggtcctagactgtcttctaccagctgcagtcatttcctacagtgtacacgaggacaccccggagctttgaacggcgtggattgtgcaatcttcgggtccccatacccaatgacaatggcgctctctgttctagtaactatagaaatgtgtaacgccctcaacagcttgtccgaaaa

SEQ ID NO: 698765 - DNA, 192 bp, Homo sapiens
ggatgagtgaggcgtgaagcggatcgtggtggaaggaacacattgatgcgagatatctgggtctagatagtatctagtagtctgcttccagtgtattcacagccgggacaagatagcaagaccctgtctccacaaaaaataaaaaaattagcagggcatggtggtcccaggtactcaggaggctgaggtgga

SEQ ID NO: 698766 - DNA, 238 bp, Homo sapiens
actcagtttacacaagtacttagcatgtcacacggcgtctgtatttcagatacacagtaacatgcgtgcaggtttgtagcctagcagcaataggctataccagatagcctaggtgtgtagtaggctagaccgtataggtttgtgtaagtcactctatgatgtttgcacaacgacgaagtcacctgacgaaggatttctcggtctgtatccctgtcattattggtggtgtaaactgatg

SEQ ID NO: 698767 - DNA, 795 bp, Homo sapiens
gttttggattccatgacagctggacccggcttctgcgtgggaagagtgtatcacagccatagggaactttcttcacccatcaaagcctcagggctgaagcatcctgaacaagaactcaggagagtgaaagaaacagttacctgtcggctgcagctggtaccagctccccaccccgtacagagaccgaagcgtcctctctctccccatcacccagcaccagactctgccccgcgacctcagcctgcacctgcttcctggctccatccagccttccagcctcactagatcatcatgggccactggccaacacacagggcagtgccgagcccaggccgtggtcacacatggctgggttagtagctgaaaacattgtttttcactggcctcacagtaatggcacctgcccccattttctgtgattgaatttttggatcctgctaccaggttatgatagattttatggtatgtctcaagatattgagataaaggtaataaaacagctataaagtcctggctaaaaaaaaaaaaaaaaaaaaaaaaattaaaaaaaaaaaaaaaaaaaaaaaaaaaaaaaaaaaaaaaaaaaaaaaaaaggaaaaaaaaaaaaaaaaaaaaacatgcggccgaaattcgggctaatttggccaattcgccctatagggagccgattaaaattaaactggccgcggttaacaacgtctaaattggaaaaaccttgcggttcccaaactaaatggccttgaaatccccttttggccagttggcgtaataccgaaggccccacctcgccttttc

SEQ ID NO: 698768 - DNA, 793 bp, Homo sapiens
taaaccctgaagccccaaaagggaaccagggtttaatacttcatttctggttaaataacagccacacagtggggggtacccagtgaaactattcccgtgccaggttaggaccccccagttggtggtctataaaataggacccgtgccaggcttttagtttggacccaaaacctcattctctcaggtctcctccctcaacatcttattcgtataagagctccgggtggtgcgtgtataaataccaggcgagtggaacagacactcaattaaggaagcggtattggagtgaacagcccgggctacaataggtgtgttggcagccccgtgcactcaaattcacacgcctcttttattccccagtgggtataaatttcttataaaaagctgtggcccacaactccccaacatcagtggtggatgtggtgaacaatttcctcccaaacactcttctcaaatattatttcagtgtcttatcaaagagggcacatttaatcatgaggggcaagtcaaacaatattccctcaaagcgtgtgccctcttttgtagaaaagctccaccggtgcttcacggcgtgcctataaaaatctccactctataacaatagacgaggagtttcccgtgcccaccacagtccctttccgaggtgtttaaaaaacaaaaggtagaacacccatttgtatgtgccccaaggggcccttttgaaaaaaatacgggtaaggtgccaagagattgccaaaccaagaaataaaactgggtggtacgcaggtgtcacctttgggggaaaacgctttga

SEQ ID NO: 698769 - DNA, 337 bp, Homo sapiens
gacttctgcacacctggtctgctgagcctctctcggagtcccggagaccagccccacaggagggctgcaccaagctccataactgagcatacaccatcacttatttctccccagccataggcgaggcactgcagacactatcctagggccctattgagttagtatactagacagccttgtgaactcagcatatacacgccattcctatatattacctactcttaacatctgaaatgcctggagcagcttgcttcactgactggactctgagcgggacaccatagatctcggacacgcataaggcttatttacacatcagagtatgatttttttaaac

SEQ ID NO: 698770 - DNA, 144 bp, Homo sapiens
ggggggccccttttttcccccctttttgggggggtttagccagaaaattttttttccccccgaaaccggggttttcttttacccaaattttcccccctcccttcccccttcccccttgggccccaaaagaaatttccttttcta

SEQ ID NO: 698771 - DNA, 765 bp, Homo sapiens
ggtccgcccgggggctgccgcccaccgcgcctcgctcgggccgttgccgtctgcacccagaccctgagccggcgccgccggccatggaggtggcgcctggagcagcgcgcgcatggactggctgcaccctggccgatgctgaactgcgcagacaccccgactcacaccagcctgggcctggcgcacaactacatggaacccgcgcagctgctgcctccagacgaggatggacgtcttcttcaatcagctcgactcgcagggcaatcccatactatgccaagcccggctcacgcgcgggcgcgcgtatcctacaggcccgcgcacgcccgcctgagcggaggccagatgtgccgccacacacttgttgcacagcccgggtttgcccttggctggacgggggcaaagccagccctctctgccgatgcggcccaacagcacaagcccgtggaccgtgaggccccttctccaaagaacgccagtgaaccaccttcagcttgctggagggccctggaggcccaatctctgtgtagccaggggctggtgagagattgggacgccgagggagacgggcacgcagaaggcagcacaagatggggacatcacccgtacaggccgcaaaaaagggaaagcggccgagctacgtggacaaaaccgcgaaacgattaaacgggggactaccccacaagcgcccaaagggacacacccagaagaagagaacagatggtcagtcgcctgaaggccctaagagagcgtataggataggag

SEQ ID NO: 698772 - DNA, 104 bp, Homo sapiens
cgtgccatccacagtgcttaatgtgtacaacattaaaggcatggaccgtacaggaaagaaggcagactgttaatgcaaatacaactgaagtgtagacaactgct

SEQ ID NO: 698773 - DNA, 195 bp, Homo sapiens
tttttaaaaaagggtttaacttttttttaaaaaaaaatcttttaactggcccttattacaagggcccccataaagttgccgttaggaaagggatgggcagggaaaaactagtttttagggtctttaaataaaaacatgaggctaagggttggttttgtttttgttttttccttaaaaaattttatgctttatgga

SEQ ID NO: 698774 - DNA, 859 bp, Homo sapiens
cacgcagctgttcatcccctgcttaatgtactggtgagttccttgaagccctgaacctgaggacttcttgtgtactttaacacttttgttatatctgaagatattctgattggcaacatttttaacatagagaactgtttaaacgacaaatacctgccagcacacaactcatccacaaattgctgtctcccgaaaaagatggcgaggctgtgactgagatcatcagagaaccagcccggcaccccaaacataatagggcaaaggagtcagatgcgaatcccgtccagtatgagacactggaccaacaagacaggacccttgacctcagaaatgcaggaattcaggactatcctagaacatgaagtagcagacgccgtgccggcagacattcatagcactaaactcttgcagcactttcccccgaggactctgcgctgtctccacaacggcctctcggactgccaggctgtgaaagggcaccaaaccggtacccacgggcacagggacgtgcccccacccctacccgcagtgagccacgcacggccccaagctgccaaccatccaaacaccgggcccctgcgcaccctccccccatacgggatacaccaattcacccaccatcccgcaccatgccatctccactgcaacccactcccacttcctcccccgaccgcacaatcgaaataacaccactgccccaggcacacacgggcaacatcacacgcgccgcagcgcggccccagccgcaacacgcccacaccgaaggggaccaaaacagcacagctcccacgccacccgccgccaccgcacagacgagcacccccacctacaccacaagggccacgccaccacccaccac

SEQ ID NO: 698775 - DNA, 357 bp, Homo sapiens
agcagcagcagcagcgtccagttcgagatggttcaaaaaaacacgtttaaaacccccagctgtgacatgaccccaaagcagtccaaagtggtaaggccatcctgtggcttttgaaaatcaagaaaaggggcaagaaagagctcccggccagagcagaagccatcatagtttccctggaagaaaaccccttggtgaagaccctcctggacgtcaacctcattttttgcgtgagctgccccatctttatctggggctattttgcttagtgtggggtgaacccaggggtccaaactctgttttttttcagggccccatttttttaatgaaaaaaaaaataataaagcttttgtttcccca

SEQ ID NO: 698776 - DNA, 273 bp, Homo sapiens
  misc_feature (17)..(17): n is a, c, g, or t
  misc_feature (19)..(19): n is a, c, g, or t
gggatatagcgcttttnanttgggaaaaaggctatttgacccaaaataagtacatttgtcatgaactagcactgtgtggaaatgaatgtggatactggtcctgtgtcatttgggccacttggatgaaaaatggaaaggatccagtccaccttcagaaagggaaaaatggcccttcctgtactaagggacaaggtaacaccttagagctagtaataaccaatccccttgatccacgctggaggaaaggggagcatgtaccttagaatcaatggg

SEQ ID NO: 698777 - DNA, 310 bp, Homo sapiens
gcaagtctccgctgctgtggaaaacaaccctgctgattggcttaacccatgtcaacccctctgcaaagcttttattgccacagatgaagacattaggaaacaggaagagcgagtgcagcacgttcgcaagaaattggaagaagcactgatggcatacatcttgtagggagctggtgatacagaagagatggatattgaaatggacaggtggtgatgacgccctatgaatttgatcaaggaaactttcaaccgactttccccaagagaaaattctctagaaatggaacaaaaatgtttccactggcctttt

SEQ ID NO: 698778 - DNA, 837 bp, Homo sapiens
tgagtgcagcagcagcccctgtagccaggagtgtgccaacgtctacggctcctaccagtgttactgccggcgaggtaccagctcagcgatgtggatgggagtcacctgtgaaggacatcggacgagtgcgccctgcccaaccctgtggggcccacatttttgctcctaccggttgcataaacatccctggaaggcttccagtgcagctgcccctcgtcttgctaccaggcttgggcccccaaatttgccgaaaattgcccaagacaattgatgagtgtgtgacttgggcatccacaaattgttcaaatcaagaagacctgtttcaacattccagggcggttttccggttgctctaggcctttcgaagtgcccttgaagaactaacgtgcgttccgggagccccaaccctgttgtgaagcgctttgcctttgcaattgagaatcggggagtgctccaagcttggctctgagaattaacctattaccactctttttccccaccaaattcaagccgccgcgggtggttttccgcattgggcccctccatgtgctgccccggggacagcatgcaggttgcgatcaacggggcaattgagggagggcttttttcaccacccggaatgtgagcccccacagtggggtgtggtgcctcaaccaagctgtccctgagccagggaatttgctcctgacagtcaagatggatctctctcggcaagggacgacagctcctttgtggacaagcttaatctttgtgtctgagaagttcgagcactccgctcgggtgggggttcctcactgtgtttctaacttgcccggggtaaaagttagaacgccccgt

SEQ ID NO: 698779 - DNA, 160 bp, Homo sapiens
  misc_feature (4)..(4): n is a, c, g, or t
  misc_feature (14)..(14): n is a, c, g, or t
gagncaggtgtctnccttgcctacgaggcctccctaaaaacaacgccgcgttacactttttctaccgagggttgttgtgtgacacagcagatgtgttggaagtgatggtgtgtcacttctgaggttaggtcattaaagacgcagcggcttctaaaaaaaa

SEQ ID NO: 698780 - DNA, 1260 bp, Homo sapiens
acgctgtcactgatacccggaaggacgagcaggagcgtagcgatcaccgatcaagtcaacatgcgcatctcccatcttctacgagctctcggagaatgacttgaacttcatcaagcagcagcaaggacggtgccggctatcctcatcaaactacatatgactcccccgggcatagtcgacttactcctcggaggtgactgctagctctctccgagtacaccgactggcagcattgggcaggcaggatggacatgcgtgtcagcgccgatgcttgcgatgcagaacaggagaccacgctgccagcgggcagcgccatatgccgagacaacaatcaagcactgctgcatcgactgaatagaacacagaatggaaccgccgcacctgccatggcagccagacaggcaagcgacgcaccgaaggacgcaacataagcaggagcatcaccaagacgcactcggctggacgacaccgctgaaccgaatcagacaaataaccaagcacataaccgggccagacggccgccgaacgaagccgagcgccacacataggcgagcaacaagactgccaagaacacggaatcccaaggctacctacgcgcacacccccgcggcggacctaaggaccgacccacggaccttcccaccgcggcagcaggcacaccaccccatggacacgccacaaacagccccgcccacatgcccaaagagggccccaaagccgacccacccggacaacagagcgagggaagtaggacaccacccacgagcgggccccaggaccgcacacagcgaacccagacgaaaaggtaagcaagggcacacatgccatgacacgaaaccaacctagaaaagagatcagacccgcgaccaacccaggcaagaccaacagccaacacggcacaaaaaataccacaccacaagctcagcaaaaccgacagccccacacaaaagagcaaagcacaccagcaatcgacaacaacaccacgcgccaaagcagaaaaccggaaacacccaagaactcacacagcgcaccagaaagacggaaacacgagcaaccagaaccacaacgcgggcacacagagaaaacacctaccggcgaccacaggtaacaatacaactgagacacaagcgtggagaacggcaatagaaaacggacagcagagaaggaacgcgacaaggaacggaagagaacagaccacaaaacaaaagaacaacacagaaacatccaagaacagccagagaacgcaggaaacacgacagg

SEQ ID NO: 698781 - DNA, 159 bp, Homo sapiens
tcatcaagcctgccgtgtaagatggtgcaagtcctagatacacagctagccagagtgaatacacttttttctccaaaatgatgccttgtgagtggggacgtggtaggggtcaagagctcccacctctaaggggcacacactcgacttgcttatgccact

SEQ ID NO: 698782 - DNA, 111 bp, Homo sapiens
  misc_feature (103)..(103): n is a, c, g, or t
ggcggtgatctagaggatccgatttcctaaccttctcattcaagagacatttaacttggtaaccttctttttaggtctaagaagtctcctggtgagccagttngactgtgg

SEQ ID NO: 698783 - DNA, 347 bp, Homo sapiens
tggtagtgcacgctcgtgatgtgggcgggctggagcagctcgtcgacggactggtaccagggcttgccggagatggcctcgaccacggcgcccagcagcacatagccggagttgttgtaggcccatttctcgccgggcgggaagtccacaggcaggtccttgaactccttgatcaactcggccgtgctgaggtcgcgccgcaccgggttgcccatatagccggggatgctggtgtagctcttgacgcccgaggtgtggttgagcagctgtagcagcgtgatctggccgccgttgggatagtagggcaggaatttagatacggggtcatccagcttcgccttgccctc

SEQ ID NO: 698784 - DNA, 397 bp, Homo sapiens
gacagagaactataaattgcggaattgtaaaagctggaaacaaatccccagattatctatgacaacttcctcattctatggatggaaaaactgaagcccacgcatatttatgaaaaagagggtccactgagctttctcaaatagccgtctgacttacagaaaatgaactcccagtctaacttgaaaggccgtctgtgtgggtcaggacaagcaccagccctgctagggaagggagacagtctacagcctctgttaatgtctgcagagctccatttatgttggcagctggtgaaaggggtacacctgttttcctctgaggtaataatcgtgatcacggtgctcatatacctgatatgtgttttccacttcctctgattctacaggaccaggacagaaa

SEQ ID NO: 698785 - DNA, 213 bp, Homo sapiens
  misc_feature (33)..(33): n is a, c, g, or t
  misc_feature (47)..(47): n is a, c, g, or t
  misc_feature (60)..(60): n is a, c, g, or t
  misc_feature (75)..(76): n is a, c, g, or t
  misc_feature (101)..(101): n is a, c, g, or t
  misc_feature (130)..(130): n is a, c, g, or t
  misc_feature (147)..(147): n is a, c, g, or t
  misc_feature (151)..(152): n is a, c, g, or t
  misc_feature (179)..(179): n is a, c, g, or t
  misc_feature (186)..(186): n is a, c, g, or t
  misc_feature (190)..(190): n is a, c, g, or t
  misc_feature (201)..(203): n is a, c, g, or t
caaccagctgtcactgcaggagctgcagaccancagccccctgttcncgggcgacgtganctgcgtgtgggactnngggcacagtgtggagcagtatggtnccctgggcggcactgcgcgctccagcgtngactggcagatccgccnggtnngggcgctactgcaggcacagcaggccnaggtccncccncacctgccccnnnataaagtggc

SEQ ID NO: 698786 - DNA, 425 bp, Homo sapiens
atgtgggcgggtggaacgggcgacgggtctggcacacgtcttccatgggcctgggaatggtggccgtccccgtgtaggcccgcctccatcccccgtgtccccgctccattccctgtgtctctgctccgtcccgtgtctctgctccgtcccgtgtctctgctccgtgctcgtgtctctgctctgtcccgtgtctcttctccgtccctgtgtctctgctctgtcccccgtgtctctgctccgctcccgtgccaaccgccgtcgagctgcccatttgctctcccattccacggggatctcgctcgggtagaagcctttgaccaggccggtcacgctgacctggttcttggtcatctcctcccggcatgggggccccggtgtcacctttggttctcggggctgtcctttggttttggcgatagtttact

SEQ ID NO: 698787 - DNA, 450 bp, Homo sapiens
aaaatacgctttttcccctggtaaaaaatgatttcctgcgtgactaaaacccttgtgctcaattgacagtttattttctgcggagtagtctctcgtttcatgggaccgctaccacggaaaggcaacatgaaacagaaaattacggattacctggacgaaatctacggtggaacatttaccgcaactcatttacagaaacttgtaacgcgtcttgagagtgcgaaacgattaattacacagcgacgtaaaaaacactgggatgaaagtgatgtcgtgttaattacctatgccgatcaatttcacagcaatgatttaaaaccattacccacatttaatcagttttaccatcaatggctgcaaagcattttttcacatgttcatttgttgccgttttatccatggtcatctgatgatggcttttcggtaattgattatcatcaggtcgccagt

SEQ ID NO: 698788 - DNA, 743 bp, Homo sapiens
ggggaggggctggtgtgcctggtgcgggagctacggggcccagcgatcgtgtgtaaagtagtgcttgtaccaacatgtcccgtggttccagcgcgggttttgaccggcagattaccatgttgtcacccgagggtcggctctaccaaagtagaatatcgctgtataaggctattaaccagggtggtcttacatcagtagctgtcaggagggaaaggactgtgcaggacttgtcacatcagaagaaagtacctgacgaataatggattccagccagcagtgagctcacttattcaagataactgaaaacatgggttgtgtgatgaccgagatatgacggctgactaggagatcccaggtgacaggagggcagcagctatgaggtagcataggttggaaatacaagtatggctatgagattcctgtggacatgctgtgtaacagaattgcggactatttctcaggtctagacacagaatggtgaaatgaggctctatggaggtagtatgatccttaatgggtatgagatgagagagcgaggggccatcaggtgatataagttgtgatccgtgcggggtctactactgtgggggtttagtagccacatggtagcgggagttgaacaacacgtgatgtcaaacaagttcctgtggaaaagacacatgtggagaagaagtttgattggtcggtcttgagcagacggtgggaaactgcaaggtagtgcctggctagtggtctaacagtga

SEQ ID NO: 698789 - DNA, 217 bp, Homo sapiens
  misc_feature (90)..(90): n is a, c, g, or t
gcggccccctagtttagcaagttccaatagccatattaattcataaatcaattttttccgggaaggatgtcagaatgcatctcttggcanagagttcagcagcaatggcatcagtggccagcaggcacacacattttttcatttcagattttccggtgctgttggacacattttaacacatatgcatcacatggctatggaaacttctaaaactagg

SEQ ID NO: 698790 - DNA, 364 bp, Homo sapiens
aggctgggtgcagtggctcacgcctgtaatcccagcactttgggaggccaaggtgggcggatcacttgaggtcaggagtttgagatcaccctggccaacatggtgaaaccccatctctacaaaaattatttgggcatggtggtgtgtgcctgtaatcccagctactcagtaggctgaggcaggagaatcacttgaacccgaaaggcggaggttgcagtgaggcgagatcatgccattgcactccagcctgggcaacaagagtgaaactccatctcagaaaaaataaataagtaaataaataaattacctggttttcttataactgaataaatgcttacttttaagtcaatcctataaaaattga

SEQ ID NO: 698791 - DNA, 732 bp, Homo sapiens
catgtacccagctatcactatgtagagcgggtgtatgatgaataaaaatggcgactcgcctgttaactaacagagagcccacgaagcattgcatgctagctggctcataccatgcaataagaggagtggtgattgaagatctacacacaagatacagatgctcacctttaccaacgtgattcaacatatagctggaaatgctgtcgagagcaccatatcaagagacataagggcgcacaaattgtaaaagaagacagattctgctgaagacacgaagatatatactcagtatgctaaagactccaccagagaaccgccagtactgaataaagaatttagtaatgttgaaggatacaccatcagacatatcatgagcataacatttaatatccactagcagcatacaaccttgctgaagatatgacggtcagcgctcacacttaagaagctactgagagtagacaatagatgcaaagtatctaagatacctaggaagcaagttaacccaagaagcgatagatgtttattaggaatactatgacaaactgatgaaagaggtccatgatgacacacacaataggcgaggacatttcatgctcatggattagaataagttgacaatactactcagagcagtttatagattctatatgagctctatcagaatgccaatgacatttcttatagcacaagtaattctgaggcagagacgcttgagacatcatatttctg

SEQ ID NO: 698792 - DNA, 164 bp, Homo sapiens
aactgtcatatagcgaggcgatggtgactggaggagtaactggattatttcactgtcatcttatactcggagactcccaagccctccatctccagcagtctaattaaaccccagggaaggtcatggatggctgtgcgctgtgttaccgcagctcgaatttcgta

SEQ ID NO: 698793 - DNA, 866 bp, Homo sapiens
cccccagcaccccatgctgacttggatgaaccccagatctctgtggtgcccagccatgtgcatgggatgtgtgtgtgtgcagctgtgccaatctacctcacatgtgcccaccccctgcctgtgtgcatgcctgtggtgatcatgtggcatgggaatgtgctcttggggtgtcggatgacacctgctgcttagcacccccagccagaacacccatgagtggtctcgtgggctctggagagagtgtgggcgggaggaagaattggcaccttcctagggaaggagacgagcgcttcgccttgattctccgagaagcctccgagaagtgctttaagtgtgtttgcatgcgccaggcgtgtgggcagctgggggcctgtccagccctctccctgccatccttaccccaagtgacgtccactgccttgtcaccagcagacctgcctgtcatgcccaacccctgaggaagcatggggaccctaacacccatggtgccctggaccagacaggccgtggtcaggcccaggacagcggacgggtactgccaaagatacacacacgtgcttgctgacatgcgtgtgcctgtgtgtggtgtctgtagctgtgatcagtgaaactgtgacccatcagtcagtccaagacaaggtgagttggcctcgaggccacagttattgcaactttcagaggtgtgtcataacgacgtcaacggctattaacgtcgataagtcttataatgtaagtaaaaatgcccagggagtcctgggaaggtacgcggagattgagggggtaaaatattaagggcttagaaatttgaagaataaggaggacgaaggcagaatgagctagacaggaagggttggcatgtggatggg

SEQ ID NO: 698794 - DNA, 635 bp, Homo sapiens
  misc_feature (194)..(194): n is a, c, g, or t
  misc_feature (322)..(322): n is a, c, g, or t
ccgcgcgccggcggggttttgaggaaattaaataaaataaaaacccccacccccccccccccccgggggggggggggggggggggggggcggccccccccccccccccaaaacaaaaaaaaaataaatttttttttttttttctctctccccgcggggaagagaaaaaaaacccccccccccccccgcgccccnctttttttttttttttgttttttgttggtataacaaaaacaaccccccccccccgcgggggggggggggtggggggctccccccccccccccccaaaaaaaatattttgttgttgtgggcggggccgngttggtccccccaaaaaaaaaaagaggggggtttttttttaaaaaaaaaaaaaaggggggggggggggggggccccacaaaaaaaaaaatttttttgggggggggaaaaaaaattttcccccccttttttcccacaaaaaaagaaggccccccctcccggggggggggggggggtttttttttttctccccccaggggggcccccgggctcataaaaaaaaaaatgggtgacccccccccctttgggcccacaaattttgggtttttaaaaaggccccagggttttttttacaaaattcccagggggcccccg

SEQ ID NO: 698795 - DNA, 266 bp, Homo sapiens
tcatgcggtgagccatcaactaacattttcctcctgcacaattccattttccacattacacagaggtattcatagttgtattccatgtcaacttccaaagattaaaaacccaaatatcttaggttttccttaatacatatgtgtttcttcataccatatacaaaagttatctcaatattgatcaatcttacatctaagagctaaaatttcttcctaaacactcttagagttgtaaaggtgcataaccttgcaatcagcccaatgat

SEQ ID NO: 698796 - DNA, 355 bp, Homo sapiens
  misc_feature (195)..(195): n is a, c, g, or t
  misc_feature (199)..(199): n is a, c, g, or t
cattgacttttcatgaaaaactaaaaccagaagcatttcacgaagctaagcacaggacagaaggtttgctgggatgggaaacctgctcaaagtccttaccagggaaattgaaaactatccacactttttcctggattttgaaaatgctcagccctacagaaggagagagagaaatctggaacccagatccagcgncggnccttcaggattctgagagccatccttgcagacctgcaggcttacaaaggcgcaggcccaagagatccgagatgcaattcaaaatcccaatgacattcagcttcaagaaaaagcttggaatgcggtgtgccctcttgttgtgaggctaaagaggggg

SEQ ID NO: 698797 - DNA, 356 bp, Homo sapiens
ctcataatgtgtccccacgaaaacttctacacaaatgcttgtggtaacattattcataataactaaaaggtggaaacaactcaagtgtccattgacttatgaatggacaaacaaaatgtggcattatctatatgatggaatattattcacccatgtaaaggaataaagtactgatacatgctatcatatggatgaaccttgaaaacattatattaagtaaaagaagtcaggcacaaaagattgtatttttattccatttatataaaatgtccaaaataagcaaatctatagacaaaaagtagatcagtggttgcttaggcctagggggaataaggagattgtgcgggatagctaca

SEQ ID NO: 698798 - DNA, 231 bp, Homo sapiens
gtcgagatacagatcgagcacagagcatgtgagacatctatgacaccacctctctggaacaagaaagatgactggggaggaaacacaggtcagcatgggaacaggggtcacagtggacacgagggtgggctgtctctccacctcctcacattatgctaacagggacgcagacacattcaggtgcctttgcagaaagagatgccagagactcttgaagtcacaaaggggagg

SEQ ID NO: 698799 - DNA, 377 bp, Homo sapiens
tagctgttctcgaggattcgaccacttgtaaacgtaagcacgaggtttcgtgagtcgagactgggccagtgctttccagcctggatgagagagcaagactctgtctcacaaaaaaaaccatcaaactaaaaattagaaggttgacaagtcccaagttctattttaaaaacatggaacataaacttcagttataggccaggtacagtggttcacacctttaatccccagacatttggaaaaccccgagttgggtgcatcatgagttcagaatgtacaagacccatgcttggcccaaaagggtgaaacccggtctacgacaaaaattaccaaaaatttagccatgttagtgttggaaggcacctctgtaattcccatgt

SEQ ID NO: 698800 - DNA, 1340 bp, Homo sapiens
  misc_feature (703)..(703): n is a, c, g, or t
  misc_feature (711)..(711): n is a, c, g, or t
  misc_feature (728)..(728): n is a, c, g, or t
  misc_feature (831)..(831): n is a, c, g, or t
tatggtggctcacacctgtaatcccagcactttgggaggctggggcaggcagatcatgaggtcaggagatcgagaaacatggtgaaaccccgtctctactaaaaatacaaaaattagctgggcgtggtggtgcgtgcctgtaaccccagctacctgggaggctgaggcaggagaatcacttgaaccagggagttggaggttgcggtgagcagaaattgtgccactgcactccagcctgtgagactccatctcaaaataaataaataaataaataataaaaaaagtttgttagtgtcaaacacagcactgcttatatttctcacatatttctaaaactgagggcttatatttctcatgtacttccaaaactgagggttagagggaaatttctacttctctagatttatctggctctagctgaagtcattagatataaatgaactgtttttttccaaagagtttttggctaaattatggtaacactgcagttgatggtttcctggacagaaattttgcattggtcaagtgctggattagttaaaacatgttccaatgcctaagtgaaggaattctggaggggcatacagcacctacagtttacatagatgtggctttgcccaggcaattcatttaccaaatgggttgtgcctcatttaaccagaacaggcattaccacctaagcatgacgatatattaaggacantaaatgtnccccattttaaaatgtnagtttttaaatacacattttacaaatgtacctaatttcaccccggcccaatagtgtgaatatcctataataaattctctgaagtacagaaattcaattttggngggaatactgatttacattaaccgactggggaaaaagtactataggggtctatcatgagccagttattaaataaaattttgggattaagcagaaggctgatttaaggccgatactctaaaaaatcacttccttaatggccaggaaatgacctttaaatctaaatccagctggactaaggggtttctcttatcgtttaaaaaaatatcttcctttgggaaaggaagattttggtattagaaacggttacaataaaccaatttaaggtcactggagggaattaccttgggatttaaaccgggaacccgtgtaaaaattaaggccgcctcgaaaacagatgggttttaggaattacaacgcttaaaaactttttacgcaacccgtgggtggcgacgccgttacccatttgggctgggggcatattgtggagatgtcgccctctccatatgcaccctcttttctatgggggctacccgttctacgggtggcgactgctcccccgggggtggcc

SEQ ID NO: 698801 - DNA, 80 bp, Homo sapiens
  misc_feature (50)..(50): n is a, c, g, or t
cctcctctctgccccggaagctgctgccctgggaggagggcccgggccanccgccaccacctctgcccgggcccttggca

SEQ ID NO: 698802 - DNA, 771 bp, Homo sapiens
  misc_feature (216)..(216): n is a, c, g, or t
tggccggagaagtagaccccgtgaaagagaccgggaacgagagcgagaccgcctagagataacagagagacagagagcgagatagaggagtgatagagaaagagaaagagagcgattatgtgatcgagacagagaccgaggggagagaggtcgatatagaagataatgggcttttgaagcactgatggtttaaagatacaaaaaatctgtgtatcnccggtggtgtgttacaaggtagtaaatttatttacagtgtctgcctatgaagtccatggtgtagaaggattataatgacccctttggttccaagcattgtagtatcataagacaggaaaaatctcaaatccgccaaaaatccacagctgacagtgtgaatggacaccttttatggggcagatgaacagtccaagactgtagatatgattctttctccataaatgtctatagtggtgtcatcctagagttatttgtgtggtacccctttggggatctggatgggtaacgtgcatgatatttgcttggaggtgtctacattgtgctggcacaccgttcagtacaaatagtgtgctatcgagtatgcaatattgacgtatgatggtttgctgtatggcagtgtgtaccgcctcttgttttttcccagtggcccttttaaacaactaataggcctttatttcccaggttcaggggagcaatagacatgcccccactcactttaagaaacctgtgagcggcggggagggccccaaggtaaggcggtgcactgcgggggac

SEQ ID NO: 698803 - DNA, 185 bp, Homo sapiens
ctttttgggggaaaattttttccccttgggggtggggggccgaggcccctttgaaatcttttttacctgtttaaaacccggaaagggactgccccgttttttaaacccccccccccagggtcgggtttgggtttccccctttccagcccgggggagattttataattaaaaagggtttcccggga

SEQ ID NO: 698804 - DNA, 471 bp, Homo sapiens
tgatgttatcgcccaacacggtgaaactccgtctttactaaaaatacagaaaattagccgggcatggtggtgggtacctgtaatcccagctactcaggaggctgaggcaggagaatggcttgatcccaggaggtggaggttgcagtgagccgagattgcgccatcgagattgtgccattgcactccagccttgtgcaacagagcaagaactccgtctcaaaaacaaaacaaaacaaaaaaaaaccccttggcttgggggaaaaatcttaaacagctataaaagaacattttggaggcaattgaggaaaattcagatatggactgtaggtaataattgaattaattttttcaggtgcgatacaagtatcttagttatgtacgaaaatgtccttattcttaggaaatgcacactgaagacatttagggggtaaactgttcataacctgatatcttgcactttccaagtgattc

SEQ ID NO: 698805 - DNA, 537 bp, Homo sapiens
ccagtgcactccagcctgggtaatagagtgagaccctgtctcaaatacacacacacacacacacacacacacattttgttggctacttgttgtactttttctatgttttctgtgtctttgctcaacacaagaaaagtatattatgtgtgcatgtgcgtgtgagatatggtaaaatatgaacatgtatttctggggatgtaatgtttcccttgaatttctgtcattctctgtttggcttatggtacttctctttccctttcccttctcaccacacacacacacacacacacacacacacagcctgtcagtctcataggtgctcctataagggtaaataaggcaggcaggcatttgaaattacagcagggatagaacgcaaagctcaggctttggaagaggaacctcttgtgcctgtatgcattagcttttaccttcagtgccttggggattgtttctccctctgtaccagatgtgctctcccagcccaggatatcttatgatgcccagtgagaggtcataaaaggacagaccatcgaa

SEQ ID NO: 698806 - DNA, 377 bp, Homo sapiens
atgaagtcctacttccgcctggatacgcccatctacttttactactctgatctgagtgtgccgcactgccatcgaagaggtccaggcagaagaggaaggatgatagtcatccagctccacgtggacaactgcatcctgaatgccgagaccctcgtctgtatcaaagagccccgagcctacaccttccgcgactacagcgccatcctttacctaactagggactgcgatggcggaaactttgatgtcacttcactggatgccaagaccgtcacgtcagatgtccagcctcagtttggacgaccgtgggattcttttagcacttaaacccacatggggtaaggctgtaccaggggcagcatgtccatcccctttgttca

SEQ ID NO: 698807 - DNA, 156 bp, Homo sapiens
cttagatgatccccgttctccccgttgcagctgagtgagtggcacgatcagagctcactgcagccttgactcctgagctcaagtgattctcctacctctgcctcccaagtagccgggattactttttttcttttttggggaacggggttaccccat

SEQ ID NO: 698808 - DNA, 978 bp, Homo sapiens
  misc_feature (12)..(12): n is a, c, g, or t
  misc_feature (15)..(16): n is a, c, g, or t
agaagagggggnccnnaaaacacggctaggtaacgaggctgggttgtagtccgcccggagcacagagctcgcctttgcgatcgccgccgtcacacccgccgcagctcaccatggatgatgatatcgccgcgctcgtcgtcgacgacggctccggcatgtgcaaggccggcttcgcgggcgatgatgccccccgggccgtcttcccctccatcgtggggcgccccagggcaccagggcgtgactggtgggcatggcgtcagtaaggattcctatgtgcggcgacgaggcccagaggcaagagaggcatcctcaccctgaagtaccccatctgagcactggcaatcgtcaaccaaacgtgggacgactagtggagaaaatctggcaccacaggcttctacaagtgatgctgcgtgtggctcccgaggagcaaccccgtgctgtctgaccgaggcccccctgaaccccaaggccaacccgggagaggatgacccgttgatcatgtgttgaagaccttcaacaccccgagtgcatgtacgttgctatccaggctgtgctatccctgttacgcctctggccgtaccactggcttcgtgtatggactccggtgacgggtccccacatgtgccctatctacgagggtgtatgccctcccccagtgccatcctgggtctgggcctgctgggccgggacctgctgactagctcatgaagatctcaccgagcgcggtacaagtttcacagcacggcgagcgggagatcgtgcgtgacctttagggaagctgttgctacgttggcctggagttcgggcaagagatggcgcgggtggttcagctcctccctgggaaaagtccagtgcttgaaggcagtgttcccttggcctagcgggtcctgcccgggggggcttcaacctcctcctgggggaggccgtgggtcccacaaactcctcccctgatgtgtgggttccccgccttttctcccg

SEQ ID NO: 698809 - DNA, 1043 bp, Homo sapiens
atcgtggaggatgttcgccatcgagggcactgaccgcaatggacgttttttactaccaggcagatcgatgagctactacatcccccgggtcgtgctgtgtggacttggaagccccgggtgattcactccatcctcaactctcaccctatgccaaagctctacaaaccagagaacatctacctgtcggaacgtggaggacggatgctggaaacaaatggtggccatgggatattcccagggagaaaagatccagtgaggacattattgacatcactaggactcgtgtgaggcagatggtagctgacgacgtcatagtagggcgtattcgtgctgttgttcatctccaatatgctggagggggggacgaggctcatgcgcatctgtggttcgctacctactatagaacgggctgacatgacgacgtgatagtccctacacgcagagcatggctgcaagactatatctcagatgtgtgtcccaagccaaggaacgagatgagcgatgtggtagtgtccatgaccattaggggattacgatctctctatcacttcgaagagtgcaggcggctaaatggcgatgacagtgttggctggtcggcctaggacgatcaaccaggtacctgtaacacggattgccagagattccgtctgttaggatgcagaagccatacttctcctagaaataatcggctggtgtgggaccatcatgtcgcctaggacaccaccctgagtctagcctggtacttgaacaatgatctatggcttaataagtcgtctggattccatcccatggcttcccttcttcaggactgggtaaaccctctcagaacgccaagcgagggcaccgttattgcgacacccggcctgaagatacaaggcggtgtggcgcagaaatttgttgtgccggcggaatcggagaccaagagaatgggggcgcatcagggaggggccccagccaactgttgcacgaaggagtgttgccccggggatagggggggataccgccagggtagagctagcgaacatgatgggaaaaagggggct

SEQ ID NO: 698810 - DNA, 158 bp, Homo sapiens
taaatcactcagatctatcgtattctgtaacagcagcagaggatgaactaagacggtaactttcagcctggcacagtggctcatgcctgtaatctcagcactttgggagaccaagtcaggtagatcacctgaggttaggagttagagaccagcctggc

SEQ ID NO: 698811 - DNA, 440 bp, Homo sapiens
agtagcaatcatgatgcttacatgtgtgtggctctgtctcgcctttactttcatctaggagagtttaggctctaggtatcttatcttctccctggtcttcttcacttctgtgatcttgtataattgaatatggccatgcctaattttacaagtcaacaggagctcagaaatggtgcataaaaatgaaggtcatgtagctaacgacgtcacaggtgaaggtaggagtgagtcctatatgtatagacttctatagcccagggagaaaactctcttttctaggcctttgacatcctcagtcatttttatacaccatccccacctatctgtattttgcacgccccattatgcttagctggactgatgacagtcttcctagaagctgtaaccctttccacatcgattgcactctttctgtgtcatttctcccaggtagagtcaag

SEQ ID NO: 698812 - DNA, 1120 bp, Homo sapiens
agcggatctgtcacggcggaggcaggagagtgctgctgcgcctgcctccgggaccgagccgtatccacagaccggctgccgctgccctgatcctgcttcgagttggagctctgaaggaagctcatgtagcaggatgtagtgttcgttccccatggtgcgtccttgtgctgatgagtttggagctcatcctaggcaatcaatgccctgatgcatgagttatacgattaaccgagagttggccggatgttgtcgggagcttggtctggtgaataggcatggagctcccttgggtgttgaggtccgctgcaggaggacatcagttcactgggcagtgagtcctacaatctctcgtaacgggcgtgcgaatagaaacgatgcatagctcgtgtcgaatgtgtgaagtcagacttgcttgaccatacgtaggctgtatcctgtcatgcattttgacagtagtcgaccgtacacacggatccggggaaagcctaacgcagtgttcgccggcagtcacctgcgagtccagagatggtcccattgcgttcgcacattgcgggcagcgagccttgtccactcacctggggttgtaactacgcgagtatttgccaatgacacgggacgaagtccctgttgggactgggactgctgcagaatggcactacgattgcttagcgacaacggagacttcgttgctgaaggaatacagcatatgaggggaccccgtttggatgaagacatgtttcccccaagttcaagtcgcccttggtgttgcgagggacacaccagaacaggttgtttacagtggaattaacggcccacccaagggtcctggtggaatgaggtaggcagcgaaaagaaaagtccgaaacgggctgtcgcaagtgccccaattgggcggcccttgcgagcgacttgggtacacggttgggttagcgccggtatctagttgaggccggaaacccattcgagggcgccataagacgttctaggccctatttatacctgtctgtataacgcgggaggtacttttttgtccccagggcgaagcccggttgcatccgaacccccttgggacaaaagcgtgccaggagaacctcgttgaagagtttttctccacgaaata

SEQ ID NO: 698813 - DNA, 147 bp, Homo sapiens
atcccaagatcttaacacacacacacacatcacacaacacacacacacaccacacacacacctcacacctacacacaaaagagagccccaaacataccacatcgcaccaccacacatatacacaccagagattcacacacaacacac

SEQ ID NO: 698814 - DNA, 1201 bp, Homo sapiens
taggaattccttcaggtctctaacacactctcttgcttcagggaagcctggaaagctgctgttacaggagatcgaggagctcagtagagactagtgtaggtgatagaaattctgcaattaaaagcagtgcagattgtaactagagatacggactgagatgaaattacctaaaatcttctcattagagaaaaaatctgcacacttttaaaaatgcataccggcagggcacagtggctcacacctgtaatcccagcactttgggaggctgaggcatgcaaatcaagaggtcaggagtttgagaccaggctgggcaacatggtgaaaccctgtctctactaacaaatttaaacaaattacgctgggcgtggtggtgggtgcctgtaatcccagctactcgggaggctgaggcagtgagaatcgcttgaacccaggaggcggaggttgcagtgagccgagatcatgtcattgcaccactccagcccaggagacagagtaagacctctgtctcaacaaacaaaaaacacaaacacaacaccacaacacccaaccaacaagcccataagacagcagacacaggctggaaagccccaacacacgtgacacccgcgaaagacaacagcaagaaggaataacaataaccacgcagaaaacgaacaaacaccggccacaaacgtggcgaaaaacagcgctacacagcacacaaataacacacacacacactcgacgagcagacaacacaagcaagaaatactacaccacaaaaacacagacaccacacaaacgaccaaagtaacatcctgacacacaggcaaccacaagactatataacaacagcagcctgacactgccacaccccgcgcgagacacacacacacaaacactcgaccaaaaccacaacacaaggcaccacgagccaaaaccaaagagccgcacaagaactacaaagcaacaggcgccacaccacacgcaccgcccaccacagccaacgcaacgcagagctaacaacggcacgcaggcagagccacacaacgcgcaccacgaggagcgagacacacacaggaggcgcaccaccgacgattccaagcacaaccaccggcgacacaaccatacacgtgacgacacaccgccaacacaagaggccgcaccacgcggcaaccgaaccaacgccaccaacaagcgaaaaaagagcagacacaacatg

SEQ ID NO: 698815 - DNA, 794 bp, Homo sapiens
agcggagaggggctctccggagtccttctccgagtagccgggcgagcacgcgtcattgtgttacactgcggccggaccgcgagctaggctgggataaaaaataataccactaccttcccccattgtttccattgcagacaaactctaaacaagggaactacactaggctgcaccagtaatcatagataataacagaacagggagaccgcagagaagaaggaaagacagaccgagaagagtcgtaaaacggacgagagagcgtatataaaaacgaatgcaaatacacgaaattacagcaagacagagagaccagggaaaacattaggcaaaccatgaaaacacaggagaacagaaaataggaacacggagaacacaagaaaaagaaagagcgaacagtagaacccagagaaaaaaaactaagaaacacacagaagaacgcaacacaagacaacgcacaaccaaaaaaaaaacaagaaaaaaaaataattaaaactaaaatctaaaaaacagaaaaaaaaaagataaaaacaacacacaaaacagaacacataagaaaaaaatcaataccaacaaaataaaataaaaaaaaaaataacataaaaaaaatacaaacaacaaaaccaccacaaatcccaaactacacctactatttatcacaaacataagtacagacaaaagaaaaatacaaaaacatgaacaacgaaaaaaacaacaatatcaaataaaaataaacaacaaaataaaaaaacaaacaacacaaaaaagcagaaacactaaaataaaaataaagtaac

SEQ ID NO: 698816 - DNA, 219 bp, Homo sapiens
accatgtagggacacccgtgaacatgggccaccctccatactctcccgagactatcccgacagtgtggactggactgtaggctcacatacccccccacatacctctccatagatatccatgcgccttcttgacacccttaatcaccatatgatgttggctgcgctgtaacggtatgggacccaaggccatacaggagctggaatgccaccgagatactc

SEQ ID NO: 698817 - DNA, 5874 bp, Homo sapiens
atggaattccccattggatccctcgaaactaacaacttccgtcgctttactccggagtcactggtggagatagagaagcaaattgctgccaagcagggaacaaagaaagccagagagaagcatagggagcagaaggaccaagaagagaagcctcggccccagctggacttgaaagcctgcaaccagctgcccaagttctatggtgagctcccagcagaactgatcggggagcccctggaggatctagatccgttctacagcacacaccggacatttatggtgctgaacaaagggaggaccatttcccggtttagtgccactcgggccctgtggctattcagtcctttcaacctgatcagaagaacggccatcaaagtgtctgtccactcgtggttcagtttatttattacggtcactattttggttaattgtgtgtgcatgacccgaactgaccttccagagaaaattgaatatgtcttcactgtcatttacacctttgaagccttgataaagatactggcaagaggattttgtctaaatgagttcacgtacctgagagatccttggaactggctggattttagcgtcattaccctggcatatgttggcacagcaatagatctccgtgggatctcaggcctgcggacattcagagttcttagagcattaaaaacagtttctgtgatcccaggcctgaaggtcattgtgggggccctgattcactcagtgaagaaactggctgatgtgaccatcctcaccatcttctgcctaagtgtttttgccttggtggggctgcaactcttcaagggcaacctcaaaaataaatgtgtcaagaatgacatggctgtcaatgagacaaccaactactcatctcacagaaaaccagatatctacataaataagcgaggcacttctgaccccttactgtgtggcaatggatctgactcaggccactgccctgatggttatatctgccttaaaacttctgacaacccggattttaactacaccagctttgattcctttgcttgggctttcctctcactgttccgcctcatgacacaggattcctgggaacgcctctaccagcagaccctgaggacttctgggaaaatctatatgatcttttttgtgctcgtaatcttcctgggatctttctacctggtcaacttgatcttggctgtagtcaccatggcgtatgaggagcagaaccaggcaaccactgatgaaattgaagcaaaggagaagaagttccaggaggccctcgagatgctccggaaggagcaggaggtgctagcagcactagggattgacacaacctctctccactcccacaatggatcacctttaacctccaaaaatgccagtgagagaaggcatagaataaagccaagagtgtcagagggctccacagaagacaacaaatcaccccgctctgatccttacaaccagcgcaggatgtcttttctaggcctcgcctctggaaaacgccgggctagtcatggcagtgtgttccatttccggtcccctggccgagatatctcactccctgagggagtcacagatgatggagtctttcctggagaccacgaaagccatcggggctctctgctgctgggtgggggtgctggccagcaaggccccctccctagaagccctcttcctcaacccagcaaccctgactccaggcatggagaagatgaacaccaaccgccgcccactagtgagcttgcccctggagctgtcgatgtctcggcattcgatgcaggacaaaagaagactttcttgtcagcagaatacttagatgaacctttccgggcccaaagggcaatgagtgttgtcagtatcataacctccgtccttgaggaactcgaggagtctgaacagaagtgcccaccctgcttgaccagcttgtctcagaagtatctgatctgggattgctgccccatgtgggtgaagctcaagacaattctctttgggcttgtgacggatccctttgcagagctcaccatcaccttgtgcatcgtggtgaacaccatcttcatggccatggagcaccatggcatgagccctaccttcgaagccatgctccagataggcaacatcgtctttaccatattttttactgctgaaatggtcttcaaaatcattgccttcgacccatactattatttccagaagaagtggaatatctttgactgcatcatcgtcactgtgagtctgctagagctgggcgtggccaagaagggaagcctgtctgtgctgcggagcttccgcttgctgcgcgtattcaagctggccaaatcctggcccaccttaaacacactcatcaagatcatcggaaactcagtgggggcactggggaacctcaccatcatcctggccatcattgtctttgtctttgctctggttggcaagcagctcctaggggaaaactaccgtaacaaccgaaaaaatatctccgcgccccatgaagactggccccgctggcacatgcacgacttcttccactctttcctcattgtcttccgtatcctctgtggagagtggattgagaacatgtgggcctgcatggaagttggccaaaaatccatatgcctcatccttttcttgacggtgatggtgctagggaacctggtggtgcttaacctgttcatcgccctgctattgaactctttcagtgctgacaacctcacagccccggaggacgatggggaggtgaacaacctgcaggtggccctggcacggatccaggtctttggccatcgtaccaaacaggctctttgcagcttcttcagcaggtcctgcccattcccccagcccaaggcagagcctgagctggtggtgaaactcccactctccagctccaaggctgagaaccacattgctgccaacactgccagggggagctctggagggctccaagctcccagaggccccagggatgagcacagtgacttcatcgctaatccgactgtgtgggtctctgtgcccattgctgagggtgaatctgatcttgatgacttggaggatgatggtggggaagatgctcagagcttccagcaggaagtgatccccaaaggacagcaggagcagctgcagcaagtcgagaggtgtggggaccacctgacacccaggagcccaggcactggaacatcttctgaggacctggctccatccctgggtgagacgtggaaagatgagtctgttcctcaggcccctgctgagggagtggacgacacaagctcctctgagggcagcacggtggactgcctagatcctgaggaaatcctgaggaagatccctgagctggcagatgacctggaagaaccagatgactgcttcacagaaggatgcattcgccactgtccctgctgcaaactggataccaccaagagtccatgggatgtgggctggcaggtgcgcaagacttgctaccgtatcgtggagcacagctggtttgagagcttcatcatcttcatgatcctgctcagcagtggatctctggcctttgaagactattacctggaccagaagcccacggtgaaagctttgctggagtacactgacagggtcttcacctttatctttgtgttcgagatgctgcttaagtgggtggcctatggcttcaaaaagtacttcaccaatgcctggtgctggctggacttcctcattgtgaatatctcactgataagtctcacagcgaagattctggaatattctgaagtggctcccatcaaagcccttcgaacccttcgcgctctgcggccactgcgggctctttctcgatttgaaggcatgcgggtggtggtggatgccctggtgggcgccatcccatccatcatgaatgtcctcctcgtctgcctcatcttctggctcatcttcagcatcatgggtgtgaacctcttcgcagggaagttttggaggtgcatcaactataccgatggagagttttcccttgtacctttgtcgattgtgaataacaagtctgactgcaagattcaaaactccactggcagcttcttctgggtcaatgtgaaagtcaactttgataatgttgcaatgggttaccttgcacttctgcaggtggcaacctttaaaggctggatggacattatgtatgcagctgttgattcccgggaggtcaacatgcaacccaagtgggaggacaacgtgtacatgtatttgtactttgtcatcttcatcatttttggaggcttcttcacactgaatctctttgttggggtcataattgacaacttcaatcaacagaaaaaaaagttagggggccaggacatcttcatgacagaggagcagaagaaatactacaatgccatgaagaagttgggctccaagaagccccagaagcccatcccacggcccctgaacaagttccagggttttgtctttgacatcgtgaccagacaagcttttgacatcaccatcatggtcctcatctgcctcaacatgatcaccatgatggtggagactgatgaccaaagtgaagaaaagacgaaaattctgggcaaaatcaaccagttctttgtggccgtcttcacaggcgaatgtgtcatgaagatgttcgctttgaggcagtactacttcacaaatggctggaatgtgtttgacttcattgtggtggttctctccattgcgagcctgattttttctgcaattcttaagtcacttcaaagttacttctccccaacgctcttcagagtcatccgcctggcccgaattggccgcatcctcagactgatccgagcggccaaggggatccgcacactgctctttgccctcatgatgtccctgcctgccctcttcaacatcgggctgttgctattccttgtcatgttcatctactccatcttcggtatgtccagctttccccatgtgaggtgggaggctggcatcgacgacatgttcaacttccagaccttcgccaacagcatgctgtgcctcttccagattaccacgtcggccggctgggatggcctcctcagccccatcctcaacacagggcccccctactgtgaccccaatctgcccaacagcaatggcaccagaggggactgtgggagcccagccgtaggcatcatcttcttcaccacctacatcatcatctccttcctcatcgtggtcaacatgtacattgcagtgattctggagaacttcaatgtggccacggaggagagcactgagcctctgagtgaggacgactttgacatgttctatgagacctgggagaagtttgacccagaggccactcagtttattaccttttctgctctctcggactttgcagacactctctctggtcccctgagaatcccaaaacccaatcgaaatatactgatccagatggacctgcctttggtccctggagataagatccactgcttggacatcctttttgctttcaccaagaatgtcctaggagaatccggggagttggattctctgaaggcaaatatggaggagaagtttatggcaactaatctttcaaaatcatcctatgaaccaatagcaaccactctccgatggaagcaagaagacatttcagccactgtcattcaaaaggcctatcggagctatgtgctgcaccgctccatggcactctctaacaccccatgtgtgcccagagctgaggaggaggctgcatcactcccagatgaaggttttgttgcattcacagcaaatgaaaattgtgtactcccagacaaatctgaaactgcttctgccacatcattcccaccgtcctatgagagtgtcactagaggccttagtgatagagtcaacatgaggacatctagctcaatacaaaatgaagatgaagccaccagtatggagctgattgcccctgggccctagtga

SEQ ID NO: 698818 - DNA, 125 bp, Homo sapiens
ccccacccctgcgcccaagaatgaatgtaagtcaatctaggcttgagaaagagggtcactccacaaatattccagctctgcccaaaagactaaactcctaaaaggtccccctgctggaacaagta

SEQ ID NO: 698819 - DNA, 2426 bp, Homo sapiens
gtgttttatgtatggtatttaaggagaataagtcaaggttctagaagtctgtatgtgcaagtataatacacacactcacacttctaaatgagtgcagtatgcttgtaaactcatccgtcttctcactgcaacccaccctgaatgaggttaagggaagaaggtctaaatccatcttcagctgcccaatgtctctcagtcttctgagtctgaattattgcactaattaacccacttctcttgcttcttccaaaggccactggctcatgaagcagcctgaatgagtatagaaagagatagaatccagcagagggggtgaggcattgggaggttccaggtctttctctatctcccaccaggtggtggtggatgccctggtgggcgccatcccatccatcatgaatgtcctcctcgtctgcctcatcttctggctcatcttcagcatcatgggtgtgaacctcttcgcagggaagttttggaggtgcatcaactataccgatggagagttttcccttgtacctttgtcgattgtgaataacaagtctgactgcaagattcaaaactccactggcagcttcttctgggtcaatgtgaaagtcaactttgataatgttgcaatgggttaccttgcacttctgcaggtggcaacctttaaaggctggatggacattatgtatgcagctgttgattcccgggaggtcaacatgcaacccaagtgggaggacaacgtgtacatgtatttgtactttgtcatcttcatcatttttggaggcttcttcacactgaatctctttgttggggtcataattgacaacttcaatcaacagaaaaaaaagttagggggccaggacatcttcatgacagaggagcagaagaaatactacaatgccatgaagaagttgggctccaagaagccccagaagcccatcccacggcccctgaacaagttccagggttttgtctttgacatcgtgaccagacaagcttttgacatcaccatcatggtcctcatctgcctcaacatgatcaccatgatggtggagactgatgaccaaagtgaagaaaagacgaaaattctgggcaaaatcaaccagttctttgtggccgtcttcacaggcgaatgtgtcatgaagatgttcgctttgaggcagtactacttcacaaatggctggaatgtgtttgacttcattgtggtggttctctccattgcgagcctgattttttctgcaattcttaagtcacttcaaagttacttctccccaacgctcttcagagtcatccgcctggcccgaattggccgcatcctcagactgatccgagcggccaaggggatccgcacactgctctttgccctcatgatgtccctgcctgccctcttcaacatcgggctgttgctattccttgtcatgttcatctactccatcttcggtatgtccagctttccccatgtgaggtgggaggctggcatcgacgacatgttcaacttccagaccttcgccaacagcatgctgtgcctcttccagattaccacgtcggccggctgggatggcctcctcagccccatcctcaacacagggcccccctactgtgaccccaatctgcccaacagcaatggcaccagaggggactgtgggagcccagccgtaggcatcatcttcttcaccacctacatcatcatctccttcctcatcgtggtcaacatgtacattgcagtgattctggagaacttcaatgtggccacggaggagagcactgagcctctgagtgaggacgactttgacatgttctatgagacctgggagaagtttgacccagaggccactcagtttattaccttttctgctctctcggactttgcagacactctctctggtcccctgagaatcccaaaacccaatcgaaatatactgatccagatggacctgcctttggtccctggagataagatccactgcttggacatcctttttgctttcaccaagaatgtcctaggagaatccggggagttggattctctgaaggcaaatatggaggagaagtttatggcaactaatctttcaaaatcatcctatgaaccaatagcaaccactctccgatggaagcaagaagacatttcagccactgtcattcaaaaggcctatcggagctatgtgctgcaccgctccatggcactctctaacaccccatgtgtgcccagagctgaggaggaggctgcatcactcccagatgaaggttttgttgcattcacagcaaatgaaaattgtgtactcccagacaaatctgaaactgcttctgccacatcattcccaccgtcctatgagagtgtcactagaggccttagtgatagagtcaacatgaggacatctagctcaatacaaaatgaagatgaagccaccagtatggagctgattgcccctgggccctagtga

SEQ ID NO: 698820 - DNA, 162 bp, Homo sapiens
  misc_feature (8)..(8): n is a, c, g, or t
  misc_feature (25)..(25): n is a, c, g, or t
  misc_feature (28)..(28): n is a, c, g, or t
  misc_feature (43)..(43): n is a, c, g, or t
  misc_feature (49)..(49): n is a, c, g, or t
  misc_feature (58)..(58): n is a, c, g, or t
  misc_feature (62)..(62): n is a, c, g, or t
  misc_feature (85)..(85): n is a, c, g, or t
  misc_feature (87)..(87): n is a, c, g, or t
  misc_feature (116)..(116): n is a, c, g, or t
aagtttgntttgtccgtatggactnttnaaagtcaagtttaanttccanaaacctttntttntctgagattactttttggggtantntaaaatgagagacattttgtaaccctgtnaaatacatagggaatataacattccagtgtatacaaagaaggcaaa

SEQ ID NO: 698821 - DNA, 420 bp, Homo sapiens
  misc_feature (185)..(185): n is a, c, g, or t
tccgagtctgtacaaaccatacaaacaagcaagagtggtgagctctacaaatactaggtctaaaagcaggtcaagaatgagagacttgtctaaagtacagagttaggcagcttctttatttttcacatacacaacaataaccaccccctaaccagctgacaataccacagtctcactgaggagtnaattaaaattacagaagaaaaagagactctgctattaggttgcagggctaaataaagcaagcactaagtccttctatcttcctaggggaagctatatggaaatgggaaggtgatcagcagaataagaaacactttagtttcttaataaatgctacagcttgatagagcctactacatatttaaagagaacctattacatacacagacaacagaaagtttttgaactaaaccgtcg

SEQ ID NO: 698822 - DNA, 334 bp, Homo sapiens
gaaaagtgatagccattgttgaaggtggggcctggtgggaggcgatggatcatgggaggcaatggatcatgttgggtgatgagtgagttctgtgctcagttcatgggagatctggttgtttaaaggagtctgggacctcccctgactcttgctccctctcttgccatgtgactctctggctccccttcacctttcaccatgattggaagcttcttgaggcctcatcagaagcatatgctggcatcacacttcctgtacagcctgcagaaccatgagccaaaataaatctcttttcttttttttttttttttggagagtgcattctagtgtggtg

SEQ ID NO: 698823 - DNA, 304 bp, Homo sapiens
ctcggccaacattggctcgacatctgacgaggtgagcagggttcgcaaatcggacgtggacctccgcagccgattgatggtgtgaccgggctgaacgcgtgttgataccgtcgaacatgtgactgccacatgctgacccgccttctgcgtacctacatgggcgcctaccgtcgcgagttgagtgcggtggttatccttcaattcgtcgccaccgcggcaatgctctacctgccgactctcaatgccgatatcatcgacaacggtgtggcacaaggcgataccggctacatcctgcaggtcgagg

SEQ ID NO: 698824 - DNA, 242 bp, Homo sapiens
  misc_feature (162)..(162): n is a, c, g, or t
gaactgtcagccctataatccaatccttgagagcacggtgccctgtttctggctgttgcagagctattgtgtggcagccaggacagctgggcccttaataaatactttggttgatgctgccttgttgtgcaacgagcccaaatgggcaatgtacaagctcanggacttccatatcacttggcagctgtttggaaaatccgccccctcccatttcagaactcaggacatttttatagcaattc

SEQ ID NO: 698825 - DNA, 467 bp, Homo sapiens
ttcgtgaggaaacagaggcgaggcttttccgagatcgtctcagcgatggcgcttaggtcgcagttaagggggactcggtttgcaggaaccctgggtgcaggttcgcagcccagtcaaccagctccgagccggcagcgaaacctgaagtggaccctgtggaaaatgaagctgtaggcacagaattcaccaaccggaacccccggaacctggagctttaatctgtagccaggaaagagtggggctggcggaaggtgtatcactcccgtgagttctggcacaggttgcgagttataagggctcagcatcatgtagaagcaattgtggagcatcagaatggcaaggttgtggtttcggcctccactcgtgagtgggctattaaaaagcacctttatagtaccagaaatgtggtggcttgtgagagtataggacgagtggtggcacagagatacttagaggcgggaatcaac

SEQ ID NO: 698826 - DNA, 942 bp, Homo sapiens
gaacacagggatccggagcctgggggaaaagcggcgcgggagccggcacccaccgctggaggggcggcgacggcggccgtagcgacctcgggaggcaagcggagccgccatggccgagttcccgtcgaaagttagcacgcggaccagcagtcctgcgcagggcgccgaagcctcggtgtcggcgctgcgcccggacctgggcttcgtgcgctcccgcctcggggcgctcatgctgctgcagctggtgctggggctgctggtgtgggcgctgattgcggacaccccgtaccacctgtatccgggccatatgggctggcgtgactgttcggtcggctagtcttccctctgagctggtgaacaatcggtcacatcttcaaacctcatagcactgtttcaggcttggcacattgacagttttgtacatgtgttcccgtgggccacgtggctgttacatgactctttagacatcaagcgccaccggttctcatacattcaccggcctttcatcggccgtgctctggcggcaggttgaacctgacatcccttgaggggcacccgggccttataaccagcgcgcggatgcctcgttctttgcgtgtagggtgatgatcgcctatggagtgagtgccttcttcagctaccaggcctggcgaggagtaggcagcaatgcggccaccagtcagatggctggcggatatgcctaaaccacctgtgccacgggcccctctggggctgaagccgccgctgggtcacagagcagtgtcacccttgaagcctgaagctggggagccctgcgttggagtcagggccagcggggactgggttttgggtccttctcttgccggtcagacattagcgcttcagcggcggcaaggagagcaggccccaggcgtgggagggagtttccgcgttgcaggagggcgccttgctgggagcctcttt

SEQ ID NO: 698827 - DNA, 189 bp, Homo sapiens
agatatctattggtcgaactccaagttaaatctatagttatatataactctgatcatggttatcaatcatgtttagcatgcaaacatttaaactgaacctttcttctccttatttgttgccatcatttacttgatctttgcaaatatctttccctgagattcatgacccttatcgacagtgtccttgtt

SEQ ID NO: 698828 - DNA, 366 bp, Homo sapiens
atttgaacatctagacaatagacaggtttaggataattctaatttatggagcttttttgttttgttggtttgggcaattttttttggtaggcaatattgcaatgtcatcacaaaaattagaacaaagactttgttcaggtatgtgtgtaccttgatataaatgttggatatactttgggattcggcttttttattaactacattgctatgtggttttcatgattataattttaatggctacattctatttcttcaagtggaggactagaactgttaaccataaaattgggcttccagttaaatctagattttattataataataaataccaataaacattttcatgaaaatcccaataaaaaaaaa

SEQ ID NO: 698829 - DNA, 372 bp, Homo sapiens
  misc_feature (289)..(289): n is a, c, g, or t
aaggttgtaggagaaagggagagaagcggaagggggtggggagacagagagacagacaggaggcctcaaaccctgaaacactgagctaaggaaagtgatcatggcaagctacactaattacaatactttgtttccaagtgtttatttttactcatatttagggcaggcaatcctggtttctcgttgaacatagaggtttgaatttcattaataaataacttcatttattttttttcagtgacttgattcaaacatgaggattaagttaataatagcacaggttgtcganagggataagataattacacaagaggcaccagaaccacttgaatgtgggagagctcttcattaaattgacaagctgcctttggg

SEQ ID NO: 698830 - DNA, 117 bp, Homo sapiens
tgccttatcatacctacctacttctttctttctttctttcttcctttctttctttcctttctccctccttcctttctttccttcctttctcagtgtaggtattatgaacggacgggt

SEQ ID NO: 698831 - DNA, 112 bp, Homo sapiens
atcacgctgaaggactgtggcatgtagattaactctttcagccagggagaacttagactgttgttgttggttgggggtgggggtgcccaaagactggagccaagtatttcta

SEQ ID NO: 698832 - DNA, 1379 bp, Homo sapiens
  misc_feature (1028)..(1028): n is a, c, g, or t
  misc_feature (1044)..(1044): n is a, c, g, or t
  misc_feature (1072)..(1072): n is a, c, g, or t
  misc_feature (1081)..(1081): n is a, c, g, or t
  misc_feature (1097)..(1098): n is a, c, g, or t
  misc_feature (1106)..(1106): n is a, c, g, or t
  misc_feature (1156)..(1156): n is a, c, g, or t
  misc_feature (1233)..(1234): n is a, c, g, or t
  misc_feature (1247)..(1247): n is a, c, g, or t
  misc_feature (1249)..(1249): n is a, c, g, or t
ttccgccctgctgcaggcggaggtgctggatctggacgaggacgaggacgacctggaggtgttcagcaaggatgcctcattgatggacatgaactccttcagccctatgatgccaacatcccctttatcaatgataaaccaaatcaagtttgaggatgaaccagatttaaaggatctcttcatcacagttgatgaacctgaaagtcatgttactacaatagaaactttcattacgtataggattattactaagacatctcgtggggaatttgactccagtgaatttgaagttaggagacgatatcaagatttcctttggttgaagggaaaactggaagaagcacaccccactctgattattccaccattgccagaaaagtttatagtaaaaggaatggtggaacgctttaacgatgacttcattgagacacgcaggaaggctttacataaatttttgaaccgaattgctgatcatccaactttaacatttaatgaagacttcaaaatttttctcactgcacaagcttgggaactctcttctcacaagaagcaaggtcctggcttgctaagcaggatggggcaaaccgtcagagctgttgcgtcctcaatgagaggagttaaaaaccgcccagaggagttcatggaaatgaataactttattgaactatttagccagaaaataaatttgatagataaaatatctcagagaatttataaggaagaaagggaatattttgatgaaatgaaagaatatggcccaattcatattctgtggtcagcgtcagaagaggatctggttgatactctaaaggatgttgccagctgcattgacagatgctgtaaggccactgaaaagcggatgtctggactctcagaggccctgcttcctgttgtacatgagtacgtgctttatagtgaaatgttaatgggtgttatgaacagaagagaccaaatacaagcagaactggattccaaagttgaagtttgacctataaaaaggcagatactgatctgttccagaggagatnggaaaacttgaagatnaagtggaatgtgctaataatgcctgaangcagattgngagagatggaaacaannatatgcanatgatatcaagttagcatttacagatatggtgaggagaatatccattatnatgaacagtgccttgctacgtgggaatcattccttacatcacagaccaaccttcactgggaagaagcctctgaagannaacttaatccatngnggccttctgatagatctagagagacagcattattaacaaagtatatatccgggagttgccggtccttataagcggatgtaaaactgttagtacccatctggaaaccagaacttgaaatctcagtatccac

SEQ ID NO: 698833 - DNA, 1229 bp, Homo sapiens
  misc_feature (1083)..(1084): n is a, c, g, or t
  misc_feature (1097)..(1097): n is a, c, g, or t
  misc_feature (1099)..(1099): n is a, c, g, or t
ttccgccctgctgcaggcggaggtgctggatctggacgaggacgaggacgacctggaggtgttcagcaaggatgcctcattgatggacatgaactccttcagccctatgatgccaacatcccctttatcaatgataaaccaaatcaagtttgaggatgaaccagatttaaaggatctcttcatcacagttgatgaacctgaaagtcatgttactacaatagaaactttcattacgtataggattattactaagacatctcgtggggaatttgactccagtgaatttgaagttaggagacgatatcaagatttcctttggttgaagggaaaactggaagaagcacaccccactctgattattccaccattgccagaaaagtttatagtaaaaggaatggtggaacgctttaacgatgacttcattgagacacgcaggaaggctttacataaatttttgaaccgaattgctgatcatccaactttaacatttaatgaagacttcaaaatttttctcactgcacaagcttgggaactctcttctcacaagaagcaaggtcctggcttgctaagcaggatggggcaaaccgtcagagctgttgcgtcctcaatgagaggagttaaaaaccgcccagaggagttcatggaaatgaataactttattgaactatttagccagaaaataaatttgatagataaaatatctcagagaatttataaggaagaaagggaatattttgatgaaatgaaagaatatggcccaattcatattctgtggtcagcgtcagaagaggatctggttgatactctaaaggatgttgccagctgcattgacagatgctgtaaggccactgaaaagcggatgtctggactctcagaggccctgcttcctgttgtacatgagtacgtgctttatagtgaaatgttaatgggtgttatgaacagaagagaccaaatacaagcagaactggattccaaagttgaagtttgacctataaaaaggcagatactgatctgtgccttgctacgtgggaatcattccttacatcacagaccaaccttcactgggaagaagcctctgaagannaacttaatccatngnggccttctgatagatctagagagacagcattattaacaaagtatatatccgggagttgccggtccttataagcggatgtaaaactgttagtacccatctggaaaccagaacttgaaatctcagtatccac

SEQ ID NO: 698834 - DNA, 763 bp, Homo sapiens
  misc_feature (214)..(214): n is a, c, g, or t
gggggcagcggcgctgatatgtggggtccgtatttgatgtcgcgtctcccagggggtcaataagatgtgttccagtagtgatgcgcttcggagatgacctggggagataatatggggcgccccccttcacggggtgctggagtttgttctctcagatcttttgttcaagagagccggggttcttatcccgcctatgccccgatgcggttcttgnatagctcctctccccccgttgttgtagtccaccctgctcgctttgcgggcgtttctccaacctatttgggcactatccggagagggatcccctgtgccccacgcgccgtccccagggcatttttgaaccccaggtggcgtctatctccccatgatcagggggctctttgggacgccccccccccctgtgagccccccttggtcaggtgatgttcccgaagcattccctcgccttatcagcagttgcccccgtttctccctcccggaaatttgcgccacatactcacactccgtttatagatccctcttccttctttataagtttgcctagaaatcatcgggtatgctataccacgcacactattcactgcgaatgctgcggcttcgagattccaataaaaccccacaattctctaagaatcaccccctatgcaacctccatgtcgtttttacccccccccaaggtgcttccccaaacatcccttcaccctacttatgtcacccaagccccaagttttggtttcccaaactataacaaaccaacaaaaca

SEQ ID NO: 698835 - DNA, 1331 bp, Homo sapiens
  misc_feature (980)..(980): n is a, c, g, or t
  misc_feature (996)..(996): n is a, c, g, or t
  misc_feature (1024)..(1024): n is a, c, g, or t
  misc_feature (1033)..(1033): n is a, c, g, or t
  misc_feature (1049)..(1050): n is a, c, g, or t
  misc_feature (1058)..(1058): n is a, c, g, or t
  misc_feature (1108)..(1108): n is a, c, g, or t
  misc_feature (1185)..(1186): n is a, c, g, or t
  misc_feature (1199)..(1199): n is a, c, g, or t
  misc_feature (1201)..(1201): n is a, c, g, or t
actcatagaggatccccgtcactgatgtctcgtgatggacatgaactccttcagccctatgatgccaacatcccctttatcaatgataaaccaaatcaagtttgaggatgaaccagatttaaaggatctcttcatcacagttgatgaacctgaaagtcatgttactacaatagaaactttcattacgtataggattattactaagacatctcgtggggaatttgactccagtgaatttgaagttaggagacgatatcaagatttcctttggttgaagggaaaactggaagaagcacaccccactctgattattccaccattgccagaaaagtttatagtaaaaggaatggtggaacgctttaacgatgacttcattgagacacgcaggaaggctttacataaatttttgaaccgaattgctgatcatccaactttaacatttaatgaagacttcaaaatttttctcactgcacaagcttgggaactctcttctcacaagaagcaaggtcctggcttgctaagcaggatggggcaaaccgtcagagctgttgcgtcctcaatgagaggagttaaaaaccgcccagaggagttcatggaaatgaataactttattgaactatttagccagaaaataaatttgatagataaaatatctcagagaatttataaggaagaaagggaatattttgatgaaatgaaagaatatggcccaattcatattctgtggtcagcgtcagaagaggatctggttgatactctaaaggatgttgccagctgcattgacagatgctgtaaggccactgaaaagcggatgtctggactctcagaggccctgcttcctgttgtacatgagtacgtgctttatagtgaaatgttaatgggtgttatgaacagaagagaccaaatacaagcagaactggattccaaagttgaagtttgacctataaaaaggcagatactgatctgttccagaggagatnggaaaacttgaagatnaagtggaatgtgctaataatgcctgaangcagattgngagagatggaaacaannatatgcanatgatatcaagttagcatttacagatatggtgaggagaatatccattatnatgaacagtgccttgctacgtgggaatcattccttacatcacagaccaaccttcactgggaagaagcctctgaagannaacttaatccatngnggccttctgatagatctagagagacagcattattaacaaagtatatatccgggagttgccggtccttataagcggatgtaaaactgttagtacccatctggaaaccagaacttgaaatctcagtatccac

SEQ ID NO: 698836 - DNA, 82 bp, Homo sapiens
gcacgagtaaagcttttccattggcaatctgacattttaatgaaactactcttatttattttttctttctgaggtattaaaa

SEQ ID NO: 698837 - DNA, 164 bp, Homo sapiens
cgttaggtgcttagaggatgcgttatcagtcgctctagggactttcttactggatgaggtgagtaagaataggtacacgtacctatccttactcacctactaaagaagtttacaatccataggaccgtcatccctcacgcgacttggctggttcagagtttcct

SEQ ID NO: 698838 - DNA, 397 bp, Homo sapiens
actcatagaggatccccgtcactgatgtctcgtgatggacatgaactccttcagccctatgatgccaacatcccctttatcaatgataaaccaaatcaagtttgaggatgaaccagatttaaaggatctcttcatcacagttgatgaacctgaaagtcatgttactacaatagaaactttcattacgtataggattattactaagacatctcgtggggaatttgactccagtgaatttgaagttaggagacgatatcaagatttcctttggttgaagggaaaactggaagaagcacaccccactctgattattccaccattgccagaaaagtttatagtaaaaggaatggtggaacgctttaacgatgacttctacgagacatcagtgcgggatccc

SEQ ID NO: 698839 - DNA, 1153 bp, Homo sapiens
  misc_feature (802)..(802): n is a, c, g, or t
  misc_feature (818)..(818): n is a, c, g, or t
  misc_feature (846)..(846): n is a, c, g, or t
  misc_feature (855)..(855): n is a, c, g, or t
  misc_feature (871)..(872): n is a, c, g, or t
  misc_feature (880)..(880): n is a, c, g, or t
  misc_feature (930)..(930): n is a, c, g, or t
  misc_feature (1007)..(1008): n is a, c, g, or t
  misc_feature (1021)..(1021): n is a, c, g, or t
  misc_feature (1023)..(1023): n is a, c, g, or t
ttccgccctgctgcaggcggaggtgctggatctggacgaggacgaggacgacctggaggtgttcagcaaggatgcctcattgatggacatgaactccttcagccctatgatgccaacatcccctttatcaatgataaaccaaatcaagtttgaggatgaaccagatttaaaggatctcttcatcacagttgatgaattgagacacgcaggaaggctttacataaatttttgaaccgaattgctgatcatccaactttaacatttaatgaagacttcaaaatttttctcactgcacaagcttgggaactctcttctcacaagaagcaaggtcctggcttgctaagcaggatggggcaaaccgtcagagctgttgcgtcctcaatgagaggagttaaaaaccgcccagaggagttcatggaaatgaataactttattgaactatttagccagaaaataaatttgatagataaaatatctcagagaatttataaggaagaaagggaatattttgatgaaatgaaagaatatggcccaattcatattctgtggtcagcgtcagaagaggatctggttgatactctaaaggatgttgccagctgcattgacagatgctgtaaggccactgaaaagcggatgtctggactctcagaggccctgcttcctgttgtacatgagtacgtgctttatagtgaaatgttaatgggtgttatgaacagaagagaccaaatacaagcagaactggattccaaagttgaagtttgacctataaaaaggcagatactgatctgttccagaggagatnggaaaacttgaagatnaagtggaatgtgctaataatgcctgaangcagattgngagagatggaaacaannatatgcanatgatatcaagttagcatttacagatatggtgaggagaatatccattatnatgaacagtgccttgctacgtgggaatcattccttacatcacagaccaaccttcactgggaagaagcctctgaagannaacttaatccatngnggccttctgatagatctagagagacagcattattaacaaagtatatatccgggagttgccggtccttataagcggatgtaaaactgttagtacccatctggaaaccagaacttgaaatctcagtatccac

SEQ ID NO: 698840 - DNA, 385 bp, Homo sapiens
gtgacggtgctgctgttggtcgtctctagcaggttcccccggccgccacgcttctccattctccagcggatggagctatggctttaactagtttatgcttgtggaaggttccctctagcgtataagtcagtttggatcttggactccaacctcaagcagtctggcacttcactcccctactcttaccactgggctagcctgcctatttaggttggccaagcttatagacaggttggagatcgggctagaacagggtctggatcagaccctggaaagtctccaatgctgatccaggcatgtcttattcaagatgcagtggagctgtgactcacggtatactctccctagggcaggggctgagtgaactgagacctgggaacaggca

SEQ ID NO: 698841 - DNA, 357 bp, Homo sapiens
tttcgtagacccaacataagaagaatacttgaggctagacggggaagtcggttacaaatcacatcagataagctactaacaaggactgggtgtaatttaaaaaaaagctaaggcagaaggcttctgggaagagttagacgaatctggaaggccttaactatagtagcttagttcgaaaaatgtgaaggactttcgataacggaagtaattcaagatcaagagctaagttaccaacgttaatgtctcgcatcgagacttgaggttaagatgtatggtatcaatcctgaggacctagcattaattgacagctgacccaggtgctacacagaagtggactcagtgaatctaggaagacag

SEQ ID NO: 698842 - DNA, 219 bp, Homo sapiens
gcactaggcgcacttctcagcctgagtgtggcatctgcttctgacgggccctaatggatgtggctcacgcctgtcatcccagcactttgaaaggctaggccaagcacagtggctcacacctgtcatcccagcactttgaaaggctaggccaagcaccccggttcacacctgtcatcccagcactttgaaaggctaggatgacagaagtgcgcctgggtg

SEQ ID NO: 698843 - DNA, 459 bp, Homo sapiens
  misc_feature (198)..(198): n is a, c, g, or t
  misc_feature (427)..(427): n is a, c, g, or t
  misc_feature (430)..(430): n is a, c, g, or t
  misc_feature (450)..(450): n is a, c, g, or t
  misc_feature (452)..(453): n is a, c, g, or t
actgagtttaacctggtgtgtggagacgcctggaaagtggacctttttcagtcctgtgtgaacttgggcttcttcctgggctccctggttgtgggttacattgcagacaggtttggcaagccctgcccctcattttgtttggggttttgggcctgagtgctggggctgtgacccttctacttccggagaccaagggcngtgctctgcctgagactattgaagaagcggagaacctgggaaggaggaaatcaaaggccaaagaaaacacgatttaccttcaggtccaaacaggcaaatccccacatacctgacagggatgccgtgtcaggagctgagtggagagaggaaggaggactggccacttggaagattcctagaagcctttgccttcccagacacttctatatattcaaccaggttccaaatnaantcccaaaccttaaagacttntnngaaaaa

SEQ ID NO: 698844 - DNA, 217 bp, Homo sapiens
  misc_feature (19)..(19): n is a, c, g, or t
  misc_feature (62)..(62): n is a, c, g, or t
  misc_feature (64)..(64): n is a, c, g, or t
gctttgtttacacttcaantttcaccctgattcttgcccccactttcataaaagaaacttcnanaatgctgacgctttggagagtaagaaaatcaatcttggctgggcacggtggctcctgcctgtgatcctagcactttgggaggctgaagctgaaggatcacttgagctcaggagttggagaccaaccctggcaacataacaagaccctgtctct

SEQ ID NO: 698845 - DNA, 458 bp, Homo sapiens
agaaaaggagaggatgggggtagagtctcccaagccaaaattttgacatttgagtgctttcgtaagccctgtacatgtactattaattcagtcattcagccaagcctcctcctctagcagcaatttccagctgtgtaacactatcctgggcaaatgttttctcctgtcctccagcctccctgcttcccttgtggccgtgaaagcatcagtttgcacggcagaatgcaggagctgggagactgtgagtgcctccctccctcagcccggatggggctgtctcccggaccccagtggtggggtgggggaagggggtcggagaatcactcaggcagggccccagggtggggtcaggaggttcctgctctggcaggtctagcgagaagggagtggagatggggctggttcctggtgcagtgacggccccaaacgggacaataaagagtggacactcagttggc

SEQ ID NO: 698846 - DNA, 527 bp, Homo sapiens
tcttcctcctctggggcctgcctcttcctacccataagcaccagagccaggcgctgcccatgacagagggggcaggctggcctccctttccaccatcccggctctcccagggctggtcctgcctcagctcctcctggaatgctggccccctctccctgctgagcccctcctcccctcatgcgtctctctgcctctccacgcccgctccctccaggaggcggggggtgtgagggcgggcccgctgggctggactgtctgctaggggctgcgcgcagagacggaaggtcgcacatcgagcggccaggccccccgagtgacgaacgggagatacagggcaccacagccaagtcgccagggaaggaaaaccaggggcctagaaacgcacggcaggggacacagaggagccacacagcagacaggcaccccaaacgacaacagcgtccaacaacacaagcaaagaatcgcatagaaaacggacacaaacaagcacatacgcacacataaagcaacccaagaacagaacccgc

SEQ ID NO: 698847 - DNA, 633 bp, Homo sapiens
gcaacggtctcaagatctgcgagaagtttgggcccaatctggacacgtgccctgaaggcaccatcctgggactgcggctggacagctctggggggctgcatcttcatgttaatggggtggaccaggggtagctgtgccagatgtgccccagccctgccatgcgcttgtggacctctatgggcagtgtgagcaggtgacaatcgtgaaccctgagccagggctgccagtgggaaaagtgctggaacccaaggggacatggagaaagcagacatggtggacggtatcaaagagagtgtgtgctggggtccaccacctgccgctagtcctctaaagagctgcgagtaccatgccctttgctctcgcttccaagaactcctgctgcttcctgaagattatttcatgcctccgccaaagcgaagcctgtgcgccctggctcctacaccccgggacccccttccgctgccccgggaatatgcactgccctttggctggtgcaggttcaacctcaggtactgctccatcctgagctgccgtcctttgaagggagaacctggggtagggttcgaggagcctggcgagaactgtgcacctcctcgggaggagcagccccctcctgtgctgctttccccctcc

SEQ ID NO: 698848 - DNA, 243 bp, Homo sapiens
accacacctgatgctcccacctcagacatgaacagaaccaaatctcatactcatgccagatcttacctccagacatgacagacccagatcctcatacctgtaccagatactgcctcctcagacattgacagacccagatcctcatgcttatgccagatcctacctcctcagtcactgacagaaccagattctcataattaataccagatcccacctcctcagacactagaaggtccaggtatg

SEQ ID NO: 698849 - DNA, 193 bp, Homo sapiens
tgtgatgtgagaatttagaatcttgagcaatgcattgcggacactcagcaacgtgcattttccagtgtcaccgtcatctcctccattgatgctgcagccacagcgacgtgaagtgttttctcagatgtggaatgctcttaactgtggtggcttttccagagaaaaccatggttgaaaggatactaggttgtga

SEQ ID NO: 698850 - DNA, 736 bp, Homo sapiens
gtgggcgttggacgggtggggcggcgtggtgtgggtgatgggggtggctgtggtttcgcccagcgcggttgggggcttgtcgtgggggagttgccgggcgttggctggactcaggggggaagagggccggtgtgggcggcggggcgcgggggggggacgctgtggtagaggcgccggggatgggggctcgctgggtgtgtcacggggagggggcacgagcccggagcgtcctggcggcgctccccccaagccttggtatgggcggcgagcccggtgagacacaggggtcgtattgcgctgacggcactcctctgggtgtccgcggcccccgcggccctccttccactgagtggtggtccccgcggcgtcgccgccgttaagcgggggttcttggtgctccccagtgcgcggaagacgtattggtggggctgtgcgcggcatgtgcgtagttagcctcggttgttgcggcgcgccccgtttgagttcgcgcgatggacacggtctggacgcgcagcgttcggcggggcacggcgggggtgaggctcgcccggttgagtacatgtgagtcctccggcttggcggtgccagcactgtgctgagggcctagcgccccggtggtgaaaccacgcgggaccgcccccgcggctggtggacttggacgaagccccggctgcccgcttgccgctcacgggtatgcctggcccgccttgcgcccccgttaattcccccccatgcc

SEQ ID NO: 698851 - DNA, 225 bp, Homo sapiens
cgcgaatcataagttacgtaaccatcaccacaatcaagatgcagagctgttctaacatcacgaaggaactcccttgtgctatctctttgtattcttattcacctcccaccacaccccaccttcatccctgtttcctggcaaccactaatctgttcttcacttctagagttttgtcattttgagaatgttatataaatggagccatagagtatgtaacttttaggg

SEQ ID NO: 698852 - DNA, 104 bp, Homo sapiens
cctgcgcttttatcacgacagctcaagacagcctggtagactggcagcatgtggagttgttacaaaagtgagtccactgggcctgtggaatgtgaggggagtgg

SEQ ID NO: 698853 - DNA, 120 bp, Homo sapiens
aacggttaccagcacatcactatctctgtgtctcctcctcctcctccttctatctcgttctcgttctccatttccttcttctttttcttctcattctttcttcttcttcttaatcttttt

SEQ ID NO: 698854 - DNA, 136 bp, Homo sapiens
ccctggtaaagtcggctcatattggcgggaatatagtattagggaagtaaggcagctggtatggaagcggggactctctagtttaacccctacggctgctagggaggcaggtcatatattactaggcgcagaatag

SEQ ID NO: 698855 - DNA, 1292 bp, Homo sapiens
gcgataagatgggggtgtggtcatgatgaatgattgccgcgtggtggttgcgttgtttgtggggttgtaggtttgtgtgatcgctgccgccagcgggtgggcgttgcgttctggatggcgacggccggtccgagggccccgtttggttgagcctcctgtccgggcggggggtcctggcgggaggggggcgctcccgggggggggtccgcccattgtgctcttcccgctgtggttgtccgacgccctcgcttggttcgcagatcggttccgccggccgtgtccccgcgagtgggggtcccacagggttgtcccccgcttgggcccgcttttggggtataccaccccaagggcccacaaaggggagatgttgggcgcaccaaggcgccccgagaaatatttgggcccccctgtgtgtgggcgggcccccctccggtgttagagattatgttttggagaacaggagataggtggtcgccccccgcacacttttgtctgtgcacagatgtttggggggagatatggggtgtctttgtgtgggccccctccaccaagatgtgttgcgtttgctcatgatgagatgttggtccctttctggaagtggagaagtgaagatctatgtgggggtgcgtaaataaacacgttgtataagagaggttagagagcgcttatatggtatatttggcctgaaagatgttgtgcccacgcgttattagcggtgggttcgcggcaaaataaagagggctaaacgggtgccccacaggtgtgtgggttactccacagatgagagaccccctcgtgaaaatgagatgtagcctgtcactcgttctcttttctccgctgtggtggttggtgcccgctgcctgctcttgccccaatatggtattttgtgacattttattggcactcttggttctcggtgagatttcacaggtttctggtgagaaatatatttttgggaatttctaatagccacactttaacacactcttttactagagtttctggcgctcacttgtgcctctgccctcgagggctccctctggctggcttgtgtgggccactcttctctcgcctcttttaccacgtcaccctgagacccactgagcccactcacttctcttgcttgcttgaaatcttgctgaaaatgttctcactttcccgctttgccgtaatgggctcgcggtgggaatgtttgttggctctggttgtgtttagttcaccccactttgtaccacattaatttgttgtcccttactactgtaaaccgtaaatatagtttggtattctgtcca

SEQ ID NO: 698856 - DNA, 921 bp, Homo sapiens
gaggcgagggcgccgacccacaccgcgctgcgcagttttgttcttgctccagctgttcgaaggtgatccagacgcaaggaatggttgtcctctctaaggaatatggttttgtgcttctaactggtgctgccagctttataatggtgtggccacctagccatcaatgtttccaaggcccgcaaagatgtacaaagtgagtatcctatcatgtacagcacggggaccctgaaaaattgggcaccatcttcaactgcattcagcgagcccaccagaaccaccgtgggaagtgtatcctcccttcttatattttctagctgtgtgaggtgtttaccacccgcgtattagcttctgcctgggcttgcgcctggatttgttggacgagtcctttatgcttacggttatacacgggagaacccagcaagcgtagtcgaggagcccctgtgggtccatcgccctcctgggcttggtgggcacaactgtgtgctcttgtttcccagcatctgtggttgggctaaaaggtgccttggcgcagtggccccaaattgtggccattacacagatttataggggggttaaaaaactctcatccaatttaaaatttgacttaccgttttatttcccccttttaacatttttttttctttaactattatttaacaaactttacctggagtcaggcctcattaccttagaagaaaagtaatgaaacacaacattttgtggggggccccgcctcgaaaaagtttaaaagacattgtggtgggggcgggcccagattgaagtgacctttgtctcaggtttgccacagagacctggtgtaagaaggtgtcggttcaccacaaaaaaaacccgcggggccggcgttttgagcaccccggggcgtcggcctcaggtcacacggccaaggctacacccgcgggg

SEQ ID NO: 698857 - DNA, 731 bp, Homo sapiens
aaggcgggggacacacgcccgagaaaagagatgagatatatggagagaggaagagggacgacacagcagtgtgcgccgatgatgatcgccccccaccagagaggagcccacagagagtagagcccccgcaccgcagcagagagagatgaggatacatataggacacacaccacacacatagagagaggagagaaatagatggtataacacatataaaaaaaaaaaagaaaagggccgccgcgcgagaagacactattgtcacacccgtcgcacacacttgcacacgctgtctccacgagagattcttaaacgcggggtgcacacactctcgcgagagtatagagagagaggtcccccccccaccccacacctcggggcaaagtggccccccccacgagtggaacaccgcgcgtttctcacccacacccccaatccgcccatccctcgtcgtagagagaatttgtccacacaagcgggagggagaaaaagagagccccaacgttcccaaggccccgccttttttttttaaaaaggatccttttaaaaaggagaaatttgtttgtaattttttatatttcaccctttaatatttttggaaaaattgttagggctcccccccttttatagtgatttcggggggccccacccccccttgggacgttttttttccaaatttgtgactttaccttttggggggacccagtgttcccttattaaattttaaaaaaaaa

SEQ ID NO: 698858 - DNA, 343 bp, Homo sapiens
aaccgacgcctttggagtagaacagttgcgtgctttagtctgtgagcctacgtgtctgcctataggagggggagctgttagggggtcgacctagcccaggagaagtggtagacgtttggctatcaccccaagaagatgtgagagggtgcaagcaaggttagcaactgtggacagagaggtcgtgatttgccctggcgtagggagagaggccaagttcagagctctctgtctcccccagccagacacctgcatccctggctcctctattactcaggggcattcatgcctggacttaaacaatactatgttatcttttcttttatttttcaaaggaggtcccggg

SEQ ID NO: 698859 - DNA, 137 bp, Homo sapiens
ctcgttggggaagagattggggcgacatcaccctgcgcttcaactggaacttccagagggacctggcgacgggaggcactgtggagtatgccaaacgaaaagcacatgctggccctggaaccccaaacagcaactgc

SEQ ID NO: 698860 - DNA, 477 bp, Homo sapiens
  misc_feature (2)..(2): n is a, c, g, or t
  misc_feature (85)..(85): n is a, c, g, or t
  misc_feature (126)..(126): n is a, c, g, or t
  misc_feature (278)..(278): n is a, c, g, or t
  misc_feature (284)..(284): n is a, c, g, or t
  misc_feature (287)..(287): n is a, c, g, or t
  misc_feature (289)..(289): n is a, c, g, or t
  misc_feature (293)..(293): n is a, c, g, or t
  misc_feature (296)..(296): n is a, c, g, or t
  misc_feature (298)..(298): n is a, c, g, or t
  misc_feature (302)..(304): n is a, c, g, or t
  misc_feature (308)..(308): n is a, c, g, or t
  misc_feature (313)..(313): n is a, c, g, or t
  misc_feature (316)..(317): n is a, c, g, or t
  misc_feature (319)..(320): n is a, c, g, or t
  misc_feature (331)..(331): n is a, c, g, or t
  misc_feature (334)..(334): n is a, c, g, or t
  misc_feature (343)..(343): n is a, c, g, or t
  misc_feature (345)..(345): n is a, c, g, or t
  misc_feature (352)..(352): n is a, c, g, or t
  misc_feature (359)..(360): n is a, c, g, or t
  misc_feature (362)..(362): n is a, c, g, or t
  misc_feature (367)..(369): n is a, c, g, or t
  misc_feature (385)..(385): n is a, c, g, or t
  misc_feature (389)..(389): n is a, c, g, or t
  misc_feature (395)..(395): n is a, c, g, or t
  misc_feature (401)..(401): n is a, c, g, or t
  misc_feature (408)..(408): n is a, c, g, or t
  misc_feature (412)..(412): n is a, c, g, or t
  misc_feature (421)..(421): n is a, c, g, or t
anggtcaaagcgggaaaccaaagagtatgtggtatccatattcgttgcaaaaatgataattactggaattttccaaacatcaaangaagggggatcaatggttaccactatcgttttcaaccaatntacagatgttcgctcaaggtctaggttttatttctacatagtagtattcacatgagttccctattctgaagtattatcaaaacgaggacccttgaaggtcgagcccagctttgtcttgacttcaaagatgacacagcagccatacctagaanccgggnttncngttngantncgannnagcnggtcngcnnanngggtacaatangcngtgtctcgnanaacgaanagcaganngnagagnnngctgaaacagggcggnggcncaagcngccgcnccagggnaccnagacagganaaaaaggtgctggccctgagcgtgcaaaacccaccaccaggaaaccaaaacggacc

SEQ ID NO: 698861 - DNA, 723 bp, Homo sapiens
  misc_feature (266)..(266): n is a, c, g, or t
ttcgatacaaactgtgtccgttaactaagttccagttgcaccactcaatcctactctcctctcgcggaaggcaataaatttttggcgtagaaaccacaatagccctttcgtctcaagcacacactcaaaaacataacatttaagcatctctcacgctcttcagatcacgtctccaccagctcaggtttattacacgcgctccccgctcgataaaaataccatgattgcgaaagagaagtctctcaagtatctttatctctagatancaaacaaaaccacccttctctagtgacagcaagaaatgatcgttcatatgaaagaaataagagttgttcctgtaatcagaagactatctatataattttgacccccccacacaaaaagggtactaaacaaattgtttgatatgtctatgaccggtttatataaaaagtggcgccccccaagagcatctctcaaccaacgagttacatacataattgtctctctcccggcgctctctcacagaaacaatctctctatttataccaagttctatttcactcatagaagactgtattgtttaaactaccccaccacaacaaccactatttttatccactcacccattgtgatcaccaggttgtcaagcactttcttggttctattatcatcttgtgagcaacccccttgtgaattaaaaaacacatgttgtgcaactttcataagcaataataccacaaa

SEQ ID NO: 698862 - DNA, 117 bp, Homo sapiens
  misc_feature (14)..(14): n is a, c, g, or t
  misc_feature (23)..(23): n is a, c, g, or t
tcaggatgtcactnattgcactnattgcattaatcaatactgcactttttgcaactgtggctatgacagcctgaacaagaaggttcctgttaactgcagtactttctgactatgatc

SEQ ID NO: 698863 - DNA, 170 bp, Homo sapiens
tgtgctgatcggggtatgcgtcgaattcataacgaccaggaggtagaagtagggtctcggtgacaaaactatgttgtgtagagttcagggagagagtgcgtcactatgttgttcctaggacgattgtagttggtgagggtgtccacttataatcatgtttgtgtattcgg

SEQ ID NO: 698864 - DNA, 433 bp, Homo sapiens
tatgattagacgtgactagatggagccacatattcctcagtccctccaggccctggctttttccggaatgtcatgtagttggaatcatacggtgtggagcgttttcagattggcgtctttcacttggcaatatgcacttaaagattcctccactaggcatgatggctcatgcctataaatccctgcactttgggaggtagagttgggggaatcgcttgagcccgggagttcgagaccggcctgggcaacgtggcgagaccctgtctctacaaaaagtaccaaaaaactggccaggcatggtggtgcacctgtggtcccagccttgggaggttgaagtgggagaataacctgagcccagggggcagaggctttgaggagccatcgtggcaccagtgcatgccagcctgggctggcgtgagatcccatctcaaaa

SEQ ID NO: 698865 - DNA, 105 bp, Homo sapiens
aacagctatacaccaacagccagctgctaaagtctgggtttattctcttgagccttacaggtccccaacacaataaactattatgtgacaatagggctttttttt

SEQ ID NO: 698866 - DNA, 1265 bp, Homo sapiens
  misc_feature (387)..(387): n is a, c, g, or t
  misc_feature (979)..(979): n is a, c, g, or t
  misc_feature (1100)..(1100): n is a, c, g, or t
taacaaatagcactttttattggccacctattggaagtctgaacttaaaacagattctgggacggggggttcatatccatcagcgtcgtttcaacttttagccaccgtgtgtctcgttccccagggggctttcccaaaactagcgtgccttcaccagtgaagcctccagtgagcttccccaattcaaacgtggggacttcttcgaccatttataactttcctaacgaaagaacttcgaggggagagaggcatacaatagaagtgggcgaagcgcctttctctagtgctctttcccaagggcgtgtcgggaactcaatttagtggcccctttcttctcaagctcatgtgggtcgtgccacctcgctgcgggctcgcagtgaattctcnccatcaatactgtcatctcgcggaatatggggcggacaccgtgtgtgtgggtgcgtgaagcacataagagagggtctcgccgaaaatcgtgaatggggggcgtattttaagctaaaagaacccaaacaacgagaaaacagaccggagagccagagttaaacacatcgcggtgaacgtcctgtgcgacactctccaacgcggggagagccttccaacagtacagtggggttcggcgccaatatcttggggaagaccccagggggaaaccaccatttttggggccccgcggggtcaacgaaatcccactggtgcgccatgggggaaatgttttacgctccaggggccaaggtaattatatcaccccgtggaaatcaattctttttccacgtaaaatcacaacggcttgagagattttcttctaaaaatgcgcgccacctcttcaaatcacattttctcggcggaacatctatcccggcaaagaggacttcacctctttccaaaaaacaccacacgaaccccctttgtgaggaaccccatatccaggaagatgtcaacaccgggggtggtcccccccatgggggaccccccggtngcgggacaaacacacgcgggtgttttgctcccacaaaactaatctctttctcattaactattgcgcgaacccactcggcacagcaggggggcgttccaccacattttcttataccacccancatctcttttcatgagaaaaagtggggtggaacccccacacgttccctcagtggcggcacccccaattaatagagagcgcagcactaagcaaaaagcggccggctgtgttagttgaaacacaacaccgctgctgtttgggtagcgacatcattcatcacagtcgc

SEQ ID NO: 698867 - DNA, 646 bp, Homo sapiens
agcatctagagcgagagcaggctcttgctaaacagtttgcataaattctccatttcacactccgggtttgatgaactcaagatgacgaatccgtgcctatgacgagaatgatatcatgcgtattatagaagaacatggagtcgtatgaggattaacaatggtaccggcagaaggagaaaatgagagtaaataatgaagtgggcaaatcgaatgtcttagtaaaatgctggaggcgaactcgcaatgcgtgaaaaccttgagtgatgccagaataaaatttgtatcagagaataaaaatttaccaatagaaaatagcacagatggttaaagcagaatggctagtgtatgcagagtcatgctggaaacaccgtgaatacagaagcagatttacaaatgaggagacagtgtcattctgctggagggtaatggtgggtgtcataatactctatgaccacgtagcatccagtgggagtatttgtaaaatttccaaaattgatatgacacggttgtctcacaagttccttacggaccaaagctccataaatagctgtggcacgggctttcgtacaatggtctcagggtacagaacgaaaacatttggagtgttgcgactacctccaagccaattaaatccatgcgggaataa

SEQ ID NO: 698868 - DNA, 292 bp, Homo sapiens
  misc_feature (44)..(44): n is a, c, g, or t
cttttactggcttaaatagccgaccaattcagcctgttaccaantccttgcaattttgggaaaaaaaatatttgaccagatacaatgctattttacagtaaacaaatatagactttcatcttatagggaagttcattaaacagttcacatcacctgcaaaactcattccaagcaacacaactcttaacacatggctcaaaacacgctcagtgcagccaaacactatgcacaaccctcactgagataacacgtcgacgcggccgcgaatttagtagtagtagtaggcggccgc

SEQ ID NO: 698869 - DNA, 110 bp, Homo sapiens
aacgttggtcttgagaaacaatcactgaagataagggtacttgggaggcccagacgggtggatcacttgaggccaggctggtctcaaactcctgggctcaagcagtcctc

SEQ ID NO: 698870 - DNA, 348 bp, Homo sapiens
  misc_feature (239)..(239): n is a, c, g, or t
  misc_feature (243)..(244): n is a, c, g, or t
  misc_feature (255)..(255): n is a, c, g, or t
  misc_feature (257)..(258): n is a, c, g, or t
  misc_feature (287)..(287): n is a, c, g, or t
  misc_feature (295)..(295): n is a, c, g, or t
  misc_feature (307)..(307): n is a, c, g, or t
  misc_feature (324)..(324): n is a, c, g, or t
  misc_feature (327)..(327): n is a, c, g, or t
cagtctctcctcctcacagaagcctggagctgggcatccaagaagaagcagcctcatttgttttctggtgtcatcgtaggtggccacctatggcttttgggaccaaaaagaagaatgtacttcatctggttgggctggattccctctgataagccttcccagttgactgaaagatgaggctaggctctagcaagttgagagtcaaaccagctccttcaagaagctttgagcagaatgangtcnnggaggacccancnntccagcccaggaagcccactgtacctggngccatctnggataagctttnacccatgctcccatatncanagcctgtcatcctagccatcc

SEQ ID NO: 698871 - DNA, 574 bp, Homo sapiens
tcaacgagcaatcaagacaaaatgtggtaccgttagcctcaagaatctgctgtttagctaccattgctgcttctggctggctggcctggctgtcatgactgtgagcatcctggcgctggccctcaagagtgactacatcagcctgctggcctcaggcacctacctggccacagcctacatcctggtggtggcgggcactgtcgtcatggtgactggggtcttgggctgctgcgccaccttcaaggagcgtcggaacctgctgcgcctgtacttcatcctgctcctcatcatctttctgctggagatcatcgctggtatcctcgcctacgcctactaccagcagctgaacacggagctcaaggagaacctgaaggacaccatgaccaagcgctaccaccagccgggccatgaggctgtgaccagcgctgtggaccagctgcagcaggagttccactgctgtggcagcaacaactcacaggactggcgagacagtgagtggatccgctcacaggaggccggtggacgtgtggtcccagacagctgctgcaagacggtggtggctctttgtggacag

SEQ ID NO: 698872 - DNA, 351 bp, Homo sapiens
tccaaagaaaaaaattcccgtgaattgtgccgaaatgctggtttttcccccctcctaaagaaaacctttcccagggtgttttggagtagaaaaaaggttataaagttgggatctttaattgtaaaattaccccttgagtgtccaagttttaaaagccgaactccttttgtgccatgaacctaaggaaagactcctgtataggtttttttttttttctccctttaaatgaagaaaagctttgcttaagggttgcctacttttattggagtaaatctgaatgatcctccccccttggagtaaaactagtgcttccccgtttcccattgtatttagcttctggttggaatttga

SEQ ID NO: 698873 - DNA, 594 bp, Homo sapiens
gagtctataagacagaagttggcacttggaagctactttgatgatggcccaggaatctataccagctgtagcaaaagtgggaagccaagcctttcctcccgactgcagagtgggatgaacttgcagatatgctttgtcaacgacagtggcagtgataaggacagtgatgctgatgacagtgagactgaaaccagcttggacacccccttgtctcccatgagcaaacagagtgtcttcctattctgatagagacactactgaagaggagtctgaatccttggatgacatggactgtcttacaaggcaaaagaaattgcaagctgaagccaaaatggcccttgccatggccaaaccaatggccaaaatgcaagttgaagtggagaaacagaacaggaaaaagtatcccgtcgctgaaacttgaagcagcaaaggctgaaaatgcaggaagtgtttgggaaccagaaatggttgacactgtcccaatcctttccccaattatgccaacctgcggttctctcccgccgcttcgcccccccccctgtcattcactacacattaagtttgtttatttttaccttcctactgtaggactga

SEQ ID NO: 698874 - DNA, 141 bp, Homo sapiens
caggcgttcacgtggctggacatctgctgctgcacctgttgacgcctgttatcacctgtggtcgacagcccggctgtggcgccggcacgttcgccgccttcccgtgaccagtgtcgacgcccagcgcaagctcgacccgaa

SEQ ID NO: 698875 - DNA, 171 bp, Homo sapiens
  misc_feature (94)..(94): n is a, c, g, or t
  misc_feature (154)..(154): n is a, c, g, or t
ccacattagggaacttgcctcaaaaacagtccacaagtgggcaatacccggcttctgttcaagctttttaaaagtgcttgagcccttacaaacncccttgaagggaaagggtgaccccttttgaagagggaatcatcttttttttttaattttnatttttcaccctggggt

SEQ ID NO: 698876 - DNA, 156 bp, Homo sapiens
cactatataagaaaactcacctcagaatctattgactctattagagggaaaactcacctcagaatctattgactccattaacccccaaaggccacttgagtgccccacccgcagcataaggacacacaggcacaggcattgcaacacggtctctca

SEQ ID NO: 698877 - DNA, 812 bp, Homo sapiens
ctctgaagacttactatttgatgtgctttttaatcgataccgattcacaagtttaggttatagaaaacaatactacttcgatgctttggagctgggaaatctggggcgcgtctttaagcatgactcttatatatcagtatattgaaaatagccataagagaagtagtaatattcagacaataatcactggacgaccaagaaatggattgatacgtgagctgtacttcacatgtatgaactagttgtagtggcgaggcttcttacctcaaggtacgatgcatgctcgggtaaggcgagtcaccctgagagtcagagcaggcgatacggacagtaacgcagatatctgtgaccactactaaggtctaactggtggatagtagtgtgtgcctcatagcgagagagtgacatgaatgcgacgttacaagaaggtcaaccatcaaacatctcaactgccaaccaatcctaggcagacatttcgcgagggactttccttatcgagagtctgtacagacgttacatgggatatttagcacatactagcatgcaatgaactggctatagtaaccaaggattgcttatttccatatttgcgactgtgaccctgctaagatgaactcaaaaggccgttgcagtgaccctgacacccaggtgcctaagtagtaactaggtggacatgcatgggactatgaggtgtaatagcagtaaagtaaccatattaatgcactggacttttgggatggtgtcgtccaaaaattcattggagcttgtaaaaacttagacgtgtgaagagtgtgtggagtgtgagattgtat

SEQ ID NO: 698878 - DNA, 534 bp, Homo sapiens
  misc_feature (148)..(148): n is a, c, g, or t
acggtcgatcatctgcgcagtttggccatatctatacatctttttatagtgtctgattatgaaaatgtatctatgaaatatattcctttagtatatgaggtgttccccatgtgatgacatggtatttgtaatttctgtcatgtacttngtcatttcaaaatgacatggccctttatcattgaaagattatactaaggagtataactgttttccataattttgcagatttcccctaatctgttaatgttgaaaactactgtttgattataaattgtatattaaattttaccatcagtgtgaaattcactaagatagagttatggagatagtgtctaatgctgcaaacagtctgtgtagtacgatacagtgacccagtgttgttctttttgttaacaggtaagaaaagaagtttttgttttacgttttctcaaattcctttggagtagaagtgttttatcttcattcctcaaggcaccaagcctaatgccattgacccctttaagaattcgtttttgaattgtctgagactttatg

SEQ ID NO: 698879 - DNA, 220 bp, Homo sapiens
atctctattgtagtttactagttaagtatgtattttgagatggagtcttgcctctgtcacccaggctggagtgcagatggtgcaatctcagctcacatgaaacctctgcctcctgggttcaagtgattctcgtacctcagactcccgagtagttgggattacaggtgcccaccaccaaacccgaataattttagtatttttagtagccatgtggttttgc

SEQ ID NO: 698880 - DNA, 347 bp, Homo sapiens
ctctagaggatctcccgctctccacccaccccgaggctgcagtttccagctgggtgagtgctacgcggggcccaggaggggtttgctttccgtccgacctgccacgtcctgggctctgctccgggaggggcctagtgcctgctgccaccccttgtgttcacaggcccaggctctgcctcctgccaggacgggggaaacagatggaaagctggggccgggagagtatctggaatggaccagggtgacagtcggtgacaaggacccatcacccagtgtgactgttcttaacctacagggctgggtgggacttgaccagctggcctgatgttggggtgggtggagagcgg

SEQ ID NO: 698881 - DNA, 654 bp, Homo sapiens
  misc_feature (145)..(145): n is a, c, g, or t
  misc_feature (393)..(393): n is a, c, g, or t
  misc_feature (398)..(398): n is a, c, g, or t
  misc_feature (422)..(422): n is a, c, g, or t
  misc_feature (454)..(454): n is a, c, g, or t
  misc_feature (470)..(471): n is a, c, g, or t
  misc_feature (480)..(480): n is a, c, g, or t
  misc_feature (485)..(485): n is a, c, g, or t
  misc_feature (490)..(490): n is a, c, g, or t
  misc_feature (532)..(532): n is a, c, g, or t
  misc_feature (548)..(549): n is a, c, g, or t
ggcacgagggagcatggaataattgtttcacagaagagggaccttcttcagtcaggtttactcctgatgggaagtacttgattgtggcccagctgaatcttagcaggctctcagtcgtagcagcacccccagtgggaagcattgnggagtgttctgtgatcagcacaatccaactagcagatcaagttttgccacatctcctagaagtcgacagaaagactggagcagtctatgtagcagaaattggagcaaaacaagtacaaaaatatgtccctttgaatagctatgttccttcattaggttcataatgtttctttcccgggaatatttcaagtggcagttcagattctcaattcactaagtgcttaaaaatgatgttcaagcacaagaatntattnttctagtatgatctagtatcaganagattcggttttgatcattaagaatcttatantttggtgccctctggnngactagttntattngtaangtgcataaggatatttaatgaaaggaaagtactaacaatggngtgggaagaggactanngtgtacctcattattgcctgtagatgatctcctggtaaactactaatgctgtgaagatgataatactatgtatgagcacaagtggctcgctggcgatcttggctg

SEQ ID NO: 698882 - DNA, 392 bp, Homo sapiens
  misc_feature (11)..(11): n is a, c, g, or t
  misc_feature (368)..(368): n is a, c, g, or t
ccgacgttganttatagaccagtttgagtaagtactgctttttttttttgggagacgggctctcgctctgttgctcaggctggagtgcagtggcgtgatctcagctcactacagcctccacctcgtgggttcaaacagttgtgctgcctcagcttcccgagtagctaggattacaggtgcatgccaccacacctggctaatttgggttttttagtagagatggggtttcaccatgttggccaggctcgtctcgaactcctgacttcaggtgatccacccatctcagcctcccaaagtgctgggattacaggcgtgagccaccatgcccggcccataagtaccgtttgggaggttcagtcttaaacatntgctttaagaaaacagtcttgaat

SEQ ID NO: 698883 - DNA, 478 bp, Homo sapiens
gaaagctgtgtagcgacatcgatgctgcggtactgcgatgtaggatatagaagctctgcgcggcgggacaaccagtcttcgacctgggtctacttgatcggcagttgcttgcgcagcacatcgaacatggcctggtagcgctcgcggaacgagtcgaagtgataccccagccgcagtgcctcgcgcttgtcattcaatacgctggtatcggccaggccgcgggcgctgagcacttccagcaaaccgttgggggtgatgttgtccaggccggtcaattgcgggttggcgctgccgctgcgcaacagtttcaggctttcgaccgcacagttgtaggagataaagaagtagttgccgtcatagctccagtgcatctcagccgcatgttcgacggtgtcgtcgatttcctggcggctgagcttcagcggcaccgacgccaggccacgcagttcggtcttggtgtactcatcgatgacctggg

SEQ ID NO: 698884 - DNA, 215 bp, Homo sapiens
gctgtagctgcaaagtggatcttccagatgacttgattggatactttagtatattcttaaatcgagaaaaagaggattgagccttttcttttgtacggaagtttgcaagatttttatctgccttatgtttctttcaccagccttcggatcaagagtataagattgtgctaaggaagagttattgggactctgcctatgataacgatttaattgaa

SEQ ID NO: 698885 - DNA, 100 bp, Homo sapiens
atctttgcatacatccttaaatatttgctttaatacagtacaggggtaaaattacaggaccaggctgggcgcagtggctcatgcctgtaatcccaacact

SEQ ID NO: 698886 - DNA, 388 bp, Homo sapiens
aagtatgatatggagtgcacgtggatgaggaactgatgctggctttgaactaatgcatgtgtcaggaagcactgggaaaatgtggcatggtgttagagagaggccaggaagagagagacagtgcactctatagccttggtgcgtgtataagtgccagtgagatcaaggacgaagtgtggacactgcagattagtgggcacatgccttctccctgcagattcaacacccacgtaggatgaaacacggtgcacaggcaaaggtgacaacgcagtccatctgcggaatgtcttggctccctgagctggagctgttgctctcgcgtgtaggatataacgcttgccaccccacctaccagtgcctgtcatcctgtctagcgcctgttctgtcc

SEQ ID NO: 698887 - DNA, 339 bp, Homo sapiens
  misc_feature (249)..(249): n is a, c, g, or t
gggggggcccccccccccccccccccccccctctgtttgggaaaagggattttgggaaaccccaggttttcccccggggggtccccccccggggggggggggcccccccccccaaaggtttcccccggggggggggtttggggggggggggccccccccccccccccggtttccccctgccccccccccccccttgggggctggccccctttttcccgggggggcccccccctttggggggccccgggntttttttttccccccccccccccccccccctggggttttttttttttttttggggggggggggggttttttttgggggttttttccccca

SEQ ID NO: 698888 - DNA, 127 bp, Homo sapiens
tgtctccgtacccattacaatctccagcatcccctcctcaggatttgatgacaggctacgatgaagggtttgatggaaggtttgatgaagggtttcaatgaccagggtttgatgaagggtttgatga

SEQ ID NO: 698889 - DNA, 302 bp, Homo sapiens
caggtctctcagaagtaaggacgatagacacctcatcatgaaaggagtctcaaacacatcctttggaacttactatgggtcccagtttaggtttgtcgttcgttgtattttctgtaacagaggactatactcagtctgcatgtaacttttatgatagttattcccaattccagaagaagcagtattaacatcaattgatcgacacaaagtaatttttaatttaattcatcatttcacatgtttgtactttgtcttcccattaacctttgccagtgttatgattgtataaatttttttaaatg

SEQ ID NO: 698890 - DNA, 211 bp, Homo sapiens
tttgggcccccccggtttttcccggttttttgggggggcccttttggccccccttggcccccttttgggtttttttgcccccggtccccccccccccccctgggggggccggtaaatgtttggggaaaagggggaaaaaaggttttttccctttttttttttttccggcccctgggggcctttttgttttttttatttggggtttttttta

SEQ ID NO: 698891 - DNA, 215 bp, Homo sapiens
cggttagcgtctgaatcctgagaacaatccccaggcagaccctgaaatcagacactagacttcccgttatgtgaggcaatgaactcctactggttaagccactttagttagtagttatctatacttgcaaccaaaagcaccccaaatgataggaacactgaggtctgtgatgctcagcttcccaaaggtgtacacgaaccactttgtaaatactc

SEQ ID NO: 698892 - DNA, 965 bp, Homo sapiens
gcgagaggctggcggcgacagggagggaggaagcctatggagtcctgccgctgggacggaggcctggtgggaacttgggagttcagcgtttcgtgcagagtggcccactaggaacctcgtgattgcccactggaaagccaagccacgtttctttggacaagtccgagcaccagcctcgctctatcgtgccctggacgaaggctcctagtgggcttggcctttgtcgcatcagcagcattccttcagcaagggacccaaagggagacacataagcatttacttgttacagaagcaccggtggaccagcatcgtttcaaaagtgaacccgatattcgctgggctccgcacgaaggcatttagcagccgtcacacgacgtgcagtgcctggcaagctggatttagtgccgccgtagtagaagagattgtgctgacaacagctaattctatggtcttcgcagagtgaacactgccgacggtacatggacgtcacagagcttgctggctgcactgctgcagcacagtacgaaggctaaccgggcaacgtgactggccgcacccatactaaaacgccttgagggtaaagatacgcagtgcgcaagcaagttaacttaccgaacagctagatgtaagtagccaataggtggaggaagaacactatcggttcggctacccagagacccccgggcaagagagcgggtagctggacccagggctagccgggcagcagtcgggatcaaccgggaagctggagggcctggacgactgacaacttcgcaggatgacccccacgccggactcccatcagactacggcaggagactggcctcaggcggatgaccgatgcggacacgtggaacgaaaagagaagaaaaaccggaggtgatcattgtaaacctacgcctcccgaaaaacgctgcaggcctgtaggacgtaccaccctgacggtggcaagggccctaagtacg

SEQ ID NO: 698893 - DNA, 833 bp, Homo sapiens
cggccctggtacgcgcgtggggccgcatggttagcgcggatacctgtggtggtattgccgtggcccccacgttgttgggggccccccgtttgtttacccactgcggctgtctgatgtgtccgtcggtctcccccccttagtttgtcggccgtcacagcgtctttccccagggctttgtcgcattgtgtggtgcaccccggtggggttctagaacggaaacggtcatttatttgggccacgggtaggcccgcgggaccagaaacttcgggcccggccattcgttgggcacaataatgtgcaggccctgtccacgatgggcggtccttccccccagggtctcccttctagggcgaagcggccccccaaaacccccttctgggcgcactggtctggacccagaaaaaacactccggccgcaactgtgtgggtttcaccttttccctccacaaagccccccgttctaaaagggaaaccgttggccaagccccccaatactacaaacgttgacaaaggttctccgcatacacttgccaatgcagcttgggaaatttctgggtgtgcttcctccgagtcagcaacagtagtgctttccagagagccctggctgcagcagagccgccctgtttcgacgccgatcacaagaacggcgtgcctagttgctaagctatagccctctactcttcgtgcggggcaataacgcctgtaaactctgccgcgttgagcagtccccgcgttgttggcacatgtcggacgaccaacttcccctgggaacaaacttctcgacggcaatactccccttggctccacatcaacaattttctcgcccacataac

SEQ ID NO: 698894 - DNA, 103 bp, Homo sapiens
aaaataaccccccccaaaagggacaaaaaaggggggccccccccggggggggccggtttaaaaaaagggggccccccggggggccggaattcggcccggggga

SEQ ID NO: 698895 - DNA, 366 bp, Homo sapiens
  misc_feature (4)..(4): n is a, c, g, or t
ctgngaggcagatgtatagggccttatggatcatcgaatgactggcttttactcatgaatgagatggggagcatttgtaggttctgagaagagtaggacatgtcctcacttggattttaaatggatttctctggcctgcagccttgagagtagactgtatgaggacaaagatagaagtaatgatactgactaggaggctcctgtaataaacagataagagatggtgatttggaccaatgtggcagcaatgaatatagtaaaaagtgcttggattcaggatatgtcttgaaagtagagtcaacaggatttcctggggactaggtatcagttgggacagacagagtagagaagaatgtgtccaaagtt

SEQ ID NO: 698896 - DNA, 396 bp, Homo sapiens
  misc_feature (62)..(62): n is a, c, g, or t
  misc_feature (106)..(106): n is a, c, g, or t
  misc_feature (137)..(137): n is a, c, g, or t
aaggatggcacactgatgtgtttatgcacctgtacacaggaaccgcatggccatggctttgnaaaggagaatggaaaaatagaagaaggtcggccgggcttggtgncttaagcctgtaaccccagcactttgggagnccgaggtgggcggatcacctgaggtcaggagttcgggaccagcctggcaaacaccccatctctactaagcgaaaacccatctctactaaaattacaaaaattagctgggcatggttgcgcatgcctgtaatcccagctactttggaggctgaggtggggagaattgcttgaacctgggaggtggaggttgcagtgagccaaggtcgcgacactgcactccagcctgggtgacagagtgagactccatctcaacagaagg

SEQ ID NO: 698897 - DNA, 655 bp, Homo sapiens
  misc_feature (17)..(17): n is a, c, g, or t
  misc_feature (103)..(103): n is a, c, g, or t
  misc_feature (109)..(109): n is a, c, g, or t
  misc_feature (117)..(119): n is a, c, g, or t
  misc_feature (123)..(124): n is a, c, g, or t
  misc_feature (126)..(126): n is a, c, g, or t
  misc_feature (136)..(138): n is a, c, g, or t
  misc_feature (140)..(141): n is a, c, g, or t
  misc_feature (147)..(147): n is a, c, g, or t
  misc_feature (149)..(151): n is a, c, g, or t
  misc_feature (153)..(156): n is a, c, g, or t
  misc_feature (284)..(284): n is a, c, g, or t
  misc_feature (297)..(298): n is a, c, g, or t
  misc_feature (301)..(302): n is a, c, g, or t
  misc_feature (462)..(462): n is a, c, g, or t
  misc_feature (465)..(465): n is a, c, g, or t
  misc_feature (493)..(493): n is a, c, g, or t
  misc_feature (497)..(497): n is a, c, g, or t
  misc_feature (506)..(506): n is a, c, g, or t
  misc_feature (553)..(553): n is a, c, g, or t
  misc_feature (568)..(568): n is a, c, g, or t
  misc_feature (615)..(615): n is a, c, g, or t
aaaaaaaaaaaaaaaanaagccacttcactcacttcaagacctatatacatgtaaagttgtattctgaggaattatttattttaaatcttttttaaatttttnttattntttgtttnnnatanntncgaggggggnnngnnggcggngnnngnnnngagacgcgcgagtttcaggaaaccctgccccagcagggcaggtaagcaacactctccctgcccacatctagtttgatttcacgccctgatgcttcaaggtgcccagaaaagcggcagcttgtggaagnggaaatctatgcnnggnnggtgcttggggcccagggctcagtaagctttcgagaaagcagaggggaagactagcttactgcaaaaacctttttaaaaaatattcatacacttcagtgagcgcctgttgagacgttaggggaacaagagcttggaaacatcccgtccaggccattgggnggnagcgtcttcctcacaccccgtccctggnggtngggggggcngggggaaggtcccggctcttccactggagaaaggagactcacctggnttcctagttcatttntgactatttcctctaaaacctgtgctgagtctttgactgcatggcangggaagcacaaacgttcggcttgtttgcaaaaaaagtaca

SEQ ID NO: 698898 - DNA, 505 bp, Homo sapiens
tggactcactctgcttatagtcttagtaataagagctagtgttgataatagctaagaatgtaacgacacttaccatcataatgcacagcgtatggcatgccgagttactaggctccggtagacatggggtcacttggaacaagattgagtgtgcctatgaccgattgactcatgcagcttgaggatcattacatataaaagcatgtgatctgtcccgcgtggagattacctcgcgagccaaccatataccgaggttgggtgcatggcaattcatggagacactacagagacagaggtattctccgaccgataaagaatgcaacctggttatcctgtctcatggtgagatttctacccgtccgtggatggggcatgctgccaagtatagtacatcagtcttcttgtaaaggatcccacatggcttggtacctgttcagccatcggccagtgaaagtgttgtgcctgatggtggtgaggaagggaatcttagaagatatacagttgg

SEQ ID NO: 698899 - DNA, 130 bp, Homo sapiens
tataagtgcaggaatgtcaccctgtagtctcaggtctatcctgtattggattctgccaataccagccaaatgactgacaatgcaggcccccttggcagaccagatggagccatgaactcagtcgctacag

SEQ ID NO: 698900 - DNA, 520 bp, Homo sapiens
gactctaaggatctcaatgacgaacagtgtgacaggtgctacgtggatattattggcataaaaaggatggagttagatacatctgtacacagatgatcttgaaacagtatcctcatagaagaagcattcacaaaagtccaatgactccatttatatgacacgggcagagtaagcaaatccacagagacagaaagcagagtagaggctgctgaaggctaagggaaggatgaatgggaagtgacagctaatggatattggatttctattttgagatgatgaaaatattctaaaattagactgggggtgatggttccacaattctctgaaaatactaaaaaccatctaatcataccctttaaaagggtagattttatggtatgtaaattatacatcaaggaagcagtaaaacaaacatcatggtcaagatgaaggaccacatcaagtcaaacacaacgacaatgttttaaataggttggtggagataatcgcacagtcatttgctggctcttttggcactgtt

SEQ ID NO: 698901 - DNA, 844 bp, Homo sapiens
gtatctcctttctgtaacctccatggacctgtgacacatgaggtcactcttctcacccgccccaccgtctggcagggtgcgctgattttgccctgccccacccagcggctttaggactcagactcttcaggaacaattagggagagggcccttggggtctaactgcgatacactcatacttggaagctaggaaaatcccggtgggcgataggtatggattgtcatacttagaacacatttggcgctagtgtgccccgcgggaacactctgtgctgtgatgctcgttaactggatgtctgtgcacccatatgacagaaggcaacctgagctctatgtaagtgtcgggaaatgctgagatctggagaggtggaaacaggcttcttctgtgggtgtgacgaccttgtgcagagctcgttctagaaggagagttgcgtagaccacagcgtgaaatcactgatagaaaactggccagccaggcctccagggtagggagcaattcctagacatttgcctgtgtccctgggggacgctggctggctgtgaccatctcacgtgggaaattcccttctgtggcgaggttctgtagtgttccagaggctcccacggagcatgctgggtggcgtggtctgtatgagaccacaccgttgatgaacccgtggagggccccagcaggttttttcaacaaatggtccagcatcggtgatccattccgggaattggccctccatacaaccttgtgaaaggtgcctcacaccggccaatgggtcaggtcacaaaacacatgtggtggatctgaagagaaacagaacaacccgtgggaaaaatgtggacacctgaaaaatat

SEQ ID NO: 698902 - DNA, 616 bp, Homo sapiens
aacaagcagaggttggaacagtttggagggctcacgagaagacagggaaatgtgggaaagtttggaacttcctagagagttgttgaatggctttgacaaaaatgctgatagtgatatgaacaataaggtccagactgaggtggtctcatatggagatgaggaagttgttggaaactggcgcaaaggtgcctcttgttatgttttcgcaaaaagactggtggcattttgcccctgccctagaaatttttggaactttgaacttgagagagatgatttagggtatctagtggaaaaaaatttctaagcagcaaagtgttcaaaaggtgacttgggtgccattaaaagcatttagttttggatgcgcacggtggctcatgcctgtaatcccggcactttgggaggccaaggtgggcggattatgaggtcaggagttggagactagcctggccaacatagtgaaacccccgtctctactaaaaatacaaaaattagctgggcttgttgtcagatgcctgtaatctcagctacttgggaggctgaagcaagagaatcgcttgaaaaaaacaaaataccaacaaagacattgcggcgcattttgagctactttggccaattc

SEQ ID NO: 698903 - DNA, 1104 bp, Homo sapiens
  misc_feature (7)..(7): n is a, c, g, or t
  misc_feature (10)..(11): n is a, c, g, or t
  misc_feature (17)..(17): n is a, c, g, or t
  misc_feature (19)..(20): n is a, c, g, or t
  misc_feature (22)..(23): n is a, c, g, or t
  misc_feature (27)..(28): n is a, c, g, or t
  misc_feature (36)..(36): n is a, c, g, or t
  misc_feature (65)..(65): n is a, c, g, or t
  misc_feature (73)..(73): n is a, c, g, or t
  misc_feature (79)..(79): n is a, c, g, or t
  misc_feature (98)..(98): n is a, c, g, or t
  misc_feature (109)..(109): n is a, c, g, or t
  misc_feature (113)..(113): n is a, c, g, or t
  misc_feature (118)..(118): n is a, c, g, or t
  misc_feature (120)..(120): n is a, c, g, or t
  misc_feature (122)..(122): n is a, c, g, or t
  misc_feature (768)..(768): n is a, c, g, or t
ctgggantcnnagaggntnncnntcannctgcgccnggtgatcgagaaggagcggcacagctggnggaatgcnaggagncgtccatctacagcccggncttccccaggnagangtggnangngaaaacgcacgcaggtcaagatccggaacgtcacttccaaccaccgggcgagcgacacggtggtgtgcgagggccgcccccaggtgctaagcgggcgcttcatgtacgggcccctggacgtcgtcacgctcactggagagaaggtggatgtctacatcatgacgcagccgctgtcgggcaagtggatccactttggcaccgaagtcaccaatagctcgggccgcctcaccttcccagttcccccagaacgcgcgctgggcattggtgtctaccccgtgcgcatggtggtcaggggcgaccacacctatgccgaatgctgcctgactgtggtggcccgcggcacggaggctgtggtcttcagcatcgacggctccttcaccgccagcgtctccatcatgggcagcgaccccaaggtgcgagctggcgccgtggacgtggtcaggcactggcaggactccggctacctgatcgtgtatgtcacaggccggccggatatgcagaagcaccgcgtggtggcatggctgtcgcagcacaacttcccccacggcgtcgtctccttctgcgacgggctcacccacgacccactacgccagaaggcaatgtttctggcagagcctggtgcaggaggtagaaactgaacattcgngggccgggctatggggtctccccacacaatgtgggccgggatatacgcccggcagcctggcggcgtgaccacggaggcaagaaccttacatacgtggcccggccccggcggaaagcaaagggcagcagtgccagtcacgtggtccaacgggctaatgtgggccccgcggccagctggaacagcggcaccaacaccgcatgctcctcggagccccgacacgtctcttggcacacacatcacgctgttggcgcccccggacacgtcgcgcagaacaacgtacgacacgacgaccaacaggacaggagcggggcaacacacaccaggcggacagagaga

SEQ ID NO: 698904 - DNA, 159 bp, Homo sapiens
  misc_feature (49)..(49): n is a, c, g, or t
  misc_feature (93)..(93): n is a, c, g, or t
cgtaacccccttccgtaacgacgcctaacgaacgcctccgtaacagccntccgtaacagcgccaccaagaaaagaaaaatcgcgatcccgatntaaaccattctagggcgtcgttacggaggcgctcgttacgaggcgctcgggcgcatcgttacagat

SEQ ID NO: 698905 - DNA, 730 bp, Homo sapiens
  misc_feature (135)..(135): n is a, c, g, or t
ttcaagaccagcctggccaacatggtgaaaccctgtctctattaaaaatacaaaaattagccagatatggtgttgggtgcctgtaatcccagctactcaggaggctgaggcaggagaattgcttgaaccccaggngaggctggaggttggcagtgagccgagatcggcatcatggcactccatcctgggtgacaagggcagaaactcgcgtctttaaaaaaaaaaaaaaattgacctgcccccttatccccaccccttggcactctgggtttccttccctgttctttgtggtcccattaggcttggtaaaggccaacggtttaggggtcactaacatggttgcgcatgctatgtgttctgccatccatgtgcagctgaaaatataaccgtgtgaagcgccagggatctttgggccactatggaactccgagcatgaattggtccaccatacggagcatatccaataaatagcctgctgcaatgccctggactcagcaggggactttgggaaagcggctctcatggtctcaggacatgggtcgttcggtcctgccagttgctcgaaggagaacctgctcaacctctgaaggaactccttattcccggggactccgtatgcaaggaagacattcacggtaggctgatggatctggccttattctcccgtgctgcccatttttctgacaccgtgtccatgtgtcacaggggtagcttatagactgacaatgaa

SEQ ID NO: 698906 - DNA, 342 bp, Homo sapiens
  misc_feature (141)..(141): n is a, c, g, or t
tcatgtatacaactaaggcatatatactgtataaatatggagatacttctaatgcctctctaaaattaaattttacataaaagttagttttattcacctttagagctttccaagtgaaatggtgactaaatatttttcaantctatacataggattctttcaccccattaagcattactatacggtagataaattctattatggcctatgttatatatgcatatataattttctaagtgtatacatattaaaattacacaaattgttcattggtggtttgtatccccagaatgtgttgtgttttttaaaaagatgcataatagctgaatgtatacatgaaca

SEQ ID NO: 698907 - DNA, 181 bp, Homo sapiens
gtggttggtctagtgctcagtggagccttaaacagtacaggttcaggcgattctccagcctcggcctcgcgagtagccggtattgcaggcacgtgacaccacacccagtttttgtttttgtgtgtgtatattccggtagagacagggtttcacaatgttgctcatgctggtctcgaattcc

SEQ ID NO: 698908 - DNA, 496 bp, Homo sapiens
  misc_feature (54)..(54): n is a, c, g, or t
  misc_feature (56)..(57): n is a, c, g, or t
  misc_feature (74)..(74): n is a, c, g, or t
  misc_feature (102)..(102): n is a, c, g, or t
  misc_feature (109)..(109): n is a, c, g, or t
  misc_feature (114)..(114): n is a, c, g, or t
  misc_feature (160)..(160): n is a, c, g, or t
  misc_feature (479)..(479): n is a, c, g, or t
  misc_feature (481)..(481): n is a, c, g, or t
aaatgctgaaatcctattggcaaagtaaactgaaattggctgctatattttatntnntcatttctgcaatcccnttttttgaatactaatatttgacatggntaattcntattnatttgttggaattgtttattgttaataatgcaaatagataattttnaattatccacaagtaacatttcactgttaatggtttgaaataggtgataagcaaacgcaatttaggataaaatataaacatgtgccattgtattataacactatacactggcacaagtaacatttcactgttaatggtgggggggggggaataagcaaaccaatttgaaataaaatataaacatgtgccattgtattataacactatacactttcttgacagttaaatttaaaaaaaaattttttttggtagcatgtattgtatatgtttatagtatatgtagtaaataaaaatatggccaaatgtttggcttggtgancntttgcaaaaaaaaaa

SEQ ID NO: 698909 - DNA, 1669 bp, Homo sapiens
cggcaggaggaggacggggaaggacggagccgagccgcggctgccttccctcgcctcactccctcgcgcacatcgcccgcccacatacacgtagcatacacggaccgtgacagaggcaaagagtactcagagacaaagcgaaacaaataagggaccaggattagtaacagagaaagaagagcggaagacggctagagccaggcacgacaccacgccgaaccgcgacgcccgcccaaagccggcccggacccctaccaaagacgacacccaaaccacagcagaagaacaaaccagcaacacccacagacaaacacaacacaacacaacaacacagaacaccacagaacgaaaacgaacagaacacaacaacacagaagaggcgaccaaaaaacagaacagaaatacaacacacaagagaaaacacaccacagagcaggacgaacgacgaccaaccaaccagaaccaaacagagccaagacaagaaacaaacacaaaaccagcagcacccgtaacagcacaacacaaccaaacagacgccggagagcaacacaggaccaaagaacgagagacacacacacagccatatacacgagaacagcacacaggcacacagacagagaaaaaaaagaaacgacaggcacaaaacagcacacacacaccacaaatagaagaaaagaggaaaaacacaacaaagagagcaacacgagagacagcacagaagaacagcgaacagcgacgacaaaacagaggaacaggaagacacacgggaagaccacgacaccagacgcgcgcacacacaagaaccagacgccgacgacagacgacaacagagagaaacagaaagaagcacgcgacgaacacggagcacaaaacacgacacagcgcaacgagacgagcaaaagacaacagagcagagacagagctcaaggacgaaacacagaacagcaaagcgagaagcacagcaaggaacccagcacaccagagacgaggaccgcccagcaagcaacagaacgagcaagaaacacaagcagcaagacccaggcacaccagacagagagaaatcaaaaccaacgaacagaagagaaagagaacgaaggaggagaagcgacagaaagtagcagcgacaacacgcgcagacacggggacgaagacacacacacagaaacaaaacacggacagacaacgagaagacagcagcagagagagcagacagagagcgaccaacgaacacaacgaggaacggagagaaagagacacgaaagcgcgagacagcgaggacgccacaacaagaaaaagaccaaaacagagaagcccactacaacagatgagaacaaagacagacatacggacagaactagaagaacgaaggaccacagtgaaagcagaaaggagcgagaagcgaagacacagccgagcaagaaaagcagcgggaagagagcagagcagggacgcccgaagacagacaaaagacaagagcagcgaaaagtagacgaaaagcagggaagagccaacacagcgagagagaagcagcacggcagcacgcacacaggaccggagcacggaaaaaagagcaagagagacgcacaacagagtaaggagacgcagaagaagcaacagagaagagagaagagtgcagagaagagggaacagcaagaacgacggagggaac

SEQ ID NO: 698910 - DNA, 392 bp, Homo sapiens
  misc_feature (54)..(54): n is a, c, g, or t
  misc_feature (56)..(57): n is a, c, g, or t
  misc_feature (74)..(74): n is a, c, g, or t
  misc_feature (102)..(102): n is a, c, g, or t
  misc_feature (109)..(109): n is a, c, g, or t
  misc_feature (114)..(114): n is a, c, g, or t
  misc_feature (160)..(160): n is a, c, g, or t
  misc_feature (375)..(375): n is a, c, g, or t
  misc_feature (377)..(377): n is a, c, g, or t
aaatgctgaaatcctattggcaaagtaaactgaaattggctgctatattttatntnntcatttctgcaatcccnttttttgaatactaatatttgacatggntaattcntattnatttgttggaattgtttattgttaataatgcaaatagataattttnaattatccacaagtaacatttcactgttaatggtttgaaataggtgataagcaaaccaatttgaaataaaatataaacatgtgccattgtattataacactatacactttcttgacagttaaatttaaaaaaaaattttttttggtagcatgtattgtatatgtttatagtatatgtagtaaataaaaatatggccaaatgtttggcttggtgancntttgcaaaaaaaaaa

SEQ ID NO: 698911 - DNA, 1547 bp, Homo sapiens
ctggtggtagtgctgggtgcagacaatgtatttggacacacactttggggggggccgacgtgtgggtgttctccgcacccttgtgtgttgtggtgtgtgtcgttggccaccatcactagctatgtattgttgtggcaacgccccggcggtcgtgtgctgtgttgtggtggtggcgtctccgcccagcttttgctcccgagcatgggcggttgtacatgttggggccctctcgtgggtgtggtggtgccaagtggagcgggtcgtacttgttgtgtttactccccccatcgcgcgtgtcgtggctgaagatgcttttgtggtgcgtgaccacgactgttgttgtttgttcgcgtccgcacccatgtgtaggtgtgtcgttgttgtgtgtgcgacccacatcgcgccgcacttttgtgttgtgtttgtgtacactctcttattcggtgcccgacacaggttgggtgtccggtgtgcaatagttgtttatcttagaggggatcttatcttttgtgggtcggttttttgtttcgtccccttcgcttctctgttagagagaagtcggttcatgtgcgggttcgtctttctctccactgccctggcgctctcgttcggtggattggggtggtgtcttctcttctgctgtcgtgtgagtagtgacatcacagctgggtgatcttcacacacacacggtgtggtgtcacgtacacaggtgctcctgtttttattattagagtcacagccacttagctgggtgtcgccttctccgttagtagagagggtcttctcttgggtttgcatcgcctcgtgtggcgtggtactcactcgcttgggggtgtgtagtaatacctcgtgggccacacgcatggcacgctcgcttctgttatgactcgcggcgcggtgtcaacactctctctttggtggtggcagatcttttcgtctcactcacaacgagtggctggtcgttgatcgttgcgcacgagagcagagatggggttggctcctcgcttccccatcagcatgagacacgtctgttaaaacagaggcgctgtatctagtgcggtggtttttttttgtggttgtgtggtgtgtcgtgtgtcttgcgcgggtcgtgtttgtgggtctttctcttgttgtttttctgttttcgtgtgggcacacaccgctgtgagcgtgaacggtccacgcgtgtgcacgcggctgtatattctatgcccgtggtgagcagttttgcacggttcaccactcttttcttgagaggtagcgttcttccacggcgccgcgacagataatgggtgcaaatctacacttagaatatactcggtcgcccttctcagatgctccgtagtggttatcccgggaagggttgatgtatgtttgccagcatgttggttattttatattggtacgcgggttctcccgttgtctacctggggaatgaactggagtaaatgggaaggtgaatctctggcccacctctgtttggagttttttgggtttaaaagggctttccaaggaccttttttaaaaaacagcccccccttttccca

SEQ ID NO: 698912 - DNA, 1626 bp, Homo sapiens
gtgctattcctctacggtagtgtctcttgtcctggattatgattctctgcctcccggagggggtcactgaggtgcccaggaatgccactccggtcacatctcaggtccttcggactgtgcacagttgctgtctcctatccgcgcatgcactggtcaatctctgacattcgctcgggatgtgatctgcaaggacgcagcatgtgtgtggtgcatctggatgtctggtgtacgttcaatcaggcccctgtacccctacgaggcgtacacgcctggggtggtcgtactaagatcgacgcaacccaatgatagtcgcaccgagagcttgcaggccctcgttaggccagactcactgagggtgcctcgtaggagccttgcggatagactgatcctcctcgcgtgcgatctagctagagcgcgtcatgtcggctcgagcatagggcgtgagcacatgtaactagccgttctcagttggaggactctgtgcgtcggcctaacaaaccagtttacacccttgctcgacgcagctagcatgggttccctgggagtactcaggttgtatagcagctcccacatagatagttcagttgcgctagcgcacccccaaagaaagggcttgtgcgtggcaccgggcaacaaggaagccgttcgcggtgtgtcaccggcatgggccaattttggtggccctagtcgaaaccaaacttagcaccaattgaattgccattgggggcgcccatactgaagtcttgggacacgctctcggtcgtattgggtgcacctaccttgacaggggggcgtatctagtgcgaagtgaaaagcctgccggacagatggcatgacattgttgggccacggcgccatggcctgcaagacggcgaaccgacgtggggctaccaccctgggtgcctgtccaacagaggatgttcataccactggcctttgtcgatacctttcagtggtggcccttggcgacaacggtgcacacagggcacagaggtggtgttcccagacagaggccttgtggtggacgttgcatcattaggccacttccactttatccccggtaagcgctatgagcgagtaacccatgtagacggaagacgcagcaaaacggggcgctaaaacacacagaggacatgtgaccccggtggaacacgaagtgattccccccccgacggaggagagaaagtagcaggaggaagacacatgactgcctgcccatagtgggggaggaatcacccccacaacggtggggatggcacacatcaaagaaagcaccggaacttagcatgatgaaagtaccaggacgttgagaacacaacaaaaagccaccgccgccgcgtgcaggcattatcagagacgagcatgagcaaggacagcggggaaaacgcagagccacatgatcccacgacccggaggaaagagacggacgagtggaccagggcacaactcacttgtggcactggagaacagaggcgggcgcatggatgaagacccccgcatggcaccacaaaaggggagttcaaatgacacaagcagcagaggcgaggaaaccagatgcgcgagaggggcagaagccacaacgacgtaagaggggaaaggacacaggacaagtaaatcgaacaccag

SEQ ID NO: 698913 - DNA, 342 bp, Homo sapiens
  misc_feature (206)..(206): n is a, c, g, or t
cagtaaactgctggacctgtaccccagtgtgactacccatgccggcctgtgccctgtgaatgcctgctgctcgtgtgtccctgcctgcatgtctgtgctgtgtgtgtgtggatgtgtgcatgtgcatgtgtgctgtgtccctgcactgcctgatgggttaaccccctgccgtgtccctgtgtcctgatgcttggaccatgatgccnctcctccatgaaaccccatgctgtcctgccactgtgcccatgtgtatgggacacacgccgcccggaaccgggggcgagggggtatgcagggagagaatcgagcgacaaagaggggggaaaggagcgacggacttgc

SEQ ID NO: 698914 - DNA, 224 bp, Homo sapiens
tcttagaggatccccgcctgagatgctatacaagtaacaaccccaaactattatcccagctgcactattgtgagagcacatggcattccactggtggtcattattggtgagcaagaactgaaacaaggggtcatcaagatccgttcagtggcctgcacagaggaggtggccattaaacgggaaaattttgtggctgaaattcagaatgccgactgtcatctcag

SEQ ID NO: 698915 - DNA, 1451 bp, Homo sapiens
catgaattacagagacagcagagacacacaagctttaggacaagagccaggaagaaaccaccggaagggaagcagtgctcacctgatgtgtagaagcatggactatcacgacgcatgagccggtggaatcatcatcgccacgcctatcctagacctcccgcacgccacaagacgtgacacggcagcacagacacgccaacggcacgtgctacaaggaacgacaaggactagctcagcggcactatcattgccacatacccgtcacaacagacctctttcaccagccccccaaagagttattctactcaacgtgtcaaccctcgaagcacgcttgcatttatgcactgattgttgtgtgtacatgcaacatgcaggtctctacccaacacggaaacacgtccacttgtgctcatcagccattgtatcgttgaattgtgcagagaagacaccgtcttgttcatggggacccacgccaacgccggaacaccacatgtggttcagcccacgcagagccgaccggcacggaaccgcacagcgacaggaccgccacacgcacgcgcgccccggccagacaaactccggccgctaacccaaccacaaccatcccattccgtctcatcgctggcatcacttccccaaacgaccaacgttccaccagagaaagaccaactgcacccacgaatgcaaacaaagcctaccgaacgaccccaccacaattcgtacacgattcaataccacacacatactcacaagcactactaagcgcacggactaggggcaaccacaacagctagaggcaaaccgggagtgtagagcacaaagagctactcgcaccaaggatcaacaaacaggcaatattgcacagtgagaacttcaaacagtcatcgtacaatcagccaccgcatcacccacaccaaatcgtggccccaacacagcaacgagcacaccagcaggccacacccactggaccacaccacacttccgaagacacaccaacaccaaccacacgcgtacactgacaccacacaccaaccagacaacaaccccacaaccaccacggagaacacatctgcaagcatctaccccgaccggccggtcaccccagattgcccgtggcagaacatagaagccaaagaacaaatgcgccgccacgcacacgccgacaattcagaccatacagagagcggcacgcacagcgcctgcgaagaccgcgccacaatagccaccacaccccacgcagaccaggacgaacaaccatacagacagcaagcgcacctagcgcaagcccaagcgctccacgttccatactgacacaagccagtcgacacgacaagacacgagagccacgtgctcatacaacagaataacaacagaacccagcgagcactacaacaatcagccagatcgcaagctaatcgtgcagagacaatatacagatctacgctctgcgc

SEQ ID NO: 698916 - DNA, 1215 bp, Homo sapiens
agcgggtctcgcgggacgcgctgctggcggtcgggcgctcgggcggccctggccggggagacgagttgcatgtgtaggttcagctaggcgatagcggcgggagcggagccggcggggcctgtgcgaccgcctgggtttgtgaaatggctgctgacatttctagaatccagcggggctgactgcaaagggagacccaaggaacagtgccaagttaagatgccgatatacccatttcggagtccttaataggtgggagtctggttcattagcgaacagagtacgtgtgaatataatgccgtgatgttgctaaatgtagacaagtggttagagaagaattttccaaatgaatttgcaaaaattacgtgtagcaaaccattcgccccaaacaacgacgctgggcaacttagtgagggtccagggaaacaagcaggggggaccgaaacgagggacgcacagcaaaaacaggacagaccgagtgtgcgcacggcggcgtacacacattacacaccccacatcacacagcaacgaccggtacccaccaaaacacgggtctacctcaataaggccaagacatttccgccaagaagtcaaactgaaacgaacattagtaggtgcaagccacgacgtacttggtggggcgcctttggcacagtttttcgggaccaactcggacctcctttcaccgcagcacagggcgatcaaaaggaattattgtggggctcccacacacaattacttcccttggttgggtggctccttcccaggtaaacaccaggggcgagacgtggtacatttgacaaccatattaacttccattctccaggtgggacgcgactttattgagacccagggaactttggacgcaataacactttctggacactggtcgcagttagccacaggaggaaacacagaatgggtgcccaagccacgggggtacggaagttggaagattggaccacagcgtacttttcgagagacggaatctcttgtggggtagaggagagtttaacaaggaagaggtggaaccattgtgggacaacaatatgtggtgtgtggatgattacacatgtggggcccttagacattggaggaaggattggactagtgtgggcgccaaagtggtgacagtaaagcagggatatttgtaagagcaagatatgagtttaggacgtagaacgacagcgcataattatacagtgataatgaatatac

SEQ ID NO: 698917 - DNA, 523 bp, Homo sapiens
gacagtgcgcgggtgctagccagcgagatggcgcgagctgcggcgctgcctgcagcctgtagacctccgggccgcgccgggcgagccagtgcgcgtgcggctggcggcgggcctccgtgagctgacccgtgggatgcggtgactgtaaggccggctgggatgtggcacatagcgaagccaagacggatgatagatgcgcgcgaagggcataagggccagagccagagagccaggaaaaatgaggggaacccggggagacagcatgcttgcacaagcaggcgatgcgccagccgtgtgcttggtaccctgaagcaaggtggacggcaagcccgcctaccgaacggaaacattgtgtaccttcccggctaattgaacaggggcgggtatgcacaccagacagcctgtacaatttgacacgccttcttccttcccaagttggaaggaagtcgaagaaattctacccttcatccttgatgtgaccttaccaaagaaacttgtgcgatctggattgccacacggcaga

SEQ ID NO: 698918 - DNA, 82 bp, Homo sapiens
gaggcaaggattcatgtcgtattgggggtggcgggcagagagatggtggacacgcgggcgttgattactgcacgtgaggaga

SEQ ID NO: 698919 - DNA, 694 bp, Homo sapiens
gaaccattgcgatggatatgacctcatagatatcacctgttccagctgagaaaagtaagcccatatgggtgcagtctatctttgatggtatctcaacagggctcctggtgctgaaggacttggggatttaggtggaccgctacattgcctaggaggttagtgaggaacccatctcggtaggcatgttgcggcaccaggggaagatcatgtacgtcggggaagtccgcagcgtcacacagaagcatatccaggagtggggcccattcgatctggtgattgggggcaaaccctgcaatgacctctccatcgtcaagcctgctctgcagggtctctacgagggaactggccgtcgtcttcaaagagttctaccgcctcctgcatgatgcgcggcccaaggagggagatgatcgccccttcatcttggtctttgagaatgtgttggccatgggcgttagtggacagagggacatctcgcgatttctcgagtccaaccctgtgatgattgatgccaaagaagtgtcagctgcacaaagggcccgctactactggggtaaccttcccggtataacaggcgttggcttccctgtgaatgataagctggagctgcggatgtctggagctggaggataccaagtcacaagtaggccatatacagtaattcctcgaagggacgagtcatcgacttctataagtc

SEQ ID NO: 698920 - DNA, 365 bp, Homo sapiens
  misc_feature (62)..(62): n is a, c, g, or t
ccagagtgccaggctgggaagactggagacaggcatcgaggggatggttggcaggggatggnttgaggggcaagtgttacagtccaccactccaggctccagggtccaggcctggcaggccgaactagtccaacccccgtcgccgtctaccccagagtaaaacccagtctttgctccagtgtcctgggtctctatctgacaccaacccaccagcctgctgactccaccagctggcccgaccgccctgcctttgcctcatctctgcacctacccacatggcctcctctatttttgacccagatgtccccctcacctgagtcccaggagcccttggagcatccacgttcagtgtgttgagtgacatg

SEQ ID NO: 698921 - DNA, 347 bp, Homo sapiens
  misc_feature (347)..(347): n is a, c, g, or t
tggaacatgacgaatagggatgacatggacggcgaagcttacgcgttcgcgcgtcatccggtggttgcgagaggcggcattgcaaaatgccgcagatgatgtgcacgtcgtcaacggcatacagaacccggcttacaggccaactgggggaaattttttcccctttttccccgggattcccgtaggcggtgcccggatcgtgatcattcatgttaacagaaaaacccggcagtctcaccggtgccttttccttgtttgcgggggtgaaaaaaaggcatcgtgctgtgtgagtaacattcgtaactttacgggcttaatgaattttcccggattgcgaaagttgggcn

SEQ ID NO: 698922 - DNA, 851 bp, Homo sapiens
caccccttaggatagatgtgttggaccccatgaagtactccagtcagaatcagccaaaagagaagtgggaggccatttctgctatgaagtcttaatgggatacgtttgaagacttcgactatggtactttcctgtcgactagatatgttctcagggctacatctgaggccttgacaccatctttgcccccacgatacaacttctttggacattgatatacttgcctccggtatccgggaagggctactatacatagagcctgctttattactcaagtgcttcaaggacaatacgttaggcgatgtacgttacatggaggtcaaacaactgtgaaggtagataaaatagtatgcctgaacagtgtgaacgtatatgaatgagaacattccaagtgatggtatggtagagtatatatgtgcagcgtgataagtggatgtaaggatacaatagagagtaaggagtatcaatctagagaaagactatcacctgacaatatggatggtagcaataaaggcggcacaagaacgctgtacaaataggaacatccatacctacaagcgtggtgtacacatatgcttatgtcacacggtatatcacggtggtacccgcgacatcttacgaagttcatgagctcatcctcgagactacaatgtaccacggagctacttgcacagacccctttggctacatgcttaattcgttgtacaattgtaaggatacgcagaaggacatctttctaatcttacagtcaggagctgctctggtcattcccttgtatgagactggtatactagactgttagtggggtgttaggtgatttttccatgatatctctgtttcttggctgacac

SEQ ID NO: 698923 - DNA, 165 bp, Homo sapiens
tttttgggtttccccccccccccccccccgggggccccggcccccccccttttttcttcccgccccaagccctggggggggggccgtttttaaaccccccctttttttttttggggggggtaaaaggccgggccccaaaaaagggggggttgttttaaattccca

SEQ ID NO: 698924 - DNA, 329 bp, Homo sapiens
tctggccagggtgatgtttcaacaaagtgagttctaaggtccatccattcaaattttaagcattttggtttctttaaaaaggggttgggtcatagaaaaaaattacttttaaacaggtttacaaggagtggggggagattgggctatttcacaacattcaaaacaggccaatcaggttgttcgcatattggttggtgtttgtgaaaggccctgttgttgtgctcactagagaggcttcggggcttggagtaggcgcctgttgtttgcccggaagatattgaggttcttaactaggtcctttggcgaaatgatggataatagccactgtg

SEQ ID NO: 698925 - DNA, 1136 bp, Homo sapiens
ggtttgcacttgcttgttgtgtcttcgcgtgcatgtgtagtgtgtctgctctcgtcctgcgtgaagtaaaacaaacaaagagagatgcactaaataagaagaaaagagaaagcaaacgagagctgaactgtatgttaagtgttgtcatgatctgttcgtcgccctgatatttccggtcgccctcgcgttggtgttcgcccctcacaagagggtgtttccggtaaggtctcttgcccgtccacccccccatcgaggtgccccgtcctccgcgttatgactgtgacaacgcctctcctgggagggggggacccacacacctgtggggttgcccccgctggtttgccgcacttggagggtgtttgtgcccccactaggggtgttcccgccaatgtgtgtatggtgttcgcggtcgtgcccgcccgcgaatggggtaaaactttgggggagcaccataaaacaggtgggtcttagcgggtgtcgcaccccatggagtatgtcgtcatattgaatgtcgaggccagcaactgtcgtaggtccaccctaaatgaggttattttaagacgcaagagtagtttgttccaagatgttggacttataaccaggggagttttcataagccagcgataatagatgatagtcaccggctttgccaggtggtcgtggcaccattcaatattaaggatctgcgcgcgttagtggccacagatttttaaagtgaaaacatctgcggtcatatggagtcgtcagtcgcccttgtaggtatgccccctctgtttggcccacgcacaacacacctcttgtgctgggtacgcagagtgaggtttgctggaatgtcatccaacgagtattacgggtgtgtattgtcctttggcccctctcctcatggttccagacacacgtgcattcttatatcgcccactcctcggtattctcttccccaccaccatctctcgtgcgagcagcggtgcttggccacgcaagggcgcaacccagggcgcgcgatagggggcgacgtcggaggctagcccacggcgccccaaggagtttccaccccactactactcctctctctacgagtggggcccaaagtcgagtgaggtcactcccctgtcacaacaaatagtcagaaaacacaa

SEQ ID NO: 698926 - DNA, 285 bp, Homo sapiens
ccgcagccgggcttggcggctgtgtggctgcctacgctgcacacgtcacactggctccgaggctccctgccagagtggtttgcaggatgagctgctggccacctgggtaggctgtgcacgagagaaggggcttgcatgcttttggaggtcgccgcataccactggagcgggcttgctgcgcacaggcgtacagcaaggccagagcaagctgtcctaccatgccttggccccctagtgtcacagagcctggccagggcacggtgggcaggtccccatgccaagccc

SEQ ID NO: 698927 - DNA, 539 bp, Homo sapiens
  misc_feature (325)..(325): n is a, c, g, or t
  misc_feature (383)..(383): n is a, c, g, or t
  misc_feature (401)..(401): n is a, c, g, or t
  misc_feature (419)..(419): n is a, c, g, or t
  misc_feature (431)..(431): n is a, c, g, or t
  misc_feature (440)..(440): n is a, c, g, or t
  misc_feature (462)..(462): n is a, c, g, or t
  misc_feature (496)..(496): n is a, c, g, or t
  misc_feature (522)..(522): n is a, c, g, or t
cagatcacctgaggtcaggagtttgaggccagcctggccagcatggtgaaaccccgtctctactaaaaatacaaaaaatcagccagtaatcctagctactcgggaggctgaggcaggagaatcgcttgaacccaggaagcagaggttgcagtgagccgaggtcatgccattgcactccagcctgggctacaagagtgaaactccgtctcaaaaaagaaaaaaaaaaagaaaaaaagactgcatatgactccccagtgaagccctccctgattggcctctgcagaaggcagcatgccgggctttggagtcagacctgcatacaaanccttgttttgccggtgtgaccttgccaagtcttcttccctgcaggacagaaggcggcnagctctccctgaactggnatctggctctttgcccanggttgttctgcncttggacancagcgcatgtgggactgtgccnttcagcatgagccctgtctgcgacatttagccanttccagatgacagaaagttgtggtancgcaaccctgaattggc

SEQ ID NO: 698928 - DNA, 637 bp, Homo sapiens
ccttgatgggcagtggcattctttgacttctctccagccgagcttccaggacaatcacatatccctgcaaaaatagcattgcatacatggatcaggccagtggaaatgtaaagaaggccctgaagctgatggggtcaaatgaaggtgaattcaaggctgaaggaaatagcaaattcccctacacagttctggaggatggttgcacgaaacccactggggaatggagcaaaacagtctttgaatatcgaacacgcaaggctgtgagactacctattgtagatattgccccctatgacattggtggtcctgatcaagaatttggtgtggacgttggccctgtttgctttttataaaccaaactctatttgaaatcccaacaaaaaaaatttaaccccaaatgggttcctcttgttctaatcttgtcacccagggaaaagggccgcccaaaattccagttatttatttccaaaatgtttggaaccagtataatttgccaaaaaaaaatgaaacttttctttttttgctgttcccccaaaaacaattcaaatgctttttgttttatttttttcccaattccaatttcaaaatgtttcaatggggctataataaataaacttcacccctttttatgatacca

SEQ ID NO: 698929 - DNA, 258 bp, Homo sapiens
  misc_feature (4)..(4): n is a, c, g, or t
  misc_feature (6)..(6): n is a, c, g, or t
  misc_feature (122)..(122): n is a, c, g, or t
actntnccactgcacttcagcctgggcaacagaacaagaccctgtctcaaaatagatataaatagagaatgagagagcacgagcctgtctgatctggagcttcaactagatgaatttttttnatgttcaaagagttattactggccagatgcagtggttcacacctgtaatcctagtactttgggaggccaagatgggtggatcgcttgagctcaggagttcaagaccagcctgggcaacatagcgagacccccatct

SEQ ID NO: 698930 - DNA, 160 bp, Homo sapiens
ctctattacaaatacacaaacatttacgtggcatggtggtgcgtgcctgtaatcccagctactcaggaggctgaggcaggagaatcacttgaacctgggaggcggaggttgaagtgagccgagatcacgccatggcctgacagtggggccgggccgcggg

SEQ ID NO: 698931 - DNA, 372 bp, Homo sapiens
  misc_feature (240)..(240): n is a, c, g, or t
ggaagtggcggggaatggatgtgttcggtgtgcttaatgggtacaaagtttctgattggcaagatgaaaaagttctggagatggatggtggtgatgattgcacaacagtgtgaatgtacttaataccgctgaactgtacacttaaaaatcgttaaaatcgtagaaataaacaaatgcagctcatatttaaagggaaaaaaatttcaagattaagccatgcatatcacaggactcgtctcntcagagatttacaagggggaatggcttgtatcatgttaagcgtaattttgttacgttgtgttctgggtttgtccagttgcagagagaaatacacaaatatgtcaacattgcttaaatgctaagcagttatgg

SEQ ID NO: 698932 - DNA, 470 bp, Homo sapiens
taggttatttaatttttttgtcagaagtagctataaaaaagccatatgtttcagagagaaattaccctgtattttgccatctctcatttttcagggcaccaaagctgcatgccccccagcagttagaagggcaagattgcattgaaggggtttcagacctctgaagtagtcagttttctcccatgtcttctatggtttaattgtaacataggtagtatgccttcacactggatcccgggggcatgggttttggagatgttattttgtggtgaattgtcatctgcagtattaaagggaagacatattcctgcacatcaccataccttgtttttaaagccagagtcattgtatgatttttattaccagaagtgctaacccggaatgtgatctggttaccttggaaaatgcaggaacttttatgaatgtactgtaaaataaaatgtgggctaattcccagaaactgaaaaaaa

SEQ ID NO: 698933 - DNA, 935 bp, Homo sapiens
gtggacagattatacccgtcctgtgtagcctgtgattgttctgggcacgatggtggtgaatacgtgctactcaaagacatggcaataatttgccagctctctcaggtggcgccagtgatttcgtatcctcagtaccttcagagtatccgtgcgttccatacgtgcacatcttccatgaatatgctctccctgggaagctggatggctactggcacttttcatgatatcagggagtgccttgatactgctgaagtgactgaacccagtttaatcgtgcagagcccagatgcttataaagcttgtggtacgaaagagtcctccatctgtcgcccaggctgcgcagtgcattggatgccaatcccggactcaactggatgttcgttgcctccgcagagtgcaagacaagtgtcttgatgccatcaagctctccatgagtatctgggattacaggggcccactcgagctgtggggctacgatttgggtaatttcacgtagagacggggtttcaccatgtggaatcaggctggtcgttgaaacgtccgtgaacgtcgggtgatccactgccttggtgtcctgaagtgttgggttaccatggcgtgagcggtggtgccccaaataacagcagctttcttgactacctggtggggtgaggggggctaactaagatccaggtaaggcttgcctatcacggaaaggagtcctgggaaggctgtcgtgcaccagaactttccgggcccgctgtgtccgtgccttcgaaaaccttacgggggtgcatcgctgcccggtatacaagcacgcaatcacaatctcgtctgccccatggcccacacgtatggcggcatattaggtgtccacgtggttagccccacccaagtctggaccactttgtaaaaaaacgctcacacgtaggctaaaacaccacaaacccaacaag

SEQ ID NO: 698934 - DNA, 461 bp, Homo sapiens
  misc_feature (321)..(321): n is a, c, g, or t
gtcaggctggtctcgaactcctgacctcaggtgattgcccgcctcagcctcccaaagtgctgggattataggcatgagctaccatacctggccaccttatttttcattctgccatcaaatagacacacagttttgtttgtttatttatttatttatttattttatttattttttgagacgagtctcactctgtcgcccaggctggagtgcagtggtgcgacctctgctcactgcaacctctgctgcccaggttcaagtgatcctcctgcctcagccccctagtagctggggattacaggtgcgtgctacctcacccagctnaatttttgtagttttagtaggagatgggggtttcatcatcttgggccaggggtagtcttgaactcctgacctcgtgatccacctggccttcagccacccaaagtgctggggatttacaggcgtgacacccacaagtgggc

SEQ ID NO: 698935 - DNA, 357 bp, Homo sapiens
  misc_feature (1)..(1): n is a, c, g, or t
ntgcagagagtcactcaattgcaatccaatgtacatgtctcagtctaagcataggtcttttgccaagttacaaaatataagcttctaactaacaaaaacgttagaatgtccacatcttaaattcaccgctagaggaatttcgtagagtatagccgatggaggcccctctcttctgaaagaccaagtctttagaaggataagtttatgcgaaagacagtgattagctttcaagtgacgccgttatctatgagatttatatcgcatgtttccacatctaaataggtggggtaaggtagtccataggcgtgtaataaccccaccgagcgagtcggaagcaagacgaggtttttgcctgcg

SEQ ID NO: 698936 - DNA, 1071 bp, Homo sapiens
gcagtgccgggcgccatggcaccgtggggcaagcgtgctggctggctgtgcggcggggtgctgcttgacatctcgggcgtgctgtacgacagcgtgcgcgggcggcggcacggccatcgccgtgctcggtgtgaggcgggtggccagactgacagcgttcccggctgaagagtgaggttctgcaccaactgagtctgcagaagtcccgggcagagctggtggtggcatgcttcaggaggctgggattttgacatctctgagcaggaggtgaccagccccgtggaaccagcatgcctgccagatcctgaaggagcgaggcctgcgaccatacctgcatcatccatgactggagtccgctcagaatttgatcaggatcgagcacatccaacccaaactgtgtggtaatttgcaggacgcaggagaaagcttaacttatcaaaacatgaataactgccttccaggtgctcatggagctaggaagaaagctgtgcatcaatatcactgggaaaagggcgttactacaaggagagctcttgacctgatgctggacgaaggtccctagatgaaggctctagatatgcctgtgggcatccaaaggcggaggatggaaggaggaagcctaactcctggaggttatacaaagataagcccatgaaaccgaatcggcagtggaagccaagcaagtgcgacaatggaaatgcggacgatatcgatggctacatcgaggaagataccacataagacgatggtaggaaattaagaaccgacatacacggtacagacgacgcatgaaatagtacaagggacacaaaaagaactaagcaactaaatctgtaatgtcaaggaataacatggtgaacgcttagacactacacagtaaaatacaaaagtagaacgatgccgcaggaaccgacaagaactaccaaacatatcacgaaccacttgcagacaaacaccacagcacaacaaccagatcatatatacatgaacaaacagaaaaacaagaaataaaagtagtaccagacaacaacaatagagaaagaaaaaaaagatgactataactgtagaaaa

SEQ ID NO: 698937 - DNA, 122 bp, Homo sapiens
gtgtctgcagatggtatggatccttaggtgggaaggtcacctgtcttatattctaggtaagattccatttcctggaactcatcagaaatgataaagctcagtgctggggaaatggatccatt

SEQ ID NO: 698938 - DNA, 142 bp, Homo sapiens
gttcagcagtctcaaccgattgactaatcaaactaacctcaatacaaatgataaccatacacaacgactaaaggacgagcctggatctcttagtactgagctatccttagagtcatttttattgctcactaacgtagacctc

SEQ ID NO: 698939 - DNA, 417 bp, Homo sapiens
ctccccccgacgggtgggtggcgggagaggtaagaaatggataggacagaaacgtgtggagatgttcgtggctgcaatctcgcaagtgtacggaagaatacagaaatctaaccgagaactttagaacgaaattttcaagtttcaccatcttaattctgtatatattccactatctcacatgtataacttattgtgtacaaatctgaggtcataacattcattaatgaatactttaatcttttatgcataaattgagtagctgagaaatagttctaaagaaacaattcagggctgggcgtggtggcttacacctgtaatcccagcattttgggaggccgaggtgggcagatcatgaggtcaggagatcaagaccatcctggcttgcacggtgacaccccgtcgggtggagcgggtacc

SEQ ID NO: 698940 - DNA, 573 bp, Homo sapiens
gcttgacctctgcttagcaaactgaggagaggggacgagaggtgttagagatattgctggggcaaggggaagtggcgtcaagcccccaagccaggactgcatgggaacaaccagactgtgatggccatatcagacccccgggactggacacgaacccatcccaacgcaaaaagcaaataaataaaacaaatatattaactctctcttcacagggagctggggtggagtcggggagaaagaggaacaggacctggtcctttgaagaagagagccaattccaagaaggggttaaaaatagaacatgtctcagaggccacagcaggttagacaaagtagcatatgtctgataaaggggggtgcggtgggtgagtggacaccagaacccagacttgaaacctgtgcttgattgagcaccctcagggcagacgagacaagaactgtgtatactcttcctacccccagccacataacaggcaaagaagcgcaacttaacacatgactggactgcccggggagcgaggcgggcacgaaaaaatgaagcactttagggtcaagcaactgagcaaacacctg

SEQ ID NO: 698941 - DNA, 275 bp, Homo sapiens
ctggacacatggtgaaaaccgtctctagtaaaactagcaaaaatgagctgggcgtggtggcgggcacatataatcccaggtaacatcaggaggctgaagcacaagaatcgcttgaacccaggaggcagaggttgcattgagccgagattgtgccactgcactccagcttgggtgatatagcgagactcagtctcaaaaacaaaacaaaacaatcttcatatgtaccgcgatatcctttctcaatcctgatttacctttagtgttacctttttccc

SEQ ID NO: 698942 - DNA, 400 bp, Homo sapiens
agaggatccacagtgagcggttgaatcctgtatacatgtgagcggttgcactcctgttgacagtgagcggttgcactcctgttgacagtgagcggttgcactccgcttgacagtgagcggttgcaatccgctagacagtgagcggttgcgctccgcttgacagtgagcgggttgaatccgcttgacagtgagcgggttgaatccgcttgacagtgagcggttgcaatccacttgacagtgagcggttgcaatccgcttgacagtgagcggttgcaatccacttgacagtgagcggttgcaagccgcttgacagtgagcggttgcaatccgcttgacagtgaggcggttgcaaatccgcttgacatgtgagcggttgccactccgcttgacatgtgagcgg

SEQ ID NO: 698943 - DNA, 110 bp, Homo sapiens
tctacacaggtactatgaacaccacacacaatgtatcacacatacaactccatacacatactaacggttaggcgtgcacacaccacacataccacacatcataaacatca

SEQ ID NO: 698944 - DNA, 423 bp, Homo sapiens
cggacccacagaattgctgctgagatgagaatggagatcacgcaaggaagagacctgtgggagaggctgtccctgacagcgagcagaagcccgtgccgacgtctgagggcaagtctagactgtcccccgccggtgagatgaagcccatgccgctgtctgagggcaagtctctactgctgttaggaggggcatgctgctgtcgcccatcctggcagtggccctcgggggtaccctggctctgagaaagaaataggaggcttttcagaagagcccgacagcaggctgtcaggttggagtcgtcttggctggactttgcccctccagcagctgtctggacctttgtggaacactctgggatacttggggacttctgctcaacatggcagtggcctgtccaggcatgttcggctacagtagggagag

SEQ ID NO: 698945 - DNA, 727 bp, Homo sapiens
ggcaagcggcgaaatggcgccctccgggagtgttgcagttcccctggagatcctggtgctgttgctttggggtgctccctggaggcacgggcggggaggaaggtgcggggtcatcacggacgagaagtggagcagaactgcgtggaaggacgacgtggatgatagaattttatgctccatgtggtggccctgtttgttaaaagatcttcaacgggaatgggcaaagttgtgctgaatggggatggaagatcttggggttaatatggcgaaagtagatgtcgagagagcagcagaggattgagtggactggtatagttcatagacttggtcttcctattattatattcattgtagaaagaatggtgaagtttaggagctatgagggtccacgggatgtaagaaggacttcataaaatttaatagaagtgataaatgacgtgggaagacgtatttgagcccgtgtcatacattggttggggtccagggttctgtgctgatgagtagtagtgtcaggactctttacagtatctatgtggatcgggggacttgacaataaatctactttaatggagagacctgggattggcagtgtggggggttcatataacggttatgctttagaaattctgtgttgcgggactggtatttaggactttgtatgaatatttgtggggagatgcctttggtctttaaaagggggaacaaagcgtccaattcccttaaaaat

SEQ ID NO: 698946 - DNA, 365 bp, Homo sapiens
actggtttgggggcttagacctagagattcaaaactggcttcacagccgagtgcggtggctcacgccaataatcccagtgctataagggaagcagaggcaggtgggtcaccagcaggtcaggagtacgagaccagcctgaccaacactggagaaaccacatctctactaacacactacaaaattagccgggggtggtaacaggtgcctgataatcccagatactcgggaagctgaggcaggagactagcttgaacctgggaggtgcaagtatgcacctgagctgagatcgcaccgaaacgcacagcccagagcaaaaaaagtgaaactgtgtctcacacacccaaaacacgcacaaccacacccg

SEQ ID NO: 698947 - DNA, 375 bp, Homo sapiens
  misc_feature (176)..(176): n is a, c, g, or t
gcctgcaggactggcagctatcggtcatgctatccactaactacattacattcttcacaaactagaaaactatttaaattcaatgggacgacaaagagctgaatagccagggatggccaggcaaaaggacaaagctggagacatcatgttacgtgactccaaactacactacaggncaacagtaacccatacagtatagtactggtacgaaaaacagacacatagacccatggaaccgaattatagagcccagaaataatactgcacacctacaaccattctgatcttcaacaaagctgacaaaaaccaagccactggcgaacaaagggactttccctccctttaataaatgatgctgggaaactggctaccatg

SEQ ID NO: 698948 - DNA, 920 bp, Homo sapiens
gatccgggggagcggaactgcaagaggaaaggctcggggctctctactggattctggccgcgctccggccgcgctcctctggattgccccgaaacaccgtggtactgtcgtgccgcagacaggaggcctggatatggtggagcgaatgggccgattccagcggatcctggagccctaggtaggaacgtcctcatccctgtgaaagaccggatccgactatgtgcagagtactcaaggaaattgtcacatcaaatgtgcccttgagccagaacgagctgtgaacttctcgagcgagtgtacactctggacgaattgcgcatgtagggtccttcataacactgggccttcattggagtccatcacaatggcaaggcctcacgcgtcgctgcacgagcacccctgaggtactgccgtccaacacgaggctcagctaccatacaaacgcaagtgaagaatcaagagacacccggcgacacacccatcgtcggtggcacacgaggcccatacacaggagaacacgcgggcagttcccaagcaacagggccaagcagctagtggggaatgcccaagtcaaaccagaggccagcacgaacacgcagggaggaagacggcgtgaccacccgatactgaaagcatcgagcgcgcccatcccagggatgcccacccctggagggaccaagaagcgccaagctgacacgacctcccaactgcacaggcagaagccgcgggcaacaacggagcccaagctccacggacgcatcacacgggagacccgcagcacgaccgcccacacacgcgcgacgagcagggggacaaagcccagagcccaaggctccggccgctcacgaagaacgacacagggcgcgaccagatatccacccggagacaagccaaacgggcacaacgcggccagcggagcg

SEQ ID NO: 698949 - DNA, 932 bp, Homo sapiens
gggagctcaaacgtgacggacctgtgatgatgcacgtgtgaggagatgccgtgtgcaggcagcagcgactgcatactcgagtttccgagcaggaacttcaccctgccctgctcagcccaggtctggtgcgagggcatgaacgagaagcggaagctctataatgcctacaggtttttcttcacatacctcctgcctcacagtgccccgccttcactgcgtcctctgctgtgacagcatcgtcacacgccacaggagatgctcgcctgggtgggtgtgacgataccctggcccagcttggagaacggtgcttgcacctgtacccggagcggtgcagtatctagcagaactcccacggaaagcaggaggttaccgatgtaccagtagtatcccatagcagtaccatcccccagtgaagactaccgattgctggccatcctaccaccacgggagcatgtctcctttcagtgttcaaccttggctgagagctgtggatgtctgtcagagccatgcccagtgtcgcggccattcagatggtcaccaaacagaccaccttggacacggtcgagcaagctaggtcatattctgcaccgacctggactggacgccaagtggtcgctgatcccaaacaatgaacacattatgtgcaaggcctctggcttgagcctaatctgactggctcgcgctgaccagctgactatcctcggcctggtgtcgcttgccttgtggaccggagttgccttggactgggcagacaccttccattttcacccctggcacagccccttccacaccacacgcctaacgactcccccaggaacaggacccgcattgttgaccccaggaaccaaccggttgccataaatgccccaactcttcacacacttcgtcgactctaccaagcctaactaatgacacctgcaagggtccctact

SEQ ID NO: 698950 - DNA, 930 bp, Homo sapiens
gcccggtcatcggtctccgaccaaatcacttgtcttagcagtgcaagactctttctcctgtgcgatttctcgtctgcggccagggtctgaaccgcgtcctcagccgtgcaccggtgtaaaagactctgccagtgatggactgtacacacagcacaataagcacgcgcattgaccgtacatcacctctgcctggcctatcacagagggccctttatagtaatgtgctgctgttagcaaagcgtggaaattgtacccgtaccgatgacttgcttacgcattgaatgcaagcagacgtactatgagtttggaggagggctgtaactactcgctgatgaatggctgaaagtgaatcacttggggaccgaggctccttcacttgccgtggtacactctcgtcacatacttcgctccgcagtggcccgtcccttggagctgggttcagatggatcctcgaactgtaaggcacctgtaaactctatgcattcgaggacatgtacctgcaagtatgtccaaccggacccgcctattttacttatcctatgtaaaagaagccatgccgtggcgcacgatatgagtccttcaatggcaatacggtaaacgcgcccattgtttaagtccataccccacaaatctggggctatgcgtaccctaccttcgcgaactatcccgcacttggacgcaaaacacctttgtctggagacgccaagaaccaattcccctttgcgagcaatcaagcagtgctatccttggtcggaaggctggtgcactttgcgacaagacagcggttttagactagcctcctacggcaacctgcttagtacgaatagcatttattgatcgccaacgatccgatcgttggacgcgcgggaatatgtcctacgacctgtaaccatacgtagacttgtgtaagaataaggtccacaattacaa

SEQ ID NO: 698951 - DNA, 126 bp, Homo sapiens
  misc_feature (5)..(5): n is a, c, g, or t
  misc_feature (53)..(53): n is a, c, g, or t
cttcntggatcagaaagcttgtcaatcactcatgtgttttgagtattcttttnatggtgctttgttgcttctgaactattttgaagagtccttctgtttcctcaagtatcaattctcctcctcttt

SEQ ID NO: 698952 - DNA, 378 bp, Homo sapiens
ccgcgacagagtggtgctgtaggtctacgcatatgggatacttcactttttccaatctggagatatgagatgcccaacaaagggatacttacattaagtgccatagccacacttgatcgcattggcacagatggagactgcagcaaacctgaagaaaagaagactggtgaggtagccacggggatggcctatagacccaactggctgctggcaggggctgcttttgagagccttgtgttcctcacccactgggtttttggagaagtctctcttgtatccagatgggcagtgagggggcatccacatccagggccagatcctaacccatttggaggtgcagtactgctgagcttgacaagtggattgatgcttccatct

SEQ ID NO: 698953 - DNA, 495 bp, Homo sapiens
  misc_feature (416)..(416): n is a, c, g, or t
gtggaaggcgatgtggctcccagaagcacaggtggatgtggaaccggcggggggcagcctaccgggaccttggtccactggagttctgagccccatttcctccccatcatcgccagcctctgagcacggggcaggacagcgccggacaggatgatggactgggatgggtacagccctccgggaagtgtggtgatgaaaggcatcggcggtcagaaggacggggacaggtcagccagtggcagccagggcagccgccacagtggaaggggaagatggtaccatttcccatgaatttaggctgtcagctgagaagaagcccacaatatctttactgggttccataaaagccaaaggaaaactttcgggtgctcctcaaattaaggggcttagattagggtcatgaacggaaattgggncaaacacagaaagaaagactcggggggtgaaaggggagggccaggcaatgtgctcacgttgacacgacagttttaaggt

SEQ ID NO: 698954 - DNA, 224 bp, Homo sapiens
agttttagtttttctagagacggtgcctcactttgttgctcaggctggtcttgaactcctaggctcaagcaatcctcttgcctcaacctcccaaagtgctgggattacaggtgtgagccactgcaccaggcccttattactgctttattgtgcatttttctgatagtgatgtttagcatttcttcttatttatctgttcaggtttccccttctgtcgtcttctc

SEQ ID NO: 698955 - DNA, 260 bp, Homo sapiens
tcaacacaatagcagtgtgcagaaacaaaatcctgggtgactaggtgtcatacagaagctgatggcatccaaagcaaatgaccaccaaggttattatcttctaaacagtataatagagcacatgcctcctgaatcagttgaccaatataggaaagaaatcttcattctgctatcccagagccttcagacttccaaaacaaccaagttaatcaacgagtttcttacgtctttctcacatatgtacttgcataaaactactg

SEQ ID NO: 698956 - DNA, 294 bp, Homo sapiens
taaggtccccctgagttgtgtcatatttagcttaagggcccccagagtgaacataagagcccaggctaaagccccctcttcctagtgccctgtcaccccccctgtcccttttcctgggcatctgttttatattttattccccgtgggcctcgttcttgtttaaaacccaaagaatctttaaaacgattcaccaatagtacttgagggggtccctccccccaaaaatattttccagtttaaaatccccctcctatagggttggctgaagccaaaggttttttaaaactatataga

SEQ ID NO: 698957 - DNA, 222 bp, Homo sapiens
aaatggaataataagcatacaaatacattatcaaaacccactgacacaacacatagactaccctatacacttgtcctataccctatgaggcctaattatcacaagctccatctgacctacgaccaaacagacctaaacatcgatcatatgcatactctaacaatcagaccacatagccctcgatagtaacaagccattctcatcacaaaccccctgaaagct

SEQ ID NO: 698958 - DNA, 1464 bp, Homo sapiens
  misc_feature (350)..(350): n is a, c, g, or t
  misc_feature (367)..(367): n is a, c, g, or t
ggtgaataagaaattctaggcatagtcacgctgacatagtcacacagagtaggagtcatgcagctgttctgaccgaaggtgatgtgatggtggtatgcaacgaggcctgaggtcagcaagtgcgaaatatgggcacatcaggcgagggacagggaacggtcttcgcagtctctcggtcgctggtccgttcgtcagcagcaggtgactaggactgtcgtgtcgattgctagggttagtttcagatagtgacttgcaccactccatatcacgatgtacacatagacacacgtaagattctagcatggaagaccgatggagaagtgtctcgtctagtcgctaaggaagtccantgtcctcgcggaacgantgcgctcgacaaatacttctcccaaatttcgtggatagttatggggcaataggacaggcattgggaacacgtctgcatacacactgagaacagagtagagacacgactaaatagcagggggcaacggagggaccttagtgtagcatacaaagactaatataaactaattatttccgcgttaccgtttagacagtaccacaagttgactctagaaggaaggggctctaatcaaaccgataggctagccccagggtcggttatcccgaagagccgcaattcgccgaccggtgggaaactagaccaaacgtgtcatacgcctaagcgaagatcacgtgcacgcgtgtggggcaacgcgtgcagtttgacgcaaacaagctataatatattccacattgagaagatcccattccattctcgagaatacattggtgccatcgaaacgttagatcgcaccccgtggggcggcttaagaggggaccccattccgggcgcggcaagcattacgggcttgggcacacgtttagcattcgcagggggggtgggcccggatagaagggaccggttttggggaccgccaattcaaggaagggttccccattttacaattcaaaaataggtcaatatggaaaattcatccaccgggatatagcgggccctttatccaaagcatctcaaaggatttcccccccctttcattccttccttttgcaaaaaaacaaaaaaaggaatttccccagtgggggagatccttcaatacaactagatgtgtccaaagggcttggttcgccaagagagggaaaaataatagcgcgccataggtggaaaaaagaggcaaggggttcaacaagtcccccaatcccacattaggttgtcctgtctcagcgcgagcccaatgaggagaaaccccaagaagggaagagagcacacgagcaaaaacgacgcgaaaaaaggccgtcagaggagtgatactagaagacctcccataggccctttgagagcccgggaggaaatgggcagacccactgaggagcacatagcggcgctgtgcccaacccaaaaatagtaggccccggcagagcactcttggaaagcagacc

SEQ ID NO: 698959 - DNA, 139 bp, Homo sapiens
ttgtcttaatgacataaatgtcaaaagcaatgatggaatacatgagatcaactagtaagcacttatcaccatgcctgcaacataactggaacttgataaatgcaacgtaatatctagaatatgatcatttctactacta

SEQ ID NO: 698960 - DNA, 339 bp, Homo sapiens
cgatcgccttagctcagtgatcctcccatttcagcctgtagagtagctgggactacaggtgtgtgaaaccacacctggtaattttaaagaaaatttttgtagatccttctgccttggcctcccaaagtgctagacttatagggcatgagccagcatggccaggccctggacatggaaaaatcttaagcaggccatttattaaaatctttcagtaaataattcaccgagcagctaagcccccaaccaaaaaaaagaagccggaaagagaccccaaaaagtgacttttctccacactccagggttccagtgctggtttagagtctatgtccggccacattt

SEQ ID NO: 698961 - DNA, 432 bp, Homo sapiens
gagcatcctgagtctaaatcagatggctggcaagactgtagaacaagtactgaacaatatgatcctggcgagaagaggcgcgatctcaccatagtgtctatccgaaacacggatactcaagaaaagatgctaaggtgcgcctagaggagatgtgctccaatggctgtaacgatgctagatacttcctagggtcctctacgcgcgtgcccttcaacgaggtgctctctgacctggtccgatgctataccatatcttgtgccctaagaggtcctggcttcgaccggtaccctcggactcggtccaatgtgataagcacgagatactgtgaccataggagtggtctggcggtcggtcaaatcagtcgcgcagtacgaatcttgtgagatagagagcctgggaaatagtataggatgcgtcttgaaggtcgtcgca

SEQ ID NO: 698962 - DNA, 923 bp, Homo sapiens
ccagactgtcggctataacttcatctactcgttctctttcaggactgggtgtctacttacggacggaacagtgtgttgtgatgctggagtggcacaccatgtgcgcccatccgtagcaagtacagattgtagtctagttccacatggcgtaccaatagaaggccgggagggattaacgcggtaacattgccagagtgctccatgagtcatcatcgaagcgttagaaggtaacaagctgatatcctgtaaacccttagcaaggtcttgtgcgtatggagaggcacgccagtcttccaactgccacagcaaagcacatatagactacagactcaacctattcggtgccccttgccctatcactcgatatcgcgtcatcgtctggaccgatcttgtgccatgtgatggggtggcagggttgtcacagcgcaagggttgcaggaccagagagcgtcgactcgcgcgaggtgaattcctaggcattctacgtatggaggccacttcatatgaggcgtggttgtcctcaaagcatcaacgttcacccctgaaaattgcccctatagtaagctgaagctcggcggaaagagctcgcgaaccatttcgggtgcctagtcatatagaagaattacatcgtcgaagagcgtctcaaggacctagacgatccagtaacgtgtgcctttaggcaggcacgcttgcagctgacagtcatgggagtgcgccttgatgcccgggtgggcttgctcaccgttgacaaacctatgggccatttgtctctaggccaatgggggatcaatctcgactaaggacgtaattgtattgcactggatgctacagtgtgcgataatccaggggcttgttggggcaccgagaattgccctgtcggtaagagtttctggctcaggctgttcgtacagagcaagaaacca

SEQ ID NO: 698963 - DNA, 492 bp, Homo sapiens
attcgcggccgcgtcgacgccagtcaacgctggaaaccaacgatctgacaccgatcctggcatcgatacctcagcagatcttgccgggcctgctgctggaagtgggtccaagtctgctgccggcgctggaagctgccctgaaatactccctggtcaggcagccatccttacgcggctgcaggctggcgggcacacccggtgcgcgccgcatgccattcagcgccaaggagacacagatcctcaccttgctcgtcagcggccagccaaacaagacgatcgcgcagcttgagacatctctgaaaacaccgtgaaatttcatcttaaacacatcttcgccaagctgtcggtagacaatgcgcacggccgccatcagtgcagcgttgcgcctcggtgttcttgattcctctctctgagccacccgcctacccattcggtcgacgcggccgggaattagtagtagtaggcgacccgggaatttcggcccgtacctgg

SEQ ID NO: 698964 - DNA, 226 bp, Homo sapiens
ccaacgataaaaagtgaacaaaggtctctggttttcctaggcagagctgtgtgtgtccctggcgtacttgcgattacgggagcggtgatgactcttaccgagcatgctgccttcaagcatctgttctacacaacagcacatcttgcacccgacccttaactccactttaacacctgacgctggacaacagacacactgtttacacgggcacgcacatgggttgcgg

SEQ ID NO: 698965 - DNA, 304 bp, Homo sapiens
cgcagccggtacgaacgggtgatgcggttggctacactggatgtgactggacgactgttactactcgggacccttccgacccggctgatgtttggtgcttaggatatgaatggctgagcggaggctgtaaaaccgggcactcggcttgggttatcaatactcgggctgaccatcatcatcgtgggactgactttggtggaagtccttggttacatgtcattattgcgtttccgacaagttataaagttgtcacttacccctcgggatagtttcccttggggtgtctctcctgaagactactctt

SEQ ID NO: 698966 - DNA, 388 bp, Homo sapiens
atgcactgcccctgcctctgcccggcaccccccaggcgtggcgccgctggccaggtggccctgaccaggcagcctccccacagctgtcccggcccacccgcttgtccagggcattcgcccaccccctgggcatccatgtgtctgggcccggggaccacaggtgtgggagctggtgaccccagaccccagaattctcagggctctacccccctttcctcgtcctaggtggccactggctatcaggagggctggaaggcagagctttgggccaaaagccaggccgttggggtccccccctcaagtttggagcccgtttccgtggtctgtaccagaggcaccggaggttgggttcctgcattaaacttcactgtgtgtttcctatctcgga

SEQ ID NO: 698967 - DNA, 625 bp, Homo sapiens
  misc_feature (247)..(247): n is a, c, g, or t
  misc_feature (253)..(253): n is a, c, g, or t
tcaggcggccgggaagaatggcggactttcagactgagcgtgcctaccaaaagcagccgaccatctttcaaaacaaaaagagggtcctgcggggaggaaactgggcaaggagaaagcctcccggcggttactacaagaaacatcggctcgttgggctttcaagaaccacccagagggaggttatgtggagggccacctacttgtgacaagaaaagtgcccctctcacgtggttaagtggtgctccantctcgnaggggcggactccctctctgtggcggtggttgcaccaagatatgaaatgaatatggcaggaggaacctatgggtgctatccgcgccggagaacttattctggcatctaactatcccgcagagttacaagccgtcttgcgagaaaggcggccacaagaaacttgttctggtgacactctgttcccccggtcttcgaggggcacgtccaggatcggtgacatcgtcacagggggcgagtgccggcctctgagcaagacagggcgcttacaaggtgctcaggtcaccaggctgccggcaccaagaagcagtcccagaagttctgaggcggacatcggcccgttccccacaattgaaataacagttattttctcat

SEQ ID NO: 698968 - DNA, 254 bp, Homo sapiens
ttggggggttttggccccccccccccccccccccatttttggggggtttggggggcccctaaagattttttgttttttttccccccggggggggttttgggggggggggggggcccccccttttttcccgtgggttcttggggtttttggggggcgggggggggggggggggggggggcccccctttttgccccccccccccccccccccccctttttttggggccggctttttttttgggggggtttttggga

SEQ ID NO: 698969 - DNA, 783 bp, Homo sapiens
tggaaacggagtcaatgtcacccaggctggaagtgcagtggcacaatctcggctcactgcaacctccgcccctgggtctccagcaattctcctgcctcagcttcccgagtagccgggatcacaagtgcgcgccaccaagcccagctaatctttggtgtttttagtagagacagggttccaccattgttggctagacgtggtcctcgaacctccagacccaggttgactccgcccgcctcggcctcccaaagggctgggattacaggcgtgaaccacctcgccctgccgcggccacatttttctcttttttttgagaatggagtcttgctctggttcacccaggcaggagttgcagtggcgcaatcttggctcactgcaacctcatgcctccggtgggttcaagctgttctccttactcagcctcccatgtagctgggattacaggcgtccgcaaaccacgcccggctgatataagtagtttagtaagaggcgggtttcaccattgtggccaggctgatctcgaactcctgacctcaggcagttcaccccgtcattcaagcctcccaaagtcgctgggattaagaggcgtgacgccattggcgcccggccaaccaccttttttcaaacccggtcatgtggtgtcccgggttggagtgtccttccccagggataaacccgtgggcacattcctttgaaattctgaaactatcccgggggaaagtcttgacataagaggatgccatatagtgcaccctcaggaatcccggtccttggaacgaaaat

SEQ ID NO: 698970 - DNA, 187 bp, Homo sapiens
acattccacttggcagttaaattacttgaagactgttgctagttgggaatgtatcttgtcactgattttagggttgcatctggaaaagacgaaaagcttcagtcccctcccaccaccagaaatgaacatgaaagcattttagctaaaagctacaccagcaaaatgtactcaggattcctcgcaatag

SEQ ID NO: 698971 - DNA, 508 bp, Homo sapiens
ggggctgacctagaggaccctcagtgagctttgaacatgatgtcaccaaagacaagtgtatctcaggcttttcttagtgaaagatactttcctaaggtagtttatagcaagattggggataaaaaaaagagttggatttatgggctggagagtcattatatacttttaactataggtaaaatttacatacctccagtccaataaatttagatgtatgcttaatgttctaaaagctctttgttccttgctcatccttgggcggaccagagaagttattgataatcagggtgttgctttctttgtggtaggacatcaccatgttctcatagagtcctgttaggaagcagaggacggactgctgtgtgtcactgtggagagaaaaagaccttgtgacgtccctgtcatcacaggattctagtatcttgttatgccagagatgtggtttgaaaacttgtttttatggacgtatccacaaaacattatgctctgtggaaagggcaccgcaaaa

SEQ ID NO: 698972 - DNA, 163 bp, Homo sapiens
cgtagtagggtggtggtcggtctggcacggtgtagtcgcgtagtactcgacaccgcacttgcacctcgcacggcgctggtgcacagcacacgtacgtgcacacacacgcgtgctgttgctgcacacacacacacacacacacacactctctctacagtgtgtg

SEQ ID NO: 698973 - DNA, 956 bp, Homo sapiens
ataattatactagcattgaccatctcacttctaggagtactagtatatcgctcgacatctcatatcctccctactatgcctagaaggaataatactcaatcgctgtcattatagctactctcatagaccctcaagcacccactccctcttagcgcaatatgtgcctatgccatactaggttctttgccgccgtgcgaagcagcggtgggccttagccgctacataggatctcgaattgcttccgaacacatatggcctagacgtacgtactataaactaaagctactccaatgctaatactaatcgtcccaactaagttatattagcgtaccactgacatgacttgtccaaaaaaacacataagtttgaatcagagacaaccaccgcacgagcctaattattagcatcatccccctagcatatttgtggaaccaaatcaggcaacaagcgctgatttagctgttcccacaaagcatttttactcgcgagcctccgaacaaacccgctctctaataatgactagctgtactcggtaccacctcagcaatcatggctagccaatgccatttatgccagggaaaacattatgacgatggggtggtctactcgtctagtataatcatccgatgaatctgcttctgtgataacgagtgcacagcccacagaactaaatcatattgaatatctctcagccgaaacaaattattcccacattggctatcatgaccccgatgaggcagacaggcggaacagctggaagagggagattacttactaatctaacctaagtagggtcccttaccctaataaatcgaataattaaactacgaagacctgcgataataagattaaaagacactatagtggcgagactttaaaactgagcgaaagatattaggaggtaccacaagctaaagaagaaactcttggcccatatagccagacgggaacccatg

SEQ ID NO: 698974 - DNA, 552 bp, Homo sapiens
  misc_feature (23)..(23): n is a, c, g, or t
gccgatggtgccctcggtcgatntgatgaacacggtcgctggcttaccgacctcgaggccgaggtcggtcgcggcatccatggtgaccgacgacgtgacgacctggtcgccgccgtccagcgtcaccttcaccacggccatcacggtgccgagttcgacctcggtgatggtccccctgagctggtttcgggtcgagagccgcatcgcaagaacctccatgtcgcaacggtcgggatctgcggtgagcgtagccctacccggctcggcccggaatggcttgggagacttccacttacgcgagcggacgggcctagtgccgggggccgagcagagctacggacgcatccacggccggttccacgattcctcggaccggttttccgtcttcgaccgcaagtgcggtcagctcccgcagcccgccgagcaggatcacggccagcggcgcggtcagcggaggaagctgcgcgcggcggaatccgggactggcgctcaggtcgatcagcaggctggtcagcaactgcagcccgcggcgctgcaccgggcgcgcggccg

SEQ ID NO: 698975 - DNA, 346 bp, Homo sapiens
  misc_feature (9)..(9): n is a, c, g, or t
  misc_feature (38)..(38): n is a, c, g, or t
  misc_feature (60)..(60): n is a, c, g, or t
cctggttanttcttgcaggtgaagcaagatgtccttcngggccgtctgcctgtccccgtnaacactgctgctcagctgggagcgtatgccatccagtcggagccttggagattatgacccatataaacatactgcaggatatgtatctgagtaccggtttgttcctgatcagaaggaagaacttgaagaagccatagaaaggattcataaaactctaatgggtcagattccttctgaggctgagctgaattacttgaggactgccaaatccctggagatgtatggcgttgacctccatcccgtctatggagaaaacaagtctgagtatttcttaggattaactccc

SEQ ID NO: 698976 - DNA, 183 bp, Homo sapiens
ccttaactgaacttactgccacggtgaacttgaactctgagatgcacaagaggagagtctgttttaacagctgcttggacacagaggccctagagttactactctcaagacagctggttctgtctctcttttcactgtcctattttttcaaggcccagctgtcaggatatacccactgaagtg

SEQ ID NO: 698977 - DNA, 217 bp, Homo sapiens
cctgacctggggtcagacccgtgggttggacccctgccccccccccaggaaccctgaggcctaggggagctgttgacccttcagtgtctgcatgtggaaagtgggctccttcccctccctcccagggctgttgtaaggggccctgttatccggttccaaagcccagggcttggcgcccccccctgggctcccaataaatgtgtttcctgttttacca

SEQ ID NO: 698978 - DNA, 486 bp, Homo sapiens
ctgtttgcgggcaacaactgttgcgggcctgggggttgcatgttctcctgaggatgggccctaccatttcaagcccccgcattgcttggttccacctcctgggccgggggtttggcccccaaagtgtttaggagagctttctccctagatcgccctgtgggccggggccctggaggggtgctttgtgttaataaaattgtaaggtttgcccccctcccctgttgccggcatgggggtagttttagccccccccccccctttgtttccagccccggaaaagggggtgctcaggtggaggtgtggggtatgcccctgagctcctgctttgggcctggtggtttgcccccacgcggcccctgcccggctgccccaaggggtggatgcctgccggtcccccagcaagcctggggactccggaaaattccccgggcttgggggatttttaatttttagggccatttttttttataaaaggggcctttggga

SEQ ID NO: 698979 - DNA, 320 bp, Homo sapiens
atcgcccaacaccatttgttgaaaaaatgatcttttctccattgaattgactttgtgtctttgtcaaaatcaattgacgttatgatgggctattctgatctccatctagctcgtgatctttgtctcttcacatacacagcgtgtcttgttactaacatagcttatagtaattctctctaaatcaggtagcacggagtcttccaactttgctttttcaaaaattgttttagctattctagttcttttgctttttcatgtaagttgtagaatcatcttgttgattcttttaaagaatatttgcagggcttttaatgggaagt

SEQ ID NO: 698980 - DNA, 248 bp, Homo sapiens; identical to SEQ ID NO: 546000

SEQ ID NO: 698981 - DNA, 922 bp, Homo sapiens
tgtgttcatttgctggattccagtgtagtgaatattgtcatagtgtcttaacgtctgagggaaccgtcgtggtgtgtcaattcttggggtaatactgatgctagaggaattataatggacgtctccctatacaattgcatcgagaccccgttctatggtagtctcgcaccaattgttcaccaagttcggtatgtttttaaatgtgccgtttttgagacggagtttcgcgtcttgttgcgaggctggagtacaatggcataatctcggctcacagtaacgctccacctcctagtcttcaagcaattcttcggcctcagcctaccgtgtagctaggattacaggcgcacgcactaccatgcctagctaattggttgtacatctatgtagtatagacaggatttcaccatgttggccaggctggtctctgaactcgtgacttcagatgtgccactcctccttggcctcccaaaactgctaggaattacaggcgtgagccaccgtgcccggccagggtactgcctgattaaagtggtatttatgatattggacaatgcccctggccacccagaaccccatgaacttcttacacctttggtggtgaagtggccatacgttactccccaaacacaacacgttccagattcagcctatagatcaagttgtcataaagatctgttacaggctcagttagcacatggtactctatggataaggatggtcaaccctatggaagagaaccccatcatgaaagtctggaaggattacaccactgaagacatccatcgttgttatagaaaaagctgtgaaagccatctaaacctgaaacagattcctacaggagaatactgtatccaatagtgcgtagctactagagaaaacgtatgcccagataatatgtgtacttcataggaaattatgatcc

SEQ ID NO: 698982 - DNA, 184 bp, Homo sapiens
tctctcaggtgcggtgagtagctccatccgacaggggcccagtcctcccacacagggcccagcccacctctccaggtcaccatgaatgtacgctcccatccacgagggcccagatccttcccacacgagggcccagccctcctctccaggtcaccccgtgaggggagccctaagggtaccgagc

SEQ ID NO: 698983 - DNA, 1173 bp, Homo sapiens
  misc_feature (263)..(263): n is a, c, g, or t
  misc_feature (383)..(383): n is a, c, g, or t
  misc_feature (434)..(434): n is a, c, g, or t
  misc_feature (596)..(596): n is a, c, g, or t
gccttctgcaagtgctctctgccttcacgcttgcttcctttgggagagaaccttcctctgggttgtctcggggattcaggaaggagcccaggagcacaggaagtagagagagagacaagcatgttacatctgcaccatatctctgctttgtcatttcagcgatgctgtgctgccatgcgtatgcgtcgcctgtactgactaagctttgggcaccgatcagtcttccatgcgacgatttcctgctctcccagaccgcaacatcncttctgtctgactaggcggcatcgacgcttcggcagttaggcgtgacagtttgcgctggctagtaggcaagcaagctacgctatgagcgacatcacggaagatattgaaccgacctttgnacgcatggtactgcgctgtgtagaggctgacgcacaagcaacaatcgtcgntagccgcgatcgtgttgatggcgagccccaaaagacatggatgccagccttttcgctcaacgtggcgagtactagcccatgctcgcggacgtcagcggcatcgagtcttcacacgacagtttgagcttacgctgctgcttgctatcgagctcggcagccggnacgctatacctggtagagctcgtctcgcgaaccaacaattgacgaacaaacttcttcgcgaacaacactagctgcacacagcacgacaagcgcctatagcgcgactgcgcacctccgatctcgcgcccacactgcgccatcctgcgcgctcctccgacacctcgtcgcacgctcacccgcaagtcgcacgtccactctgcctcacgcgactccgtcgtcccactccactcccgcctctctgagcccacttgtccgtacgtgatctgccctttcctcgctttgcatgcgcctgcattcgccgccgcggctgcgggacactcctgcagagcaagggcgtgctctaagccctgcgagacacgacgggctcacccttccgtcgttcccacggtcctggcccttcggactgccactcagcactcggctaaccactggaacgctcagcgacaccttgactaacccgtcctccctggaatgcccgcgccatcttggttcagccccttttacggccggtcctacctccctcgacaagcgctcgtattctgcagcgtcgccccgaattcggtccctgcccgatgac

SEQ ID NO: 698984 - DNA, 211 bp, Homo sapiens
ctaggagagaacagagagcaacgctccaacactggatctaggcaatgatttataggatgtaacgccaaaggcacaggcaacaaagaatagacaaattggactgcatgaaaatttatttatatttatagagacggaatctgtgctcgtgtcgcccaagccttggtctcaataacaacaaccaaataaacatgaaaccaaaaaaccctaccct

SEQ ID NO: 698985 - DNA, 257 bp, Homo sapiens
aacatctcggctgtactccaattttaaatgggacataagctcggggtagcgttgagtgtagccgtccgtggcatgcgactgccttgcgggccattttgggtagccagaactggcgctgagagatgaaccgaacgccgggcttaatgcgaccgcatggctacactcatcagaccccagaacatgtctcgtttgatatagacgtcaggcacggtatcgatctcaggcgaaccattggtaggcgcagcatatagtccacg

SEQ ID NO: 698986 - DNA, 806 bp, Homo sapiens
atacatatatgtagaccttcccgaaatgccattctcaattttattttatgggctccaaacaaaaattatctgggttaataaggttatctattaaagcccccagaatctcagcactagatgtcataaatatgaaatagtaaacaacaaggtcacttgcacaacatgggtatttaataccctcagctggtgttcttcagaagccatacagaactaggaaaggtaagaactagctatactattgcagatatacctgaccactcacaactgtacttctatagcagacacctttgttaaaactgaacacagcattcagctttattgattgagtacaaactgctttagctgtttctaccctaagtcattagtcacatcatgtaccaggcaacatggcacaaaaaacaaatgctggctataaaatagtgaataatatcaagcatgcaggctagaaggaaggcataacaacgtcccactgcatcataaagcgaccaccagcaacacagccaatacctatcggtacagactatactacactagagcactagccaaggataccgcaacttgattagcccgcacacttgattataacagcaacttacgaactctctagggcacaacaattgaaaataggaaactaagaaatcccgacattagataactagagacgacaggcaaatatactggtacacatccttatcaaaggtaaagtaaggaaacactaactcatcagtagcagacatccatactaaaactaggacacttgaatctaatggtaataaaaactacatagaagctcaacccaaccagac

SEQ ID NO: 698987 - DNA, 370 bp, Homo sapiens
gaaatcaggaggcacagaacacactctatctcaaaaaatacaaaaataaaaaaaagaaaagagcattgcctttaagaaaaggaaagcctcaattgctcttcctggcacacagtagatgctcaggaagtatctgtggaatgaatgaatgaatgaatgaataattgaatcattgcgtgaacaaagcaattcttgggcaatcttgctaaagggcaggctccctttgtggcttgttttctgtctctctttccctgacttatgaaggaggaacaggacggaaccggttgtgtgtccaggccttctctttggtgccccgtgggttccttggtggccgtctgtatcctctgacagaggtagggtattcatgtgccct

SEQ ID NO: 698988 - DNA, 927 bp, Homo sapiens
tgttctcgccctcgtgttgcttttcgcgtttagtgctccgtcgggagggttttgcgtatccccgctctggtggtcccggcccataatttggggccccgttccgggttgctctctcctcctgggcgcgcttttacctggcgtgtgtcgctatagcgtcgcagctcactccatcgtttgcgtcgccacttctacggcctctctttattctcgctccgggcagaatacgcactcttcgatttctgctagggctgcggttatgaagcctcgatggtgtgcccctctgtgctcgtgttggatttcgcccgcgtcctcttgactaccctccttcaggtccgctggactaggtgctgttctcctattgtctggatccggattagcaaattttgtaatctaccccctggctcctcagcacccataatttttgtcctcccggaccaccctagcgatatccacgccctcccctcgcaataccccccaagccaggaagtactcattcccgactgcccacatgtgtttctcgacctacctctccatcaaatccgttaatagagggcctcgccccgatgttgtaggcatactccccagatttcagcatatatgacccccctcttctctgctattccactcctccccgcccttcgactgtcatttcattgtcgcgcccgtctcgcacgctcactcctcgggctgtgttgactccaaaagccgagcactcgacgcccttcttggatgatctagtggtagtgggcgtaggccactacgtcctgtgctcgactttgccacgcgcttcatggcacgccgcgcagaggcggtgaggactggtatgttcccactcactcgctgtgactattgcttcgtactcgaggcctgttctctctgctctgattgatagacctagaatataatttcatggtgctctccgcggga

SEQ ID NO: 698989 - DNA, 749 bp, Homo sapiens
ttaagtacacaatacagtatgttaactatagccacagtgttgtacagcaaatctctctcacctatgcatcctgcgtaactgaaactctgtgcccattgaacagcagctcctcatttcctcccccatcagcccctggcagccatcattctactctctgcttctgtgagtctggctattttagatcccttatagaagtggaaacgcgcagtatttgtccttctgtgactggcttatttcattgagcataacgacccccaagtttagccatgttgttgcttatggcaggatttccttcttttttcaggctgaataatatttccttatatgtatatgctgcatttttaaaaaccctttcatctactgacagacgtttagattatttccacatcttggctattatgagtaatgctacaacgaacgagggagtgaaaatatctctttaagatcctgatttcagtttttttgaataaatacccagaagtggaatgactgggtcattcatatggtaattctaattaaacatagaaattatttttattttttgagaaaattctgtgctgctttcacaggggttgctccgttacctattaccatggggccaaggtcccattctcacatttggcaacggtatcgggtgggaatgacagctataatggccggctcagcaatcgactcgaaaagaccggctcaaaagcgccatatgtcaccccgaaacgccaattgggcaacacccaaacatgcccgccact

SEQ ID NO: 698990 - DNA, 122 bp, Homo sapiens
  misc_feature (60)..(60): n is a, c, g, or t
tgggcacgagacgtagcgtaaatgtatgatccttttcaatcgatggactgaagttgctcnccttaaggaagcgtgagttctcctggcagtgactagctgtgtaggcaaactgtttgtgattg

SEQ ID NO: 698991 - DNA, 400 bp, Homo sapiens
gagctggaagcttacaccatatcgtctgcaggaacagccaggggaggttcagctgacgctcccaaggtagctgatccccaccaagcacacaggaccagctggagaacagatcatagcatatgctattacatcccaaaccatggggttttcacactttaccccaggcatactatccctaagaagaaccctggcacatgtaccaaacaacactacctgcagaccgactgccaccactttctttcccgcccttacctcccaccttcattacaccctccccccaccccccctccttccccccgtctcccccccccccccccatctcccccccccctctcccccccctcccctcccacccacacccccctcccccccctcaccgaccccgcctcccccatcctcc

SEQ ID NO: 698992 - DNA, 163 bp, Homo sapiens
aatcaatgtgaactcagggaactgaggaagcctgaacctcatatttggtgttacggtaagataaccgacagggctggtgaaagtcaccagatggcagaagtctaaaggaagatggaaatgtctttcaagcgtctccaacaaaccctcaacagacccgtgttcc

SEQ ID NO: 698993 - DNA, 288 bp, Homo sapiens
  misc_feature (16)..(16): n is a, c, g, or t
  misc_feature (31)..(31): n is a, c, g, or t
  misc_feature (47)..(48): n is a, c, g, or t
  misc_feature (60)..(60): n is a, c, g, or t
  misc_feature (74)..(74): n is a, c, g, or t
  misc_feature (76)..(76): n is a, c, g, or t
  misc_feature (79)..(79): n is a, c, g, or t
  misc_feature (105)..(105): n is a, c, g, or t
  misc_feature (129)..(130): n is a, c, g, or t
  misc_feature (133)..(135): n is a, c, g, or t
  misc_feature (140)..(140): n is a, c, g, or t
  misc_feature (166)..(166): n is a, c, g, or t
  misc_feature (176)..(176): n is a, c, g, or t
  misc_feature (232)..(232): n is a, c, g, or t
  misc_feature (262)..(263): n is a, c, g, or t
  misc_feature (265)..(265): n is a, c, g, or t
cacgtgaagtcagccngcaccagccgaaccngcgtggaagatctgcnncaaccgttatcnttgttcgtgagttncntcntgcgtttaaaatgagatgcgagagcntttagcataccgtgtaaatatggnnggnnnaaaantaaaatactattggaagtgctttcanctcagccgcntcttagctattagttctttgtgttgtcttatcaaagtttaatggatacagttccgnggttgttgatgtgtttgtgtgtatattcgnntntataaagatggtagtaagtcggt

SEQ ID NO: 698994 - DNA, 292 bp, Homo sapiens
atatcaccagatagtcaacattgaaatcagactgattatatattctttgcagtcaaagatggagaagttctatacagtcagcaaaaacaagactgggagctgactgtgactcaggtcatgaactccttattgccaaatgcagacttaaattgaagaaagtggggaaaaccactagaccatgcaggtatgacctaaatcaaatcccttatgattatacggtggaagtgagaaatagatttaaggcactagatctgatagagtgcctgatgaactatggatggaggttcgtgac

SEQ ID NO: 698995 - DNA, 210 bp, Homo sapiens
tttaagtgaacaggccggctaatttttgtttgtttgtttgttttgagacagagtctcgctctgtcgcccaagctggagggcagtggcacgatcttggctcactgcagccttcctctcctgggtttaagtgaacacgctggctaatttatgtttgcttgagatggagtctcgctctgttgcccaggctggagtgcagtggcatgatctcag

SEQ ID NO: 698996 - DNA, 305 bp, Homo sapiens
gccatgcgaagttgacgtctacagacatgtctatggctgctggcatggactatagggatggaaccacacagagaccgcgagacctgtgtggctgccattgtggcggtacttttggaacctgggcactatactgagtatagctgtggaggagaccggctgtggctctgctgacactacagctgaataatggtgatgaagtcatacgctctatagctgcaaatgttggagattgacagagtacagacggattgtatgcagggcctttcaaggatactgtttaacgatgacgattagtttcgagactc

SEQ ID NO: 698997 - DNA, 274 bp, Homo sapiens
tcggccctgcatcggccctggggtaccatgtggcctctacttctgtggccccctgtcccccagacccttccccttgtttccctggttgcctctcttgccccttgtcctttagccccccgacccaaaagggggtggggggggttttttgggagaaagggagccaggtcattggagggcatgggttggcggggggggggtttggggccctttattttggcttttcccccccgggggccccggcggcttccaaaaaaaatttatttttttcacggga

SEQ ID NO: 698998 - DNA, 312 bp, Homo sapiens
  misc_feature (20)..(20): n is a, c, g, or t
  misc_feature (109)..(109): n is a, c, g, or t
ggtaagacgggtaaggtggntacaagcccagagatgagcacatgtaccgatctcaaccccgacaatctgtcagggcggtgatgacctggaccccaactacgtgttgagntcgtgggtgcgcacgggccgaagcatccgtggatcctgcctccccccgcactgcagtcgtggggagcgccgcgtcatcgagaagctcgtggtggaagtccctgtccagcctggacggagacctggtggcccgatactacgcgctcaagagcatcacggcggcggagcagcagcagctcatcgttgatcacttcctctttcgac

SEQ ID NO: 698999 - DNA, 244 bp, Homo sapiens
caaagggatttttaaattaattgcaaaatgtgcattagctattgacttaaagtgaattgccttttgtatcctgattcccaacacctattcctgttcagtattttttgtcttgaaaaaaaaagtttatgtttgtaaagtcaaataaaaggttatccccctttttagtaaaaagttttagtttggggctgttaataataatttgctaaaaggccttttaaaattttttataaagggtttttaccca

SEQ ID NO: 699000 - DNA, 227 bp, Homo sapiens
gtatgagttggggggtctgtatcttagggcagcctcctagtgggcagcttctagtgttgcagataggtccctaacccccaggatgaccccgtagtggaatttcattgacatctgagtgagtggggactagtgtcaagtctagcccccaagtcagactggaccccagtgactctcaggaaggagggcacccccctaccgtgtgaaagatgtgcaggggctttgtcagt

SEQ ID NO: 699001 - DNA, 247 bp, Homo sapiens
ggagtcaacccagtaaggcggcactgaggagatctagggtgatgccattgggccactgaatgttcttctcatgcattaagcttctataaaaactcatttgcactggactgtcatctcattcttgttacaactgtataattactatgttcacatccaaccaaactggttagctagcgaaaaaccgtgcaaatctgagttgttacgtagtctattttgctccaacgtcatatcacatacattggtggat

SEQ ID NO: 699002 - DNA, 536 bp, Homo sapiens
  misc_feature (105)..(105): n is a, c, g, or t
gcagtgctttgagccctaggattcatcttctttttcacggtaggtggcctgacgggcattgtattagcaaactcatccttagacatcgttctacccgcacggtantacgttgtactcacttcccctatgtcccatcaataggggctgtatttgccatcataggagggttcattccctgatttcccctattttcagggtaccccctaggccaaacctacgccaaaatccctttccctatcatatttggcggggtaaatttaacttttttcccccaaccctttttcggcctatccggaatgccccggcgtttctcgggctaccccgatgcataccccccatgaaacatcctatcatctgtagggtccttcatttctctaacagcaggaatattaataattttcatggtttgggaagccttcgctttgaagggaaaagtcctaatagtagaagacccccccctaaacctgggggggctttttgggtgcccccccccctcccccccctttgaagaacccgttttcattaaattttgccca

SEQ ID NO: 699003 - DNA, 393 bp, Homo sapiens
ggtaatggtggttttcttcattgcattcagatggatacatctgtcaacgccgctaatcaggttgtttctgttggtgctgatattgcttttgatgccgaccctaaattttttgcctgtttggttcgctttgagtcttcttcggttccgactaccctcccgactgcctatgatgtttatcctttgaatggtcgccatgatggtggttattataccgtcaaggactgtgtgactattgacgtccttccccgtacgccgggcaataatgtttatgttggtttcatggtttggtctaactttaccgctactaaatgccgcggattggtttcgctgaatcaggttattaaagagattatttgtctccagccacttaagtgaggtgatttatgtttggtg

SEQ ID NO: 699004 - DNA, 147 bp, Homo sapiens
gcagtaaacggggttttcagacccagagcactggagatgcagtagtatcaagaggaaatgagcaagggtctggtggcaggtctgggaccgacagcatcccccgtgtctgtggggcctcccctagacccacattccaccttgccaggt

SEQ ID NO: 699005 - DNA, 678 bp, Homo sapiens
tatatacaggatgctcagccagcacaaagctgtggtgagattgggcccaagtctccgactccagattccaaaccacattaaaaaaaaaaaaatcaccgggcagacggcctatagctttaacagtctcggtctccccttcttcacatccttccgggggagaaaagttggtggaatattaagtaaatttggattcaatagactttttatttttttggtaaagatgatgggggtctggctatgctggctcaggagggtctggaactcgtgacctcaggtgatcctcccacctctggtctcccaaagtggctgggagtggcagtgggtggtggaccttgggctcactggcagctttggactccctgggctcaaatggctcctcctggagcctggactagctgagaccacgggctggtggccatcatatccagctaaattttttattttttggtagagacagaggtctcagtatggtggcctaggctagtcttgaaattctcgggctcaagtggatcctcccacctcagcctcccaaagggcggggattaccggtttgagccaccacgcctggtggactccaacttttaatattttttaattttggccactttttttttttttggggacagagtctccttctgttggcccaggtgtggggtgtcgtgggcccgaatttggccc

SEQ ID NO: 699006 - DNA, 294 bp, Homo sapiens
ggacccggtagcggggaatgaaaccagtcacggacaatctcaaaacgcatgctaagtgggcaaaaagttgattgtatttactgactgtaaagagaaaagacatcaatggccccacctgccttgattgaagaccctgaggttcctgctgctgaggcacacacatctgtgtataataatggagtcaagccagggcctccccctccacaactaggtatgctcactgtttccagctttcctattccatcccttcataggatctgggagtctcctctccttctagctgccaaagataat

SEQ ID NO: 699007 - DNA, 105 bp, Homo sapiens
cacctattccctgggcctcccaacagtgctgacactttgatctatggacttctagcctccataactgtgtgaaacagttccctaaaataaatctctctctgaaca

SEQ ID NO: 699008 - DNA, 824 bp, Homo sapiens
gatcgctcgctcgcgggaggtgcattgcagggggccgtgccgggcgccatcatggacgaggactagtacgggagcgctggcctgatgtgggtgcgacgaggctgacggcggccagctagtgaggcatgattctggagaaggagaggatgatgcgggaggttctagcaatgaatgcctgcataaattttccagccggtggattatatcatggaaccctccatcttcgacactcttgaagagcgtattttcaggctaggatgggtctccagagaattgtgtatccaggctcttatcttgaaaactacacgcgcgtgtgtgcccgagaccttgtgaaacctttgctaggacccgcatgttgggctcagtttcaagaccatgggttggttgagcccagtgccagggttcaaggaacacttcgtgtgcataagtcaccttgacagaggtctcgcgtgagtcaagacattctttgagccccccgttaaacaagcagaaatttcgtaattgctttttaacctggaatgggataagggagaaggactccccaggcggtgggccttggcaaaacagtaattgactctgacggcaagtacccaagggtgggcctggggtgaacacttttctttataacttaaaaaacccgtggtcgttggaatatgccccgccaattcccgagaaactagggattctgaattggcttggaaagcttttcacagcccagtgttacagggcctttcattttccgtgtgacgggccacgtggggtaacccattgggcgggaatgaaatccaaccaagattggttgttcccacaaggggcatttggcc

SEQ ID NO: 699009 - DNA, 174 bp, Homo sapiens
tctggaaagactgccgagaagagactcagaatttctatttcctaaaaatgtacacgagtattgaatgtacattcaccgtcttctcttctgctccctatacatctttaacatgatccattactggaactttctttctagatgtagggtaacccatcatttctgtgcccatttcaa

SEQ ID NO: 699010 - DNA, 144 bp, Homo sapiens
attgtgtggagctgagcgcaagacgacttcgtggcgtggggggcccgggttgcagtgccaagggcacaccctgcatgtgtagccgggctgatgaggccctgtgctgctgcctgcggtgagccgcgtggggtgtgcttggcgtgt

SEQ ID NO: 699011 - DNA, 111 bp, Homo sapiens
gccccttgatgatgggcggatctttactaatgcccggcatctttactgactgcgcggcatctttactaatgggcggcctctttactaatgagcggcatcttactaatggcg

SEQ ID NO: 699012 - DNA, 397 bp, Homo sapiens
ttcatcataggcaccttcacggtggtcacctggtccacgtggtagtcctcttccacggtgtcattgactgcaaagggtctgtcccatttgcctttaaagcagatgtaattcccttgagtgcccttctccacgtaatcgctgatatgattcttggcctcttcggtgtccccatagttgacagtgaagccttgtgagtggtccaactttttaacatccgcctgcatcttatccacgagcttcaggccctctctgaggaacaggccattgccggtggtcagctggagctggctgtctggcatggttagtggtatggaggagttcctggaagccttcatggttctgagcctccggaatctgcgtgaggttgaaatccaggccctcaaggatttcttcgtga

SEQ ID NO: 699013 - DNA, 167 bp, Homo sapiens
tactatctctacaaacccatcacacatagacattggaacatctattacctattatttctggcgcttgagctcggagttccctaggctcagctctaaacctccttattcgatccgagctggtccagccaggccaccttctaggtaacgaccacatctacaacgttatc

SEQ ID NO: 699014 - DNA, 166 bp, Homo sapiens
tttgcttgcaggatccctcattaccacacagtctgtaagctttccccatatgttcgtagctagttcctacaaactttcttactgtggtttcaaaagcttaatgccatccaataaacgagcttactggaacatgttcctatttcatctcttttatcctactaccaaa

SEQ ID NO: 699015 - DNA, 151 bp, Homo sapiens
ttcactgtgcgtgctgaccatgtaagcccattggcagggtaccaaagtgatcctccatcttatatgaacatcagactgagtacctagaatgagaggcgggtcaaagaactcgtgcagaagcgttctcagttcataggctatcccatcaccc

SEQ ID NO: 699016 - DNA, 165 bp, Homo sapiens
ataaatattagaagcacaaacaaattgcacgtgtgtaaacaaactgtacaatgattgatgaagatgagggaaggtggtttgcagcactccagaagcataatacgtcatcctgactggtggtgaatggagagagcaggcatcttgtaagacatttgcggtggtata

SEQ ID NO: 699017 - DNA, 353 bp, Homo sapiens
caggcatgtaccaccacgcccagctaattttgtatttttagtagagacggggtttctccatgttggttaggatggactcaaaactcccgaccctcaaggtgaatcgccccgcccggggcctcccaaaggtggtgggattaaaaggggtgaagcaattttcctgggccaagatcttattgttttggaagggaattttccccccttggttgggaattcttcccggttgcaacttaaaaaaagattttttttggttccccccctccccacacaaaattggggaattttaaatagagggcccccccccccccctttggaattttttaaaccaaaattaaaacgcgcttttctttttg

SEQ ID NO: 699018 - DNA, 90 bp, Homo sapiens
  misc_feature (1)..(1): n is a, c, g, or t
ngagacggcgccggctcagatctcgagacaggtgcaaccgcgccaaccccctctacctccgcgccctcgcacccaggaccaccccaacgc

SEQ ID NO: 699019 - DNA, 375 bp, Homo sapiens
agaatagctgaacctgggaggtggaggtggggtgagccgagatcgcaccatagcactccagccggggcgacagagggagactctgtctcaaaaaaaaaaaaaagaatagggggaattataagaccaatggcaaataagatttattagtatattggaagtataaaagggtggtctaatatttaaaagggtataatctcacttatttactaccaaccctatgagataggcataatattcactttttatagacacacaaaggggggtaaaggtggtgaagaaactggcagggaagagacatttaagggggcagaaccagaatccaaaggccgggtctctcggatcccaaaaacaaataccggcctctaggtcagttcg

SEQ ID NO: 699020 - DNA, 1139 bp, Homo sapiens
  misc_feature (7)..(9): n is a, c, g, or t
  misc_feature (380)..(380): n is a, c, g, or t
  misc_feature (433)..(434): n is a, c, g, or t
  misc_feature (477)..(477): n is a, c, g, or t
  misc_feature (479)..(479): n is a, c, g, or t
tgggggnnncgaaggggggggaaaccttaggctaggtacgaggctgggtgttgcagcagccagagagggagtcggtgtggacgcgaggagccgggcgcttagaacagaggcttgcacaggtggagatgtggaagtctgtagtgggccatgatgtgtctgtttccgtggagacccagggtgatgattgggacacagatcctgactttgtgaatgacatctctgaaaaggagcaacgatggggagccaagaccatcgaggggtctggacgcacagaacacatcaagtaggtgccgaaaggactggagaaaaggaagggggttatgggaagagcccaaagaaaactcggagacttgggggaagattttaaaaagtgtcagtgnatgaccacattgcacaagcaacatactgtgaaagcctggcacagtttctacanntggatgacataccacattgttaatcagaaataaatggtttcgncngggcgtggtggctcacgcttgtaatcccaaaactttggaaggccgagcgaggaagatcacttgaggtcaggagttcaagaccagcatgggcaacatgatgaaaccctgtgtctactaaaaatacaaaaattagatgggcgtggtggcgggcacctgtaatcccagctactcaggaggccgaagcacgagagtctcttgaacccaggaggcacaggttgcagtgagctgagatcgcaccactgcactccagccagggtgatagagcgagactcagtctcaataaataaataaataaataaataaataaataaataaataaataaatggtttcaattaagtagctataatgaatattattcttaaaccatgccattctggaaaaagattgaaacaatggaacagggtcattcaggaagcttctgtgatacccctctatagactcatagatcaaaaaaaaaaaaaaaaaaaccacaagacccttttccttttctgaataaaggccactcaacgctggtattctgggaattgtccagatgaggatgcacacttcatgcctttggtggtattgtagccaatgaggtttatccgaggtgtgattattgctaattgaaaacttcccaacactccgccatgatgacttgcaatatagtaggcattggc

SEQ ID NO: 699021 - DNA, 109 bp, Homo sapiens
ttaatgttatctgccaacacatcagtgtgtttcttcgtttctcaaaattatgcaacaacatttactgaacacttcagaaagaaagacatgtccctgtcccgaatggact

SEQ ID NO: 699022 - DNA, 2052 bp, Homo sapiens
  misc_feature (7)..(9): n is a, c, g, or t
tgggggnnncgaaggggggggaaaccttaggctaggtacgaggctgggtgttgcagcagccagagagggagtcggtgtggacgcgaggagccgggcgcttagaacagaggcttgcacaggtggagatgtggaagtctgtagtgggccatgatgtgtctgtttccgtggagacccagggtgatgattgggacacagatcctgactttgtgaatgacatctctgaaaaggagcaacgatggggagccaagaccatcgaggggtctggacgcacagaacacatcaacatccaccagctgaggaacaaagtatcagaggagcatgatgttctcaggaagaaagagatggagtcagggcccaaagcatcccatggctatggaggtcggtttggagtagaaagagaccgaatggacaagagtgcagtgggccatgagtatgttgccgaggtggagaagcactcttctcagacggatgctgccaaaggctttgggggcaagtacggagttgagagggacagggcagacaagtcagcagtcggctttgattataaaggagaagtggagaagcacacatctcagaaagattactctcgtggctttggtggccggtacggggtggagaaggataaatgggacaaagcagctctgggatatgactacaagggagagacggagaaacacgagtcccagagagattatgccaagggctttggtggccagtatggaatccagaaggaccgagtggataagagcgctgtcggcttcaatgaaatggaggccccgaccacagcttataagaagacgacgcccatagaagccgcttctagtggtgcccgtgggctgaaggcgaaatttgagtccatggctgaggagaagaggaagcgagaggaagaggagaaggcacagcaggtggccaggaggcaacaggagcgaaaggctgtgacaaagaggagccctgaggctccacagccagtgatagctatggaagagccagcagtaccggccccactgcccaagaaaatctcctcagaggcctggcctccagttgggactcctccatcatcagagtctgagcctgtgagaaccagcagggaacacccagtgcccttgctgcccattaggcagactctcccggaggacaatgaggagcccccagctctgccccctaggactctggaaggcctccaggtggaggaagagccagtgtacgaagcagagcctgagcctgagcccgagcctgagcccgagcctgagaatgactatgaggacgttgaggagatggacaggcatgagcaggaggatgaaccagagggggactatgaggaggtgctcgagcctgaagattcttctttttcttctgctctggctggatcatcaggctgcccggctggggctggggctggggctgtggctctggggatctcagctgtggctctatatgattaccaaggagagggaagtgatgagctttcctttgatccggacgacgtaatcactgacattgagatggtggacgagggctggtggcggggacgttgccatggccactttggactcttccctgcaaattatgtcaagcttctggagtgactagagctcactgtctactgcaactgtgatttcccatgtccaaagtggctctgcctccaccccctccctattcctgctgcaaatgtctaaccagatgaggttctggacagacttccctctcctgcttcattaagggcttggggcagagacagcatggggaaggaggtccccttccccaagagtcctctctatcctggatgagctcatgaacatttctcttgtgttcctgactccttcccaatgaacacctctctgccaccccaagctctgctctcctcctctgtgagctctgggcttcccagtttgtttacccgggaaagtacgtctagattgtgtggtttgcctcattgtgctatttgcccactttccttccctgaagaaatatctgtgaaccttctttctgttcagtcctaaaattcgaaataaagtgagactatggttcacctgtaaaaaaaaaaaaggaatt

SEQ ID NO: 699023 - DNA, 223 bp, Homo sapiens
tcgacccaaaataaaattctaaggcccccagcaaccatctgaatggactccttccttggccacggtgctcttaaaatttaacttggggccgggtgctatggctcacgcctgtaatcccagcactttgggagactgaggcgggcagatcatgaggtcaggagatcgagaccatcctggctaacacggtgaaacccagtctctactaaaaagtcgacgcggcacg

SEQ ID NO: 699024 - DNA, 398 bp, Homo sapiens
  misc_feature (7)..(9): n is a, c, g, or t
tgggggnnncgaaggggggggaaaccttaggctaggtacgaggctgggtgttgcagcagccagagagggagtcggtgtggacgcgaggagccgggcgcttagaacagaggcttgcacaggtggagatgtggaagtctgtagtgggccatgatgtgttcctgactccttcccaatgaacacctctctgccaccccaagctctgctctcctcctctgtgagctctgggcttcccagtttgtttacccgggaaagtacgtctagattgtgtggtttgcctcattgtgctatttgcccactttccttccctgaagaaatatctgtgaaccttctttctgttcagtcctaaaattcgaaataaagtgagactatggttcacctgtaaaaaaaaaaaaggaatt

SEQ ID NO: 699025 - DNA, 1812 bp, Homo sapiens
  misc_feature (7)..(9): n is a, c, g, or t
tgggggnnncgaaggggggggaaaccttaggctaggtacgaggctgggtgttgcagcagccagagagggagtcggtgtggacgcgaggagccgggcgcttagaacagaggcttgcacaggtggagatgtggaagtctgtagtgggccatgatgtgtctgtttccgtggagacccagggtgatgattgggacacagatcctgactttgtgaatgacatctctgaaaaggagcaacgatggggagccaagaccatcgaggggtctggacgcacagaacacatcaacatccaccagctgaggaacaaagtatcagaggagcatgatgttctcaggaagaaagagatggagtcagggcccaaagcatcccatggctatggaggtcggtttggagtagaaagagaccgaatggacaagagtgcagtgggccatgagtatgttgccgaggtggagaagcactcttctcagacggatgctgccaaaggctttgggggcaagtacggagttgagagggacagggcagacaagtcagcagtcggctttgattataaaggagaagtggagaagcacacatctcagaaagattactctcgtggctttggtggccggtacggggtggagaaggataaatgggacaaagcagctctgggatatgactacaagggagagacggagaaacacgagtcccagagagattatgccaagggctttggtggccagtatggaatccagaaggaccgagtggataagagcgctgtcggcttcaatgaaatggaggccccgaccacagcttataagaagacgacgcccatagaagccgcttctagtggtgcccgtgggctgaaggcgaaatttgagtccatggctgaggagaagaggaagcgagaggaagaggagaaggcacagcaggtggccaggaggcaacaggagcgaaaggctgtgacaaagaggagccctgaggctccacagccagtgatagctatggaagagccagcagtaccggccccactgcccaagaaaatctcctcagaggcctggcctccagttgggactcctccatcatcagagtctgagcctgtgagaaccagcagggaacacccagtgcccttgctgcccattaggcagactctcccggaggacaatgaggagcccccagctctgccccctaggactctggggatctcagctgtggctctatatgattaccaaggagagggaagtgatgagctttcctttgatccggacgacgtaatcactgacattgagatggtggacgagggctggtggcggggacgttgccatggccactttggactcttccctgcaaattatgtcaagcttctggagtgactagagctcactgtctactgcaactgtgatttcccatgtccaaagtggctctgcctccaccccctccctattcctgctgcaaatgtctaaccagatgaggttctggacagacttccctctcctgcttcattaagggcttggggcagagacagcatggggaaggaggtccccttccccaagagtcctctctatcctggatgagctcatgaacatttctcttgtgttcctgactccttcccaatgaacacctctctgccaccccaagctctgctctcctcctctgtgagctctgggcttcccagtttgtttacccgggaaagtacgtctagattgtgtggtttgcctcattgtgctatttgcccactttccttccctgaagaaatatctgtgaaccttctttctgttcagtcctaaaattcgaaataaagtgagactatggttcacctgtaaaaaaaaaaaaggaatt

SEQ ID NO: 699026 - DNA, 1941 bp, Homo sapiens
  misc_feature (7)..(9): n is a, c, g, or t
tgggggnnncgaaggggggggaaaccttaggctaggtacgaggctgggtgttgcagcagccagagagggagtcggtgtggacgcgaggagccgggcgcttagaacagaggcttgcacaggtggagatgtggaagtctgtagtgggccatgatgtgtctgtttccgtggagacccagggtgatgattgggacacagatcctgactttgtgaatgacatctctgaaaaggagcaacgatggggagccaagaccatcgaggggtctggacgcacagaacacatcaacatccaccagctgaggaacaaagtatcagaggagcatgatgttctcaggaagaaagagatggagtcagggcccaaagcatcccatggctatggaggtcggtttggagtagaaagagaccgaatggacaagagtgcagtgggccatgagtatgttgccgaggtggagaagcactcttctcagacggatgctgccaaaggctttgggggcaagtacggagttgagagggacagggcagacaagtcagcagtcggctttgattataaaggagaagtggagaagcacacatctcagaaagattatgccaagggctttggtggccagtatggaatccagaaggaccgagtggataagagcgctgtcggcttcaatgaaatggaggccccgaccacagcttataagaagacgacgcccatagaagccgcttctagtggtgcccgtgggctgaaggcgaaatttgagtccatggctgaggagaagaggaagcgagaggaagaggagaaggcacagcaggtggccaggaggcaacaggagcgaaaggctgtgacaaagaggagccctgaggctccacagccagtgatagctatggaagagccagcagtaccggccccactgcccaagaaaatctcctcagaggcctggcctccagttgggactcctccatcatcagagtctgagcctgtgagaaccagcagggaacacccagtgcccttgctgcccattaggcagactctcccggaggacaatgaggagcccccagctctgccccctaggactctggaaggcctccaggtggaggaagagccagtgtacgaagcagagcctgagcctgagcccgagcctgagcccgagcctgagaatgactatgaggacgttgaggagatggacaggcatgagcaggaggatgaaccagagggggactatgaggaggtgctcgagcctgaagattcttctttttcttctgctctggctggatcatcaggctgcccggctggggctggggctggggctgtggctctggggatctcagctgtggctctatatgattaccaaggagagggaagtgatgagctttcctttgatccggacgacgtaatcactgacattgagatggtggacgagggctggtggcggggacgttgccatggccactttggactcttccctgcaaattatgtcaagcttctggagtgactagagctcactgtctactgcaactgtgatttcccatgtccaaagtggctctgcctccaccccctccctattcctgctgcaaatgtctaaccagatgaggttctggacagacttccctctcctgcttcattaagggcttggggcagagacagcatggggaaggaggtccccttccccaagagtcctctctatcctggatgagctcatgaacatttctcttgtgttcctgactccttcccaatgaacacctctctgccaccccaagctctgctctcctcctctgtgagctctgggcttcccagtttgtttacccgggaaagtacgtctagattgtgtggtttgcctcattgtgctatttgcccactttccttccctgaagaaatatctgtgaaccttctttctgttcagtcctaaaattcgaaataaagtgagactatggttcacctgtaaaaaaaaaaaaggaatt

SEQ ID NO: 699027 - DNA, 1665 bp, Homo sapiens
gcggaacccatacggatggctgaagtgctctctgtattttttcctatttcttttacatttttccttatctgttgctttctgctttccatgtttccctacttccatctttgtcttctccattcgctcccagatttttccccatctgtttccctctcttcccatccatgcctccctctatcctctgattctcacatttcctcctacatttgttttccacattcctgtttttcttcccactgattcttctcaccacccattcccagcattttgatctcctataactcagaactttctgtcctgcagattatgccaagggctttggtggccagtatggaatccagaaggaccgagtggataagagcgctgtcggcttcaatgaaatggaggccccgaccacagcttataagaagacgacgcccatagaagccgcttctagtggtgcccgtgggctgaaggcgaaatttgagtccatggctgaggagaagaggaagcgagaggaagaggagaaggcacagcaggtggccaggaggcaacaggagcgaaaggctgtgacaaagaggagccctgaggctccacagccagtgatagctatggaagagccagcagtaccggccccactgcccaagaaaatctcctcagaggcctggcctccagttgggactcctccatcatcagagtctgagcctgtgagaaccagcagggaacacccagtgcccttgctgcccattaggcagactctcccggaggacaatgaggagcccccagctctgccccctaggactctggaaggcctccaggtggaggaagagccagtgtacgaagcagagcctgagcctgagcccgagcctgagcccgagcctgagaatgactatgaggacgttgaggagatggacaggcatgagcaggaggatgaaccagagggggactatgaggaggtgctcgagcctgaagattcttctttttcttctgctctggctggatcatcaggctgcccggctggggctggggctggggctgtggctctggggatctcagctgtggctctatatgattaccaaggagagggaagtgatgagctttcctttgatccggacgacgtaatcactgacattgagatggtggacgagggctggtggcggggacgttgccatggccactttggactcttccctgcaaattatgtcaagcttctggagtgactagagctcactgtctactgcaactgtgatttcccatgtccaaagtggctctgcctccaccccctccctattcctgctgcaaatgtctaaccagatgaggttctggacagacttccctctcctgcttcattaagggcttggggcagagacagcatggggaaggaggtccccttccccaagagtcctctctatcctggatgagctcatgaacatttctcttgtgttcctgactccttcccaatgaacacctctctgccaccccaagctctgctctcctcctctgtgagctctgggcttcccagtttgtttacccgggaaagtacgtctagattgtgtggtttgcctcattgtgctatttgcccactttccttccctgaagaaatatctgtgaaccttctttctgttcagtcctaaaattcgaaataaagtgagactatggttcacctgtaaaaaaaaaaaaggaatt

SEQ ID NO: 699028 - DNA, 294 bp, Homo sapiens
gagcttaggtgatccgcccgcctcagtcttccgaagtgctgggattataggcgtgagcaccgcgcccggcctgcataatttttaaaaatagtttgttcccagttttggtatattagaatgggattacttaaagttgctttgacagaaagacgatttcattgttcatgtcagaattgttcggtctacttactcaattttcaagcattatgaatgtgctaatttatgttgtcaaaattctgtatgagcctggaaaacatcacattctcattctcctttttgggcaatggaaggggt

SEQ ID NO: 699029 - DNA, 131 bp, Homo sapiens
  misc_feature (88)..(88): n is a, c, g, or t
gggcggcagctgcgaggctcggagaaacaggcgccgcgggctccgcgcccggccggacccgggcccgagatcatgatgctgccgctcncgccgccgtcgtggagcgagaagcccggatagacgccctttct

SEQ ID NO: 699030 - DNA, 1339 bp, Homo sapiens
ctacatgctctccacccacttactgtggcataaatagtactcgatgggccctccgcggtggttgttaaaatagcttataagaagacgacgcccatagaagccgcttctagtggtgcccgtgggctgaaggcgaaatttgagtccatggctgaggagaagaggaagcgagaggaagaggagaaggcacagcaggtggccaggaggcaacaggagcgaaaggctgtgacaaagaggagccctgaggctccacagccagtgatagctatggaagagccagcagtaccggccccactgcccaagaaaatctcctcagaggcctggcctccagttgggactcctccatcatcagagtctgagcctgtgagaaccagcagggaacacccagtgcccttgctgcccattaggcagactctcccggaggacaatgaggagcccccagctctgccccctaggactctggaaggcctccaggtggaggaagagccagtgtacgaagcagagcctgagcctgagcccgagcctgagcccgagcctgagaatgactatgaggacgttgaggagatggacaggcatgagcaggaggatgaaccagagggggactatgaggaggtgctcgagcctgaagattcttctttttcttctgctctggctggatcatcaggctgcccggctggggctggggctggggctgtggctctggggatctcagctgtggctctatatgattaccaaggagagggaagtgatgagctttcctttgatccggacgacgtaatcactgacattgagatggtggacgagggctggtggcggggacgttgccatggccactttggactcttccctgcaaattatgtcaagcttctggagtgactagagctcactgtctactgcaactgtgatttcccatgtccaaagtggctctgcctccaccccctccctattcctgctgcaaatgtctaaccagatgaggttctggacagacttccctctcctgcttcattaagggcttggggcagagacagcatggggaaggaggtccccttccccaagagtcctctctatcctggatgagctcatgaacatttctcttgtgttcctgactccttcccaatgaacacctctctgccaccccaagctctgctctcctcctctgtgagctctgggcttcccagtttgtttacccgggaaagtacgtctagattgtgtggtttgcctcattgtgctatttgcccactttccttccctgaagaaatatctgtgaaccttctttctgttcagtcctaaaattcgaaataaagtgagactatggttcacctgtaaaaaaaaaaaaggaatt

SEQ ID NO: 699031 - DNA, 125 bp, Homo sapiens
ggagctcggtaccctgagctgatcatggtgaaatcctgtctctactaaaaatacaaaaattagctgggctcggccgtgcgcaagtgctggatggggagctgctcaaccgctacctgtacctgtag

SEQ ID NO: 699032 - DNA, 186 bp, Homo sapiens
tccaacgcgcctcttggtggtggtggtgatcccagacaagcgctcgttgctttggcttcgtgacctactccaatgtggaggaggcggacgccgcattgctgctcgccccatgccgtggacggcaacactgtggagctgaagcgggcggtgtcccgggaggattcggcgctgttggggctcctctag

SEQ ID NO: 699033 - DNA, 1998 bp, Homo sapiens
  misc_feature (7)..(9): n is a, c, g, or t
tgggggnnncgaaggggggggaaaccttaggctaggtacgaggctgggtgttgcagcagccagagagggagtcggtgtggacgcgaggagccgggcgcttagaacagaggcttgcacaggtggagatgtggaagtctgtagtgggccatgatgtgtctgtttccgtggagacccagggtgatgattgggacacagatcctgactttgtgaatgacatctctgaaaaggagcaacgatggggagccaagaccatcgaggggtctggacgcacagaacacatcaacatccaccagctgaggaacaaagtatcagaggagcatgatgttctcaggaagaaagagatggagtcagggcccaaagcatcccatggctatggaggtcggtttggagtagaaagagaccgaatggacaagagtgcagtgggccatgagtatgttgccgaggtggagaagcactcttctcagacggatgctgccaaaggctttgggggcaagtacggagttgagagggacagggcagacaagtcagcagtcggctttgattataaaggagaagtggagaagcacacatctcagaaagattactctcgtggctttggtggccggtacggggtggagaaggataaatgggacaaagcagctctgggatatgactacaagggagagacggagaaacacgagtcccagagagattatgccaagggctttggtggccagtatggaatccagaaggaccgagtggataagagcgctgtcggcttcaatgaaatggaggccccgaccacagcttataagaagacgacgcccatagaagccgcttctagtggtgcccgtgggctgaaggcgaaatttgagtccatggctgaggagaagaggaagcgagaggaagaggagaaggcacagcaggtggccaggaggcaacaggagcgaaaggctgtgacaaagaggagccctgaggctccacagccagtgatagctatggaagagccagcagtaccggccccactgcccaagaaaatctcctcagaggcctggcctccagttgggactcctccatcatcagagtctgagcctgtgagaaccagcagggaacacccagtgcccttgctgcccattaggcagactctcccggaggacaatgaggagcccccagctctgccccctaggactctggaaggcctccaggtggaggaagagccagtgtacgaagcagagcctgagcctgagcccgagcctgagcccgagcctgagaatgactatgaggacgttgaggagatggacaggcatgagcaggaggatgaaccagagggggactatgaggaggtgctcgagcctgaagattcttctttttcttctgctctggctggatcatcaggctgcccggctggggctggggctggggctgtggctctggggatctcagctgtggctctatatgattaccaaggagagggaagtgatgagctttcctttgatccggacgacgtaatcactgacattgagatggtggacgagggctggtggcggggacgttgccatggccactttggactcttccctgcaaattatgtcaagcttctggagtgactagagctcactgtctactgcaactgtgatttcccatgtccaaagtggctctgcctccaccccctccctattcctgctgcggcttggggcagagacagcatggggaaggaggtccccttccccaagagtcctctctatcctggatgagctcatgaacatttctcttgtgttcctgactccttcccaatgaacacctctctgccaccccaagctctgctctcctcctctgtgagctctgggcttcccagtttgtttacccgggaaagtacgtctagattgtgtggtttgcctcattgtgctatttgcccactttccttccctgaagaaatatctgtgaaccttctttctgttcagtcctaaaattcgaaataaagtgagactatggttcacctgtaaaaaaaaaaaaggaatt

SEQ ID NO: 699034 - DNA, 1561 bp, Homo sapiens
taacaggaaaggagatactttagatatcgtcgacccacgcgatgcgcctttctgctaagggtccctgatgatcacctcatccaaggaagaacaaaaacttatagcgacttgcaaataagccagccgtgaagttgctctacaagcagaagtaacaacaaatactcatataccagcaattctgacgacacatatgttgcaacaaacattgaactgtttgatcaagctgtctctgcgctttaacggcaagggtcctgttccataaaggcatgttattggaggatgaaatctgctgctggtccttattatggtcagaggacggaagattgctgaagtctgattgtacctccatcgtctatgccactgagaagaaacagaccaaaggtggagttacccgaagacccggattatatgcaggagacacctgcaaccatatatagctagtatgaagagccacaaggatggaacaggaggaccctgaccaatagacgcatccatgagacggccaacacggacgggcacaagagagaagacgccatcaccacacaccatggacgaaggaacaaaggaagcggagagcggaatcgacgccgcggtagacggcaggatccaacaatcaaaggcggcactgatagacacggagacccagacatacaaccagaagaagccaggccaagaagtaccacgacagcaccgcacccatccgtacatacacacacagaacacccacaaaaatacaccatgaccagatgacaacacaacactacgcaatcccatgatgatcagagacatgaccaacagagacaccccatatccaggaatacaccccattgaggaaagcacctgggcatgacataaccaaaaatggaaaccaaacgacaaagactgacatataaatgacacgggaaacaataggaactgggacaaaaagaggcaacaaataagcaaagcgaacataggacaaccacaagagaacgcaagatgaacaccacaacgaaacggactagcaaacacagaacaacaggaagcatacaaaaggacaacaccagacaaagacagaaacacatagaacacaccagatgaggaaaacaacacaactagggcaaaccaccagaggacaccaccaacacgagaaaacacacaaagagaccaaccgagacgtaaaaagaacacgcagaaaacaaaagaacaaagacaaaccacaaagagaaggaaaccataaaacaaacagcaggagacaacgaacaacacgaacgagcaagacaaagagacagacgaaaagacacgaaagagcgcagaaagacgagaacaacaagaggaaaagaacgataaaaaagagaaaaaacaacgaaaagaaaagaagaaaacagataagaaaagcgactgaagatacaaaagagaataagagaagacagaggaaaaataaacagcaacaaaacgaactaagcataagatagacgaaaatcgcagaacagcagatagacagacaataaggagacaagaaagagaagaacacacatccggacgtctcctcgactggacatggcacaggaactagaggaaa

SEQ ID NO: 699035 - DNA, 145 bp, Homo sapiens
  misc_feature (117)..(117): n is a, c, g, or t
ctcctccacacagcccttgtagtcctcacggcatttagccgtcgcttttgtaagacaggcacaggtgctgatgctctcaggatgggttgcaattaaggtgacaagcttgtcttcccnttaaaggtccctgataatctcaaggtgt

SEQ ID NO: 699036 - DNA, 1754 bp, Homo sapiens
  misc_feature (7)..(9): n is a, c, g, or t
tgggggnnncgaaggggggggaaaccttaggctaggtacgaggctgggtgttgcagcagccagagagggagtcggtgtggacgcgaggagccgggcgcttagaacagaggcttgcacaggtggagatgtggaagtctgtagtgggccatgatgtgtctgtttccgtggagacccagggtgatgattgggacacagatcctgactttgtgaatgacatctctgaaaaggagcaacgatggggagccaagaccatcgaggggtctggacgcacagaacacatcaacatccaccagctgaggaacaaagtatcagaggagcatgatgttctcaggaagaaagagatggagtcagggcccaaagcatcccatggctatggaggtcggtttggagtagaaagagaccgaatggacaagagtgcagtgggccatgagtatgttgccgaggtggagaagcactcttctcagacggatgctgccaaaggctttgggggcaagtacggagttgagagggacagggcagacaagtcagcagtcggctttgattataaaggagaagtggagaagcacacatctcagaaagattactctcgtggctttggtggccggtacggggtggagaaggataaatgggacaaagcagctctgggatatgactacaagggagagacggagaaacacgagtcccagagagattatgccaagggctttggtggccagtatggaatccagaaggaccgagtggataagagcgctgtcggcttcaatgaaatggaggccccgaccacagcttataagaagacgacgcccatagaagccgcttctagtggtgcccgtgggctgaaggcgaaatttgagtccatggctgaggagaagaggaagcgagaggaagaggagaaggcacagcaggtggccaggaggcaacaggagcgaaaggctgtgacaaagaggagccctgaggctccacagccagtgatagctatggaagagccagcagtaccggccccactgcccaagaaaatctcctcagaggcctggcctccagttgggactcctccatcatcagagtctgagcctgtgagaaccagcagggaacacccagtgcccttgctgcccattaggcagactctcccggaggacaatgaggagcccccagctctgccccctaggactctggaaggcctccaggtggaggaagagccagtgtacgaagcagagcctgagcctgagcccgagcctgagcccgagcctgagaatgactatgaggacgttgaggagatggacaggcatgagcaggaggatgaaccagagggggactatgaggaggtgctcgagcctgaagattcttctttttcttctgctctggctggatcatcaggctgcccggctggggctggggctggggctgtggctctggggatctcagctgtggctctatatgattaccaaggagagggaagtgatgagctttcctttgatccggacgacgtaatcactgacattgagatggtggacgagggctggtggcggggacgttgccatggccactttggactcttccctgcaaattatgtcaagcttctgggcttcccagtttgtttacccgggaaagtacgtctagattgtgtggtttgcctcattgtgctatttgcccactttccttccctgaagaaatatctgtgaaccttctttctgttcagtcctaaaattcgaaataaagtgagactatggttcacctgtaaaaaaaaaaaaggaatt

SEQ ID NO: 699037 - DNA, 589 bp, Homo sapiens
  misc_feature (7)..(9): n is a, c, g, or t
tgggggnnncgaaggggggggaaaccttaggctaggtacgaggctgggtgttgcagcagccagagagggagtcggtgtggacgcgaggagccgggcgcttagaacagaggcttgcacaggtggagatgtggaagtctgtagtgggccatgatgtgtctgtttccgtggagacccagggtgatgattgggacacagatcctgactttgtgaatgacatctctgaaaaggagcaacgatggggagccaagaccatcgaggggtctggacgcacagaacacatcaacatccaccagctgaggaacaaagtatcagaggagcatgatgttctcaggaagaaagagatggagtcagggcccaaagcatcccatggctatggaggtcggtttggagtagaaagagaccgaatggacaagagtgcagtgggccatgagtatgttgccgaggtggagaagcactcttctcagacggatgctgccaaaggctttgggggcaagtacggagttgagagggacagggcagacaaggtaagtgaccactctctctcccaaccacccacctccagtcctgtgaaaattgcccacaatcaccc

SEQ ID NO: 699038 - DNA, 243 bp, Homo sapiens
ccccgctcggtcggtgggcacttccatgacacggacctcgcggttcaccaggcctgcagggatggagaccttccagatctgggctgctgtggtggtgccttctggagaggacgccgagatacacgtgccacgtgcagtatgaggggctaccccagcgcgtcagcctgagatggaagccggcttccctcctcaccatcctcatcgtcgttgcttcattgcttcactggttctcattaggagctg

SEQ ID NO: 699039 - DNA, 196 bp, Homo sapiens
  misc_feature (54)..(54): n is a, c, g, or t
ggtgacggagtcaactttgtgggcaatcaatcaatcaaacatgctatctcaggnagctctaataaaaactttagacaccaaaaatcagaaagatcctggtggacatcggcgtacgccacatcatacagaggtacaatgcccaccccatggaaagaaacggaaatccataaacctcccaactcgccccatggctcct

SEQ ID NO: 699040 - DNA, 120 bp, Homo sapiens
gaggacgcatgccaagacgaagagaaccagaaacgatgccaggacctcggcgccttcaccgagagcatgttgtcttcggtgcccctaacataccacaccctaactgcccactcaaagcgt

SEQ ID NO: 699041 - DNA, 697 bp, Homo sapiens
  misc_feature (7)..(7): n is a, c, g, or t
  misc_feature (69)..(69): n is a, c, g, or t
  misc_feature (88)..(88): n is a, c, g, or t
  misc_feature (131)..(131): n is a, c, g, or t
  misc_feature (145)..(145): n is a, c, g, or t
  misc_feature (160)..(160): n is a, c, g, or t
  misc_feature (188)..(189): n is a, c, g, or t
  misc_feature (231)..(231): n is a, c, g, or t
  misc_feature (256)..(256): n is a, c, g, or t
  misc_feature (277)..(277): n is a, c, g, or t
  misc_feature (332)..(332): n is a, c, g, or t
  misc_feature (336)..(336): n is a, c, g, or t
  misc_feature (352)..(355): n is a, c, g, or t
  misc_feature (363)..(363): n is a, c, g, or t
  misc_feature (377)..(377): n is a, c, g, or t
  misc_feature (383)..(383): n is a, c, g, or t
  misc_feature (395)..(395): n is a, c, g, or t
  misc_feature (399)..(399): n is a, c, g, or t
  misc_feature (419)..(419): n is a, c, g, or t
  misc_feature (429)..(429): n is a, c, g, or t
  misc_feature (440)..(440): n is a, c, g, or t
  misc_feature (443)..(443): n is a, c, g, or t
  misc_feature (556)..(556): n is a, c, g, or t
  misc_feature (558)..(558): n is a, c, g, or t
  misc_feature (572)..(572): n is a, c, g, or t
  misc_feature (578)..(579): n is a, c, g, or t
  misc_feature (583)..(583): n is a, c, g, or t
  misc_feature (589)..(589): n is a, c, g, or t
  misc_feature (591)..(591): n is a, c, g, or t
  misc_feature (603)..(603): n is a, c, g, or t
gggacantgtcccagctgccacctagactcggagctccatccaaacctccagcgaagacatcccaggtngggtgaatcttccagcccngggggtggaggtagtaaaggccatggccatgcagaaaatcttngcccgggaaatctnggactccagggcaancccacggtggaggtggacctgcacacgnncaagggccgattccgagcagctgtgcccagtggggctcccangggtatctatgaggctctggaactnagagacggagacaaaggccgntacctggggaaaggagtcctgaaggctgtggagaacatcaacagtactctgggcnctgntctgctgcaaaagaannnnaagcgtgnggatcaggaaaaangttganaaatttatgatngagntagatgggaccgagaataangtccaagttnggggccaatgncancctgggcgtgtccctgggacgtgtgtaaggcggggagcagttgccaaagggggtccccctgtaccggccacatcgcagattctcgctgggaacccttgaacctcatactcccnanggccagccttccantgtganncacngggggncnccatgctggaancaagcaggaccaggcaggaagtgcaatgagtctggcatgctgggagcccgccccgtacagggagggccatgcgcctcggagccgaaggctgaca

SEQ ID NO: 699042 - DNA, 1462 bp, Homo sapiens
  misc_feature (323)..(323): n is a, c, g, or t
tctcttttacctttttaaatggggtctcttcaaaacttcgtggtgacaaattttgtgggctcaagttgtgttctccattataaaaagatccgtgatttcttaaacaacttaattaactttaaaacgtgccacacgcaaaacagaaacccaaaggtggctccacaaaacaatttcctccttattccttctcgtaagaggcgtttcaccgaagtgctatgtgctctcactccatgtacacgcgagctcttattctacttcacttacacactataagagtgcgccccaagtgtaacacacaagacgagctctcgtggagacacccngcttcttctccccaccccgtgtcttataaacagagtgtggcgcgcgtgcgcgacggctattccacgcgcgctctaccctatctctccatttttatacccctctctcgtggagcccactcccgtggggcccagccaccctgtgcgcgcgcccccttgcgccccgaccctctctcgaccccagcccctttctcgtgtgtctccccaccgtgccatatgtcggagtgacacaaccccccagcgccgacaacacgtgactccgcgaccctccaatctatcccccgccacacgagccaaaaaggccgacaacccaaaagagcgggtgggcaccagcctcctgaacacagaccctcttccaaaccaccacatgtgggcgtctttgcccgagggaaaaccgccactatcgtcaccccccttggggcccgtgcctctcacccgcgcatctcctccccgcacctttcacgggcgcccccttcttctcccccggccctcttctaccccccgagaccggggggcgcactccaccttctttctcccccttctcagccctccggcccacaacggggccccacccatcgcgcgggacacaataaacctcccgtggcctcccccacgtactaaggacagcccagggaaacagccccaagcggggcgccgctgacccacacacaagcaggggggggccatgggacccccccggaagtagtcccaacaaggcacccggagccatgtcaacaacacgcaccgaccccctccacaaccacgagcccaaactgcaaactcacagcaaccccaccgaaagcgcggccgggcccttcaacccccccccactcaccgttgaccccaattatgagacacccccgccgcccgcgctcctcacaacaccctcgcccgcacaccagcactctcggccgccccccgcgccacaccgccgaggtcgtccgccaccccgcaccaacccacctcccgacgggcacacagcaccccccgcgcgccccaccccgcccacccacggcgccgaaccacccgcccggcgcacaaaagacacaaacaacagaacaagacacaggtcacatacaggcaccacaaaaacacacacgcggagaaacacctaaacaaccacaaccacacagcacatgcaa

SEQ ID NO: 699043 - DNA, 224 bp, Homo sapiens
gttcgtaagggctgaggatttttggtccgaacgcttcctgcttcctgacttaacgtgttcgctctcgccagaggaacaagtcggtcaggaagcccgcgcgcaacaacatggcttttaaggataccggaaaaacacccgtggagccggagtggacaattaaccgaattcgaataccctaagaagggaacgtaaaatcttggaaaggtgtgtgctgattgataaga

SEQ ID NO: 699044 - DNA, 860 bp, Homo sapiens
  misc_feature (201)..(201): n is a, c, g, or t
  misc_feature (384)..(384): n is a, c, g, or t
tgcgaacattgtgctgcgactggtgcggagcgtgcgggccctgttctgacacccgtgctcgcggtcccgttatcccgccgcggccctgcccgaccgatggccctggcatctggggcgtgggcgccgtccgtagctctgtcgacgactggatccggctcgtggctcttcggttgcgtacactttcgcagagaagacgctagntgtgtaatcaacggtaaattgcgcgttggagacagtgcgcgagaatcaagctaattcttgcgacaggtaagcgttgggtagattgtatgctatctattgctagatctccctgaacgttgggtacaaaattgatagcaaacatagagtgagcgttggatgcgtatctggatagctgtgaaagcntgctaagtagaacgctctatttcttccttttagttcagggagggatagtacagcttgaacacttacattggagaaagctgcgttgactgggacacatagttccatgtgagctctgggtagacgcgaatagttcttagtatactcgagacgactgcgtgttggtctgaatgccaagacttgatcgtcttgaggtaagccttgcagaacctagagtgaacttactgacgtgaagaatcttatgacgagaatactcatatattctacttgatggatgtgagaaaatggaatctctctatgataaacctatgtaatgagttatacgccaaggccatgcagaagtttgtctgtacacttacgtggtggattagaacgacttgagactttgagactttaagtagtaccgatggtggcccaaatgatcactgttaccatcttggtactgatgagagttgccttaactttctatgatttgatta

SEQ ID NO: 699045 - DNA, 377 bp, Homo sapiens
  misc_feature (48)..(48): n is a, c, g, or t
  misc_feature (84)..(84): n is a, c, g, or t
  misc_feature (134)..(134): n is a, c, g, or t
  misc_feature (240)..(240): n is a, c, g, or t
tatatatgcataacttacatatccaaaatgtatatattttgaggtatnaaaagtacgtgctcaaggtattggtcactcctcaanttgttttccttgaaacaaaatgaaggtataaatatttcagccgggcgcgngtgtcacgcctgtaatcccagcactttgagaggccgaggcgggtggatcatgaggtcaggagatcgagaccatcctggctaacaaggtgaaaccccgtctctactnaaaatacaaaaaattagccaggcgcagtggcgggcgcctgtagtcccagctactcgggaggctgaggcaggagaatggcgtgaacccgggaagtggagcttgcagtgagctgagattgcgccactgcagtccgcagt

SEQ ID NO: 699046 - DNA, 303 bp, Homo sapiens
  misc_feature (32)..(32): n is a, c, g, or t
  misc_feature (48)..(48): n is a, c, g, or t
  misc_feature (177)..(177): n is a, c, g, or t
  misc_feature (183)..(183): n is a, c, g, or t
  misc_feature (218)..(218): n is a, c, g, or t
  misc_feature (285)..(285): n is a, c, g, or t
tcccccccaatgtcctgccttgatgaaaaatnccccacaatcgccccnggggtcctaccttttcctgcagtccttgtgtagatttgggctgcccacccccaaaaccccaaagggatgtctgcccatggagtacacccacccacgccccggtactgagaagtattttcagtgattcgncccagnccagatttcaacacatggttcccatacaggaaggnctctctgccccaggctttatccaaactttatacttggcataaggtgcaaggtaatccagagctatgngcttcaataccctgtctc

SEQ ID NO: 699047 - DNA, 110 bp, Homo sapiens
ccccccgggggttttttgcctgggggaaggggattttgatggaaaattttagccctggttgctttttgttccccgcccctggccctaaaagcctttttgttggatgggga

SEQ ID NO: 699048 - DNA, 369 bp, Homo sapiens
  misc_feature (26)..(26): n is a, c, g, or t
  misc_feature (28)..(28): n is a, c, g, or t
  misc_feature (32)..(32): n is a, c, g, or t
  misc_feature (74)..(74): n is a, c, g, or t
  misc_feature (107)..(107): n is a, c, g, or t
  misc_feature (153)..(153): n is a, c, g, or t
  misc_feature (202)..(202): n is a, c, g, or t
  misc_feature (255)..(255): n is a, c, g, or t
  misc_feature (315)..(315): n is a, c, g, or t
  misc_feature (320)..(320): n is a, c, g, or t
  misc_feature (349)..(349): n is a, c, g, or t
  misc_feature (363)..(363): n is a, c, g, or t
taagacctccccacccccgctggggncngtgnggtgctccagtccggaaatgaaggaatagcccgaggaccggntggggtttatttaaactgttctgtgtgggtctngggagggagagcaccttaatattattggggttggttggggtggggnaggatctcagccataaagtgccagtttgcgttagttctcactgtctccntggtctgtgcatgcccgtgctctggggatgcacggcggcagggtgggggaggnaggttcctcgcaggtctcagcccgggacagggtcttgcaagcagcctcctgggcaagtcngtaanggttgcggcgtgatgtcttcaataaattnaggttttatttggnaaaaaa

SEQ ID NO: 699049 - DNA, 110 bp, Homo sapiens
tagcggagtgtgcagctactcggagctgaggcaggagatgcttacccggagcgagtgtagtgagcgaatcacgcactgactcagctggcacagatgaactctgtctcaaa

SEQ ID NO: 699050 - DNA, 391 bp, Homo sapiens
tccaattttttaaaaaggaaaatttaaatactggggcttactggggaaatatttcagtgggtgacccgggcgtggggggtccccctgttccccagcatcttgggaaggccaaggcgggtggatccacccgaggccaggatgttcaaaaccagcctgggccaactatgggtgaaacgcctggttatcttattaaaagacaaaaaattagctggggctgtgggtgggtactattcgcctgtataccccagctaacactgggaggctgagagtcaggagaaatcacttgaactgtgggaggcagagtgttcgcatgtgagatgtgggaataacgcagcaccaattggccctcccaagcctaggtggacaagatatggagaacttcttatttccc

SEQ ID NO: 699051 - DNA, 701 bp, Homo sapiens
  misc_feature (231)..(231): n is a, c, g, or t
  misc_feature (253)..(253): n is a, c, g, or t
  misc_feature (313)..(313): n is a, c, g, or t
  misc_feature (375)..(375): n is a, c, g, or t
  misc_feature (395)..(395): n is a, c, g, or t
  misc_feature (420)..(420): n is a, c, g, or t
  misc_feature (438)..(438): n is a, c, g, or t
  misc_feature (440)..(440): n is a, c, g, or t
  misc_feature (469)..(469): n is a, c, g, or t
  misc_feature (522)..(522): n is a, c, g, or t
  misc_feature (524)..(524): n is a, c, g, or t
  misc_feature (538)..(538): n is a, c, g, or t
ccacgcgtcgccgggccgaggcgatggctgccctgggcgctcctcagccctggggtcctggtgcggaccgggcacaccgtgctgacctggggaatcacgctggtgctcttcctgcacgataccgagctgcggatggaggagcaggggagctgctctgccctcacttctgtctggtgctgggtcctgctgtctactcgctgtgtactcatggaccctggtagtgaatgtgcnccccagctcaggaggagctcanagagacagacagcatggttctccagcatccctcttcgggctgaatactgctggtgctgcngcctgaggtcggactgcgtgagtgcgcgttgcgtcgccgtacgacacactgccctggatggngaactgtgtgggagagcgcnacaccactcttgtggtctacctggngctgcagctggtggtgcntntgtggggcctgtacctggcatggtcaggnctccggttcttccagccctggggtctgtggttgcggtccagcgggctcctgtncncaccttcctgctgntgtccctctctcgttggggccagctgctcctcgtctcgcacctgacctggtggccagaaaccaccacctgggaattcactcttaaacggatggctaattcggcagggccgacccttgacgggctgacgaactgccacttctgggtgcccggccgggaccttgc

SEQ ID NO: 699052 - DNA, 317 bp, Homo sapiens
  misc_feature (144)..(144): n is a, c, g, or t
aaaaaaaccccttttttacccaaagcccccgggtgttaattagccccggggtttttttaaaaccggaaaaaaaaacttttggtgggggggggggtgggaggaagggatgggccccccctttttggggacccctttcaccccccnggggggtttttttttcccccccccttccccaggggaaaaaaatttcccttttgggaaaaaaccaaagcccaatttttcccttttttttttgggttttttttgggtttttaggatgggcctttttttttttaaattttttatatttttaattaaaaaaaacccttttttttgga

SEQ ID NO: 699053 - DNA, 269 bp, Homo sapiens
tagaggataccgtgatgttatacccaacactcgggaggctgaggcacaataatctcttgaacctaggaggtggaggttgcagtgagctgagattgtgccattgctctccagcctggtgacagagggagactctgtctcaaaaaaaaaaaaaaaggaaaggaaagaaaaagaagaaaaaaatattctccacggcaaccttggggaggcagattactatcactcctcatttagggacgactgaggaagtgggagtgcttcagagaggggca

SEQ ID NO: 699054 - DNA, 341 bp, Homo sapiens
ccccaaattttttggggggaaaaaaaaccccccggggtggggtagaacccgggggtgttttttttgtttttcccccccccaaaaagggatttacccctggggggaaagcccttgggggtttttttaattccgggggttttttttccccccccccccccggttaaaaccggggaacccggaaattttttgggggggtttttttttttttaaaaagggacttttccccgggggggggaaaaagtttttagggtttccgggggcccaaaaaaaggggccccgggcccctttacccccccttttgtttttttttttgggccctaaaagccccttttttttgggga

SEQ ID NO: 699055 - DNA, 278 bp, Homo sapiens
  misc_feature (54)..(54): n is a, c, g, or t
  misc_feature (77)..(77): n is a, c, g, or t
  misc_feature (101)..(101): n is a, c, g, or t
aagaacctcaggtgttacatcttggcgagccagacaggagactccagaaaaggntcaaagccatcaagctacaaatnatcttacaaatggaacctcaaatnagctcagctcacggcttctaccgaggacccctggttcaacccgctggtccctcaattaccctagaaaattcccctctggaggacaccaaactgcagggccccttcttcacccctaaccagcaggaagtagccagaacggacttgccacacggttcccaacagcagttgggggtgtcc

SEQ ID NO: 699056 - DNA, 1028 bp, Homo sapiens
  misc_feature (695)..(695): n is a, c, g, or t
  misc_feature (706)..(707): n is a, c, g, or t
  misc_feature (713)..(713): n is a, c, g, or t
  misc_feature (715)..(717): n is a, c, g, or t
  misc_feature (738)..(739): n is a, c, g, or t
  misc_feature (742)..(742): n is a, c, g, or t
  misc_feature (756)..(756): n is a, c, g, or t
  misc_feature (761)..(761): n is a, c, g, or t
  misc_feature (764)..(766): n is a, c, g, or t
  misc_feature (768)..(768): n is a, c, g, or t
  misc_feature (774)..(774): n is a, c, g, or t
  misc_feature (783)..(783): n is a, c, g, or t
  misc_feature (785)..(785): n is a, c, g, or t
  misc_feature (790)..(790): n is a, c, g, or t
  misc_feature (806)..(806): n is a, c, g, or t
  misc_feature (809)..(809): n is a, c, g, or t
  misc_feature (812)..(812): n is a, c, g, or t
aagggctgctcagaccaaggagagaggagcctaaggtcagcggaggacttggaggaggtagcgggcctggctgagtctctttctaaaagccgggatggggcagcagctgagctgggaagaggcggaggcggccggggagatggatgtggcggagttgcaggagtggtacaagaagtttgtcgtggagtgtcccagtgggacgctcttcatgcacgagttcaagcgcttcttcaaggtcacgggcaatgaggaggccagccagtatgtagagagcatgttccgagccttcgacaagaatggggacaacaccattgacttcctggagtatgtggcagccctgaacctcgtgctgaggggcagcctggaacacaagctcaagtggaccttcaagatctatgacaaggaccgaaatggctgcatcgaccgcctggaactcctggacattgtggaggcgatttacaagctgaagaaagcctgccgagcggagctggatctggaacaccagggccagctgctcacgcccgaggaggtggtggacaggatcttcctcctggtggacgagaatggagacggccagctgtctctgaccgagttcatcgagggcgcccgtcgcgataagtgggtaatgaagatgctacaaatggatatcaaccaggctgctggatcacgcagcagaaggcggagaagcgccatgntctgagagccnnggaccntnnnggcccaaatccctcaagatcnnccnggtcccgggttctngcggnggnnngntggtgnacctgtccngnggggnggacccgaagggccancanggngcgaactccacggggtcaaaactctttaagaaacctactggtgggcccaagtactggccagtggcctgggaagggacaaggaagggggcacacaaataggagccaaaaggccgagcgaggtccacgtgaaagacgtaaagcaggggtagcaacccccactcacacggaggagacaacgacgacaagagcgcaaccacggaggggtggcccgacaaa

SEQ ID NO: 699057 - DNA, 141 bp, Homo sapiens
agtgctcatagatacctctacagacagaatcatcctataacaggatcacaaccttatccctctgtactatcactgtaccccctaaatttcctaccctctgaacctgacctcttgcctacctgccacggtgcgttggaccaa

SEQ ID NO: 699058 - DNA, 411 bp, Homo sapiens
atagcctctagcttgcattggcacttctagctcagaagattcttcatccagtaatgagcgggtcacacgaatgagcgttaagcttctctgctacaggtgcagggttatgccctcacatatctgccttctcccttgcggccaagtgagatccgatgtgctcaaaggtgtgagtccgcattcttagacttccaaccatgtgtacttgtccagaacagcctgaatgtggctccggtagtcaggttgctccacagtcaggttcttgaccgctgtcttcggcatcatatgctgtgcatcgttcaggtgcggggcaatgttctcgcacacccgtttcctctgttcctcatagagcgcgttcacataatatgcgcgcacgtgagcaacgttctcctccttgacagtgttaaatctccg

SEQ ID NO: 699059 - DNA, 108 bp, Homo sapiens
gcaggtcaaaagacccttatacttttatgatgccactatgcttctgccagatgctttggagcagggtgcttctgggctggagctttttgacccttctgtcgtcttctc

SEQ ID NO: 699060 - DNA, 604 bp, Homo sapiens
ccagtatagtcctcatatagaaaagatctacataggtatgtacaatgagcttataatcggttaaatatttgatatgatgcaaggttgatttttaatcaaacttctatttctcagtggaaaatgctctcttcatcagaggtggtagagtttcccctacatcaaacatcatgaccaagaggtgggtctatggagagaacaccaatcaggtatacggcccgtctgattataatattcctttgaaacagaacggctcccaagtatatctggtaatgctccaaaaatagcccctcccaaccaggccacacaattagactttggcaggtggagtatgacttcgaaatgtcttagtgccaagtgcttatttatatttgggtttatctaccaaataccttattcctgcaagcaatctgtggagaactcctggcaacatagaagtgccacctatgactaccaaattctctgctagttgcttcctggtgtctatcggacactgtataagggaatccaatattacagtggcaactgattgctctgcatcatacttgtcaaaaagactttccacaagtgaatctctgattgatccaaggctctgtaaatctctctc

SEQ ID NO: 699061 - DNA, 247 bp, Homo sapiens
ttagacatggaatcaacacctaagtgttcatcaatagatgaatggatttttaaaatgtggcacatatacacaatggaatactattcagccataaaaagaaatgaaaaccctgtcatttgtgacaacatggatgaaacttatagacaatgttaagtgaattaagccaagcacagaaggacaaatactgcatgatctcactccctacctggaaatttttaaaaaattgatttttagaaggagaatagta

SEQ ID NO: 699062 - DNA, 103 bp, Homo sapiens
tccaccttactaccagacaacctatagccgaagccatttacccagataaagtataggcgatagaaatagaaacctggcgcacatagatactagtaccgcaagg

SEQ ID NO: 699063 - DNA, 479 bp, Homo sapiens
gaagacttctatagagtccctttctatagaacttaattacattagtcaggagacacccagaaagaaagagcccatacgtttcaatcttaggcataataagcttgatagatcttcagaaaaatcccttttaccacagaactcccccactggaaaggattctgatagaattgatgtcagccctcacaaatgacgttgactgcctgctggatttctgttgactggtccggagtctgtactgcaagacccttgtgagcttccctagtctaagagtaggatgtctgctgaagtcatccatcaggttgaagaagcacctcatacagatgagaaggagatgctgctctttttgtgccgggatgttgctatagatgtggttccaccttgtgtcggcgaccttttggatacttttacgggaaagaagtaagctgtctgtcggggacttggttgaactggtctaccgagtgaggcgatttgaactgctc

SEQ ID NO: 699064 - DNA, 113 bp, Homo sapiens
aaaaaagtatcagctagggatgactctggaggatgagtatcatggttgggaggaaggattttttttaaatgtaaatgacccccatttaccagcccaatcaaagtcccttaagg

SEQ ID NO: 699065 - DNA, 867 bp, Homo sapiens
gatatctgtgcccacatgctcacagcagcattagtcacaatagccaaaaggaagaagcaactcaagtgtccatcagtgaatgagtagataagcaaaatatggtatatacaatagaatattattcagccttaaaaaggaaggaaaagctaacacaatgctatggtatggatgaaccttgaggacatgaggctaaatgaaatcagataatcacaaaaagacaaataccgtatgattccgtttataaatgaggtggacagagtagtcaaattcatacagactgtattaagccattcttgcattgctatgaagcagtacctgagactgggtaatttataaagagaataagtttaattggctcacagttctgcaggccggacacgaagcgtggggctgcatctgctcggcttctagggaggcctcaggaagcttccgatcgtgacagaaggcaagtggggagcaggcatggcacatggcgaaggctggagcaagtgagagaaagagtggcgggggaggagccacacacttttaaacaatcagatctcatgtgaactcagagcaagagcccactcatcaccaaaaggatgacccacgccattcataaaagatccacccccatgatcttatcactcctaccaggccccacctgcagcatttggggattacaattcaaccgtgagatttgggcaggaataaatattcaagctatatcagagaccgcaaaaaagaaatggtggctttccagggctgggaagaagggaaatgggaagtccgtgtttatttagggaccaagttccggtttggcagattgaaagagtctcaagatgctggggggatggtggtcacccgtgtatgttttactgggaaatt

SEQ ID NO: 699066 - DNA, 724 bp, Homo sapiens
  misc_feature (14)..(14): n is a, c, g, or t
  misc_feature (276)..(276): n is a, c, g, or t
  misc_feature (339)..(339): n is a, c, g, or t
  misc_feature (350)..(350): n is a, c, g, or t
  misc_feature (384)..(384): n is a, c, g, or t
  misc_feature (435)..(435): n is a, c, g, or t
  misc_feature (446)..(446): n is a, c, g, or t
  misc_feature (480)..(480): n is a, c, g, or t
  misc_feature (483)..(483): n is a, c, g, or t
  misc_feature (675)..(675): n is a, c, g, or t
  misc_feature (716)..(716): n is a, c, g, or t
aaccacaaagatgncttacttctatcaaatgatataagaagtgaatatgaactcttatagtgacaaaatgtttcattgcatatataacaaaattatacacaataatcctgtcaattataatgttactaaatcttgtgcccccaaattactaagcaggagtatgtaaaattgagaagtctaacgtatgacacgcttaactgatctctaacaagcgtttggagtgcaagaacattgaagagttcaaatctgaccaagatgttgatgttgcgataaganaattctctgctccccacctctaagttgccagccctcctagagctacctgtggagcaacctgcncagatacatcnaacatggagacagcactcgaagtagaattataangaagatcatcgtccatgttcaacattattataaccctacattttgtgcatntagtgtaagtntataagcatatcaatattaaaaagcaagccagcngantttggaattcatccaatccaaatgcggcatcgttcaataccatccatgatgctgcttacatgtctcgatcccacttaactatcttgggctgtgacaaagtcacatggttcacacggcagcgtatactcatctcttttcagtgggggtgaattcagtgtagtacaaaagatagaaagaccagtccttgctganagacaagtctgaatgctccactttttcaattctctctccantcttcagt

SEQ ID NO: 699067 - DNA, 657 bp, Homo sapiens
  misc_feature (397)..(398): n is a, c, g, or t
  misc_feature (403)..(403): n is a, c, g, or t
  misc_feature (406)..(406): n is a, c, g, or t
  misc_feature (410)..(410): n is a, c, g, or t
  misc_feature (416)..(416): n is a, c, g, or t
  misc_feature (428)..(428): n is a, c, g, or t
  misc_feature (438)..(438): n is a, c, g, or t
  misc_feature (446)..(446): n is a, c, g, or t
  misc_feature (465)..(465): n is a, c, g, or t
  misc_feature (474)..(474): n is a, c, g, or t
  misc_feature (493)..(493): n is a, c, g, or t
  misc_feature (507)..(507): n is a, c, g, or t
  misc_feature (519)..(519): n is a, c, g, or t
  misc_feature (568)..(568): n is a, c, g, or t
agaagggtgatggaggtggcgccagcggcgtgcggcggcgtgtggtggtggcagctggtggcggtggcagtggtggtggcggtgtgcgtgtgtgcatgcatgccggccaccagccccccaagagaacacaacttctgaggcatgtgcctgccccagggggaatgcactggaccctgagacgactggcgatgatggaatgtggctcctgacacacatgctgaggaatgagctggaacacatgccatgtgacacatgacgctggatgatgtgggccttgcagtaagcagcctgacaggagcaattggccaccatgcatgtgtgaatgtggcatctgctgccccagtgcctcaatgcctgggcacccaaccctggatgccaccccccagctgggtacaanngaaanctngcancaggcngcctcctccccnaacgcatccnagccagtnccatgtcctctgcaggtgnagttactgncctactccttccccatganccctccctgtctgnactgcccaggcnagagggtagagcacaggggtttccccatactacctcccctccccagganactcccaggcttgggttttttctataggtttggcggggggccacagggaggggaccctgacaataaagagattggatcccaacctgttc

SEQ ID NO: 699068 - DNA, 289 bp, Homo sapiens
tcaatcatcttgtctagtgcatattttttttatttttacacccaagtgccttatccccaagatcaatgtcctctcagcagatggccaagttttcttgtgtagttaaaaaagattctcccagaatgggcatttagacagtgccaggggaaccttcaaataatatttttccattcacaagaggagataagcaaccatatgagggagaggtcacacgtgtattcccctctcatcccagaaataggccttggccccattaaatgtgtggtggaatgccgcagaacaggacaca

SEQ ID NO: 699069 - DNA, 189 bp, Homo sapiens
ccgggcccctgtgcgtgcacaggtctctgttcctacccgcgaaactcaagaatcattcaggaccatctctcttctctctccacattcttctccctgggtaagcttctgcctcatccacagccgcagattatcatctgtctatcgacaacttctcatcttcatctctagcccagacctgagcaagccagg

SEQ ID NO: 699070 - DNA, 267 bp, Homo sapiens
agtcaggtattatcagatcaccctccaggacctctacggcggcccgcagctcacggcagcgtcatggtccaccagtggcagcagatcatccacgacaaccaccctctgtcctggctccagggcgtctttctggatccccagctcagccttcccgtactccagggaataggagcccactgagtgcgggctggcagcttcccccgctttcggattagcacgcagcccagtccaagctcctgggccaggtaggggccaaagaggaagcct

SEQ ID NO: 699071 - DNA, 1497 bp, Homo sapiens
  misc_feature (626)..(626): n is a, c, g, or t
  misc_feature (629)..(629): n is a, c, g, or t
  misc_feature (636)..(636): n is a, c, g, or t
  misc_feature (648)..(648): n is a, c, g, or t
  misc_feature (678)..(678): n is a, c, g, or t
  misc_feature (689)..(690): n is a, c, g, or t
  misc_feature (714)..(714): n is a, c, g, or t
cggccacgtggggagtaggcccggtgggggtgcgcgccgccgcggtccgtccctcctcatagggagagtgcatggggttgtgcggtcctagccgggtcggccccgttggcgccggcggtggcattcccgggaaaggggattacactgaggcgctggggccgccggggtttttcgtgctccggaactcgcctaggtaggccctccgctccgggtgggggacgtccaagggaccgagttggtccccagccactcttgaggggcaaggagcctcgaaaaaggtttgggttggtggtagacctggcttggacgaagaccggccagagggggactgtgaagcgaggagaagacgtgagggaaggtaccagccagaaccaagttggggtcccttcgccgagccggggttaaaaagaacctcctgacccacccccgccccacctacccctgagcgagccccacagggggtgaaatggggccgggaaacatgggcacagccttgcgcccggtgagacgtgtccctggcgaatccccgagtgataagcagccccctgcgccactcctgggccttcccctactccgccaagcaaggtccctcctcagccagttagttatgggattctcccccctgnccnccagganatctttgttgtnaaaaatatgttgtttcccatcaaggtcatnttctgtttttnntttttttttttaattctttttttnttccttctttcctctttttttcctctctctcctcctaatacacactttttttagtaaggggaataccatgatgtcgctctagcccggcccctgtagacgcgaccccggggcctgctgttaaaaccactgtagaatcgagagcgggagctgttgtagttggtggtcggcgcgtacggctcgtggaaacccggtcgtgttgtcgtgttgtcgatcctggtctgttggttcgtttgggatcaccttgatttgcccttcctctaaatagggactcatctaaggccaaggaagtgcctcactgactctttgtctgagaactctatatacgcaaacctttggatggccactaaatttgtcacacagtatggtaacacggttgactgaaccacagccatgaaagtgagcttcagctctctgctgttgcaccatagtcacttgccaacatagatggaaccggcatcagctcatcttctcctcaatgacatgatcgcgggccagcattgcctggaggtgactatattcatctgcttctctacctcgttctgtagctcctttagcttctcagcttcttcctccatctccctgacgcttgatagctcagctagcggtcctcaatggcgcgtcccggtcacctcgaccagtccggctcctcctcctcctcttggctgccggggctcccgaaccagcccagggcccggagctccgggggggcgcggggccggggcggctcctcttcgggctcgggctccggctcgggctccagcagcacgtcctcaggctcccccc

SEQ ID NO: 699072 - DNA, 624 bp, Homo sapiens
aaagactaactagaattccaaaaaaaaaaaaaaataaaaaaaaaaaaggggcaatataaaaaaaaaaaaaaaaaaaaaaaaaaaaaataaaaaaaaaaaaaacaaaaataaaacaaaaacaaaaaaaaataaaaaaaactaaaaaaataaaaaaaacaaaacaaaaaaaaaaaaaaaataacactcctccccccctatcccccttcccttttaaacctccccattttttacccctcccccccattttcccttctttttccaattttcccttttacgcttccttttaacattcaccttccccttttttaacaccctttacctttcaaaacccctgccttacccaatttaaatccctttctaaaaattcccttttttccaatcttcgctataaccataaaccccctctcccctctcccctttcatattccccaccctaatttccaattgaacatttttaaccttttatttttttataaatctccctttaaatttttcttcaataatatatcccccaactgcctttcatctttctctcatttttaaacataatcccctttttacacactctttctccaccctcaaatccctcacctccttttacggactctcccctttcctcctccg

SEQ ID NO: 699073 - DNA, 366 bp, Homo sapiens
  misc_feature (295)..(295): n is a, c, g, or t
ggtccccaatggggttcctttaggaaggacacaccagaaattgggcattgccccttcacccaaaatgggtttcggcaaggtaaaaatccccaaacctttttttggtggtttcttcaagaagaagaagctgggggagccccccccccaggaaggggggttttttgccccagaaaaagagaaatttgggttttcggggcggggcaagtttgttcaaaaagctgggggctcccaaattttcccaaaaatcaaaggttttcctcgggtccaggggtccctgggatttgggtttgttttnacgaagggaatttatcctcccaaatgggggttttaaatgttttaaggccctaattaaataggtggctccca

SEQ ID NO: 699074 - DNA, 1368 bp, Homo sapiens
  misc_feature (497)..(497): n is a, c, g, or t
  misc_feature (500)..(500): n is a, c, g, or t
  misc_feature (507)..(507): n is a, c, g, or t
  misc_feature (519)..(519): n is a, c, g, or t
  misc_feature (549)..(549): n is a, c, g, or t
  misc_feature (560)..(561): n is a, c, g, or t
  misc_feature (585)..(585): n is a, c, g, or t
gatcttctgtcatcccccatggctgaaaacaggctttacgcccggtaaggcttgcccactctgtcactggctgctcacatgccgctctggacatgatctgtctggccacaggaagattgaaagacattcgatccccaggagctgaagtattctctatgacaactgataactttttccctgacattaaccggattttgtcctcaaaagcgccccagtcattttaagttactcagaggatttccattcctctatccacttgagcccatttaggagattccacccatccgaccagaattgatgactgctccttgagcctgaggtacatagccaatcccgatggcccatatccattttctggtccatccgacactaaggtctgccccggtgctgctgcagtgccatacaatcctcccgctggcacatactcacatattctttgtttgtctgtagaaagtgtgcccaggaccatgttcatagacaagtgttctcccccctgnccnccagganatctttgttgtnaaaaatatgttgtttcccatcaaggtcatnttctgtttttnntttttttttttaattctttttttnttccttctttcctctttttttcctctctctcctcctaatacacactttttttagtaaggggaataccatgatgtcgctctagcccggcccctgtagacgcgaccccggggcctgctgttaaaaccactgtagaatcgagagcgggagctgttgtagttggtggtcggcgcgtacggctcgtggaaacccggtcgtgttgtcgtgttgtcgatcctggtctgttggttcgtttgggatcaccttgatttgcccttcctctaaatagggactcatctaaggccaaggaagtgcctcactgactctttgtctgagaactctatatacgcaaacctttggatggccactaaatttgtcacacagtatggtaacacggttgactgaaccacagccatgaaagtgagcttcagctctctgctgttgcaccatagtcacttgccaacatagatggaaccggcatcagctcatcttctcctcaatgacatgatcgcgggccagcattgcctggaggtgactatattcatctgcttctctacctcgttctgtagctcctttagcttctcagcttcttcctccatctccctgacgcttgatagctcagctagcggtcctcaatggcgcgtcccggtcacctcgaccagtccggctcctcctcctcctcttggctgccggggctcccgaaccagcccagggcccggagctccgggggggcgcggggccggggcggctcctcttcgggctcgggctccggctcgggctccagcagcacgtcctcaggctcccccc

SEQ ID NO: 699075 - DNA, 931 bp, Homo sapiens
atgccgccaactagatactaccgtatggcccatcataattagccgcatactcgttacactatggcgctcagtcaccgcaagctaaaaatatgaaatgacaaacgtaccagctactgtcaccatcatacaaagcccattaacgagaataaagaagaatgaaaaaaattgaatggtctggggtgcagaacattggcgcgcacgaggaaatgtatttagagacccaaattggtgaggggtgggagggagcaaggaggaattcttcggaggatagtggaggaaccaaaggagggtggtcgtgatggaaaggcggggagatatgacaggggggggtggttttaataggatttataatgacgcccggcggtgcgcacatacagagggggcgtttgcgagacactgctcaggaatcgtgtccccataggaaagacggaacgcggggacctcttaaaccaagaggctactggccataagaaagtgcacgaacttactaatgtaaagcaccacccctcattgtggaccaaccaaggaaccttaatggccggaagcccccgaggttgctgcccggccctgaccacaggggattggtcacagccaggtacagggcaactttccagttaccccaagaaattgcgtgaggcttttaccattcaaccaaggtgatggcatgttgatatgaaccgaatcttgttgggaacctaccctaccgtggaagacggcagttgaccaaggagattaaggggaaaacggccccacaatgctacggggccggtggacatgttcgcctaacccgaggacaatcgtaacgcccacttctcggaccgtgtttacagagccttccagagaggctcccttgaaacctggtctaatgaatcctaatttcctttcttcaacccttctttaattgtcctcgatcataagacctcagtctcaa

SEQ ID NO: 699076 - DNA, 127 bp, Homo sapiens
  misc_feature (37)..(38): n is a, c, g, or t
atagcaggttgtttggttacttcaagcaaccaaagcnncatggctgccggagacagtgatacaggcagcagcttcatgagatattgcagtttaatccagtcatctacaagcacaatctgcccatcag

SEQ ID NO: 699077 - DNA, 255 bp, Homo sapiens
  misc_feature (73)..(73): n is a, c, g, or t
cccagagacgcttggggggctgagaaaggggataaacttccttgccccacccagggggagtggtgggccaggnctgggggcgagttccctgaccccaaaagggatcccagacacatttctaagtcgtctcagaaaaatggcatctggttgagctcatgcctgtaatcccagcatttggggaggcggaggcaggcggcacatttgcagctcgggagtccaagcacagcctgagcaagatagggagacccccccatc

SEQ ID NO: 699078 - DNA, 244 bp, Homo sapiens
ctttttttttttccccccccccccccccggggggggccctttttttttttaaccccccagaaaaggtttttggcccccccctttttttttggaggtcccccccccgcccccttttttttttcccaaccccccggggtttccccgggtccccaaaggggaattttttccccccctttttttttcccttttttgaaaaaaaaaacccgggggttttttttttttccccccttttttgccctgggga

SEQ ID NO: 699079 - DNA, 987 bp, Homo sapiens
tgtattcgttcccaggtccaaatgggcgcaatctggggagctagtcaatcaagtaagtcctgtccgcgcgggtgtccaggggtacatgcacttgaggccagggaaccttcaggcaatgggattagtgcccgtcggcttctacaattgccctcatggcggacaaacatgaagaagatcatcctctcgaacagccaagctctttcttggaggaccatggttaagaaaccccagagctctggaagacacggacttgagccggctctacacagcacacatccctgatgcagactttgatcgacaatcgctgactgaggaagtttcacggctataacctccctgaagggaatactactgaggaagaaagttgcatggcggtacctgcacagggatttgtatgttcctctcactgctggtgtaatggcagctgacgagtccgttggtgcaatgaaacgtcttcgtaaccatgtccaataatctccgttcagagaaacgagagaacagtcaatgatttgctgcctgcctctgcatgggggccatcattgggcattctatgagggctctgtgcttgttcccctcgagcccctgagcatggatggataagctggtggtggagtactgccaacgcgcatttgccaatgggagcgtaacaagttgcaagtgctcgtgacacggagcaggtggaggccagaccatggagtagaggcctccggactcatggcacgctccagcagccgctcctctggaagctgcgtccgcctcaccgccctgtattcaaggtctcccatctccctcgagtgacctaggatgctgacgtacacaccattcagcagggggcactccaccatgcacaccatgtgctcggagtaggcagcatcttcaatgggagctcacaggctatatgtttgtgcacttagttacaggttttatccattgcagttgttaggcatggtagacaagtgacagagttcttgccctctgtataccccc

SEQ ID NO: 699080 - DNA, 356 bp, Homo sapiens
tggatgctgtcggatgtccaggcctccaggaaccccagcaggcgggtacagtggttcctgcctagtatcccagcactttgggaggccacaggggcgtatcacctgaggtcggaacgttccgagaccagcgtggtcgacacagtgaaaccccatctctactatcaatataaaaattagcctagtgagtggtgtgcgcacgtctgtaatcccaactactcatgacgcctaggcaggagaattgcttgaaccccgggaggcggcagtctcagtgagccaagatcacgccagcacattccagcctgggccacagggtgagactctgtctccgataaaaaaagaaacccaagcagttggga

SEQ ID NO: 699081 - DNA, 204 bp, Homo sapiens
taaatcattgcgtattgactttttattattaattactgttcataatttgtttaaaccaaaagacatttcacacagacaaaattctaatgcatcccatgtaaatgtttacatccattttattccttactcgactgtaagacttatcatttaactttaaatttttttttttttacatctcaaaaatatatgtgcaataattagagc

SEQ ID NO: 699082 - DNA, 710 bp, Homo sapiens
agcccatctacatggaactcaacagcaggcagaattaattatggtgacagaagtcataacggtgggccgggtacactcctgcagtcccagccactcaggaggccgaggcaggaagatcccttgaacccgtgaggtcaaggctgcagtgagctgtgatcgtgccaccgcactccagcctgggcgacagagcacaagcctgcgctgcgacctcataaaagaggtcacttcttaacagtaggtgtaggtgttagctgaaaataaatacaagcaaaactttttgggttttagaaaaatgttccacattttgatttgagtggtagtcatatgggtgaacaatgtgtaaaatgtaccaagtatacagttagatttatgcattttactgcatttctattgaagattatgttcaattttagaaaataaaattctggaagaaaatatgactggaggccaaaagcctttcaaaaatttgatttataaaagtacctaagataggcaacaatgacacaacacacatgtcacagggaatcccagagaaggcttccgaagtcatgtggtactgaattgctatgactgagaaacaaggtctcttgagatataacagaattgacgcatatgctgaatgcgcactctatggacctggggggtaaatcaactcagaatagccgacactgagacacagtataatttccggttttaagatataatacagc

SEQ ID NO: 699083 - DNA, 855 bp, Homo sapiens
ccacgcgtcggcagcagcagcaccaatggcagcggtggcgagtggcagcagtggcccaaaggcaggagcagcagacaagagtgcagtggtggctgccgccgacaccagcctcagatggcagatgacacaccaccccccgagctgtcggaacaatgagcggtatcataccgtgagcccctcaacaagatgcctgctgcctggtcccgccctgcatctcccacatactcattcttatttggcagcagatggtggtagttggcggtggcagcatgacatgggcgcgagagtctcgctgacaaggccacatgcagtgcatgcagaccgctgcctccactgtattggccaatcgggcatgacctggctggacggccatgcgcggtggacaaaagcaaccctacctcaaacgcacaaaagtcgcgtgctgtggccagacctgctgcagcacaggcacagagccgggccacggcagctggcagacgagggacagcctgacgctgcagccagttaggcccacgtcccaccgagattcctgaagcgcgtggtgcagcgagcatagtcccggctgctgaagagaagggagggattgcatggccctgcactgacaatggaagggctgtggcaggtgacagaaggcacctcaatggggccagtccgaattcacccctaacatgggccgctacacacaaataaagcacaaggccgtcttcaattcatgaaccccccgagcaggatggaggtacccgtggccagagagacgcgaccggaaccagggcgcggccctggcctgagataccaccaatgcacagggaacaagaatgcccacaggacaatccagaatcacggcacaaagacagc

SEQ ID NO: 699084 - DNA, 334 bp, Homo sapiens
  misc_feature (9)..(9): n is a, c, g, or t
attcgcggncgcgtcgacctacatatggccagccagttttcccagcaccatttattaaatagggaatcctttccccatttcttgttttagtcaggtttgtcaaagatcagatggttgtagatgtgtggtattatttatgagggctctgtcctgttccattggtctacatctctgttttggtaccagtaccatgttgctttggttactgtagccttgtagtatagtttgaagtcaggtagcgtgatgcctccagcttaggtcgacgcggccgcgaattcaaggaaaaggaggagggcccgcgcaattgggaacgggacctgcaggcagtgccatc

SEQ ID NO: 699085 - DNA, 592 bp, Homo sapiens
gaaaggcgcacgatgcgcgtctgaccgcgactgtggaccaagttgatgacacctcattatgttgtgcgctgtagcaaaccccaggctcccatcacaggtcacatgaatagtctattcgccatcagaatatggtagcagcacagaactcaaccttcctgaaactgcaaagtcggtcacgctcagtaacttgcaacctggtgtccagtataacatcactatctatgctgtggacgaaaatcaggacattacacctgtcgtgattcaacaggaaaccactgtcaccccaggctcagattcagtgccctctcccaggtacctgccgttggcggaagttacagacgtgagggtcaccatcatgtgaacccgcctgagagtgcagtgaccggctaccgtgtggatgtgatccccgtcaacctgcctggcgagcacggatagaggctgcccatcaggaggaacacctttgcagaagtcaccgggctgtcccctggggtcacctattacttcaaagtctatgcagtgagccatgggagggagagcaagcctctgactgctcaacagagaagcaaactggatgccgcactaacctccagtt

SEQ ID NO: 699086 - DNA, 105 bp, Homo sapiens
aatagatataaatatgcattctctttcagctgtatgtcttaaattattcttgaatgtactgtgatgtcaataaagctctttagttcattttttgttaaactcttg

SEQ ID NO: 699087 - DNA, 430 bp, Homo sapiens
  misc_feature (4)..(4): n is a, c, g, or t
  misc_feature (20)..(20): n is a, c, g, or t
  misc_feature (64)..(64): n is a, c, g, or t
  misc_feature (99)..(99): n is a, c, g, or t
  misc_feature (420)..(420): n is a, c, g, or t
  misc_feature (422)..(422): n is a, c, g, or t
  misc_feature (426)..(428): n is a, c, g, or t
tgtnccccagagccaacagnaggcagattcacaccctcactctgcagcacaagagattgaggtnaggccctgcacccccgccccagtgagctgaagggnccctggcatagaaaagctgaattgagaggcctcagtgagttgggcatggtggctcacacctgcaatcccagcactttaggaggctgaggcaggtggatcacttgaggcccaggagttcagggacagccctggttaacatggggaaactctgtttccactaaaaaattcaaaattagctgggcgtggtggcacatgcctgtaatcccaactactcaggaggctgaggcaggagaatcgcttgaacccaggaggtggaggttgcggtgagtcgagatcgcaccactgcacttcagcctgggtgagagtggactctgtctcatnancttnnntt

SEQ ID NO: 699088 - DNA, 267 bp, Homo sapiens
  misc_feature (1)..(1): n is a, c, g, or t
  misc_feature (20)..(20): n is a, c, g, or t
  misc_feature (27)..(27): n is a, c, g, or t
  misc_feature (33)..(33): n is a, c, g, or t
  misc_feature (50)..(50): n is a, c, g, or t
  misc_feature (71)..(71): n is a, c, g, or t
  misc_feature (73)..(73): n is a, c, g, or t
  misc_feature (75)..(75): n is a, c, g, or t
  misc_feature (80)..(80): n is a, c, g, or t
  misc_feature (105)..(105): n is a, c, g, or t
  misc_feature (119)..(120): n is a, c, g, or t
  misc_feature (123)..(123): n is a, c, g, or t
  misc_feature (128)..(128): n is a, c, g, or t
  misc_feature (137)..(137): n is a, c, g, or t
  misc_feature (142)..(142): n is a, c, g, or t
  misc_feature (151)..(151): n is a, c, g, or t
  misc_feature (154)..(154): n is a, c, g, or t
  misc_feature (160)..(160): n is a, c, g, or t
  misc_feature (184)..(184): n is a, c, g, or t
  misc_feature (200)..(200): n is a, c, g, or t
  misc_feature (211)..(211): n is a, c, g, or t
  misc_feature (218)..(219): n is a, c, g, or t
  misc_feature (235)..(235): n is a, c, g, or t
ngaacgcgcggtgtctcggngcctctncgcgcnggaagatggcggaacangctaccaagtccgtgctgttngngngtccnggtaacatttgtcgatcacccattngagaagcagttttnnggngactngataaccgntcganaacgatgtnagnggatcngagggtagacagcgcggcaacttncgggtattagataggnaaccccctggnctacccnnggccagagctgtcatngcagaggcacggcattcccatcgaggcacgtt

SEQ ID NO: 699089 - DNA, 116 bp, Homo sapiens
ctctcaaagtaaaagaaaaaaggccatgcttgtccagctctggggctcacttagcctgggggttggctcagtaacatgatacgctctgtactcagcctggttacagagtagaccct

SEQ ID NO: 699090 - DNA, 254 bp, Homo sapiens
  misc_feature (223)..(223): n is a, c, g, or t
gacgctatcaggcgagggccatagtgaaccatacctattcagttccgcggtcagggccgaagcccatgggacccagggcccgattaactagggaagccggcaatgcgaacggggaaccaagggggccgcccacctagcccgcaacccccccatggaagggcccgccgagagcccactgcacacattccaacagcacaacaagtcccttttgtattattttgtncccccacccgccccgccagccaccccgccct

SEQ ID NO: 699091 - DNA, 1570 bp, Homo sapiens
  misc_feature (1570)..(1570): n is a, c, g, or t
ggacctcgcggcaggagcgggattaccggggatcacgggacacccggcacggggacacgggactacaacgttcccggacgaacacggacacacggacgacgcgtgggactacgtaaacacgacgacagaccgcggacgacagacgtgacgacggaccctaccaacgacaccggacggaccagggggctgcccgcataggtccacgagggggacgcggacaacaacaggcacagcaaaacggacaaagcgatgtgtagagggacgcggacaaaggacagtcacgcaccgatgagactagcgacgcacactggagaacacgtcttaaatgacaagaccaggactcttctgatactgggacagtgaccacaacactatgccctacattcacaaccacggacttggatcacatattactaggtaccagatccccatgggaccttatactgaacggaaacccgttgaaaagacaaacacctatcagcgcacgattataccatgggtgggataccaatttgaaccttacaggacaggaccagaccaactgggaccatgtagcaatacctatacactcttgaacagccagttcccacacagtacagacactgacactgccattatcataccagaggttggttattgcaatcgccattacacaaagctatcccttggacaaacacacagactaaatattggaccatttgcgaaacaacactatggcacccagaagtgtgggaaacaggggcccctccaaattaggatacccgtatgtggcgaccaacacactacatacctattacctacctagccagggaaatcattgagtctggacaagtgtcctgtagacacactcccccaaaagagacataccctaccagagcaagagaccttgtccccatttaacacaagtaagcaacatcgtatcggccagcccacgggaatcagcacggaggaccggagagacacatagtggaggcgactggacagcgcacgagcaacaacaaataactaccagtagacacagcacagtgcgcgcaacattaccacacgcgactaacagacggacacatacacacaggacaaaactaaaacaagcaacaccagacaaacacggctgacccgacaagacacggcactcggaggaattatcaaaaccaccacgagagtgagggatcggaaccaccacacaccggtgcaaagacatgaacacgacagacacggacaccgcgcccaacaccggcacaaagcagcgggcgataacccggaggaccgccccagcacccgagggagtcacagagcaatgcccaccaggcacgacagtagccaccacacaggcaagacaccacaggagtacacaccgacatgagacaaggacacaccgaggaaggcgaacgacaacgagaagacgagagaagaagtacacagacgcaccaagccgcagcagcgcagcgacgacccacacgacgaagagcaagagaagtagcataaaaagacagaacgaaaaacaacagggagaacgcgaactagacaaagagagagaacagacagtgaagtaacaaaaagcagcacagcn

SEQ ID NO: 699092 - DNA, 265 bp, Homo sapiens
  misc_feature (114)..(114): n is a, c, g, or t
  misc_feature (204)..(204): n is a, c, g, or t
actctagaggattccctttcatttaggccaatcttctcatgctcatctgattgggaagttcatcagatttaagttccgaagtcctttgatcagcagactcgtaaaattggggtnctattgctccaacagtcataaattccccatctgctgtcctgtatgtcgtatagaagggtgctccaacatccaacatgtccagtcctcgangtgcttcccacagactcaagtttcgtgagttttccacataagataactttagtattgcttg

SEQ ID NO: 699093 - DNA, 356 bp, Homo sapiens
taatcgagctcggtaccgtattgggctgtcgtgctgacttgagaatgtggcttcctctgaggcacaagcactgcgggtactcacccatctcaacgagctgcaatgccgcttgcccaggcgattggtggtcacttggcttgccttgctgccaatttggacatcagtagaactgtcagaatgaggagatcctgaacagtctcaaggtatgtccgtcctgggggtggataccaggccaccttcacccttgtccaaaaatgtgaggtgaatgggcagaacgagcatcctgtcttcgcctacctgaaggacaagctcccctacccttatgatgacccattttcccgcacgaccgcccaaaa

SEQ ID NO: 699094 - DNA, 975 bp, Homo sapiens
  misc_feature (64)..(64): n is a, c, g, or t
  misc_feature (529)..(529): n is a, c, g, or t
  misc_feature (908)..(908): n is a, c, g, or t
  misc_feature (948)..(948): n is a, c, g, or t
agagatttgcggttgctgctttccttatttgttattttgtcttggttattataatttttctttnttcgtccgtaccgcgttctttgttttctctgatcttttgtttgttttttattgttatatgctttttttttttctttttcatattaagaaaaaccgagctaggactagaccaacgagccaccaccacttcacccccccgccccccactccatacacccccctaccaacatacaagagagataaagaacaactagagaaacacagagacgcgaacataccacaacgacctacaaatacgacacatacccaacaatattttaaagttcatcagtgccctctgccgctggtggcgtcgcgctgcgctggcgcgcgctccctctaccagcatcgttaagtggtccacttagtttgttttgtagttcagcgtatatgatttcacgcactaagcaggcggagtgtttcgtcgcatgtgctgatgaccgtgctcgtctcatacacataatgggcgtcatggagagcagctcgnggatgtgagagagcgcggtagcgcggagatatgagcccgcggcgagaggggtacaaccacacaacgagaagaccggacctgaagtgctagcggatcgaataatctacatcaggccctagccgcacatcgaatgctgaggtcgcactatcagctcgctcagagtcgtgatggttgccaaagatcgcatttatgtattcggcgtcggcgcgaggaagcgtgttcttcatgcatccacacacagtcgagcggtgtacccgaggagtgtaacagatagagagatgattcctcctcgcgctttcatacaacctacgaactacgccttcacccgcactatcatccagtcgtactacatactactcctgatctcgacgaggatatntatcgtatgtcgtggtaggtgtttcgaaggagcgcgtgtntgatcgtcactgcatgctctctcgccg

SEQ ID NO: 699095 - DNA, 335 bp, Homo sapiens
tgaggatccctcgctattcatcggcacccaatggatgcatgcagtctctcaagtcccgaggctccgtgcatcgacacagtttgcctggcatgacatttctactgttgcctttaccattgagggtatccagtatctccgtgatttccttcatctgcccccggatattgtgcctgccaccctacgccgtctccgtccagagactggccggcctcggcctacggtctgtagggtgagcgacctgcgagactcacaagatgtgaagctgacagagatccctacacgaccgagtgctcgtgtccacctgggtgtcccatgaatagcgagggtaccgatct

SEQ ID NO: 699096 - DNA, 1603 bp, Homo sapiens
  misc_feature (457)..(457): n is a, c, g, or t
gaactgtggatagcaatggtgtgatcacagtaaagacctgacttcacgggcctcaaaggaccctacaggattgagagggagggtgagaagcaggagctgtgggaatagtatctgatcgacaagtgtttacccgccactgcgcagccagtgcaggagagacggatgccgagtgaaacgcgtcgaagttgttcaagggatctattatggccggatcaatggagtatctcgagcagctctcgtaggcaccggacttgtggagatgaactggtgcaccagtgttggcccttcacgggcgtcatttcgtaaatactggcagacgtgtcgtgtacacggacgcaaacggccttatagagatactgagctagagtcgtcctacggtcgcacgtctccttttgataggaagttggcacgaacctagttcgacgttggttccaagcacccagtcgattccaaggcnatggtcgctctcagagtaggtaacgaggagggacacttgcaaccaaagcgataggtccacttgggcctggactgggcactaaatgggtggcttcaactttcatcgcttacgctcaattgcaactggttgatgacacgcgctttactttctccttcgcagtgacgggagttgacaattccttccttgactgccaacgtgccccgggcagtgttgagccatagtaggacttcgtactctggttgaacgcgcttctcgtgcttcgacctgtgggcaacttcttcttggagcaagaagtgttagcgctgcttgctgagaaaggggctatattcgatgggcattgctacgagtgtggctaggtcgctggactcacattcgcaggggtctccaacaaacaactccttggaacaaggtcttccccatcgttggggaaagaacccttggttgggaaggtcgtatgtgggccaccgggttggggctttgacatgccttaggaacagcaatgggtattcacaccaagttcgtggctggagtatgcttcctcggggcacaccttggcagtgtgatacccttcataccggtaattgttaccggggaattaccttaggggaagttcgcatatcacatggggggtggcaacacgtgccttgtagtgcccggtgttttgtgggcacattgcgggcaacacaggtatgtacacgatacagggtgcgacctggatgaacacactttaccaggcgttttgaacaattggtctgtgcggcacagtctgcatgtgccctttcactggaagagtctgatagctcctcccgtgtatgtacaacaagcgagtaccgatatgtagggttgagtaccccggcctgacaagtgggataacgcacagggggaggagtcccagtaccacaaacggggaaacagaggccaacccgagcaacacaaggaagcacaagtgagcagggcccgggaaacaccacaggggagacataataggccccgtgagaacaccgggcgtgatataaatcagaccggtggcacaaagaaacgacagcgaagggagtatacagacgagaacaccagccagcatagcacgaagcactggggtacgcacaacaaggaagccggacacgaacaacaggaccacactaacag

SEQ ID NO: 699097 - DNA, 355 bp, Homo sapiens
  misc_feature (252)..(253): n is a, c, g, or t
  misc_feature (270)..(271): n is a, c, g, or t
cgtatcctgacatgatgatggaccccccgatttgttacattacacgaccaatatctcgccactatagaccatcttacacagcgacatcaaggacacccacatccccaaatatgcatgcgcctatgaccatcgagcaggccgatgcctactgacttcgagccgcccagcacccaaaacagcagagacctcagaaaacacgtaatagagcaggacactgcaaattaataaacgcatgctttacacattaccccnncctccccctccccctcnncccctgcacccatgaacaagacttcgaaaattgaacgataaaccccaaagagatccaaccttcagacccttgaagaaccccggg

SEQ ID NO: 699098 - DNA, 425 bp, Homo sapiens
ggggttattgtatcctgcaagaggagcacctctttggtctaacttgattaccacacgatgccccttttccttgaggatgtttcagagcagctttccctgtctgtccatctggtagagggtctcgtgcaaaaggatcacacccccaatgctctggttgatggacctgtccacagagaagaggatttctcgaaagtgccggcggttctgtccagtgttttccccgttgatcctctccaggcggttccccatggtaccatcagattcatgggcagccaggatcgcctttccgtgggcaacaatgctatgggcaatttttgagagctccttgttctgctcctgggtgaggtctggcaatcggtgggccatggtgccaggtagctcgcgagagaagagtcgtcctatatatcgaaagctgtgggtgaggc

SEQ ID NO: 699099 - DNA, 169 bp, Homo sapiens
tagaggatcctttcaatcgcatgtattaatcagaggtacatgagcaggctcactcatagggaataattgccaacaaacacttttgggaagcctgggaccatggctctcgcaggaatctgtgacatctccaggccatcatttgagtcctgccttctcaaagtacttgtga

SEQ ID NO: 699100 - DNA, 256 bp, Homo sapiens
agcggggaacaatcacttgactcctgagctcaagtgattctcctgcctcagccttcccagtagctgagactactcgtgtgcaccactgcgcccacctaggctctgatcctaacttgctataggctacttgtgtggcctataacctatagctgtttttttgagatgtagtcttgctctgtcacccaggctggagtgcagtggtgcaatcctggctcgctgcaacctctgcctcccaggttcaagtgattgtcccgct

SEQ ID NO: 699101 - DNA, 113 bp, Homo sapiens
aggttgtgaacccctccccccaacttttcatgttttttaaaggcattttggttttttaaaatctgtacagcaaaagcaactttttctgtcaaataaaaatgagaaatgcagga

SEQ ID NO: 699102 - DNA, 172 bp, Homo sapiens
tcccccttcccttattctccaacacttttggaaacactctttttcccgggcaaaaaacatagagaatacatttccccccgatccccatatcgagtacctgttctcgatcaatctccgcatgttttcataaaaaaagttttcccccacatcaaataagatacacaaacataca

SEQ ID NO: 699103 - DNA, 328 bp, Homo sapiens
ggccaaccctcttccccagggaaaggagaaaagagaaaacaggctgggcccggtggctcactcctgtaatcccagcactttgggaggttgaggtgggcggatcacctgaggtcaggagtttgagaccagcctggccaacgtggtgaaaccccatctctactaaaaaaaattacaaaaattagccgggagtggtggtgggcacctgtaatcccagttactcgggaggctgaggcaagagaatctcttgagctcaggaggcagaggttgcagtgagctgagattgcgccactgcactccagcctgggtgacagagggagactccgtccca

SEQ ID NO: 699104 - DNA, 503 bp, Homo sapiens
catatgcacctcagctctggactaagccagtcaagaaggcatgaataaacctcttcctaaaacaaaaatgatacaccgctatatcactattacaatggttaaaatccaaaacactgattatcacccagtcctggaaaggatgcaaagcagaaggagctcttgttcattgctgctgggaatgcaaaatgctatcagacactctggaagaaagtttggcagttacttacaaagctgaacatagtcttatatacaatccagcagtcatactcctagatatttaccctactgatttagaaatgtatgtccccactaaaacatgcacacgaatatttatagcagctttattccttatcgccgaaaaccagatgtctttcagtgggtgaactgatatcgtacatccgtacgatggaataatattcagtgattgaaagagaagtgagccatcaagccacaccgaggcgtggatgaatccgagatgcagactcctagctgaatcatctcta

SEQ ID NO: 699105 - DNA, 145 bp, Homo sapiens
acactcctatagcaacctggtggtcccccgctcccgggaggtcaccatataagatgccgaactatagtgcggacacccgatcggcatagcgcactacagcccagaactcctggactcaagcgatcctccagcctcagacctcccg

SEQ ID NO: 699106 - DNA, 290 bp, Homo sapiens
agctactgctgagccatgctaacaaaactaaacctttcactttctttaatagtcaaaattaccattcatgaatcattgtcataacaagtgcattcaagtacattaccacttatttcaaatcacaaccaccaattttgaacacaatccaactttgaaaagctgccatcaagttttttttttcaatccctgcattacatttctatttattcactgtggtcaccatgaaaaattgtattttcagcagcactactcactgctccaatttcttttttcaaacacacaacacacaa

SEQ ID NO: 699107 - DNA, 590 bp, Homo sapiens
tagcatcttctcaattggacagtacatctgtggacaaagcagtacctgaaacagaagatgtgcaggcttcagtatcagacacagcacagcagccattctgaacgagcaaagtcagagtctcgttgtaaaaacgcgtaatacaaacaaagagaatcgctgtttcatgtgcatggaagaaagtgggacttactgggtttgaattgccggtgtggaaatgtttactgtggtgtacacctgttactcagatgtacacaattgctcttacaattacaaagccgatgctgctgagaaaatcagatagaagaaaagtccagtagattgttggtgacaaagatccaaacatgatttgaactcctgctggaatacaaaattcttgagcatctgcaaactagaaattgacttgaggttaattgttgaccatagctcatggggaatgtagagcagggtatcttgcatgctcatcggaagaagtagatattggatatgggtatagattgagaaaatgagtctgaacgatttatttccgtggcaatgctctgtggctagatggagacttaaactttacaggtattatccttttaagatcagtg

SEQ ID NO: 699108 - DNA, 302 bp, Homo sapiens
gaatcatgaagtattcattaaacgtaacggaacacctgcttgagaagctgactgcattgcactgggcggtgcttttgggagcagacctcctgagggtagaaggccgctcaggtttattcctgccggagctatggcaccagggttacagccgagcatgggggttgaactactcatcagagcctgtgccccacagacagagcccactacattgatgatgataagttcagcagagtttgccatgacctggagggccgctggtctttgggatgagctgccgcgtgataggacatctgacgaaagca

SEQ ID NO: 699109 - DNA, 709 bp, Homo sapiens
ccaacaggacccacaaattcctggagaaagccgaagggctctgtaaaatcagtggtgtgattggtccctaccgagagaccgtggactctggtagagaagaaagtcaatgagataaaagacatccgtggcccagagcccagcagcggaaccacgtgaaaaacattggcattctcttcgaggaggcagagaaactaagccaaagatgtcacagaaagagatggcgcaggtagaagtgaaattaactgatacagcttcacagagtaacagcacagctggagagctcggcgcactgcaggcagaagcagagagccttgacaagaccgtgaaggagctggcagaacagctggagtttatcaaaaactccgatattcagggcgccttggatagcatcaccaagtatttccagatgtctcttgaggcagagaagcgggtgaatgcctccagccacagaccccaacagcactgtggagcagtctgccctcacgcgagacagagtagaagatctgagtgtggagcgagagtctccgttcaaggagcagcacggaggaacaggcacgcctccttggacgaacgtggccggcaaaactgcaaagtctcgacctgtcggctggttgcacagatgacctgtggaacacctccagggctgactgtgctgaaagtgaatggtggtggcccaaactgcagaactgacgaaggagagcagaagtgt

SEQ ID NO: 699110 - DNA, 405 bp, Homo sapiens
atggaatggaatggaatcaacccgagtacaggggaatggaatggaatggaatgcaatggaatggaatcatccgtaatggaatggaaaggaatggaatggaatggaatggaatggaatggaatggaatggaatggaatcaactcgattgcaatcgaatggaatggaatggaattaacccgaatagaatggaatggaatggaatggaacggaacggaacggaacggaatggaatggaatggaatggaatgcggaatggaatggaatgtaatggaatggaatggtatgcactgctataatcacctcatgaacattgtgttatagaccactctagtagtctaagtataacttacctgccggtcactttttgccgttacggagtttgatcttacccgtcccgccccctct

SEQ ID NO: 699111 - DNA, 341 bp, Homo sapiens
gaaaaaagaaaagaagaaattggggttaaaaaacaccgtaataccttacccatccttaacccatttttaactgtacagtcccagtagtgttaactgtatgcatattgctgtgccacagatatctagaggcttttcaccttacaaaactgaaactctattacccactgaagaacaagttcccattttcccctcacacagcccctgtttctatgagtttgactacttttaatacctcatgtaagtggaatcatacaatatttgtcatttggcttatttcacttagcataagtccactaggttcatccatattgtagcatgtcacaaaatttccttcttaaggc

SEQ ID NO: 699112 - DNA, 192 bp, Homo sapiens
gtgcgtatggctgttacctcaactggctgttacctacaactggctgttacctacaactggctgttacctcaatggctgttacctacatggctgtcacctcaatggctgtacctccatggctgttacctaaatggctgttacctacctggctgtaggttggctgagaatttaaacatgcccgcaacaaatcca

SEQ ID NO: 699113 - DNA, 696 bp, Homo sapiens
gcaagatactctaatcactacattgcttattctatataaactacccataagcctttaacctttaaagaaaaatgaaaaaggttagtgtttgggggccggggtgaggactgaccgcttcataatggccagtacgtctgagctgagatatgtttcaattaaacctttcgatatttctcaaggccctattctctgctgtctccccctcccactaccccgatcctttggctgaagctacgtgcggaaagataatggggcgaattctggccactcccctgtgtgaccctgccttcgagttttccttacacagttagtgcatttccttgtgttaccacgcatggggaagcaaaacgcatggcctcaagaatgctagcctcgtaccgtgagcgtcctgcgtgtggctatgcctgccgtctgactcataggcatagttgcgtgtgccttcttagcattgaatcccgcggtgtcgcacgttctttgtggcagtagcgtacggaaagaaccggtaaaggacgttccttgcgcagtagagaggttgggaggataagccatgactgaatgacacaaggggtaggacgttgtggaacgtactgactttgagcaccgctgatcctcccagttgttgctcacacaggtgtctcggcctccacgtgtaagatcacgatgcctggccctcatcgttcaagaggctatcacccg

SEQ ID NO: 699114 - DNA, 435 bp, Homo sapiens
  misc_feature (335)..(335): n is a, c, g, or t
cacgacgtgcggcttgacggcgcatagttcgctgacttcaccgatggtgaaatagcgcttggcgggaatgggcggcaacgtgatgcgctcgctcgatttatccgacatgcaatggacggacgggtttcaggccgggccggcggtggttggagtaggatggcgcgccgacttggcgcgcagcagcagcatacagactggccgcgggcgcggcaatggaccgcgcggctgtccgtcgtcagctggggacgccgggcgcgaggccggcgcgttcctccaccaggctcttgagcttctggctggcgtggaaggtcaccacgcggcgagcggtgatcggnatgatttcgccagtcttcggattgcggccgggacgctgcggcttgtcccccaactggaagttgccgaagccggacagcttgacgctgtcgccctgctcca

SEQ ID NO: 699115 - DNA, 496 bp, Homo sapiens
atttttttatcaggttaaaatcaaaggccttaattgtatgtttgctttacgaagatccaagggatctgttttttatttttttcattccagggccttaaaaaagactaaatttttaaagacagttgtggtgggatcaatttttaataaccaaaaagtatgtttcattgaagtttttgaaaaataaattatggatccctgtttacccctgctccaaaggaaaaggtaaaaatccacagttttttcaacaggggaggttaaaattttgtccatctaagtaggttgcatttacaaaaaattactcattttaaaaaaaatttgttatttaaagggggattaaatttttttaaacaaacatttaaaaaaaatagaacggctttgtattttcccttagcatttaattttataaacattgagggttttttaaacaagatatttattataaatttagattattatggataaacctagaaataaataaaccagggtaaattttgga

SEQ ID NO: 699116 - DNA, 422 bp, Homo sapiens
  misc_feature (227)..(227): n is a, c, g, or t
  misc_feature (238)..(238): n is a, c, g, or t
  misc_feature (245)..(245): n is a, c, g, or t
  misc_feature (288)..(288): n is a, c, g, or t
  misc_feature (398)..(398): n is a, c, g, or t
tttgcagatggcacagactccatggataataggtaaacttggggccgggcgcagtggctcacgcctgtaatcccagtattttgggaggccgaggtggaaagatcgcttgagcccaggagttcaagaccagcctgggctacatgacgaaactccatctctatcaaaaatacaaaaaattaactaggtgtggtgctgcacgcctgtggtcccagctattcaggaggctnaggtgggaggntcatttnagcccagaggtagaggctgcagttagccatgatcatgccactncactctgggctgggtaacagagtgagatcctgtctcaaaaattaattaattaattaattaaaataaactaggtaaactttggataggcagtagatatttttgcccacctnaggagggactcagtcaagctgttt

SEQ ID NO: 699117 - DNA, 165 bp, Homo sapiens
ggatctgcaggtcttctgtctaagcctggcatcaccacaggtatgccctgctgcttctcttcatcagtctgagaaaaatattcttccgaaatgcgtgcgcccactcgatgcagtcactgcaggggtcggcagggattggccacatcagcacttttaatcagcatt

SEQ ID NO: 699118 - DNA, 164 bp, Homo sapiens
  misc_feature (151)..(151): n is a, c, g, or t
ttgcatggaattaaaaaactaaaaaagaaaaatatatgcatgtctcagactcttatttaagcaagtctctacaggaaccccaatgacaaccaaagtaaacacaaaataagacaccactgggaggaaatattagttactcacacctacagcntacaaaaatgtta

SEQ ID NO: 699119 - DNA, 349 bp, Homo sapiens
ggtaactgatacgatcgagctctgacccccgctggccaatgcacatatggcaaaagattttcttcattttttttttttgggaataatgggggtgcaaaagtgaaagggggggggaactctgggcacttaaggtggtcaagagccagggaatcaagggtcacagatatccacacggcattggagagcacagaaacctagaaacacaaagttgggagtagggtggtcattggtccggaagtacggcagagccttccgggccagaagaaacagataaactaagctgtctctgcataatcaagggatatgcagtgtgggtctgacaaggtgaagagacatcctatggcctcag

SEQ ID NO: 699120 - DNA, 250 bp, Homo sapiens
tagggggtctgctgttcgcacatccctccagcactcaggtcaggttcagcacagtcgggtcttgagtgcaccacacatcatgttgtgtcagcagttccagtggcagcagtgcgtccatcatgtgtgttccctcaggccagcattgtcagtggtgcaggtgtgttatcattcatcggcatgtcggcagtccaggcccggcatgtcagcagtccagggagggcatccctttcagcagtctgcacctgccagg

SEQ ID NO: 699121 - DNA, 423 bp, Homo sapiens
ccctcagtgtttagtatatctttttatatcatcacatatatacttttccaccgatgtgaatagaatatctggattaccgcaacaaatgtagtataagatctgctttgtttatttagaccaatgaaatttctgataaagcttgattatagttcatatgtttaaataaggagggtttaaatgttagtattatataataccttcttgaaggtgtggtgcttatttccctagcactatgtgcaagatgccgtcattggaaatgttcaagagaaagctatgaaacttcataatgcttctaattctgaaatggtaaatactctagtgtatattcttcaaattagacagattataaaaatggtgatacacgtaattagatgaaataattataataactagcattgcatttataaactcatttttacaaaa

SEQ ID NO: 699122 - DNA, 965 bp, Homo sapiens
cgatggataagtcttagtccgccgaagggggcttagccggacaggaatcgctaatcttaatgaataagtcgtatatagaccagatagtgattccccggctgacgtaactcaggctgatgaaccacgtctcccggacgtagataccaggcatcgccttcctcttcggtcgaatcacatcctggcttaatcagtagcttaaaccatgtgtagccagtgttacttaccgttcctgtcacctgtcgaaggaccatttaaactgaacctgacgtggtcgtactaccagaatggtatccatcacaccaccggctccgtgctgaccacgccgccggttgggctgcgtctgtatggttacgagtggggacctcgcgaaatgagacccggtagtagcgctcgccggttatcccgtggaccatgatagtaaaatttaaacatactcgctctcaccagcctgcaacgccagcctggcggggggcgaaaaagcagttcacattccaccggtcggggtgcgcaattcactgctgcccgggcatatcatagcaactgatggcaatacggtatatccgtgcgcctttgttgtaattcacatacacggtttgcatgacaaacgtgcaagctcgtgacggcaggcgaaagagtcaggattgggcgacccgaaaatcggacctgtgtcaaaggtggccgggcagccataacggaacccggctgtcaaggaagggcctcaggtcaaagttacgaccacagtggctgaaccatggaatactctctgaagggctggatacagcacaacaaagacgagaacaactaacgaaaggagggaaaggcgtaccaggggatccgaaacatgacgcggcaaacctgaggcccaggaggagagaataagcacgggggacacacacgaaagagcctaccgcggaaaccaccgcgagcagtgacccaggggaaagacagcaggcgggcacccacag

SEQ ID NO: 699123 - DNA, 327 bp, Homo sapiens
  misc_feature (67)..(67): n is a, c, g, or t
  misc_feature (104)..(104): n is a, c, g, or t
acatttcattaggggaagtagtaggaaataagagctctagaatcaaaatcagggaagcagcatggangacccttgaggacattatgctaagtgaaataagtcanccataagaagacaaatatggggtgattccacttctatgaggtctctaaagtagtcacatttatggaaacaaagtagaatgttggttaccaggggcctggggaggggaatggaaatgagttttagttttgcaaagaacagtgtgaatatacttaatactactgaactatacgctgaaaaatggtgaagatggtaaactttatgtcatgtgtttattaccacaat

SEQ ID NO: 699124 - DNA, 382 bp, Homo sapiens
taatgcgctgtacaaattcgcgtcatcatgcgtggtgaatagcccttgccctgatgcgcgtgtcaaccacgacggacatgatcaccacattcggcgcctcggccgaatgccctaccaactccttgaacgcctcgtctgacatcaccacatcaaaggcgcagccgttgttgataaaaacctgcgatttcgctgtctgcttccagaatcaggaacccttgcgggtactgggcaatacgcgtcgcggatttttcccagggtcgcggcttcgtcgccttcgtaggcggtggtttcgatttgaaagcagcgggcggcgtcggcggggcgagcattgcgcaagggtcagggtgggcatgggtatttccggagcagttccacttaaggc

SEQ ID NO: 699125 - DNA, 935 bp, Homo sapiens
gaattcctgtaatggctgcttcctagaaggtctgctgttgcactggtggctaccatcttaatgctcagtgatccggccgctccaggaagggaaaacttgcaagtgagatagaaattactatatattaccgagttctatgggaagcttcagtcaatcaagattcataacagcatgacctgtcagtttgaatgaccatggttgtcgctgtagtatcctaattgatttgctgtttttggttgcttgcctggttgtgattagcagtaaaaggcaggaagatgcgatatcgcccattctagtgagggtgtggtatctcgaggcacttacttgggtatttgtgcactgattgtgggtgtatattgtcaggagcacgaatataatctggacatgatggtggacatttcgaatatggggcttaactgaggtcaaactctcgattcacatgaagggtagacttttgctgcgttaatgaggctaaacccttggagattttggtgtgttgagaatggttccgaggaatcagtaaataatagggagtctaacatattgcattgtgtgtgcagtgatgtgggagtaaggatgcatttgtaaattggggaagaaaaatgttttctggtaggcaaataaatgcaggggaaaaatgaggctataattggtaggtgaggtagtcaaagaagtgagatgggtggattaacaggtgagtaatattataatcttagaattctctcaagcatgtgagttgggaggaagaaggtgtgggcagaatttggggagtaccagggggaaaaaactggacctggatgggcgcgggcttaaaaaatggggggggtcccaggaatattttggggtcagaggcggggaggattttcttgcgaattgaaagaggtggctctggtgggaaatggcaaaaaattggagatgtggcaacaaacgggcaa

SEQ ID NO: 699126 - DNA, 243 bp, Homo sapiens
  misc_feature (87)..(87): n is a, c, g, or t
cctgccgagttcctcctcctcctaagggaaaccttttcgtttacaggcattttaagcagccgcaaggtagatcccgccagtctagtntcttttcaagaatgagccttttcccccagtttcctaagtttaaaattcactgtctttcaagcagaggaccagccaaaccagacacgttgggcacagaatctcacgcctctaggctggtgtacatccattacccaggcagcatccattgatagtgaa

SEQ ID NO: 699127 - DNA, 910 bp, Homo sapiens
  misc_feature (806)..(806): n is a, c, g, or t
agagaaccaaatgtcagagttactagaccaaatagtggttaaaacctccaaaggaagtaatgtaatcttattcataatgggattaacagtattttgaggacattcatttcaaacactacctcagttactatagagtataaaaatctgtggtttaatccctcaaaagttaacagtaatttttttagtggtcttacacacacacacaccccctcccccatgcatcactatccctgtaccctcaccttggtcatctatcctgcaaataaggcttagttagtattggcctgaatgtttggtgtctgtgttttggtctctcttttgtacggtgacttttgaaaaaattgtgtttgtataccttatcatactctgcctaatttacacttacttgggggagatacatcagagctatggtggtgcaatcagtactacgtaaaaaaaaaaataaaagagcctacgcgttaaagtagtatagggcctaattggggtacctccaatagacttgccccatggaacgggtcctagatgacattttcctccgggaagacaactcgtctcggcaaatagtgcaaaccgttttgggcggacacaacatccacagtgccgaggcccaagtgttggttaaaacatgcaacgctgttcgcacaagattatttatttactaacacagacaagatggcaccggatgtgaatcatcacggaagactaagaaaatgttatttggaggaagaccgccctctattgaatacatgaagcagttgttcccggccgtatgacttaccccaaggtaatttgccaacagcggccgntctaaaagactcaaagagaataaaccttggcccctataaaaatgcgggcaacgggacaagaaacggcaactcggggcgcaccatgaacacttgtgccgacatta

SEQ ID NO: 699128 - DNA, 337 bp, Homo sapiens
tgagacagaatgtccctctgtcacccactctggagtgcaagggcacgatctcaactcactgcaacctctgcctgccaggttcaagcaattctcctgccctagtctcctgagtaactgggactacaggcatgcgccaccatgcctggctacttttttttgtatttttagtaaagacggggtttcaccatgttgaccaggctgatctccaactcctgacctcaagtgatccacctgcctgggcctcccaaagtgctgggattacaggtgttagccaccatgcccggcccataatggtaatttttaaatactctaaaaactgacccatcatacaaatgct

SEQ ID NO: 699129 - DNA, 531 bp, Homo sapiens
gcataaagtcaatgagtcatgtcgtatgtagtggcagaccgaacaaaataggactaaaatttttcaggggggctatctaattagggtagaaatacatttcaggtttccatttatggagcaaagccaaaactggcagagggtagaagcgtgatgtggacgcaaaaatagaaaatatcacttgatactttaggttgaaagaaaaagatgattgaggcaatggggcacgcctgctctgtctgactactcttgactcctttggcttcttagtgttttcaccatcctaaccactgctggccagtcccgtcacagctgccctctgctacctgctgcgctatatgtttggccactctcatgttcacatgaatcgtacaagacattaactcatgaagtcaaaggatactcatcaggtggcgaacagctgcacacataatgcacagctccacagtgacatataacagtgtgttcaaatacttcagacagacccttgccacttcgatgacaccaatcaaggacctgatccatgaccaacaa

SEQ ID NO: 699130 - DNA, 476 bp, Homo sapiens
gctttaggaatgatgtaacttggcaaagaaatcctaagtcaaaatttttttgatgataatctcagatcaactgagaatgatgccaatcaacccatgaatgtaatgtgtttcacatgtgggattctataattagtgcttactaatagaggtttcttcaagttactgaaatgagtttacaaactttaggtagctcaggaccctaccctcatgtatatgtgagatttcatttttataaatgccactgtcaaagggtcagatgttgctttttattctcgttgctaggatggtcaaaatcaacattttgatggttgtgttgaacagagcagtccagtcagatttaatccagtcatattaggatcatgccattagagaacagttccacaatcttttctaattcctcttttgtttctggatcataattaaaataatataggaacaaccttattaataaagcttgaattagtttgtctgtaaaa

SEQ ID NO: 699131 - DNA, 358 bp, Homo sapiens
cccactgaaccaatgagctgggactacaggcacatgccaccacacctagctaattttttgaatttttagtagaggtgaggtcttgctatgttgcccaggctgggaattgaacttctgagctcaagcaatcctccaagtttggcctcccaaagtgctgggattacaggcatgagccaccgtacctggtcttggcaagcttctttactgcaccctgttttatcagcagtctttgtgatctgtgtcttgtgaaaggagtcctggtgaactcctatctcataatcatgtctcattaggcccacctaccaatactgttgcattggggattaagttcccatcacatgctcattgggttccgatg

SEQ ID NO: 699132 - DNA, 613 bp, Homo sapiens
  misc_feature (175)..(175): n is a, c, g, or t
ggttggaaggcggggatagtgctcccctctcccttggtggaagggcacagaggggcatttccccaccttgtttttatcccggatggcaaccgtttcttctcaggagcccgcaagaatgttaagctcttgtgttgggatctccgccagtttggttacccattgtggtccctgggtngaaaggtgcccaccaatcagcgcatttatttcgatttggacccgcccgggcagttcctagtgagtggcagcacaagcgggcccgtttttgtttgggacccggacgggcctgccaataatggaaacccggaccctgtgttgagttttttcccccaaaaggattgccccaatggggtgagcctgccccctagcctcccttttttggccattgcctccggtcagggtgtgtttcctgagcccacaaaaagtggggacaaaggaaagaagttggcccttcccttgttttccagggcccaggtcccccttaaatgtcggcttcagctttggtggtgtgggggggggccaaactccagcatcccttatgttccccagggcaaaaaagggcagggaggaccggagggaggtgtgggtgagttaaaataaaaaggtttttttgtta

SEQ ID NO: 699133 - DNA, 231 bp, Homo sapiens
gccgggcgggggggaaaaacttttttggggttttaggggacccccccaaaaccccgggggcaaaattttttttccccttttgggccccaaaaggggccccaaaaaggtttgtccccccccaaaaaaaagggggtccccgggtaaaaaggggaaaatcccccccctttttttcccccctttttttgggggcctttgggccccggagaacccccaccgggggggggcccttga

SEQ ID NO: 699134 - DNA, 117 bp, Homo sapiens
gggggtttttttttttaacccaaaaaccagggggataaatttttttttgcctttttttttggaaaaaaccccaaaaaaactgtggggggggttaaaaaaaagaatttaattttttta

SEQ ID NO: 699135 - DNA, 222 bp, Homo sapiens
ggggacacccaacaatttttccatttctgcagagggaaactcagatgtccaaactaattttaacaaacgcattaagaggtttatttggggacaaggcccgcagtggcttttgccccaaaaagggggaaggaacaagggggtagatgattttttaggagggagggagttctcttcggtgttaaccataagcaccttcagctgtactagtgccattggaataat

SEQ ID NO: 699136 - DNA, 804 bp, Homo sapiens
  misc_feature (1)..(1): n is a, c, g, or t
ncaggggccatcgaatgtgaatgcacaagggagtatcacaaatattaagtgataattatctgacgagcctacactgaccagaatggagcaggggaataatgcatatctcacttctgagcccacgggcaagcagtctcaacaataaccaaaaaatgtgactttacgactggtagtgtggttctgaagtaaaaatattctcgccaggaatcaaaatttgccatgaggaaatacttcactgctggagaagcacagttgcgaagctcatcttctttattgatcatcatcgaagcaattgcaccatcattaaactcaaaagaagttcctccatccacaaccatacaggcatcccaataacgagaacgaacacaaaccctatgcggaaggaaatatctcattaaataggaatagttgtcttaataggttattgtaatcctggatcttaacctagcagatcatttggcctccattttaaaaatcaagttgttctctggtatgagaaaattagtcactatgtaaatatatgggtatattatgaaggtctcaaaacgttcaggatggcaccattcgctcaagcatttagcattaaagaagtgccgacctgactgaactcacaggctgttttatatgattaaatgctgaatactaacattacaatataaagattgaataagagggttactattttgatggaaatttggactgaaatttttaccttagttacgcatttcagagagtcgggtcctggaataatgttactgggtttccccaattatcatgcccattcaccgaaaaagttatgacaca

SEQ ID NO: 699137 - DNA, 836 bp, Homo sapiens
gacccctcgtcatggtgtacatatgttgtgagtaatagagcgactgaccatctctttctccagctatctgcgtactcgaccgaatagttcagtagaaggctggagcgactgagacggcaaaaggtatcgtacctctgctatgatgacctcgtaataggacagcgtgagagcttgctggtggagcggacgactgtggttagaccccttggacacgccttcacttgagcgctcccgaatttccatatcgctatgtaggactctgcattagcacgcaaagggcttacaccacgcattgtaaggtcataagagatcggttattagctcgccaatagggacgcagtggtcactagccgtggccccaccttgacgatttatgcgggtccaatgggcctttgtttaataaggcaaccgagtcggtccgtaaacccttgtccaggtaaagagggaaacaaggacgaagaaacactcaaggcctctccgtgtattgcgtgtgccacactgtgatgggtgactgcacacaccctacgtagaagggcgcctttctcttgaccacatgtgctggtcaacttatggatagataagaagagagaatgcacgaaaatgaaacgtggaaattaactagtctcagtgtgcacaccccttgcatgcatggcagtgacattaaccatgttttggacctttcccgaccgattgcgaatgagagaagcaaacacaagatagccatggctgaccaaggaggacaagatcccagcccgtacaccattgaaagacctaacattgccttcattccttgcacagaaaacacagaatgtagcatatgtgtgtgcacgacacca

SEQ ID NO: 699138 - DNA, 124 bp, Homo sapiens
  misc_feature (9)..(9): n is a, c, g, or t
actgctcgnctctgtgagagtgcagatattctgccgttattagagctcagagagatcatgcgagccttactgagagtcagtccgtctgactgcatctctcttgtactgtacaggtctgtctgtg

SEQ ID NO: 699139 - DNA, 764 bp, Homo sapiens
tgatcgtcgtgatgtggtgcttgtgggtggttcacgcggcgacatctttgggtgtgttggtgctttctgtgccctgtggtggtgatgtgcgccttgtatggtgcggcttttggtgaggcgcgtgtgtccagggggtgtgggagttttggcgggttttccgtgggtgtgttgtttgtcgcggcttggtgcggtgcggcccgtttgtggggtgggcggctgggggcgtgcacttcgtggggttgtcggctgtcgtgttgccgattcatggggtgctcggctctcgtgtgattggtatggtgtcgcctcctttgtgtcctgctggcttggtgcgagggagagccccgtgtgattcgcgtgtgctgtgggcagcgagccgccgcgttgcggaaggggtggttgctacccccgtgggggggttgggcctctctggggggcgtcccccaggtgtgggaggcgaggtttgggtgctccctctgggggggtttcgttctggaagacttgtcttagtaggtggagtgtattgataggccggtgtggttccaagatggacatgatgttgtggggtaggatataagttgtgccgctgcgaggtgtaggagtgttgggtagtatttgggagccccagagcggtccgccccaagatgttgtgacgaagtagggagaatgaagaccaatggtcgactttggggccccaacaacgaggtgagcccacgagaagaggtgccacgtgcccccccggtccctccaaaaaaacccccaaaaga

SEQ ID NO: 699140 - DNA, 80 bp, Homo sapiens
tgcgagatctgggacaaccccccgggtactatgggatatctggggccaagggacaatggtcaccgtctcttcagcctcca

SEQ ID NO: 699141 - DNA, 125 bp, Homo sapiens
ccatgtcgggcatatttgccattgatggggcatactgccatgtggggcgccactttctaattggcttggagatgctgcatgtccaagcaaattagaaagtgggccaaaaatgggggtaccgagct

SEQ ID NO: 699142 - DNA, 284 bp, Homo sapiens
  misc_feature (10)..(10): n is a, c, g, or t
  misc_feature (51)..(51): n is a, c, g, or t
cgcgggctgngctggagccgcacacgctctcctcccatgttaaatagcacntttagaaaaattcacaagtccccatccacaaaaaaaaagggagaaatttgtaaaatttcagggattaaaaatcccctttgaacaaaaaggaacatttgctggcctgggggggcatttaaatttctatagcaccagtgattccttccccacccaacccataaaatagatgtagcacctttggtataaaagggggagccgtttccaccctgccccaatccttaccaaaaaccacc

SEQ ID NO: 699143 - DNA, 151 bp, Homo sapiens
agataacgtcaggtaccagtagagtggcagcgctcgctagaaaaagatacctagaatatcgtggaagtagacatatgtaaactcgtatacaccaggccagaggcataggaaccagtatataggagaggctccagcaagcaccaggcaacag

SEQ ID NO: 699144 - DNA, 153 bp, Homo sapiens
  misc_feature (119)..(119): n is a, c, g, or t
gggcaagctgagatagtgaatggggggctggccggctggcccagaccaggccgaaccggaccagacaggaagcacaagcgcgaggagcatcaccttgtcctcgttcactctgctcgcgnactgggaggcccccgtaccccgacttgatccaag

SEQ ID NO: 699145 - DNA, 1020 bp, Homo sapiens
ctatcatcatcttgatgccaaaatttggtggagacagccataggaaattgcataacatgtcatgctatattattcttgttatgatcttcttctataatacatactcataccattacttaataacagttaaccagtccccatagaatttgacaagaattgctatgactgaaaggttgacgaggtcctaattaaaaactttagtcaatggcagtattcataacttagactgaaaatgcagttctgtagaggtaatcttcagagttatctgggaattatatacactccaggactatacacaggatgatggcatgcagcattcacaatgtctgtaaggttactgtgaagagcaatcagcggtctaagaacagcgttaccagtatgggaccctgtacacaatacccaagtcccgtcacgtcacggctcgcgtctatgcaaccaattgttagagacccataactatttaacacacggggtagtctgaactaacattagcaaatacgacgcaagttcgttatgcctgtgcgcaccacgcgttactcacaccttttaaaggttgggacgttatcaacctgggccaagtcactccacaactggtagaacaagacattttacaagaaaattacaaaagctacgggggtacccaaaggtttacatgggtattcaagatccttaaacaacaatatttcggtcgcacaataattggtctcactcacacacgaatagggcttggaagcgatttcgaccaacaaaaaatgagtgatcactacgagatatgaacgcctatataaaagagtaccgtaggtatttacaatggttggttgcaatagacagattgcaaaagattcggaaacgtgagagatatggaaaacatagagtagtcaacttaagaagaatagggaggacatagtacaactagataaggatacataatagcgaagaaaaggtaatacattttttagacattggacaagatttagaaaagtggtacaaacaatgaatagaataattagaagtaatctc

SEQ ID NO: 699146 - DNA, 196 bp, Homo sapiens
gtgtgaggatggagaagagagaccctggatagaatctgaaggaacctggaagaaaatctgggcatggggcacacacctgtagtcccagaaacttgggaagctgaggtaagatctctggagctcaagaggttgaggctgcagtgagccgatgtgccagtacactgcagcctgggtgacagagcaagaccctgtctca

SEQ ID NO: 699147 - DNA, 1021 bp, Homo sapiens
tggaaaatttttttttttccaaaaaaaaaaacccccaaaaacacaaagtttctccccccccccccggggggggatatgtgtgggggggggggggtgttctgttcccctctcccccctgtgggcccccgccccgtgtgtgtggtttggggcaccacaatggggggtttgtggggttagtggcgcgccaaaaacaataaagagtggtgtggcggtgtgtgtgtgttgtgtggcgagagagaacagagaggtgtgtgtcacaacaccggcgcgtgtgcgcgagagagcgcgcgcgcgcgagaggcggcgagagagcgtgcgcacacgagagacgcgaggctctccacgtcagaagtgtggtgagacacgaccccccgacgagagaggagtggtggcgagagaggcgccgcctcttctctcgcttagacaacctcatttgttgtctgttgtaatggtcgggcggcgagcgtccttcatcaaccaacaccccaccggccgcagcggtagatgaagaccaccaccttcttatctgttggtggtgcgggcccccctctcatcatgagcgaggagaggacaataaagagcagtcgtcttctgttgtggtgtccagagtactgtcgctgtcgtagagacgagaacagtagtagtcgaacacccatacttgtagaagaagacgcagaagtagaagatgccgccgccccccccaccccaggggcgcggtgggagggtggtagctctcgcttggttggtggcgtgagagcaatgcgaggagaagaaggaaaaatctatcctccctcacactggtcggcctcgtcaaacactaatattcattcatttcttcccccctcctaccatccatactatccagccagcttgctgattgcacacacaatgataagcacgattgaaatgaaacatacctatcgtacaggcacggataacaaatacctttcaccgtcagaccgcatcatacaataattcattatttataagctacatcgtaggatccctctcccctccgcca

SEQ ID NO: 699148 - DNA, 736 bp, Homo sapiens
  misc_feature (73)..(73): n is a, c, g, or t
ctttttagtctgggctggcacatggcatccagactgaggatacccggaacttatgggccacgtgagccatggnacggacgctaggcagcccggaagcacctctcggtcggatcatgctggtgggctgcgatcactcaccggatcaactattgcaaataccacccatgctactttgggaaagttgctatgaatcattaccacttaaagaggaaccagagcttgtgcccaactgtaaaccttgacaaatggcggactctggtcagggaacatacacagctgaatgctgctaaaaacaatactggcgctgatcccatcattgatgtggtgcgatcggactactacaaagctctgtgaaaggaaaagcttccaaagcagcctgtcatcgccaagggctaattcttcatgagaacatctgacgagaagattaacagtgtcaggggggaactgtggtctggtggcttgaagacacatggagggagcttgatttaaggctaacctcttttttcggcaggggcaccattgaaatcctgagtgacttggtggggcccctgagtcgcagacaatttagaatcaagcaagcttatgctttgagacgatttacagcttacttggccattggcgctttgagagagcatgtaaattcaatggccggtgtttaaaccgggatgctggggaaaccctggggtatcccaatttttcgtttggggggattcccctttgcccattgggtgtttga

SEQ ID NO: 699149 - DNA, 205 bp, Homo sapiens
gggactatagttctgataccattcaattacgagtgctctcatgtttgacaggatgggggggacagatgtctattttgaaacaaggcagatggtggtgcagaatagaaggcagcagtagtgaacagagcaagaggtagctttcagttgacctatcattaggcatgcccttttgttgtttttttgcaaccggatagtagtagtaggc

SEQ ID NO: 699150 - DNA, 326 bp, Homo sapiens
  misc_feature (22)..(22): n is a, c, g, or t
ggactaagagatgagaatgccnaaggtcagtggcgttgggtggaccagacgcccattaacccacgcagagtattctggcataagaatgaacccgacaactctcagggagaaaactgtgttgttcttgtttataaccaagataaatgggcctggaatgatgttccttgtaactttgaagcaagtaggatttgtaaaatacctggaacaacattgaactagaaactcagaaagtggtccttgtgatggaaagagaaaagaaaaccaattagaataaggcagaatgtacgtgcgtcattggaacacagaaaacatgctggttcatacag

SEQ ID NO: 699151 - DNA, 317 bp, Homo sapiens
gcgtatgcacaacctagggtcagttttgcaggtgtaagccatttaccaagatagttgtaggtaaagaagggcagatttattagagaaattgtgaaaatatgttgcagtgggcagctcagcagagaaggggctacctgcaaagaggcaagggctggaggaaagttttatagggtcctgctgaagggtgctacgtgtggaatgaggtcattgtgcccgcaggttgtttgtgattagctgtctctaacaattgttcctacaataattgttcattattgctctcaacttggggctctccccaacctggagacccttcctta

SEQ ID NO: 699152 - DNA, 419 bp, Homo sapiens
gcatgccaaattcaggtctctccaccacattgaagaacaggaacctggtagaagatgtaaaaataagtccactcttttcatttatgttccatataaacttatatggatctactctacatagtcatatgctttcaaaactttacaggataacaaacaaatggtgtccatcagaaatctggaatgtaatccccatctctgtcagtagcttgctgtaggactggtttacatcaaaacctgtacattatttcctcattaataatgtatccctgttctgtgtgcctgcacaaggtgtcaaataagcaacaagaaaaaaaaatggaaacctttccatgtgttcagaatacccatggataaatccatctgaatgtatctgaagagctgggtaaagagccgcccgggttgccaagagcagtaatgtg

SEQ ID NO: 699153 - DNA, 938 bp, Homo sapiens
  misc_feature (300)..(300): n is a, c, g, or t
  misc_feature (595)..(595): n is a, c, g, or t
  misc_feature (623)..(623): n is a, c, g, or t
  misc_feature (632)..(633): n is a, c, g, or t
  misc_feature (668)..(668): n is a, c, g, or t
agcaagagcccatagaagatgacaccgccgtagtgcaccaggaggctatgaggaacacgtactgccactcctcccgcgtcttgtgcttggtcattgcacccacgatgatggggcacaccatcccagacagtgtgcccacgccattggaaatgcccatcaagatgctggcatagcgaggggcgatgtccaagtggttcacgttaaacccagagatggcaaagccactgaagcccacagccaggaccaggaaggagatggccacgcccttggagtgcgagtatccgaccaccagcagcagcntggcttccatcccgaaacccccgcagttcatgagctttcgcacgttggtagtggacattatgtgacgactgcgcaaaaagtcagcgatctggcctccaatgggtacgatgatggtcatgacaaggtgaggcagcgccgacaccagccccaccttgctgatctcaaagccgaacacttcttcaaagtaggcgggctgagagatgaggagcaggtagaaggtccagctgcggcaaaagttcgcaacgatgatggcatagacgggcatggacgtaaagaagcgcctccaggtgtgttnaacttcgtaacagggttcatgagctggngctctcccnnatggcatcctcaatgtatttgcgctcccctcaganatgctggggtgcatgccggtgactcataggagacaagcaaccagaacaggtaccaaaagatcccgaagctgccatagacatagaagacagaactccatcctgaatactgcacaaggaccccagccaagggcatggcaaccaccgccccagcataggaaccgcaaaaggctgtcgttgccagccgactccgttctaagggaggggcccatttgctccagatgccatggccaagcagggtatgtgaccccctccaccaatccctgaaggatc

SEQ ID NO: 699154 - DNA, 107 bp, Homo sapiens
tagctgcttgacggaagttagcattgctcagagctgaatggccgctacatcagcaacgaatttaaggtggaggtgaatgtaatccacacggccattcaacgcctccg

SEQ ID NO: 699155 - DNA, 191 bp, Homo sapiens
aatgttggaaaagaagggggaaaagaagaaaataaaacccatgccgtgaatccccgatgtttcctgaaagaactcttttagatgaaatccttctacccaaagggcccttaattttttttttttccctgagtaaaagcaagaaattttttcctttggaaaaaatatatatattaaaaacccccttttagagg

SEQ ID NO: 699156 - DNA, 740 bp, Homo sapiens
  misc_feature (26)..(26): n is a, c, g, or t
  misc_feature (71)..(71): n is a, c, g, or t
  misc_feature (93)..(93): n is a, c, g, or t
  misc_feature (125)..(125): n is a, c, g, or t
  misc_feature (134)..(134): n is a, c, g, or t
  misc_feature (146)..(146): n is a, c, g, or t
  misc_feature (152)..(153): n is a, c, g, or t
  misc_feature (167)..(167): n is a, c, g, or t
  misc_feature (199)..(199): n is a, c, g, or t
  misc_feature (208)..(210): n is a, c, g, or t
  misc_feature (212)..(212): n is a, c, g, or t
  misc_feature (214)..(215): n is a, c, g, or t
  misc_feature (218)..(218): n is a, c, g, or t
  misc_feature (221)..(221): n is a, c, g, or t
  misc_feature (247)..(247): n is a, c, g, or t
  misc_feature (252)..(253): n is a, c, g, or t
  misc_feature (264)..(264): n is a, c, g, or t
  misc_feature (272)..(272): n is a, c, g, or t
  misc_feature (274)..(274): n is a, c, g, or t
  misc_feature (279)..(279): n is a, c, g, or t
  misc_feature (287)..(287): n is a, c, g, or t
  misc_feature (329)..(329): n is a, c, g, or t
  misc_feature (339)..(339): n is a, c, g, or t
  misc_feature (342)..(342): n is a, c, g, or t
  misc_feature (344)..(344): n is a, c, g, or t
  misc_feature (373)..(373): n is a, c, g, or t
  misc_feature (433)..(433): n is a, c, g, or t
  misc_feature (721)..(721): n is a, c, g, or t
tccctacctaaataaaagtgcaacantcagtgcatgtgccagccccattctcccaagtcgtgggagtgggngtaggtggtggggggggggganggaaaaaggaattacttcacttacacctatgntgccctttncccaagcctgangaaagnnaaggggaaaagggntgcagggtacatttttttttttcacttgaacntggaaagannntntnncantcncccttcccctttttagggggtgtgtnttttnntcagcatcctnttttctcntncaccntgtgtttntgtgtacacatattccaccacagttgggaggcatgtttaggntgacccagtnttntntgttcctcctttgaagagggtttgtcaantgggaaaaaggaaggagccacatcaggcagaggtttcaagccatgggatgggggaaaggnggcagagaggagcagcaccagaggccaggagagagtggaaagggccacagcttgtttttaaaaaattctataatttggaagagggtggcgattaattttcaaaatacacttcagagtcccactttccacatagctcccttactcacagccctttggttttttagacaaaatttaagagctctcataaagccagaagtattgataactccttagtgcatccaaaaaaaagtgttcacatcaatcccttacaaagactatgtgctgtagactttgcttcttcctatacanttgtcttacggctcagtgg

SEQ ID NO: 699157 - DNA, 513 bp, Homo sapiens
caaagacgaaagactgaggagctaccaccaacagcaggaggtgatgccgtacctgctgataccactctgtggttctcaagtccatgaacagatattgttgcattttccacaccgctgattgaacataataaacaatccagaaaagcagttttgcccagttgaggatcaatttaatcttaatgatgtattagcatactctgaagagttattcctgaagcttgatactagtgcttcaggccggttatgatttactagttaaggagacgcggaactctgggggaggacccgggcccagcttagtcctatagggagaacgaatccatgtcagtgtgccgtgttttacaagaatatttacttgtaaaaccctgaggtagacaacttgtatcgctttgaggagaattccattttctgaagatggggaagtcatttaaaaggcgcaaaccaatggtccttttgccacatattgtcaccctcaatggggaaggggaaatttgcgggcgcatataatttgga

SEQ ID NO: 699158 - DNA, 320 bp, Homo sapiens
  misc_feature (23)..(23): n is a, c, g, or t
  misc_feature (36)..(36): n is a, c, g, or t
  misc_feature (69)..(69): n is a, c, g, or t
  misc_feature (71)..(71): n is a, c, g, or t
  misc_feature (139)..(139): n is a, c, g, or t
attcggcacgatggcagttcctnggtcgcgcggcantgttgagcgccgagggaaggcggtgcagaccantncctgggcgcgcatgagcgtggtgtcggcctgcgtgctcctgacccagtgcctcagggatctggcgcanaccccgacggggcgccaagatgtcggaccacagggagaggctgaggaactcggcctgcgcctgtctgaaggctgcaccctgctatctcaggctttaagggagaggtcttcgcccagggactttaaccgccagtgaattccaattctgtgaatttagcaacccacccccataaccctttttt

SEQ ID NO: 699159 - DNA, 127 bp, Homo sapiens
tgtagtatctagaggatcctggtagtgatctcttgttgtccacagggcgcactcagcctgccagctcatacccagttcttcagctcggccagcggtaactgaagcctcccagaatcctggatccggg

SEQ ID NO: 699160 - DNA, 89 bp, Homo sapiens
tatacctgtacattcgtgtcattcgtgtccaagcagggtcttgtgtgggtatattattgacggtatttgagtttagtaagttcaggaag

SEQ ID NO: 699161 - DNA, 909 bp, Homo sapiens
  misc_feature (10)..(10): n is a, c, g, or t
  misc_feature (61)..(61): n is a, c, g, or t
  misc_feature (64)..(64): n is a, c, g, or t
  misc_feature (95)..(97): n is a, c, g, or t
  misc_feature (107)..(107): n is a, c, g, or t
  misc_feature (111)..(111): n is a, c, g, or t
  misc_feature (122)..(122): n is a, c, g, or t
  misc_feature (140)..(140): n is a, c, g, or t
  misc_feature (221)..(221): n is a, c, g, or t
  misc_feature (363)..(363): n is a, c, g, or t
  misc_feature (393)..(393): n is a, c, g, or t
  misc_feature (550)..(550): n is a, c, g, or t
gctgctgccnttttcacccgaggaactgccacccaccagctctgcgcagggatgctctctnagnttagcgaacatatcttagatctcttttttcnnnttgagacctngctntggagagtagnactggcagccctgcctgnactccacttggcatgataccagctccagaagggaagggagtggagcaggcagtgaggagagagcctgggggtcggctgggnacagccgtatgtgctaggtaggagtggagggagatatgtttaccaaatgcctgtcctgccatcctcccaggtagtcagagtgagctacatcctgccccgccttcatttccatggaaacatggcagctaggacacggggtacnacagcagccaaattcttccccacctccctnacttcgaaaaaaagtttggaaccctggtccctatactctgcagtcagaagtgggactgagccatacatgcccttgaattcctccctgtctggccctccctctccagcaagcagggttttctttaacttggcagtgtgcagaggagaagtggtaacanccccaccccattcccctgcatcggagctcagtattcctacagggtaagaggtaggaatcttgctgggacgaggggagccagaagtggcaataaaagcgtgttgacctgggactccatggtgttgacatgggactacgcgggactccatgaattttccattctggcaactggaaggggaggtgtagaagggcctgcagaggacggcactggagactctcctaaaggccacacacctcccccttgctgcccggcacacgcgcgtctccttcaaccgatgcattggcagcctcccacaggctcggcctctgctctaaattaggtcgaaagagtcccagttccaatctagggaacaggataac

SEQ ID NO: 699162 - DNA, 351 bp, Homo sapiens
  misc_feature (93)..(93): n is a, c, g, or t
  misc_feature (110)..(110): n is a, c, g, or t
  misc_feature (118)..(118): n is a, c, g, or t
  misc_feature (155)..(155): n is a, c, g, or t
  misc_feature (268)..(268): n is a, c, g, or t
  misc_feature (316)..(316): n is a, c, g, or t
aagaggttttattgactcacaattctgcatggctgggaaggcctcaggaaattcagaatcatagtggaaggtgaaggggaagaaaggcacgtntcacatggccgcagagnagagagtnaagaaagtcacacagttttaaaccgtcagagctcgtnagaactcactcactatcatgagaacagcctgagggaactgcctccatgatctgatcacctctcaccaggtcccttccttgacacctggggtttacaactcaacgtgaaatttngggtggagacacagagccaaaccacatcaccatgtcatatactatctngaagaaacctgcctattctcaaatgttcagcagtg

SEQ ID NO: 699163 - DNA, 371 bp, Homo sapiens
  misc_feature (2)..(2): n is a, c, g, or t
gnaaccacccaaacagaaaaaaaaaaagccccggaggggtaatcgggaggggcaggtgggggaagcccctaagtttggtttgaacgtgttgagttgggctcatccccatggagatgtcaaaatggcaaatggagttttgggtctcaggctcagggaaaaggtcaccagtttgagatcagcctggccaacatagcaaaaccctgtttttactaaaaatacaaaaattagccgggggtgatgtcgtgcacctgtagtcccagctacctgggaggctgaggcaggagaatcccttgaaccagggagtcaaaggttccagtgagccaagatcatgcccccatactccagcctgggcaatagagtgagactccata

SEQ ID NO: 699164 - DNA, 271 bp, Homo sapiens
cattacaggctcagatgggttctcattatgttgcccaggccggtctcgaactcctggcctcaagtgatcctcccgcctcggcctcccaaggtgctggtaccacaggattgagccaccaagcccggcccgaatatatttttaattttttttttttaagacagagtttcactcttgattgccttaggctggagtgcagtggcacgatctcggctgaccgcaacctccacctcccgccatcttgagcctgtgtctccatcttgagcctgtatct

SEQ ID NO: 699165 - DNA, 228 bp, Homo sapiens
aaccgggtccttctccaacatcttcaaccccctgacattatctgggatcctacgggtttctccatccaattcttggaatttcccagtctcccctatgtaaaacttagcaagtgggggggacctcatgccggggactatgctgtaaccaaattatggtccaaggctatagtgcggggatgaatataatcggaggaagggcagtaaacagacccgcgggggggggtcacg

SEQ ID NO: 699166 - DNA, 987 bp, Homo sapiens
  misc_feature (79)..(79): n is a, c, g, or t
  misc_feature (153)..(153): n is a, c, g, or t
  misc_feature (327)..(327): n is a, c, g, or t
  misc_feature (592)..(592): n is a, c, g, or t
  misc_feature (595)..(595): n is a, c, g, or t
  misc_feature (612)..(612): n is a, c, g, or t
tcgagggtaatcgctggagctcttgatgagttgcgtggaatacaatgggcactgtccgacgagtaactcttaagagtcnttcacgagagtgcgatagaacatgtgaaagcaagtatcaatcttccaaatgattaggaaaaggtagcgtcgcgncaatgatagcaggtttcttgtatatccacctcccaggtatggaagttaggaagcttggtgggaggttacaatactgacgaccagtgggatgtgacacgtcgcatttcatttggggccacgcgaaagtgtcataatttgatactgtatctgttttccttcaaagtatagagcttnggggaaggaaagtattgaactgggggttggtctggcctactgggctgacattaactacaattatgggaaatgcaaaagtgtttggatatggtagtgtgtggttctcttttggaatttttttcaggtgatttaataataatttaaaactactatagaaactgcagagcaaaggaagtggcttaatgatcctgaagggatttcttctgatggtagcttttgtattatcaagtaagattctattttcagttgtgtgtaagcaagtttnttnttaggtgtaggagaaantactttctccatggtttaacgtgcaaaacaagatgttaaggtttgcttcaaaaatttggtaaatgggtttatttttaacacttattcgtggttgggtaaattgggtaacgtgattaagaaatgtggtgatagtccagctggaagtgtctcttagaggggtgggctttggttgactgagggaggggaaactttttttttcctatagactttttccagattaacattcttcgtgagttcataaccagccgggcagtatgaggggcctaaatgcagagaaaacgagcccctgggggaatggataagtaagggcggaaaagattttttgtcatacctccatgggggaataggcttaaccctgagaattcttactacgga

SEQ ID NO: 699167 - DNA, 1216 bp, Homo sapiens
gtgagttgtggaattcattcatctgcggtaggcaagtgcattggtgtccatcttccgaccaatcgtgggaccgtcatagatacatgcacaagaatgagagccgggtgagctcaattctcgaacagtggtgtcgtccatgttcgcagcctatgcacccgaaggtcccatgggaatattcagcagagcaggcctatgtcaactcatccatggcacctagacaacacagtgggcatgggcttcccatatagcaacacaaagacactgcatcctagaaccagcacgaccctagatggcgtggcccagtatgtgagcccgagatgcacacgtggtagaggacaattgcgacatgctaaattatgccttggaccactggcgtctatgagcgcacggcgtccggtggatcccaataatttcaaacctctcaacgtcgcttgctatcccatcacacggacaattgtcttgtggttgcatgcaaggaccttcatataagcgtgggcacagtcggacgacaccacacgtggcagggtgatagaacaacccctaattgtgcgtttcgagacagctgacacagttcccatgcacacgatgggtgtcagtagaaccccagtgtagaaccgtcgcaacatgtgcgcggtctagccaatggcacatcgtgcttcgcaactggaacccagatggacaagtggacaaacaggtgcctattgtattcaccatcaggcacatggtgcctccgagaacacgcacgatgcacactcatatccccacaacggtggaagtggtgagaggggaatatgcacgcaaggtgatatggcataaacgtccactgccacctatttgacacggcacaccattgacaaccggaattgaacattggggcctggcaatattgtgatagacaactctacaccatcgtaaaaaccgccttgggcctgtaaagcttaatactacaatctaatcgaccaacaccgtgtagtataggaatggcagaaaacgcgagaatcttataagagccaagctgtggcgcgtacatcgtgacagtgtgtgacttttcattcactacctaagggcagtgccctgggcaagcatgtgtggtgactaggtctgcattgcgtgctacaccctggtgcacggccacaacgatacctcatacacttcgtacaccaggacaggagaacccgtgcgtatcacttgggacaaccaatacacactgtcggcc

SEQ ID NO: 699168 - DNA, 419 bp, Homo sapiens
gagttagggtatcgatcattgctcaggacagcatttgacctccctgtcttacgcaatcctcgtcagctcagccatacagggagctgggactacaggtgtacaccactatgtgatgctattttttttttttttaaagtagagatggggtcttgccatatggctaggataacagttgtcagccactgcacccggccagcaacctgttcgtatagcagcaggaaatggaggggcagagaggttaaggacacctgccaaatgtcacacagctggagaagcagagaagccagttgcccgagctcctcatggctctgtcagcctgattctcctcgtggggaaggcctccctttccttccaggttctatcagggtcctctttgtccccttgattgttttcggtgcctcctgctctatgtcagtttg

SEQ ID NO: 699169 - DNA, 621 bp, Homo sapiens
  misc_feature (1)..(1): n is a, c, g, or t
  misc_feature (17)..(17): n is a, c, g, or t
  misc_feature (36)..(36): n is a, c, g, or t
  misc_feature (74)..(74): n is a, c, g, or t
  misc_feature (78)..(78): n is a, c, g, or t
  misc_feature (116)..(116): n is a, c, g, or t
  misc_feature (125)..(125): n is a, c, g, or t
  misc_feature (133)..(133): n is a, c, g, or t
  misc_feature (167)..(167): n is a, c, g, or t
  misc_feature (185)..(185): n is a, c, g, or t
  misc_feature (236)..(236): n is a, c, g, or t
  misc_feature (296)..(296): n is a, c, g, or t
  misc_feature (333)..(333): n is a, c, g, or t
  misc_feature (335)..(335): n is a, c, g, or t
  misc_feature (342)..(342): n is a, c, g, or t
  misc_feature (473)..(473): n is a, c, g, or t
  misc_feature (475)..(475): n is a, c, g, or t
  misc_feature (480)..(480): n is a, c, g, or t
  misc_feature (522)..(522): n is a, c, g, or t
nattttttttggggganaagtttagggttgggttcnccttggggggggagcaatagttttttggtagttaaaanatcntgcaacccaaagtttttaacaaaggcccagatttgttngtaaagcantttgattnttacttggggcccgttttttaagggttcctgcgntcccacttcatctgtccntgagatgcagagcaggatggaggtctgcttctagctcagctgtttctcctngaggttgcggaggaattgaattgaatgggacagagggcaggtgctgtggccaagaagatntccgagcagcagtgacggggcaccttgctgtgtgtcntntgggcangttaacccttctgtggggccaaaggtttgcatcgtggatccagctgtgctccagtctgtcccctcctcctccactgtgactgccacgccccggaccagcagcttggggaccctccagggtactaatggggntntgttntgagatggacaaattcagtgttggaaatacatgttgtactangcacttcccatgctcctagggttaggaatagtttcaaacatgattggcagacataacaacggcaaatactcggactggggcataggactccagagtagg

SEQ ID NO: 699170 - DNA, 132 bp, Homo sapiens
  misc_feature (18)..(18): n is a, c, g, or t
  misc_feature (113)..(113): n is a, c, g, or t
tgaggatgcgtgtaggtnctgaagaaggaagaggataacaaacatatacacaagtagagatgagtgtgttagtttcctatttctggtataaaaaattaacaaaggatctagtnggctaaaacatcacaaact

SEQ ID NO: 699171 - DNA, 1143 bp, Homo sapiens
ggacgcacgcagctgacttggtcttctccgcacgaactggtacgagaggtctccaggagccttctctctcctgttgcatggatggctcatcgtcttaatggaaagatcgtctattgcgaccctagcttgcgggacaacaaggaggcatccacgtgtccaatccaagtaagattcactctgtagtggagtgtctggacaatagtttggtgtattggtctgtgtgcttaatctacgtctattgtgcgtaggcgaatacagtcatccttgggccttggagtagtaaactatgtcttcctttggttggcgtattgctttgtatgtgaaaggcactaacatgtcctatcacatacgtgtaggaatacagtcgcatcgcggaatctagcgaaggcactgggagaaggcatgttagtatgtccgatctccaaggaaactaggccttcatagaaaattcttgcttgagcgcattcactgagggacgtaattactgtcctggattggaacgcggacaccgaaagtaatacttaaaacggaatggtggtacgattgggctaacaactttgcgagtggggacgatcgcggatctcgggccaaagagacaggcgggggaagaagttcagggctttccaacattttgcttagcgataggctagggaaagaatacaattggttataacagtatgcgttccgtttgcccacaatactctctccaagcatctcaaattttccctttccaggggacttccgagatgcacacatggttacacgaaagggtcccctttgtgacgtttgtgtcaacttccaatttagaacattctcggtcttgcggtatttttcccgaaaacacccacgcaaaggtttggcgaacgcaatatccttataaaccgcttaagtagttataatcccctggggtcaaacagccttacacaggcttgtgggaattttgaacgccccgaaagtatgcgaatccccgggccgcattggcactctgtggtggaaacggtcggcgcacttagattcacaagtcctcggggggactttccttgggccctcacgaaatgtacatccgggcttaaggcgctttgttcattggcggcccttgcgaacaacaactacaccttttcgtgtggccactgtctcctaatc

SEQ ID NO: 699172 - DNA, 313 bp, Homo sapiens
aataatgtgtgccaggctgcgtgtatggcgtgatctcggttcactacaacctccgcctcccgggttcaagcgattcttctgcctcagtctctcgagtagctgctgggattacaggcgcgtgccaccacgcctggtaatttttgtatttttagtagagacagggtttcaccatgttggctaggctggtctcgaactcctgacctcagatgatcatctgcctgcctcggcctcccagaggctgggattacaggcgtgagccaccgtactcggccggatttggttcagttttattatatgggcacacattatggag

SEQ ID NO: 699173 - DNA, 177 bp, Homo sapiens
tcacactggcttgcctgagttcttcctgggcaagctaagaacctcccgggctatgcttcaatcttagggctcgcctgtcctgcatcactgggatcatctcccagtaaactagccacatttacatcctatgttctggcactttctgaaagatctaattaaacatgttgatgtgccaat

SEQ ID NO: 699174 - DNA, 193 bp, Homo sapiens
gttactgctgtcagtagggtgtcgacactctcctccacttattctgtggatgtcacagtcttttcttaggtctaggagtaattgctttaccaactttacttctgctaggtaaaacattaggtagtcttctgtcttctttatacaggcacttagctgtataaacgtttcctcttaagcgctacttttggctgca

SEQ ID NO: 699175 - DNA, 393 bp, Homo sapiens
  misc_feature (335)..(335): n is a, c, g, or t
  misc_feature (352)..(352): n is a, c, g, or t
  misc_feature (362)..(362): n is a, c, g, or t
  misc_feature (378)..(378): n is a, c, g, or t
  misc_feature (387)..(389): n is a, c, g, or t
  misc_feature (393)..(393): n is a, c, g, or t
ttttttgaggggggggtggtggttttcccccccaaaaaaaaatttttttttttttgttttttccaaaaaaaaaggcgcccccctctcttttgtttttgggtggggtattaaaaacaaaaaaattataaaacacacccccgggagattgttgttggtttttttttttataaaaaaacaaccaccaactccctcggggtgggtctcccccctcttgggaaaaaaaaccctctggggtctttctccatctcccaaaggggaaaagaaataattctttgtggttccgctcccttgtgtggccagaggcaagccaaaaatatttaaaagtctttggtctncgtaaatggccaagatnccgcctacgnactttcccttgttgangctcgtgcnnngaan

SEQ ID NO: 699176 - DNA, 936 bp, Homo sapiens
tttcggcgcgtcgtttgtgggcgtccgttgtgttgtccgcgtggagacgccgaatccaccgctggtgtgtcgtccctcttgtgtggacaccgcggggtggattccgggctgcgtggctgtttgtctgttggtcgcgcgggggggggagaccattgtgtgcaccagagctcggtcgttgcgccgcctcggcgcgttgttgggtgccgcccattttgagcgcagctgtttgtgtcctagaaggatcgagaggcggtgtgtgcacgcgtgccgtgatttctcttgcggggatgtgttttctggaccgacagcggttgtgtgcggcccgacggtcggttgcgctgtgtgagggttttggggggcgctgccgccccccaccgatttgttgagggggggttggtatttatgttgtgtcccccccgaggggcgcggcttttcatgaggctgtgtggttgtcaccccgtcgatttgtggggttttttcgggagagaggaggagggtgcgtcatcccgctttgttgaagggagggagatttttgtcagcctgtggcggccctcttcttctctggggagcagatttttcccccgcgaagtgctgtttctctggtgtgcccccgcgcgtgggtggtgctccccaggagcactgtgggtggtgttgttgtcaagacgcctggggcacaacatgtggtgcgcccactacagccgccggcggtggtgcttcccccaccttgtggggggcacctgcatgtgcccacaatgtgttttatctatctctttgctggggtcgatttttttgccaccccctgggggccccctccacgaggtggttttcccgcgggggggggttttggggggccccttgggggtttaaaattccccccccccccccctttttgtgggccccaagggggttttttttaatttatttttccccccggta

SEQ ID NO: 699177 - DNA, 686 bp, Homo sapiens
ggtatttcatgataaaccctgtcacaaggatagtagtactccttgttaagtagccatggcctaatttgaaccgttcccgtaggacatagacactttgcatcagggtacatgtactgtcagctactactatagggaggtacatggtgttacgtcagtagtctgatactaagtttgagctgatttaggccatagccgactcggcttgagagtatagcggcaagtcgtatagtctcaactctgtaggcatcactgttagtttatgaatcgtgaccagatgtacgcaagagttactatgcactaatcatgctcacacatgtatgcttcttcctctgatattgcatcacaacatcctacgagtctaatccacagccctggctatatgccaggatcttgggactgtcaaaatatgtactgatggatttatataatggttggtgtacatgtcatgtcagttagtcacaataaatccaatagctgaagctttagagttcatacaatcaagcaatttggtaggtaagcagtctcagtgttttaatactgataagaatatcttaactctcggttttcatactagcattagttacctctaagtgtgcatcacctcctctcctgtcctataccatgccctccatctgtgtagtgtttatgacagttcttgactgccatgtattatgactctgagctcc

SEQ ID NO: 699178 - DNA, 113 bp, Homo sapiens
ccgctcagagcagttctctcagcagctctaccaatttacattcccaccatacccccagtgcccagtgtgtcttttctttttatttattttttttaagaacggggctttggggg

SEQ ID NO: 699179 - DNA, 256 bp, Homo sapiens
gtcttgttacgtagcgccatggtgtcaacaggaaaaggatatgcataactttggctaatgtctagccctgaggtttgtggcatattttttgctctgagtctggtactctaagtctactagtcattactgtaagccaaccaatatgcttccacataaattcctgtttcttatcggttcacgctgaccttacattaattttctgtccatttgcaaccccagaatcctaaatatggtaccctcatggcactacttggga

SEQ ID NO: 699180 - DNA, 886 bp, Homo sapiens
agagcggtaagacatctgtggaccaaaacctagggccccacctaaagaccagcgagaaccttgggacccaatacccaatggcttggcagatgggaccaaaccaacccgtttgtcgccccgagagacgcggcccccccctctgtggagttccaaaacctgggaaggcgcaccaacagagtcacaccgtgaccacgaagaagagcctgtgccgaagactaactaacccgggtcccgcacgccagaaaatggggtgccagagaagaccgccggcaatggccgagagtccccacaagggccacgaaaacactggtgaacagccggacccaacgttttcaatctctggggaatccgtgaacaaaaaacctctcccacaaagttttaatcgtgaacccttccccccctccccttccagattatatgcgccccccttcttgagaaagagacacccatccagacaccacacccccaacttgtttgagacgcttgtgaacacccaagcccccggcccacccaagacgcccacctggaaacgtttttatggaagaattctcgtccacctttgtagaaaaatgccttccaggcctgccgataaggagacccctttttcccaaggagggttaaaaaacacttgttgccgccaaatcaaactccccttaggcgcttataactactcaccacttttaagcaatctccgccctctcccctgagaatatagagaaaaaaaattaaagactccaaagcgttagttcaatcctgtttttctctttttctgtctggtgtaaacacccccaacccccccttctcttaaaaacaaaaaatttttttaaacctttgcccctttttttttggcttccattaaaaaaaaatgggaaaaattttaaaaaaa

SEQ ID NO: 699181 - DNA, 396 bp, Homo sapiens
  misc_feature (10)..(10): n is a, c, g, or t
  misc_feature (43)..(44): n is a, c, g, or t
  misc_feature (108)..(108): n is a, c, g, or t
  misc_feature (112)..(112): n is a, c, g, or t
  misc_feature (116)..(116): n is a, c, g, or t
  misc_feature (132)..(133): n is a, c, g, or t
  misc_feature (143)..(143): n is a, c, g, or t
  misc_feature (152)..(153): n is a, c, g, or t
  misc_feature (162)..(162): n is a, c, g, or t
  misc_feature (172)..(172): n is a, c, g, or t
  misc_feature (181)..(181): n is a, c, g, or t
  misc_feature (190)..(190): n is a, c, g, or t
  misc_feature (209)..(209): n is a, c, g, or t
  misc_feature (220)..(220): n is a, c, g, or t
  misc_feature (236)..(236): n is a, c, g, or t
  misc_feature (247)..(247): n is a, c, g, or t
  misc_feature (296)..(296): n is a, c, g, or t
  misc_feature (305)..(305): n is a, c, g, or t
  misc_feature (307)..(307): n is a, c, g, or t
  misc_feature (348)..(348): n is a, c, g, or t
  misc_feature (352)..(355): n is a, c, g, or t
  misc_feature (378)..(378): n is a, c, g, or t
  misc_feature (382)..(382): n is a, c, g, or t
  misc_feature (387)..(387): n is a, c, g, or t
  misc_feature (395)..(395): n is a, c, g, or t
gtgaggcttnttgatgatggttgctgacaccatcatcgggggnnggcacacggcccttcggagcctgggcagcctggcctcacaggcagactcgcagacggggcagtnagcntctnggacagtgccaagagnncgggtgtgtnttttttcgnnaggcgtctntgcatgggtnttttagggnacaaatgtncaacaagggacaagaacancggacaccttnccgcccagcgcccctnccatggcgctngcgttcctcctccagatcgacccctagatgcctacacaatatctttaangtaacacanangtttttattttattaaaaacgtatagcctacttaaacgcgngatnnnnatatatagagtttaattttacgncccnccgcngggagccnc

SEQ ID NO: 699182 - DNA, 122 bp, Homo sapiens
actacattgcccaggttggtctcaaactcctgagctcaagcagtcttcccaccttggcctcctaaagtttggaaattatagcatgacccactgtcaggctcttttgtcagcctatcaacctt

SEQ ID NO: 699183 - DNA, 539 bp, Homo sapiens
  misc_feature (75)..(75): n is a, c, g, or t
  misc_feature (109)..(109): n is a, c, g, or t
  misc_feature (115)..(115): n is a, c, g, or t
ggattgctggcccaaaagtccccttttccaagggcctttccccaaaggtttaaaaatcattctactataaagacncatgcatacatatgtttattgcagcacttattcncaatancaaagacttggaaccaacccaaatgcccatcaatgatagacgggataaagaaaatatggcacataaacaccatggaatactatgcagccataaaaaagaatgagttcatgtcctttgcagggacatggatgaagctggaaaccattattctcagcaaactaacacaggaacagaaaaccaaacaccgcatgttctcactcataagtgggagttgaacaatgagaacatacgggcacagtggggggaacatcacacaccagggcctgtcggggggtgagaggcaagggaagtgatagcattaagagaaatacctaatgtagattatgggttgatgggggcagcaaaccaccatggcacatgtgtacctatgtaacaaacctgcacattctgcacatatatcccagaacttaaagtataattaaag

SEQ ID NO: 699184 - DNA, 239 bp, Homo sapiens
cacctggcggctctaattggaaagcctaccgcccgcgctctcatggacctcctgcagctcacaagggaggagggtgctgagggcctgccatgggctctctctgtcactatgtcctacttagagatctaccaggaaaaggtgaggctcttttctgatcgaggaatggaagagacaaagggttaaatcagacttagttgtagaacccgtaagacataaccgcccgcggttatgtcttacgg

SEQ ID NO: 699185 - DNA, 315 bp, Homo sapiens
ttacattcacgcaaatgtaccaggcatcaaagaattggtaccaatcctattgacactatttcataggattgagaaagagggaaccctccctaaatcattctatgaagccagcatcaccctaataccaaaaccagaaaaggacataaccaacaaaagaaaactgcagaccaatatccttgatgaacatcgatactaaaatccttaacaaaatactagctaaccgaatccaacaacatatcaaaaatataatccaccgtgatcaagtgggtaacataccagggatgcagggaggtttaacatacgcccaggtatgca

SEQ ID NO: 699186 - DNA, 956 bp, Homo sapiens
tttgtgtttgtgataaatctggattaaaacaattacctcttcagtgttttctcatgcaaaattttcttctagcatgtgataatgagtaaagctaaaatctattattcatgcttttctcaattaacatttccggtagtatacttcagagtgatgtaatctaagtttaagtagtttaagtatgttaaatgtggcatcttttacaccacatcacagtgcaacacactggggagacgtgcttttttggaaaactcaagaggtgctagctccctgattcaacagaaatatttctcatgtttgttgcattctaggtttatattttccattcaagaatcctttaggttaagtttaagcttgttctaaaacgtctagtctttggagaagttgacgacacagagtagcataactactcgtaggacacttggtgacggccttgtagcttatcaacctttcttgtgatactgtgatgttccctctttggtgtgctattttgcgtaaggtgacacctatgttaaagtgtttgtcgctttaactaatagtttcttccccttaagaagtaaatagactttcttgcagcagaaatagaaagacatagagaagacccacaagacagaacaacggaagatacaagataataataaggcaggcgtgatccctgtgaatgttcagccgcgagcaggcggtgtagtgaccaacctccatttactccatctaagctaagacaagaagaatgtggccatacaatccggatgcggaattgcttgaacggcaagaatggcagtgaggcctcttgggatactcggaaatgtgggcccgggtttaggaaaaaaaacgcggtcactcggatggagacaccttggactaataagagccccgtaactgggaagcgccatgatggaattcccttgacggctaccctactcctaacaacttgctgcagacctcttgacaactattca

SEQ ID NO: 699187 - DNA, 272 bp, Homo sapiens
ggctcaagggatcctcccacctcagcctcccaagtagctgggaccacaggtgcgttccaccacagctggctaatttttttggtagatggggtctccctgtgttgcccaggctggtctcaaactcctgggctcaagcaattctgccttggcctccagaagtgatgggattacagaggcgtgagcccctgcacccagcttaacatgacttcctaaaatcagattctgaactcaaggtttgttaactttcgcagtttagtcgacgcggccgcgaa

SEQ ID NO: 699188 - DNA, 232 bp, Homo sapiens
acccccgtcctgattgccatgtagttctgatacacagtcccaagcacgcatgaagtcttgacactgagagcttgtcccggagctggtacctctctgtcacatccccgagcggttccaagcgggcacggggggagcgatggtagtagagctcgttaaattcatccatccatacttcagctggacaaacactgttggccagagccttgtggcgggattagggagcgtgcttggg

SEQ ID NO: 699189 - DNA, 255 bp, Homo sapiens
  misc_feature (196)..(196): n is a, c, g, or t
gaacagaggcgtatgctgtttcagcaattaagacaacatcttgagatggaagcttcgtcttctgtcaggtgaagtggaatcacagatggacggggacaaggggaagtctctcctcatatgaacactctgcatctgcagagatggaaaggtgctgcattaggaggaaagtcactgggaggaaaaatccaccaccagnaagggtgcagggcgacttttggcggcaagaattttaacaaggccacggtccatgacctc

SEQ ID NO: 699190 - DNA, 401 bp, Homo sapiens
gctaaggggtttggatagactctagctccagagcagttagagactgcagaaatcacagaagtgtggagtcattcaggtgtcccttagagagtgatcatttccctaattgaaagtacagggaggaaaagttgaaagacaagaaatgtcacattctctgtgatttactgttgcccaattccctctcccctttttcagttctttcctcatcatcatcttaccttcctctataccaaatgcaaacttattccaaaactttcatgcagccttatttattaatgtatcttccatacctaacgtatcttcagcatagtatatactcaataaatatttgttaaataaaatatccaacatagaattctatatgaataaatcttaaaatcttggagaaataaaaaaaaaaa

SEQ ID NO: 699191 - DNA, 901 bp, Homo sapiens
tccgtgtacagcgccctgtatcctgccgtgatgcagagcagcctgcgccatgccccaggctgcgtgccccccgagccccatccccggaagcctgacgtgctgcggccctcgctgacctccattgctgctgtccccgccgaccatctgcagctctgcggagccacgataatacgacgaggcgctcgccgcaccgcgatcacgcatcagggccacagtcgagagaaaagtcgacacccgagcagacctctcaatcactagcatacgcacacacaactgacacaccacaagacagaacaacaaagaacacagaaacagagagggatcataacaacaggaagcgacccaaaggacgaagcgccggaccaaccacgaacaggaccacacagcacaccctccgagacgactgaacacaccgaccccccgacggagacgaaccagcaaaaggcacgaaccaacgaaaaacagagaaagaccgcgcgcccgcaccgccaccaagcccgtcacaggagcgcgaaaaacaccggaacggagaaaacaagaacgaggccacacacaatgaacacagaacacagcggacgagcaaaacggcagggaaagaccacggacagggccaaccagcgcgtagcgctacaaccagcagcacaacaaaatgcagacacacagggccaaaaggggcaagcacaagaaaagtgacgcgcacaagaaccacacgagaaaaaagagaaaagaacaaacatcaaagaacagcaaacaaacaaacaaaaaaaaacaccgcgaaacaaagaagccgaaaaaccatcacactaaaaaaaccaacccaggcaaaaaatccaaaccaaaaagaaaaactgacaacacgaagactacacagacagcacaaaaacaaaaaacacacaacaag

SEQ ID NO: 699192 - DNA, 140 bp, Homo sapiens
ggctaagcccagggtgcgggatgggccgcgcatgcacaagttacgtcagcagcaagcaggtcttgcgctgggtccctgcggtgccagtgaactccaggcagatagcccggcgtacacgaaccacattctgcgtcgccctt

SEQ ID NO: 699193 - DNA, 153 bp, Homo sapiens
tattgagctggtctgcaatgcaaatggatacctactccacttatacaatggcttaaagatggaaagcccatagctcgtggtgaaacagaatgaatccgagtgagtgcacatggcagcacattaaacatttatgagagctcttacatctcgaca

SEQ ID NO: 699194 - DNA, 356 bp, Homo sapiens
cgttatgagagggagagggaaggtgtatgtggacttgacgacgggataggctgaggctcgtgcttcctcctgccaatgcccatttgaaagcacctggtcccccttcagcatcccctgatgtcctctgttccctcctgtgtatccagtgggcaattacatgagcagtgaagaggaggtcacggctggatgggaggatggggtacttgagagtactagggcctagaggacacagggagttgatcttagacacgaagcgaggcaacaccttttgaactgagaaggaaggagctgtcctggcgaaaccgtccgccacaaacgagctccgcatttagggcgtcatgcaccaggcaggcccc

SEQ ID NO: 699195 - DNA, 304 bp, Homo sapiens
tgtgtcagggtgcagtgagccgagatcacgccatgcactccagctgagcgacacgagtgagactctgtctcaactacatatcaacaacaacaacaacaacacttatgctggacatggtgatgtacctgtatgtcccggctaccagggaggctgcaggtgggagaattacttaacgcctgggatggtcaagcgctgctagtgacgctgtgacttgtgccatctgctacccatgccttgtgcgacatgagacccgtgtctctaacaaaaaattgacaaattcacgtttaactttgctagcttatca

SEQ ID NO: 699196 - DNA, 646 bp, Homo sapiens
  misc_feature (83)..(83): n is a, c, g, or t
  misc_feature (108)..(108): n is a, c, g, or t
cgggaggccgggccggcgggctgcgagcgcctgccccatgcgccgccgcctctccgcacgatgttcccctcgcggaggaaagnggcgcagctgccctgggaggacggnaggtccgggttgctctccggcggcctccctcggaagtgttccgtcttccacctgttcgtggcctgcctctcgctgggcttcttctccctactctggctgcagctcagctgctctggggacgtggcccgggcagtcaggggacaagggcaggagacctcgggccctggcccgcgcgtgcgcccgggagccgcccctgagcactgggaagaagacgcgtcctagggggcacacgcaagcgccagggcggaagctggtgcccataccgcggaacgctctcgaggagctcctgggtcttcgtgccccacatgcgccggttcctgaggcaggaagaaggatccggacaccacatctacgtgcgcaaccaggtggaccacttcaggttcaaccgggcagcgctcatcaacgtgggctaccaggagagcagcaaccagcaacggactacataggcatgcacagacagaagacctgactcccatctcaacgaggagctggactatggcataacctgaggctgggcccaatccaagtggcctccccg

SEQ ID NO: 699197 - DNA, 814 bp, Homo sapiens
attaatcccctggcccaacccgtcatctactctaccatctttgcaggcacactcatcacagcgctaagctcgcactgattttttacctgagtaggcctagaaataaacatgctagcttgttagttccaggttctaaccgaaaaagaagtaaactctcttcgttccacaggaaggcgtgccagtcaagatatttcctcacgcaagcaaccgcatccataagtccgttctaatagctatcctcgttcaagcaagtatactctcctggacaattgaagccagtaaccaagtactaccaagtcaagtagctcagtcattaataagtcagtaatggctatagcaataagaactaggaatagccccctttcacttctgagtcccagaggttacccaaggcacccctctgacatccggcctgcttcttctcacatgacaaaaactagcccccaatctcaatcatataccaaatctctcgcctcactaaacgtaagccttctccatcacgtctctcaagtcttatccatcatagcaggcagttgaggtggattaaaccaaacccaggtacgcaaaatcttagcatacatcctcaattacccacataggatgaataatagcagtatcgtaccggtacaacccgtaacataaccatgcttaatttaactatagatataatcgctaagctagtaccagaattgcctacatactcaaggttaaactccaagcaacaacaagccctacgtactatctcgcaactgaaacaaggtagcatgactaacacccttaattgcatccaccctacatttgacctaggagggct

SEQ ID NO: 699198 - DNA, 1531 bp, Homo sapiens
  misc_feature (937)..(937): n is a, c, g, or t
  misc_feature (1058)..(1058): n is a, c, g, or t
  misc_feature (1095)..(1095): n is a, c, g, or t
  misc_feature (1117)..(1117): n is a, c, g, or t
gtgctgccgtccgtctctcgtgtcttgtgtgtgccggtcgtgccgttttgctctctgtccgttcgcgtgttcctgcctgttctgcgtgttggtctcgtcggctcgttgttgctgtggtgttgttctgtcgtgctttgcctggtcggcgtggtcgcgccgttcgtgcgtggtgtggtgtggccggccgcctcggtcgcccctgcgttgtgtcgccgctgtcgtctgggtggttgttttggggcgtcggttggtctcggtccccccacgtgtctcggtcgttggtcgcgcgctcgttggttgtgttggtcgtgtttgtcgtcgtactggcgggcggagggggggttctaataacccaggaagttccctgttttaggtggaccccctttccaggttgtccccctggggggaacccccgccactccccccccgtggtgttggacccccccccatttagaaagaccccccggggcccccgatgtccaagcctctccggcggactctttaagccctttaggccccgccggggggcccgggaattaaacgagagtgggtcaaacagcacggggtaaccacagtctttattgtgacccccacttttaggcccctctaatttttaagggtgggacacactattagtgcacccagggttttgcgcccccaaaatagccctgggctttgggtatccccggttctcccgggattttctccccggggagtaatctgtcttgagcaccacacggcgggttctctgcccagcatgtcttgtccccgctgacccggtgccacccctttattggggccgcgcttgtgcccgtccccgccgttggccacaggccacacacggcacttccctcgagggagcactctttcgcgaggcccccggagagccacagccctcccccctcttggggtgtctcggccttttctctcgcgaagngtgtcccaactgtgtcacccaccgagcgccccctcttccactgagtgttctgacccccacgcgagtattttgtgttctcctctaaaaacactccccctcgagagtgttcacccaccctctnggggccacgaaaagtttgttttctcggccacgagacnccacgcttttgagaggaggagnccacgagcacccccatcgccacgagaggttctctggagaagaaaggttgaaaatgaagagtgagttcgtcccgccgggcccctattggcacggccttctcttgccccttggtggcacctcttggccacgcccgcccacgctggagaaggtggagacctctctcgagagagacctcgagttcttataattggagaaatgtgaactatgagcctctgcgctgtggagagagaattcgagctggagaaggtcctcgctggttggggcacgacaaacttcaccgcctggcttggccaagccacactcctcggagaaaggagttcttgtttcgagtatgaaagccaccacgtcacttgaaaaagaaacgaaatcctggcccagaatccttatgagattccgggaaagggaaaacttcca

SEQ ID NO: 699199 - DNA, 328 bp, Homo sapiens
aagattgcctgcatacactcggtaaggacacatctaggagcgaggcctgagcagacagaggggggccccgctgctcacggcccctacccttcctggcaggcacccctgctcactgcagacaggtgttccatggacatgtaattcctgcaggactggggccttgggcagggccatcaagaaggtatcactacaggtgaactaatccatggaggtcgtgcgaggctgagcttaccaggtatatcagaagaaactgggtcccatacacccagtcagacaagaggcgccaagtgagagggtggtcacacgtcaccaagctctgtggcttcag

SEQ ID NO: 699200 - DNA, 768 bp, Homo sapiens
cttgttttttcttttccccctttttataacacggctacccaattgtataaaccataaccctttatggttatccagaacaaccataccgatttttaagtgcacacacttatttagtaacttccgaagggaatcccccaccaagattttgtcaccacaatataacaccaggcgtttgtgagataaccgcaccgggccccaggttaacttgatgacaccggttctcttataggtttaatccgtagggcacctgtggttgcgccgaaattctcggcccacagaaggacctcgccatttgagcgccagaatagccatatgataatatgttgaatagtgagacactcggtgccacactcgttggggttagcgcccaccttgaagattggtgtgtgtgagatgcttgtgtggctgtatgccaacaccagtgtgtctggggatatgattgagaccctcggatgtgtgtactcgccaaaatgtggaaatatggcttctcgctgtatatgtctgctcggaatggtgggtgtaaatggaactggaaaattgcccagtgcactgcttggggctgtagactgcctaccgtgtgtgttgtaaaacttatagtgggcccatccacccaaattgtagtgtttttgtgacaccttgaattttcgttgccacctgctgaaaatggaaggtaatacttaccttaagtggctatgtagaatgaagatcatgggtatgaattgttggtgcttcttaagaaccagccccaaattaaattattttccaatt

SEQ ID NO: 699201 - DNA, 668 bp, Homo sapiens
cacaactgtagtcccagctactcaggaggctgaggtgggagaatgcttgagcccaggaggtcgaggctgcagtgagccatgaccacaccactacactctggcctgagcaagagtgagaccctgcgtttaaacaaaacaaaacaaaaacaaaaacacaccaaagctaaaagcttctctgtgatttaaaagatgtagaactagaccagcctgtccaacatggtgaaatgccacctctactaaaaatacacaccaaaaaaattagtgtgggcatggtggcacgtgcctataatcccagctactctagagatgctgaggcgggagaatcgcttgaactcgggaggtggaggttgcggtgagcccaagatcgtgccactgcactccagcctaggcgacagaatgaaactccatctcaaaaaaagatgtagaacctagataggcctgctcattagaatatcaagatggctccagctgactttctttcctaatttatatgtactagtggctttactcttaaatagtttccttctgaaaactaatcatttggaccagcttatatgtggtcgggcgggaaagggacacgtgttatctgtaccagtgccaaatatcctatcaaaaacttggcacaacgtgtccaactaaacaaacaaggacaataacacacaccttgg

SEQ ID NO: 699202 - DNA, 852 bp, Homo sapiens
agcgggggggggatgttaaaacacatgcaaaaaaaaaaaaaaaaaaaaatttggtttatataaccatttaaatcttttataaaggtttggaaggtccaggtttgaattgctggcagctggtgaagcatacataaataaatggaagtaaagccaataacgtggatttaatttatggggatggttaatttcccctaaagacctggaaaatggaacatagtatggctaagtaattttccagtggttagcctttaactttcctcacacaattgggaatcatataatatagggtaccttgggtccccggattaaataattggtgacgggataagaatggcttcaaggtggtgttattatggaaaaggaggtgggaaaaggtatataggctttaagcaaagggtggttgggcccattctaagaaatggagcgaatatattagaaattagtaggggcattttcttcccgtgtaagggggaggtgtatgggtgtggacattttcttccccaaatttctttcccacttcgtggttttctccccaattatttggaattacaggggtgactggctgtgaagaattgacctttggaaactccttatattcgcactataaatttaggtgtttacaagaaaaaacccgtgtacgtggacacgggtgagaacttcttcttcccataattttcacggttaaagagcaactttgaagaaggatgtggacaaaagattaaaaagtgcgctattagaaaaaggagacaagggggccacaagggggattgggcccaaatatttggattcttttttgaattaaaacccttccttggggggtttagaagggaatggactttagcttacattaac

SEQ ID NO: 699203 - DNA, 136 bp, Homo sapiens
acacatggaaatggctcgcaaatcaacttcttgatgcgaaagaatcgagcagatccgtggcaggctgctgagcgctgtgtgtggcacacatggtcgcgaaacccttccattcaagtttctttcccaacctttttcc

SEQ ID NO: 699204 - DNA, 668 bp, Homo sapiens
cggggttcctaaagttgaccatcccattttggcgcagactattaacataagtttactgggtgaacattatatagccctcatcacgacgcaatcacccaacatcactaacacttgaccacctacattgatcacttaaaagtcacacagaccaactatgtgaaaatcaatgactgccttaacgtgcttaccaagaacaacgatctacaagaattactccacccactcactagtactacgaataaccctgtgaaccctctcaaacacgcacacgcgctcaaccgatgcatgagccgggtaccatgcaacgactacagctggggatcccacataccgccaacagacgaacaccgactttctaacacattacacgctgaactgctcccagctctaaggagaacactccatgcaacatctattatccaataagcgaagtaccagcatccagtttgctctgaccttgaaccatgctacgctactgcgtaggcatgacacttaccgcaaacggagaccagggacacccctagaacgcggattcttgcagatgctacggttctattggatcaaacgccacctaaggtcccagtctagtctcaaagacaatagtccacccaattcaagaaacataatatccgcatttacccaagtgttttctagagccaccctcgata

SEQ ID NO: 699205 - DNA, 960 bp, Homo sapiens
  misc_feature (547)..(547): n is a, c, g, or t
atccgagtgcttatgaagtaatgctgagtgaatcgggtaggcatggagctcccggagtgtctggcatgagtaaagaaggaaaaaccgacggctctcgggactcgagataggcgtctctgactcatggtcgtccagaagctctggacaggggtgatggacattggctcgaattccttactgtgcgtggtcgcacacgagagatggcgaggcagacacgcccattggttccctgtgatagacagaggtcctcgaagatcatagcaaaaacatgaagtaaagagttcttgcatcgcatgcgctcgccgtatcgaagggacactggccctaataagggaccgttgggctgactgtcgcagcacgagcatcatcaacatcgacagtcggctggtaccagagaattcgctccgcttggacgcgcctgcgagccatcctcctgagtggggagacagagggccttccactacaaaaacgagcacgaccacgtacccctaccccttcccacagatgattccacagtgaaccaataggaatacggctcgtccttggnttctagtacaccagggtctccgggaggaacgaattatcctggccgcctatggggacttcccctttccgccgtctgaattctaccccaatattgccaagaaagcggctaaattacttctagtttgacgaaccctattctcaccaacacgaggtggcgttttggcaagacacccgacttgacaccccttgggccaagtgaacctccataatgtgttttggcctttctagtacccaccgtgggggccccctggtgcataacccaaatgtctgagggtggtatttctcctccaacagcgcccaagttagccaagggaaagcgagaggcttgggggtgagacccaagtcaagagggaacctccacaaggtatgctggggcctatgcaacatggggaagtcagcattcgcaaagggcgg

SEQ ID NO: 699206 - DNA, 1072 bp, Homo sapiens
agcggatgggtgcctaaggatcatgtctgcgaaccaggatacccgatccacacagcgatgggccccgatggaactggaggcgccgacaggcgtcatcgagagtagaacgtaggcacatgacgattgtcgagagctgtagatgacgtgaatcctcatcgggagctcagcgtatcgtacgctggacatctacgacctatgagtttcgagaaggccctctggcatccagcaggcgagcgcagttctaccgttggtactcaacggcgttaatgagtgtgagttgctcgaagcgccaattcctgggaccgtggggagagaagaggctgaccactttgctcagtatctgacttcctgtcagcatgatttgacatatagaatctatacatgccagcccagtgccttggtaccttaggcaccaatctgcctagaagtgcgagcctcaggcagaagtacaggaagagtgggtacatgggcaggtaggagcacgtacagtggcgtcgaccttcactgtgcgaacgcgctgtacttcggggggtcgagccacacggtgcggttgcctagaggttgccatgacaaacttggcgatggatggggaaacgacttccgccgtcgatcccatccgtaggtgcttaacaccattggacccggtagatacgctatagcatcattggctattgaacccctgcgacagaatcaacttggtaatcctcccaaaaaatgaacagttcgaaagacattgctcgaggtcacctcgggggactggataggccttgggactcggaaaccatcgttttaaacgacccgggtggggaattttcacagagaggaaccccaaggagtttccttagattggaacacattaattcttccgcaagacaagcaagccgttccaggaccgaggacaagaaccaacagcccaaagggataaaggatgttatgggccgttgggtcagaggcccccaagaaaagtggccaccgtattccattggacttgggtcggccttcttggcaagaggttgcgaaccccaagtaggaaacagggcttcacaagtggacaaggggaggaagcaccccc

SEQ ID NO: 699207 - DNA, 914 bp, Homo sapiens
gagtgcgcatccggacgtaggaggtggaggtggtggcattcgccgttcgaaagcagggactaaaagccccacttcgtcttacgttccgaaaggaaggcgtcgtgttgagcctttctctgcagtgcgtgagggaggcgtcgacaggcgtgcggaatgtcctgagttgaggcttgcgggatcctttccggagaaagcgcaggctaaagccgcaggtgaagatgtccaagtacgtgaacgacatgtggccgggctcgccgcaggagaaggattcgcgcctcgacctcgctggtcgggcgggtccagccgagtgtcgtcgcaggtcttaggagccagctcttttgccagaagcgtctcaggttcccaattcccgggtctcgagccggtgttcgtccaggagtcggaggagcaagtccaggtcccggtcccgaaggcgccaacagcggaagtacaggcgctaatcgcggtcatactcgcggagcccggcgcggatcccgaaagcgccgttaccgaaagaggcgctacgggttcaaccaggagatactaccgggtctccttcgcggtaccggtcccggtcccggaacaggtcgagcatctcggggaaggtcgaactggcggaaagggcgtacgcgatcgcgcgggggacagcgacaactacgactatgaggcgcacaagcgtacccggaggatcacagcacaatggggagggggccaagggtcccaagggacgaagggtcgcgagacacaaggaacccacacaattatcggctaacgttagagacaggatccgaattgagacgcggtgcgaaaaataagccagacaacccactggaggggaaaagccctagggagacacagcacagacttcgacgtgccacgcaaggacacaagaactggacctcgagccaaggaacgcg

SEQ ID NO: 699208 - DNA, 192 bp, Homo sapiens
  misc_feature (11)..(11): n is a, c, g, or t
  misc_feature (13)..(13): n is a, c, g, or t
gcatggtggcnantcttcagtccagcacgtgggagtctgaggcggaagagttgcttgagccaagagttcaagaccagcctaggaacaaagtgagaccccatctcactttggaactcaggactgcagtaagccatgatcataccactgcacttaatcctgggtgacagagtgagaccttgtctcttaaaaaaa

SEQ ID NO: 699209 - DNA, 141 bp, Homo sapiens
cggatcccccgacttcttgacgggtgctgtgtgtgctgtgtgctcatctgtgtgctgtgtgctgtgcgtttgtgtgtgtgctgtgtgtgcatgtgtgtgcgtgtgtgtgccgtgcgtttgtgtgctgtgtgtgcatgagca

SEQ ID NO: 699210 - DNA, 326 bp, Homo sapiens
cggtcagtttactgtctatataattaatagaaaccagctctttatctccattcaaacatgcatcacgtttaaacgcactatggcatcctccaacctcagctctagtctacacaacactgcagtgtacagagcagctacaatgcccgtgataggaagcagtctgcattcacagtcgcaagcttttgacatctagagcgcgcacagacctcataacctgtatagagacttcccctaccaaagctgactagtctacatcacaacaacacaaaaacagtaaacaacaacaacacacccacaacatggacagaaatgacataccttaaaac

SEQ ID NO: 699211 - DNA, 198 bp, Homo sapiens
  misc_feature (35)..(35): n is a, c, g, or t
atttgctttaattttaaaaaaaaatttaaattttncttttttattgctgggttaaaaagattcagattatccctggcctttgaggaaaagttttttatttggagttttttggaaacagttttagtcttttaacttggaaaaaagagggattaatccccccccttgctttccaaaagccaataaagtggtttcccccga

SEQ ID NO: 699212 - DNA, 1573 bp, Homo sapiens
actagttctagatcgcgagcggccgccctttttttttcataacttatgtttttatatggttgcattacgccaataaatcctcagctgggaaaaaaaaaaaaaaaaaaaaaaaaaaaaaaaaaaaaaaaaaaagaaaaaaaacaaaaaaaaaaaaaaaaaaagaagagaaaaaaaaaaaaaaaaaaaaagtgagaaggagagcagcgaaagagcgagcgaacgaagacgagagaagagaggaggaagagataaagtagagaagacgcacgcgaggagaggaagaagagaaaaaaaaaaaacagaaagagcaaggtggcacacaaacccgacgaagagcagaggaaggcacacaccagaccgaaaaaaaacacaggagggaggtgaggaagagtacgagaagagaggggcaagacagaagaggggtgggagagagggaccgcagccggagaggcgatggaagggcgtaacaacagaagagagtgaagagagagagcgacgcaaaagaaggaagaaaaagaaaaagacacgcgacggacagcgccgaccgagggagaagaaaaaaaagagggcagacagggggcgaagcaggcgagataccgaagagacgacacaagagagagagagtacataggagaaccaagacgggaggagaacaagaggtaagacgagaaagaggaacgagaggaacgagaaagaagagggaggggcgcgcaggagagaagaacacaagaagaaaacacgatgaagcggaccagacgaagaggagaaaaaataaagaaggaaagacgagatagagcgagaaagcaggcagagaataaaacgagacgaacaggcaaaagaggagacagagaaaggagaacagaagaagagggaaggaaaggaaagaagagagaagaaagagaggagaaaagaacgaaaagggagcagagggaggaagagagaagcagagcggcgacgaagaggagcacgaaaaggcaaggcaaaagacacagagcgaagacgaaggaaaggagaaagacagggaagacacgtgagaaacgaagaggggggacacgagagagggaagggagaggaagaagagaagcaaaagacggacagccaagcgagagctagaaggagagagcagaagagaaccagagagaggaagaggaagagagagaagagacgaggaacaggaagagagaagagaggggcagagagaatgaaacaggaggaaaggacggacagagaggaagaaaagaagagagggacaggcgacgacgaggacgcaagcaaagcgagagagaagcaggaggacgggcgggagagagagcgggagaggggaggggaggagcaaggccgatcgcaggccacggagcgaggaggcgaggaggagaaggcgaaagagagagggaaggagacgcgcatgagaagggagacgagaagaggagaaggaaagagcgatgaggagaggtgagagcgaagagcgacgcaaggaagacggaaggagctaggagagaggagagaggatgagaggaagagagacgcgagaaagggagagagaaaggagagaggaaggaaggggaggggcgac

SEQ ID NO: 699213 - DNA, 1178 bp, Homo sapiens
  misc_feature (267)..(267): n is a, c, g, or t
  misc_feature (310)..(310): n is a, c, g, or t
  misc_feature (342)..(342): n is a, c, g, or t
  misc_feature (370)..(370): n is a, c, g, or t
  misc_feature (405)..(405): n is a, c, g, or t
  misc_feature (553)..(553): n is a, c, g, or t
  misc_feature (605)..(605): n is a, c, g, or t
ggctgaggatgccgagtgggacagatgagtccgccgggaggacgtacctgtgtgctcccggccctcagctgtgtctggatgcaattcagtgagcgcgtgatacgaagaagtgcgtgagatcgccctcgttccgcaagacagtgcctttgataactgttccgcggtcactttgttgtacccaggaaacatttcctaccgaacgcctagatacaagaggtaaccttctagccctgcgtttaagctggaaagtgcgccctcccgtctcantactgagtgtgcttgtggaaggccgaggcataggagtgctcanctacctccttatgtagaaggcggagcctgtanaccgtctgcacgtcccgtgggcgttaantctattaccccatgatgtcgagcacgccacggcgntccttgtggcaatgccgggtgcataggagcgatggtcgtgagcgttgcatgcccctgtcgtttaagggcctgcgcactcgaagcatacggttgaacatgaacgccaagatcgcacccaaacacgtccatgggacgataggaaggccancatgatgtgattgggggaccaagtgagcgcggccgcatcgcaatggcctgcnttcgcgaaacaacggcgcggagaacgggttcctcggaaggtacatcgaaggattcaaacttggtccattgctgcattccatggacgattgaactcatcggatccaccccaaccttgcgttgggatcgcatcgagaaggagataagctccatccgttggcttgggttcatttggcactaagcgacagtttgcgagtccacttgtgcaggcattggtctcgccttgtcctttggcgtgccacgtgtggtcgaaggtctgtgggggtcaccatatactgcgagttactccacggtgagaggagggcaacgatcgaggttggacggtcttaagtaccatctgagaaaagacccatgctagcaatattgtctgctattgaatagtacgagtgaactcctagacacttacgggtgacccttggtgtaagcttggtcgcaacggttatcaggacgcaattgtcttggtgacatttccgagtgggactcttccggcactcggggtcggacaggaccttagccctaatgttgagggcgcgccgaaacaggcgaactgaaaggcgtggtaatagctttgccag

SEQ ID NO: 699214 - DNA, 291 bp, Homo sapiens
cgtgtgtgattagtcagtgtattgatgcatgaaaggcaaccttagaggccaggcatggtggctcatacctgtaatcccaacactttgggaggcagagcaggaggatcacttgaaatctggaattcaagaccagcctggaaaacatagtgagatcccagtttctgcaaaaatcaaacaattagctgggtgtgatggcatgcacttgtggtcccagctactcaagaggctgaggtgggaggatcatttgagctcaggagttcaaggctgcagtgagctatgatccactgcact

SEQ ID NO: 699215 - DNA, 88 bp, Homo sapiens
  misc_feature (51)..(51): n is a, c, g, or t
  misc_feature (78)..(78): n is a, c, g, or t
tttttgcaccagcagttgacttcttgaatgtatagtcctcaaagccgctgnagaaaaaccatgataaaacatctctcnctctatcgct

SEQ ID NO: 699216 - DNA, 323 bp, Homo sapiens
ccctcgagtcctccgatagtcatgcatagcctttgcacaaaagacagctccctataaaagggttaaatggagatcttttggtaacacaagccatgaatgcgagtttgtcttaccctagccctctggaggccatgtttgtagcattcagaataggagctttacaatttttcagttctccaaaggaaggcatatacgtgaccgtgtatttgagcataattctagcaaggttaagtaaggggtaaaaattcttcatttgaaatatcccccgtatacaacccagacactctcgtgtagtctcgtgtccccatggatacgcatgacct

SEQ ID NO: 699217 - DNA, 661 bp, Homo sapiens
tttttgaagttttgttcttacataaacaaaggttaggggtcaagtgatctaaaactgtctaatctcagatgttacgaagaaaaaactacaaagaagaagtcaagagtcatatgagagtcttaatagtagtagaatcacagatgcgtgtaatacaagatgagtaactgcgacatggcggacaagatcgaggatgactacaaaacatacccacccagaagcggtaacgtccaacgaagagagtccgaaacaaacaaaaaactggagcaccctaaacgaagcacaacgcacgcctcgcaatacaaccagcaaaacttcgcgaaaacacccctagtcgcaactcactacagcactacagcgacacgccagaaaccaacagcaacccagtccacgcccaccacacaaccacggcagctaagtagcactcaacctccaaagatgcaacaactacccgcggagaactaaacaaagcgagaacaaccgaagaaaccggaccaactaccacaaccgaagaccctcccacggcaccaaataacccatacacggactctgaaaaaggccagcacacaactgcgcgataaggacaaaacgcaagttcacgggcaacacaattacaaccgaacaggctcacacacacaaaatccaaccatctgaagcccccccg

SEQ ID NO: 699218 - DNA, 114 bp, Homo sapiens
tctgaatttttcactttcagtgcacaaataccattaccatcaagtcataatgcagaagtaagaaatggctttgtctagacaagaaatgcaggaagttcagagttctagagagcg

SEQ ID NO: 699219 - DNA, 696 bp, Homo sapiens
  misc_feature (25)..(25): n is a, c, g, or t
  misc_feature (616)..(616): n is a, c, g, or t
agcgcgtcctcacccccacctatgntgtttcatcgagagcaccctcacccgcctcggcaagacggtgcgggtattgaccccggacctgttattggtacgcgataaacaggtgttgctctacagcgtagccggcgcaatccaggcgtttgattcgctggaggcgttcagccaggcctgggggagcaggatgcaacgcgagtttcagttcgacagcctcacttggcaacgcaacgaaactgccgccaacgtgtttgaacaacaggccgggctgatcctcaactaacaactcgaagacctggcagccctatcgttccaggggcaagacgaaaaagaactcgatcaacgcctggacatgatcaccaacccggccaggtattttaccgacatcaagttgcccgacaccgagcgccttggcactgtgagccagtaactgccgcaatggctcaagcaagccgagcccgcggatcgtttcgcctatcaccgccacttgcaggatatggcgcatgttctgcaaaaaaaccaggggcgatcgttcaacgagggtattgaaaacatccacacattcagccgcagcgcattgcgcaagcagatgcaagccgatcacggcggtttcgancctgatgcggtgccgttggactttgccgtagcggcaggtatccggcgcgcgggatcatcgagcacgtgcgcatgtgccgt

SEQ ID NO: 699220 - DNA, 356 bp, Homo sapiens
gtgcggagcatcataagatcaccagataagtggattctcttttgtgcccacaaagatctttctcactttgcacaacttgtactttgcctcctcaggtgtaatacgatcttcagcatagcgacccttgggtgtcattgatcagtacggacattcgtctcccggtgcttgtctatgctgatcacctccataaatccagcaagggtcagttatatctgttcggaccttgccatcatttttgttgacccactgcgtgtcccctcttcttttcttcctctcctgtcggggcatactttactctgttcctccataaaattataagagggagacactctctctacttgtgcagaccggctcgg

SEQ ID NO: 699221 - DNA, 280 bp, Homo sapiens
gtgatagcctgggggtctggcagtgaatgggaggcatccagaacgagaaggagacatgcaaagcctgaacgaccgccttgcctcttacctggacagatgtgagtgagcgtggagaccgagaaccggaggctggagagcaaaatcctgggagcacttggagaagaagtggaccccagtgtcagagactggagccattacttcaatgatcatcgatggacctgagtggctcatgatcttctgcaagatacgtgtggacaagtgccctgcatcgtatcttgca

SEQ ID NO: 699222 - DNA, 816 bp, Homo sapiens
ctgccgatcttggtctatttgtgggggagaaggagaaactaagggaaacaatgacactattttgatattatttatctttaggtgctccaataattcttgcaatacttaacatgtctggaaacatagaatctttgccatttatggaaaatatgaaaaataaagctaaatttagaaaaagtcacatattctaataaaatatactaagggaattagttctggccataagataaattgatcacataaatctccagcaaaatatattaatagctacagtaaaatccaataaaacaaaattagcagctttatgcctcggggcacattcaacttctcttacagatcccaacttccagccaccattttcagctcaatgccctgtctctctgctttaaaacgcattttgtttttaagagatccattttttctcaaataaggaatgtttgtattagaaatgtacaaatgttttaaattagcatttgaacaaataactagagaaaaacttacatttacttgcctttctatcatttgtagtttaaaaatataccaaaacaaaaataatgtttttaattctggaagtaatgttcccataggcatatctactaaatgaaatattataatgaagatattttgccaactcttaaagtataaaatgaaaggcagaattgtcattttatttgcaggaaacacttaagacagagattttgtaatataagttggcaaacaaaacattactaactgtcctacaataaacgttgtagttaccaaactttgatatttttaaaaacctctttggctgtatattgaaaccaccattctgct

SEQ ID NO: 699223 - DNA, 317 bp, Homo sapiens
gagattttcccaagctttcttagttttaaatatatctgacatgggccgggtatggaggctcacgcctgtaatcccagcactttgggaggccaaggcgggcagataatctgaagtcaggagttggagaccagcctggccaacttggtaaaaccccatctctactaaaaatacaaaaaattagggcatgatggctcatgtctgtaatcccagctacttgggaggctgagggatgagaattgcttgaacctgagaggcggaggttgcagtgactcaggatcatgaccctgtactccagcctgggtgacagagtgagccca

SEQ ID NO: 699224 - DNA, 914 bp, Homo sapiens
  misc_feature (647)..(647): n is a, c, g, or t
ctcactttatgtgagtgactgttcctgcgcgcgtctactctggtgtgaccctcctcttgtggcctgaccgcgataatttggtcgcctcgttcattatcgccacgtcgtgccaatacaagggggactggctaaatcacacactccggccctcccgacggtgagtacctgggcgccaacacacatttgtggccactgttgaaccccccgccggttcaaacccgtcgggcaccactaatgtgccgccactttaaagactcccgcggggttaaacacaaaaaaactgggaggcccggggagagaaattaagggttctaggcttaaagaacgaaagctcgccctctttcccaaggggtctcaacgaaggggcttaagtaatcttcgcccgtctttctatacatgtggcggtctcaaacaactgttcgccccgtccggcgccgttgaaaatcgacccgcgccctggggcactgggtcccactattaggaacgaacaaaactggggttttgggagaactcagggctttctatgagctatctccgctccgggtgtcggaaataaccacgggtgggggagccacacaacaaggagcaaaacgcacgtggggggaagcatatcccttggcgcctatagtttttgttaagcgttgaangaggggaagataaccgacaaatgcgttctcattgataatgaccttatattccagaagtctaaaaaacactaaaagcatatcccccggccttggtgggggtcgatggccattgattctcaccacctctctctaggggcgtggggcgaatggaaacacttgcaaccccgcgagagtggcgggcgcactgagtacgggaatacaaccgtagggcccccctgcgggaacaaggggaggcgttcccaatataaaaacaaaaaacaaaagaca

SEQ ID NO: 699225 - DNA, 680 bp, Homo sapiens
  misc_feature (40)..(40): n is a, c, g, or t
  misc_feature (42)..(43): n is a, c, g, or t
  misc_feature (90)..(90): n is a, c, g, or t
  misc_feature (659)..(660): n is a, c, g, or t
accagcgtggaagccacgtggggctgacacacgacggaancnngtggagacagggccttgctctgtcactcagggtggagtgcactggcncaatcatggctcactgcaacctcgacctcctgagcttaagtgatcctcctgcctcagccccctgagtagctgggactacagacagaagccagcatgccctgcctatttttaggaacaaaagtatctctcaactcttagcaagatttttatttttatacattatagtgaaaagtgttgtagaaacatatctaggaccacttgatgttgagaaaatatttatattgaatgttttccgtgcatttatttctgttaggaaaaaaatagcaatgaaaagcattatcagtctgggtggttctttttcagatgcaaaaatcactcaaactgaaatcctttttatactcaaattgggcctgccagctttaaaagagggcagtcaggataatatgataaactggcccatgcgctcaatcttagctcatcaaggctgtgccagaactgacattttcgtacagtatggcttgatgctctgattacaaattggtcttgagcagctatactctttgtaattttattcactgagggattgtgtttgtatcataggtctgttttggttttgaaacctgaagtannaaatacatcactgaaaaaaa

SEQ ID NO: 699226 - DNA, 115 bp, Homo sapiens
atataagtgggtgacaatccaacgctagcctcactcatgtgatgtccatccctctgtactgtccacctcctcatgtctgtccacatactcatgagctgtcccctccctgtgctgt

SEQ ID NO: 699227 - DNA, 606 bp, Homo sapiens
agggtggcggagaggattgggtagtgctatggggaatcatcggaatccttcaccatggcatcagtccggccagcgtcggcagaggcaatgatcctctcacctccagccctgagcgaagctcccggacgtactgatgccctcacctccaggcctgtgcgtgaccttccaccatttgaggatgagtccgaggggctcctaggcagagaggggcccctggaggaagaagaggatggagaggagctcattggagatggcatggaaaggtgactaccgcgccatcccagagctggaccgcctatgaggccgagggactgggctcgggatgatagaggagccgtagaggagctagaggggcagtcagagggatagtagcatggaagcggaggcatgcgggcggacgtgaccgggaggctgggcggggggctgggccgatgcgccgtgggctccggtatgaacaagtgagggaccgaggacgacaagagacgctctgtgccgcgagtgtccgcacagggggatgtgggggcacggagggacggtgcaggaggacaaggaggatgactgcgagagctggagaacctgggggatctgcagagggcactctgtggg

SEQ ID NO: 699228 - DNA, 224 bp, Homo sapiens
ttcattcttttaatgaaaaatgtattagtaaatatataataaataaaacgacttacagattattttatgatatattcttccttgaataataataataaataattctaatttgttgttacttaaataggactgtagtataactccgatgcacgtgcgatgctcacgagttattaccagatcctcgtgggtcgagttaaacgggccggggctgttagaaccgtcaa

SEQ ID NO: 699229 - DNA, 252 bp, Homo sapiens
caagagtagcttatagccttgtctaagtacagtattaatcatgctgtcgacgggggaatagcacattgttttggacggactctagctagtaacttacagtgcaagataattcaataactgatgttccatatcatacagagaccttattgctcttatcaaaacagaggagggctacatttgtaggagtgttatcatattctcaggccacctgtattgaaatgcggtatctcactgggctattctggacacact

SEQ ID NO: 699230 - DNA, 188 bp, Homo sapiens
  misc_feature (7)..(7): n is a, c, g, or t
cgcgcgnttgtgatctagataactcggcgatcgcacgcccccgtgctgcgagaccattcgatgttgcctatcactttcgatgtagtcgcgtgctacattgtgacacggtgacgggatcagggtcgatccggagaggagctgagaaatggtaccacatccaaggaaggcagcggggcgttggatgcagt

SEQ ID NO: 699231 - DNA, 1512 bp, Homo sapiens
  misc_feature (330)..(330): n is a, c, g, or t
  misc_feature (1401)..(1401): n is a, c, g, or t
ggaacaacctgaggagttctgcactatgaatctctgatggaacactcgtgaacaacagtgccaagggattgtcatcctgctgtccagaaaacgacttgggtcatcatggagacgacgtgcaagcagggttgcttcagatgtggcacgctcagcatacttccagtagtctagcatccggatgatggaactccgagatgtcaagtagacctctgcagatctttatctctgttgcaacctcttacaatacagtgttcattcggcatagagctcgcaatgactcaaggatggcttccgggagagtctccgtgagttggttgcgattactagtgnccttgcccgtgattcaaggtgactgcttccagagagcctacagcctcggagtctgggcggagtacgaaggagcgatgcgcctgtatggccacgttagcacactaggctggcaagctgtaagggtggtggaattcctacaagtagcagtgggaagcgacgttcttagaaccacgtttctcgtggggtcaattttgagatgttacacatagagattatggcgtgagaatacacgagcgtgcgatcttgggcgacgcctcggtggtgccttagcccggggaagacgtttgctcgtccgagtgtcccttgcataatccaaaacaatcaatagacttccttcgtgtagccaccgcacgtagttgacacctggcaagggcctggggctttgcgtgtcccaaatccactgtggtgggggggaaaatggggacgcaaaagccgtttcccaaccaagggcttcttggctcgaaaaagggccagcccaggaactttgcgtgggtgcgagtctgggtgtcccgccggtgcaagtgaattagacccagcatttgtggggtagttcggtgaacccgtacgaacgccttctccaaagacagaaaatgaacgtacttaaccaaagggctttggtaattctctggaggattagctcccgtaatcaacggcatgtggcaacttcccccccaaaagcgtcccaaacgggcttcggattccccaacgttcaaaggacatctaattcgaacggcagtagggtccggggactctccacttccttatgaaaatgtcgacacacttttagactgtggaggacaacacttctttctgccctcatgggagagaacagcactttaaatcttatctctggtgaccagtttcccggaacctgaggaaagacgttctccaaaaccaccgcggtggagcctttcgaaagcgaaggaaaaaggaagtctaaacacccccctcgggtattttgtcaaacatcggcgattggcctttccaaaatgcacaacaagagcactccaaggaaaactcccaatcaaattggacctgggcgaagcaccatcgaacaccaaactgttttgngggcgaggtaccaatccgccaagggatgtcacgaccgagcgcactcactgtaaggtgaaggaagcggtcagatcacatcagctatggagacctacatcacagcgggagcac

SEQ ID NO: 699232 - DNA, 404 bp, Homo sapiens
tttcctatgcatatatacatatgataaaatttaatttataaaataggcacggtaagagattaacaactaataataaaagagaacagttataacagtataatgcaataaaagtcatgtgaggccaggtgcacgtgtcacgcctataataccaacactttgaggggccaaggcagaagactcacttgaggccaggagtttgagccagtctgggcaacacagtgagaccccatctctacaaatgtatattttttacattagctaggcgtggtgggacacacctgtagttctaactattcaggagacagatgggaagatcgcttgagcccaggagttcaaggctgcagtgagccatgattgcatcactcactccactgtgggtgacagagtgagaccctgtctcttaa

SEQ ID NO: 699233 - DNA, 116 bp, Homo sapiens
ttgttactcacaaacacacacgatgtatccagctcctcctcaacagacacatgccatccagctcctcctctacagactcattcctctggctatacactgtttgtggaggtagcact

SEQ ID NO: 699234 - DNA, 264 bp, Homo sapiens
actcgccctcagaggggccgtgcccgcagtgtgaggacgccctcgttgcgccttctgcccttttcttcccctttttcgctggttcagctgcttgaaaagccttgtgccttttgcagcggggcaacaaaccattcgatgtcgtccagggcgcagttgagaatttgggtctccttctctattttctgagcaagcacggcccgggtctcctcttgagattccagagggggaaaacttggttggttgaggtgcactgcgggcccacgc

SEQ ID NO: 699235 - DNA, 237 bp, Homo sapiens
agaggaaaagtttcaagtcggctgacttccctacccggggcttcaggcgccccctctccggggccgcgcgggcccaaagcgggaggggcgcgccccctcctttggcagcctcagagcgcggctgtgacggcactcattccactccctccggggttcttgttgtcatgttgatggtttttgttgggcaggaaagcgggctcgactttctctttttgccagcgggagctgaagcccgtt

SEQ ID NO: 699236 - DNA, 579 bp, Homo sapiens
  misc_feature (22)..(22): n is a, c, g, or t
  misc_feature (59)..(59): n is a, c, g, or t
  misc_feature (160)..(160): n is a, c, g, or t
cggatgggagtctcctgccaangaatcaaagttggaagatgaagatcaggccaaagtangataaatatcaatgaaaataagagagatttcacagataatgagaggaagtattacagaatgggtaaatatgcaagcccttaatcaagtctgggtttcaatnctagctccgtcatgtatttgcagatgatcttggacaagttacttaaactttctaagcatagatttcattatttgtaaaatatagtcttagagtagctagccaagacctttagatttccaagtataaattaaaagactggtcaaatatgtctcccaaactacagttttcacatagcgagctttccaagtggtactgttgaagccctttccctaggacctaggtcagagggagcacaccccacccatccttcttgagggtaaatgaaactcataatataccaaaacctctctccaaaatgctcattctaatgtataactcctctcagtctctccaatcccctttattggcttgagatgggtagttagcaaaggtcacaaaaccagtatctagtctcacacctcacttggcgatcctctaga

SEQ ID NO: 699237 - DNA, 175 bp, Homo sapiens
gagaaaaagaagggattggatccagagcattttgccattacagtttccattaactccttccccccgctccccccaaaaatttgaattttttttttcaacactctttacacctgttatgggagaatgtcaacctttgtaagggaaccaaaataaaaattgaaaattaaaaaccgta

SEQ ID NO: 699238 - DNA, 537 bp, Homo sapiens
taaaaaaagggtctccctgtgtcacccaaacgggagtgctgcaggggcattgaccacgtggctcactgtggaaccttccacctgtgggggacagagcaagacttatcttaaaaaaaaaaaaaaagtgttggggcgcgggggcccaggccctgtgttattcccagcactttggggaggccgaagggcgagggtggatctcacggaggtctcacggagattcgaaaacacactccggggcaaacccgtggggaaaaccccattttcttacataaaaattaacaaaaaaatatagccggggggagaagagggggggcgccgtggggtcccccagaacaactgtggcggagggcgggagggagaggaaaaaaacagccgggaaacccacagggagggtggaagacctggccaggaggagacgctggagaatagggcccccacgtggcccccacaagccccagagggggaaaagggggcaaaagaacatccgggtcttaaacacaaaaaacaccaaacaaacaaaagaaacaacaaaacagg

SEQ ID NO: 699239 - DNA, 862 bp, Homo sapiens
  misc_feature (35)..(35): n is a, c, g, or t
  misc_feature (162)..(162): n is a, c, g, or t
  misc_feature (337)..(337): n is a, c, g, or t
  misc_feature (393)..(393): n is a, c, g, or t
  misc_feature (479)..(479): n is a, c, g, or t
  misc_feature (487)..(488): n is a, c, g, or t
  misc_feature (569)..(569): n is a, c, g, or t
  misc_feature (606)..(606): n is a, c, g, or t
  misc_feature (611)..(612): n is a, c, g, or t
  misc_feature (627)..(627): n is a, c, g, or t
  misc_feature (708)..(708): n is a, c, g, or t
  misc_feature (735)..(735): n is a, c, g, or t
  misc_feature (751)..(751): n is a, c, g, or t
  misc_feature (772)..(772): n is a, c, g, or t
  misc_feature (798)..(798): n is a, c, g, or t
  misc_feature (841)..(841): n is a, c, g, or t
tgaacacaagtcttagaataacaaatataaactantataaaagtgtagcttatgcatgatgtataaccaattcattgtcagtttaggtagaggaaagattaaaaaatctcaatctaggtaataagatcaaatcaataaattctttctgtgtacaaatactantatttcatttggcatccttaaaatggttcatcctaaacccaaccattacaaccaacatcagtcactgttatgatatatgatagtcattattccaaaatagcagctgaaaagatctctttaccatatacgcacaatgaaaaacaaagaatttacaaatcacatcgtaccacctgcnaatatctcaatattgtttgggccagactcccaattagggtttggttaatactttcngggcttttactttccccccccgctcattgtggtttgctagtgctttggttttcttaccacaaactcccggctctttgcataaggcncccagtgnncttctgctggattctttcctggctgctgcgcgcccttccttttttatgttgtcatttatcttctcccatcgggtcgggctnttcgggcggctctctctctccccttctttcttcccgnggggnntccattctggtgggnctttacaactgaccagctctcttgtcatggctggattttcagtaaagtttataattagtttcataatctgtatcttggtgnagtgatttcccaggtataacaaagcanaaaagtctggtaaagnataggtaagcaaatgttggtnatgattagtcacagtcatgttggttnacagtcttagcccagccatctgcacagctgtgtccaagcgtcntaccatggtgtcatcacacac

SEQ ID NO: 699240 - DNA, 95 bp, Homo sapiens
catggggtgggttcatcataagtaggatgggattatccttcctgggaaataaattcccgtttttatccaaaagagctataaaaagttttcagtga

SEQ ID NO: 699241 - DNA, 284 bp, Homo sapiens
tgagaacaagtaagtgaacacattagttgtactgaagcaacttagttacgatgactcgctgatcatcaaacaacctgtgtgtaatattttttccccaaaaaacgtagcacccttcagcaggaccctataaaactttcctccagcccttgcctctttgcaggtagccccttctctgctgagctgcccactgcaacatattttcacaatttctctaataaatctgcccttctttacctacaactatcttggtaaatggctttaccacctgcaaaactgaccccagg

SEQ ID NO: 699242 - DNA, 367 bp, Homo sapiens
  misc_feature (128)..(128): n is a, c, g, or t
  misc_feature (134)..(134): n is a, c, g, or t
tgggcggtatgggtgaggcaggaggtggggaagcaggatctctggaggctgtccagtctctttcctgggtgagggtctggctgagtctccgggtagagatgggaaccagagattggaagaccagaggncacggncacgctcatgacggggctggggtaatgtgggctcgtgataggaagaagaggaaacccttaaagctcttggggtacaagggagaagcaggttcctggtcttgggctggcaaattcaaagggacctggggggaacacatgaggaacctgaaaagcacaagcccgaggccaactaattcctccggtcactgccccagccatggccctatctgcacacccaggccctgggagcagcg

SEQ ID NO: 699243 - DNA, 104 bp, Homo sapiens
aggaaaaacgacggccagcgatttcgttgtcttcctggtggctgtctcttgaggaacacccccccctgctcctcttcttgattgccttcgcggctttttcagga

SEQ ID NO: 699244 - DNA, 430 bp, Homo sapiens
  misc_feature (1)..(2): n is a, c, g, or t
  misc_feature (430)..(430): n is a, c, g, or t
nngacatagtgtgcccacttatattctgctctacctattataaatattgggcagtagtgtggcaccattagttataaatggtgtgccaatattgatacagcattattaactaatgccttaggttacattaagggtcattctttgatttgtacattctatggattttgacaagtgttttgtaacatgtatccataattacattatcatacagagtacagtcacgtgtcaatactttctgagaaatgcatcgtttggagatttccaagttgtgtgaacatcatagagagtactttacacaaacccagttgatataacctactacacagctggtatatgatatagcctattgctcctaggctataaacctgtacagcaggttactgtactgaataccataggcaattacaacacagggtgttttctgtttctn

SEQ ID NO: 699245 - DNA, 702 bp, Homo sapiens
  misc_feature (179)..(182): n is a, c, g, or t
  misc_feature (184)..(186): n is a, c, g, or t
tgagcctgggaggcacaggttgcaatgagcgggtatcatgccactgcaccctagcctgggcaacaacagcaaacttcatctccaataaataattaaataaaataaaagcagatacctggaactgacctgtcctttgcttcctgggccacacagacacatgttgggtttcctttcactcnnnncnnnagctcttagcttctgccagctatgatgacacagtgaagctgtaccgggaggaagaggatgactgggtatgctgtgccacccttgagggccatgaatccactgtgtggagcttggcctttgacccgagtggccagcgcctggcgtcttgtagtgatgaccgtactgtgcgtatctggcgtcagtatctaccaggcaatgaacaaggggtggcatgcagctggctctgaccccagttggaaatgtatctgctactttgtccggcgttccactcaaggaccatttatgacattgcttgggtgtcagctgacaggggcatctggccacagcttgtggggatgacgcgatccagcgtgtttcaggaggatcccgaactcggatccacatgtagcctcgaacgttctcgcctgacatgcccatcttgcatcaggcccattcccctaggactgtcaaactgtgtggcctggaatcctccaaggagccagaggctactggcacgtcctgcagtgatgactgggg

SEQ ID NO: 699246 - DNA, 463 bp, Homo sapiens
  misc_feature (179)..(182): n is a, c, g, or t
  misc_feature (184)..(186): n is a, c, g, or t
tgagcctgggaggcacaggttgcaatgagcgggtatcatgccactgcaccctagcctgggcaacaacagcaaacttcatctccaataaataattaaataaaataaaagcagatacctggaactgacctgtcctttgcttcctgggccacacagacacatgttgggtttcctttcactcnnnncnnnagctcttagcttctgccagctatgatgacacagtgaagctgtaccgggaggaagaggatgactgggtatgctgtgccacccttgagggccatgaatccactgtgtggagcttggcctttgacccgagtggccagcgcctggcgtcttgtagtgatgaccgtactgtgcgtatctggcgtcagtatctaccaggcaatgaacaaggtgaggtccattagtagagctaaagaagacccatctctcaaggggttcacagtctgctaagcctcgacatgtt

SEQ ID NO: 699247 - DNA, 459 bp, Homo sapiens
  misc_feature (3)..(3): n is a, c, g, or t
  misc_feature (389)..(389): n is a, c, g, or t
  misc_feature (413)..(413): n is a, c, g, or t
  misc_feature (434)..(434): n is a, c, g, or t
  misc_feature (448)..(448): n is a, c, g, or t
atntcggcacagctctttgcacatgatagcatttatacttgagaaaaattgtacaaatatagaaaatgtagaaatccattaatgcctactcatgtgttactaaatatcagagagtttgtacttaataaaaggattataaatgtagtatttgttgaaagacctattagaaaatacaggtcttaaaagtgaagaagagtattctgaagatagacaatagaaatagtaagagggttgtagtacctgtacttgcatcatgggtcttattgtgcatatttcatactagaagaaaaccctggaagcagttgcccaaactttctttgacattagaggaatttatattgggaaaggaaattttacaaatgtaataaatttgggaaaagcctttgttncaaaaactatagctttaaaaaaancccgtttattactcggaggtnttttgttggtgtcngtaggttggaa

SEQ ID NO: 699248 - DNA, 405 bp, Homo sapiens
aaagtactgtcaggaatgttaaactcggccaggtgcaatggctcacacctgtaatcccaaagtgctgggattacaggcgtgaaccactgtgcctggccaaaaaaatagacttttgtaatgggatcctgagaccaaaatatttgagaaccactggcctaaagtatatgaaatattataatctgcaaacttgagcagatgcaaaatataattctgccttgggagcctctttcttttggggtggctgttacatgataatgatggatagtgaaaataaatctcacactatgggccaggtgcggtggatcacgcctgtaatcccagcactttgggaggccaaggcgggcggatcaccaggtcaggagatcgagaccatcctggctaacacggtgaaactccatctctact

SEQ ID NO: 699249 - DNA, 395 bp, Homo sapiens
gtgccaggtactctattaagaattttgatataccttttcttatttaactctcacagtacttttaggaagttggtagaatttctgttttctttagtgaaaaaaatggaagctccaagatgttaatcagcttgctccggatcacatggctaataagtgagtggcagaaccttattcaaacacaagtccttctgattccaaagggctttttctataagcattgttgtaagagaatgttccataaattctcagttgttgaatttttcagaatgatttatttgcagatataacagataggctgtgatgtcctcatgtgtgctttatttattgtgctatcctttatgtagcagcatatccataaggaatgaaaggatatcagggtgcacatggtggattta

SEQ ID NO: 699250 - DNA, 417 bp, Homo sapiens
attcactcttggtcaaaatatataaacttaggcatcctaaccactttagtctatcccctattggaatatattccatccccttggatgttttttagctactctccccctaggtaaggaaattaatcataacttattttgcaatcacaaggaatttgaggtttttccccctcagaattcactttacatttcttacattaagggttttaaaaataagtgaggattttaaagtcccaatgggacttttattcaatgtctcgcgttttcccgggatattataattaaaacacaaattgagatgagaggtttggggttgggcggagacaagaggtaaatctctcctcaatatataattaacccgtgtcctcaaatcttctgaggtgagggcccaaggaccccttcccctgattttaaaaactt

SEQ ID NO: 699251 - DNA, 381 bp, Homo sapiens
  misc_feature (171)..(171): n is a, c, g, or t
gacttttttcgggggccttttcatcatcttgctttggcggacgctcaagtacctgtggaccgtgtgctgcccctgcgggggcaaaacgaaggcccccccctttgggtccccggaaattcccccaacagcgcggaattggaacgggagtccgccttaggcccgggttttacncggagggttttccctggcgctcgaggggggtaaatgttgtcggctttaactatttctggggcaaacgccccccggccctgaggctggcgaccccttcgatgtatggttgctaggctccctgcctggtttgtagttgtgtccctaaaaatgttttcccttccccccaacccctgggtggagtggggggcccccccctgataaaaaactgca

SEQ ID NO: 699252 - DNA, 327 bp, Homo sapiens
  misc_feature (61)..(61): n is a, c, g, or t
  misc_feature (69)..(69): n is a, c, g, or t
  misc_feature (92)..(92): n is a, c, g, or t
  misc_feature (116)..(117): n is a, c, g, or t
  misc_feature (135)..(135): n is a, c, g, or t
  misc_feature (140)..(140): n is a, c, g, or t
  misc_feature (142)..(143): n is a, c, g, or t
  misc_feature (167)..(167): n is a, c, g, or t
  misc_feature (169)..(169): n is a, c, g, or t
  misc_feature (181)..(181): n is a, c, g, or t
  misc_feature (187)..(187): n is a, c, g, or t
  misc_feature (191)..(192): n is a, c, g, or t
  misc_feature (195)..(195): n is a, c, g, or t
  misc_feature (219)..(219): n is a, c, g, or t
  misc_feature (268)..(268): n is a, c, g, or t
cattacttaagaatgtataggactagattgacattataatgatagtacatggtttcacaantccaaganttatgacataatctctacatcgntgcccatcacctattatatttctnnatgcccactctgcttgcncacanannttctgatggagtgaatggagaagncncctgaagtctgnctgacnattnncangcattcctgtgtccgtctgttcanaagttccagatgcaatgtttgtcaaagcccatgcagcttcaaactgtanagaaggattgtcatctctttcaagacaatggacctaaatggacaatggacctaaatgga

SEQ ID NO: 699253 - DNA, 422 bp, Homo sapiens
tgaattagagttgttgctctccttcacaacgcagatacttgcaagtaagttttcttactatccattgcattttatttctctctagtattctaaatatttgcttcttttttttcctttgtgagatttcctaatcccttttcaaatgttttatcatttctgtttctttgtacttagtagttacttagaaaacaagtgttaaatacctattaatctttcaccaaaacttattctggtactttttctcctatattatcaagtgaatcagtatgtataataaattggctctcagatagtccttgctgttgggaagttcttcctccaggggaaagtttttgcccatctctctatgttattccctgtgcacattctaatatgtttttgtttgtgcaggcatcattcagtttatgtattgtttagatatg

SEQ ID NO: 699254 - DNA, 388 bp, Homo sapiens
tgtagagacaaggtatcaccatgttgcccaggctggtctcctgagctcaagtgatcacccacctcggcctcccaaagcgctgggattacaggtgtgagccaccgcacccggcccagattggcttcttccacgtagcaatgtacatttcagcatcctccacatctgctcaaggcttgacagctcatttccttttatccataaacaatattcccttgcagggaagcgccaccgttcgcacatccacccaccaccacagggtatcctgactgcttccaccgcgcccgtatgaatgaagtggttacaaacacctgcgtgcagttttcatgtgaaggatggttttgaacatttttaaatgttgaaaaaaatccagaggagaatatttcacaac

SEQ ID NO: 699255 - DNA, 258 bp, Homo sapiens
agaggacctggaatgtgtggtgtatgccagattaagtcatatctagttctctcttcaaaatcctaatacatcaacagactttaggtttctggaaaacgttgacttgcattttattttatcatctttttttagaaaatagatcaattaaaatataaaattgcccctagtggactttcgaaagataggtttagccatttcgaaagaaaactattttcattccttttcttaattccaaaaacaacttagttttacttggaa

SEQ ID NO: 699256 - DNA, 836 bp, Homo sapiens
aatcagcagttaattacagctgcaatgtaacaggaaaaatgctaagtggcttaaacaagatagtttatttctctctcacataagggtctagttgtaagcaattcacggcaagtaagacaattatgtcccccagaagacttcagctgcttatcattacagttttctgccttgccatccctggttcacaatggagctccggccatgatgtccatgtcccaagcagcagatgcgcgaggagagaagtaatgatgaagggtacaaagcaactgtttcttaaaaaaggtatctgaaagctctcacatgacattttcacttacatggcattgatgtggccatatgtagctacattttccaaggaaggctggaaaatgtaggcttttattctacgtattgtgtaagaccatttgcctagctgaaactttattattgtgaacaaaaagagggaacagactactggagaacaattaacatcttctgctagtagaaattctattagctttatcaactccatggagagagcatcttctcaggtcctgtaaaaaactcctggcaacgctcttataggctccacttgagtcctatgtccattgttgaacgatcactttctggggtggtttgaccagacctagcatgtgctcacccccgtggtggtgatgagggtagagccggaaaggtaacatacgcaccagatgggatggattcctccaggagaaaagctatgtgtgtgttggcggggtgaggaatggggtgtctaataccagacaaagggaggcaggaagctggattgtataataaaggagttcaacaaagttcttggatcaggttcagcttagaag

SEQ ID NO: 699257 - DNA, 651 bp, Homo sapiens
cgggcagtacggatgtgccacagatgccccagacccagcacaggcgcagacctggcgccggcttgaaatcacaggcaccaggaagtttcccccaatgccaaatgtgggcacagccggaatgcaaatgtggctggagacagctctgtgggtgagctgagccgaggctggcttcacaacgacacccaggggttcccacgaatggctctggctcaacacagtgggaaggtgaaggagacagaaagcactgtcagtcatggctttgccaagcccattcttccctgtggtttagaaaacagaactacattattctcttcccagcccaacctttccaacctggagagaagttgcagggatagcagagcaaacacccattcacttcgccgaggttccctggcggcgtgctttgccacaatcgcttcaccactctttctgtgatgtgtaggtacacccacatgcactcacacgcatccgtacatgcacacagacacacaggcacttatgcatccgtgcacacacacaggcactcacacgcatctgtgcacgcacacagacgcacagacacgcatccgtgcatgcacacacacaggcactcatacgcattcgtgcacgcagacacagaggcactcaaagcatccgtggccgcacaaaggg

SEQ ID NO: 699258 - DNA, 1134 bp, Homo sapiens
  misc_feature (580)..(580): n is a, c, g, or t
ttgctagtgtctgagtgccttgtgttgttttgctgtggctggattgtgctgtgtgatgtgtgtgttctgtgttgctgctggccatgtgccaatgccctggttgtgtgctcctgcatgctgcatgctgccccctgtgtgctgccccctgcctgcctgccctctgcctgctgtgatgcctgctgctgtgagctgtgagcctgtgctgatgctaaccctgatgccagcctgtgctgtgtgctgttcctgtgatggtgctgtgtgtgctgcatgtggatgtgtgtgcccttgacttgcagtctgcagctgttgtgcaccctggtgctgtgcctgcccatttgtgctgttgacatgctgttgcacctggctgtgtttgtgtgctgctgtgctgtttgtgctgttgcccctgtgcgccccctgtgtgccctgtgtgccattgttggctgtgccccattgtgaaccgaccggcggtctttactttttcccatgatgcccccccctgtttgtgccctggcattgtgatgatggtgtgcccccttgtgtgctgtgggtgtctgtgactggattgatgtgtggcccatgnttgatggctgccaatgttgtgaagatgtggtcaaccctgtccaatggtttattgaccctgcaattggaggcctactggttgaaatgctgcccttcagaccttaggatgtgagttgggagtcccttgtgagcatgcctcagctggcgcccttctaagctgaccttgccaaggtgaaacggagtgtgatgattccccaagaaaccttggatgaattttgacctgtttggattgacggctccttgtggacattggaaccgatgttgaactggatttgccctggtggcttgcccaatgggggttctaatgcacggcttgcttgggttgactttgttacagaaacccaacaggaggtgcctttcaatttcttggccttgctttggaccacagattcccgggggcattgcaaggaaagcttgaaggcacagccccaagacagaagttcaggggtcccccgacccaaggagaactgtgtggctccacagtgacaatctgtgcccccccaaaccttcgtagcaacagcaataccgcgggacccttcggcagggcttggtgcc

SEQ ID NO: 699259 - DNA, 375 bp, Homo sapiens
taccccaaaatccaaacagggccccaacatgggccggtcccccattttaatgggggctgggaattgctttttaaaaccactgaaaacccaagggaatgaagcccctggaagtacaaaacttgaactacatttaccataggactcttgggtgcctgacctcccttgggaactcctttggcattcacagtcccttcaagggtatttattccacacccctttccactctgcccctcagcagctcccccaaaggctgggctgaaacttgagcccccgtggatcaacgtgctccaggaggactctgtgactctgacatgccagggggctcgcagccctgagagcgactccattcagtggctccaccctgggaatctcatt

SEQ ID NO: 699260 - DNA, 1129 bp, Homo sapiens
caagagtatgtaaaaaaaaaaaaaaaaaaaaaaaccaaaccacgggaaatattcaattgccaaaagggttacccaaattccattaccgtggaaagccaaagcagacagaaaccaagttattgcattgggagtgattaaagccattgtgtttataagtgggtgaacaacctctcaccagaattcacctaagtggttctctagaaggtttaacctctcaagtgtgggccaagccgtggggtcttttacagggcatagtctccagtgtggcccaatagttccctatacagcccaccaggaatattagggaatctcgtggtataacacctgtgaatgtgttctgtgtctgtgaaaaggcttatggattttaaaccctgtggcatgtgagaggggcattctccctatttttaaaaaacaacacaaactgtgtgtatgtggtgtcgcaccttcaaggtctgtgtcctcttgtggaaaggggaaacactgtggaaaaaaacctgtgaagtgttaagcccccctgtgggccccagaaatataacacgtggccgtgaaattttctctcagaagaactatttaattttccactcctgtggggaaaacacaaattctccctacccatataagccacaaagagcggagagccccttataacagaagaggtgtggggccaatataaaatgatctttctctgctgcgccccctctttaacgagtttctccccagaaaagacatattatatttctacccgtgggatcaccgtggaagaaaaatctcccggtgggaaaaacctataaaatatatgggcgcctgacgggaaaacaatttcttcaaacagcgaccgtgaccatgtggcacccagtagcactgtggggagtatatcgaccactataataccaacatcaaccttggggcgcgaacatctcgccccgtgagagaacagcttctgttctctgccgtgggaggcacccccgtgaaaaattcgcacatcaatgggacaccttataacatgctcacagaagtctctctttataatctccctctgataacaagcctgtggcccccccattaataatatcgtgggaactaccaaccccaatgtggattccacataaggaggaacgccatctcgtga

SEQ ID NO: 699261 - DNA, 322 bp, Homo sapiens
cttctcttcaccctgaacaacgccgggacctctttgtatcaaactcaaacaggtactgcactctcctggacagagaaactccgccctctcttttagagcctcgtacttcttttccagctctaagcactcaccagtaagagcctcctgatccgccctcttacttactggcggtacctagtggctgctgtcttgtaatgctaccatttttttcagcttcttatccagtttctcaccctttacttttgctgctaccatcttctctccaggaggatcgtaaggtttgggacgggcagacccacagagaacacctggagatgggagg

SEQ ID NO: 699262 - DNA, 113 bp, Homo sapiens
gatctcaaacatgttcacaaggaatatcattgggaaaggaggcgcaaacattaaaaagattcgtgaagaaatgcaacaccaaaatctgagcttccagcagagaatagcaattc

SEQ ID NO: 699263 - DNA, 664 bp, Homo sapiens
gaaaccccagggttccactgtgtctgtgttgggcccaaaaacaagggagggggcacaactgtggaccttcctcaaaaaaagttcctgcgccaaaaaattcccacgtggacgtgcaatcaagtcttggtaaacaaggccagtaaggcggggttccaaagcccagaatccgtgttaccggcgtcaattttttcatttgcaatcatcaaaagttagtgccaaaaatgtaatgatgacctgcacgtcaagccggagtatgccttttcctagagtcaaagccatcttggcacaattgcattgtcagtctcgtaaacacagctcatgtcacaagagatcaataaagtctgtaatgtctttatcccagcctttgtaaataagtgcgctaagacggacgataagcacacatatgtggcagagaagggtaaaatacatgctgtagcaagtcaaccatgctttacgctgataactccacatttaagagcgtctcacgcctcccatgagaataatagacactgaatggagatcgcaagccaagtcagcagtcctcatgggtggtgggtgaagagccaacacctggtctaaaatgcatgcatttcctcaatcaattaaccaccatgcaaagtgcttccattaatataatatggtaagtatctacgaaaaaaaaaaa

SEQ ID NO: 699264 - DNA, 1361 bp, Homo sapiens
gctggcgcgctgctggatcaacgatgagcctgcagtgagctgcgtgctgcgtgctggctgtgtgctgcctgatgtgtgcatgtgccaatgctgtgatgaactgcctgaatgctgcttggacgcttgactgtgttgctgtgctgtgtgtccatgtggctgcttgcttgctgtgtgtgccctggtgctgctgctgtgttgatgcttgggctgtgctgtgtgtgcttgtgtgcctgtggtgtgcatgccttgtgcgctggctgtgtgctgccccttgttatacccccttttgttcccattgaactagaggtcaggctgacacaattttccccgcagttcaccaccggagtactgtttccctacacctagtgaattcaaccatggacttccagcggatccgacgggcctgcaaacgcggtggcccccattaccacccccaaaacaaccaggttgccaatcagaccaaacgcgacgaccgaccatttgctccgtgtgccacccccacccgccccgggacccacgcgcttcagtattccccacttggtggcacccctcgtcaacgagcaccctggccctgatattcaacacccgaactgacccggccaacgctcccaccctacggcaacgaccttgctagaccgcacccataggtcgacagcgaccacccacgacaacaccagagaccaccaaacatgagaagtcccacaaggggcaccaccacgcgcacccagcatctcactaaaaacccgccccgtgcgccactgaacacacggcacgcaggcaaaacccacgaccagggatggcagccataccaaacattgaccgaattccgcccagccgcttcccagcagcgcgcaagcagccgcagcatatcccgggacgcacgcgcccgacagcccgaaaaggtcaaaaagcacgctgtgcacactcgacagaacggccccagaaccgcaggaccagccttgtgccacaccacacgacgcatagcccccagtgcacggggaccacacaatcagtagcatccacgggcaaaaaagcagcccactttgggcacaacacagaggaccccaccagaagcgccccaccgataaaaatagtcaacacacagcgagcaacgcaaaccaaatagcttgaccaagctactccgctctgtcgctggcgcagaacccaaacattatcatcaaagcagcccaccaaacatacgaaagcttccactcgacaccacctcaaagatcacggtggcgcataatggtcggccccacaccaagacaaattttgcggagcaccaacaaaaacccccatagcctaacaacaaacctctgacgaggcaactattcctgatcgccaacaaacacccgacgacg

SEQ ID NO: 699265 - DNA, 503 bp, Homo sapiens
gagttaccagacaacaggcgtaccatttgagtcttaggggtcgagtcctctcgttatcaccacaccacattgcttcacaaataaaaagcaaaaatccaattcacggcacaacctatactgaaatttaaaatgcaaatatcccttgattcagcaattccaatccttggtatttatctccaggtacacaggagatagatgattgatagatagatagacagacagataggcagggcgcggtggttcacgcctgtaatcccagcactttgggaggccaaggcaagaggattccttgagtgcaggagtttgaggttaacctgggcaacatagtaaaactgtgtctctacaaaaatttttttaaaaattagtaaggtgtggtggcatgtggctgtagtcccagctactcaggaggctgaggtgggaggattacttgaacagggaggtcatggctgcagtgagccatgattatgccactgtaccccatacaggctgggtggccagaagga

SEQ ID NO: 699266 - DNA, 204 bp, Homo sapiens
cgctttgtgtgtggacgtcccacggggcggtgcggcgtccctctgcagcgttagacttctttgggactgggccacagttacttacagacaggcaatctatacctgcgggggccctgaagaagtccaatgcaccgcttgtcatgtgaccctctactatgaagcactgtgcggtggctgacaagccttcctgatccgggagctctt

SEQ ID NO: 699267 - DNA, 405 bp, Homo sapiens
attaatgttgtctaggaattataatagacctcaaacttgttttatacaaatttaatacatatattggaattattcacgttagattatgattggttatagtattaatggttataggctgggtgcagtggctcacacctctaatcccagcactttgggaggccgaggtggctggatcacctgaggtcaggagttcaagaccagcctggccaacattgtgaataataccaaatataaataccactataaataccaaaattagctgggcgtggtggcaggcgcttgtaatcccagctcctcaggaggctgaggcaggagaattgctggaacctgggaggcagaggttgcagtgggccgagatctcaccactgcattccagcctgggtgatagagcgagactccatctca

SEQ ID NO: 699268 - DNA, 293 bp, Homo sapiens
gtgatatcgagagtcgtgaaggtgtattgacatgacgctatagactatacgagtgctgatcggtcattctccatgtgggctgacgcagcgatattactacagattgaacgggtaggcgatctgattcagtgcagtgttgcgcgcgttgctgcatgggtggtggtggtcaccatgtcatgcagctgtttttcaacttcgatgaccagcactgcttcgagtatctgttgttcgaaacagggcggcgccgggctggacgtattcttcgtcatcagtggcttggtgattatcctcgc

SEQ ID NO: 699269 - DNA, 179 bp, Homo sapiens
atagatgtgctgtgactttgatgacttggtgtaacgtagaaacgcgtaaagacagagatgagggcacagagaaaactggactgggcggggaacagaagaacatggaataagaccaagaggaagaagaggcagggccacatgtgtaatctctcctcagcaggtaggtatgatgcaggacg

SEQ ID NO: 699270 - DNA, 882 bp, Homo sapiens
ttgactgaagaggagacccgtgtcatgtttgagaagatagcgaaatacatggggagaatcttcaactgctggtggaccggcccgatggcacctactgtttccgtctgacaacgaccgggtgtactatgtgagttgagaaagaattattggaaggcttgggccggccaaattatttccgggggaccaagctgggtgtcgctgggggacctgcttgggaaaattcactaaaacccacaagtttcggtgtgcacgtcacagctcgtggattaccttgcaccttatgccaggtataaagtcgggataaagcctggtgcagagcagtccttcctgtatgggacccatgtgttgaaatctggtctgggtcgaatcactgaaaatacttctcagtaccagggcgtggtggtgtactccatggagacatcccttgggtttggggtggcagcaaatctacacaagaatgcgaaaagtagacccatgggatgtggtatttcatcaagcaagacattggggaatttgtgcggatgaagagacgttgatttaaaagaagcattccaatgacagacgggtgtatggaaagggcgagcttggtttcctgtgttgtgtggactcccatcactccatgttgaatcggccacaatctgacatctttcaggacttcttatttaagaatcccaatcatgcgaacggcggcggagtccatatatccggatgtcacaggggtccgaccttggagaatgaacggtcacatggaacaaggcttgtcgggaatggaacctggacgaacacgtggtgcgatacacgtaacacgggtgttaaacccaccgcagaaacacggaacaagacacacaccaacagggggagaaccaaacatcggacacaagc

SEQ ID NO: 699271 - DNA, 115 bp, Homo sapiens
  misc_feature (8)..(8): n is a, c, g, or t
gctatttntggtgattgtttcctttgctgtgcaggtttttagttttaaattatccatttgtccattttggctattgttgcttttgtttttggcaccatatccaaaaaatcattgt

SEQ ID NO: 699272 - DNA, 160 bp, Homo sapiens
  misc_feature (145)..(145): n is a, c, g, or t
ctgtgagtggcgtgtagtgggatggcagatgaggaagaagaccccacgtctgaggaagaaaatgaagaaatggaggaggtgcagaaggtggacaggtaacaagaaagagacttttttctaaaggaattgcgatgtattgatgtcnatggctttggggatt

SEQ ID NO: 699273 - DNA, 372 bp, Homo sapiens
taagtgtgtgtcatgtgattgtgttggattgtgtgtcatgtgattgtgtgtgcacatgatgtgtctggtgacgtggtgctggtgtgtgatgtgagcgtgtgtgtcatgctgatgtgtgtgtgcgtgtgcatgagagcatgtgtgtgtgcacgtggatgtcagtgtgtgtgtccgtgggtgtgtgtgtggatgtgtgtgtggctgtggatgtcagtgtgtgtgtgtggatgtgagtgtgtatgtggatgtcagtgtgtgtgtgtggatgtcacggtgtgtgtggatatcagtatgtgtgtctgcatggtgatgtgtgtgtaggtgtgagcgtgtgtcaatgcggctgtgttggggcgtgtggctctgagtgta

SEQ ID NO: 699274 - DNA, 213 bp, Homo sapiens
atgtgtacagctgacatcatggtcccctgcatgtgtgattctgtggctagtcaccagcctgggagcagcagacagaccgggtgacacttacaactcagaaagcaatagcagctctgacgccttgtccaaggttctcatctggtggctcagtgcgactttgggatgccgaaatgatgaaatccacagccatagcacgggtggggatacccgggg

SEQ ID NO: 699275 - DNA, 163 bp, Homo sapiens
ttccgcaggccagccggctgacggcgctgcgcaacaagccgagcctgaagccaagcacgacgatgttgtcggcttcagcattggtttcagcatcacggatcatctgttgaatttcttcatcagacaggccggagttggccttgatggtgatcttctgctcttt

SEQ ID NO: 699276 - DNA, 178 bp, Homo sapiens
ctcctgtacattaagaattactttagatgacaaacgcagattacaaggtcgtagggaagtactttcatcacccaagcatcagaaaaacacacaagaacaataacacagcaaacagattgagtagttgttgtggtttttgactaaggtgtatgttagtttcatcagaaacttaaaacat

SEQ ID NO: 699277 - DNA, 677 bp, Homo sapiens
  misc_feature (645)..(645): n is a, c, g, or t
tgggcaagatgaaggctatcgttgagaagcttcgcattcacatacagaacgtgacagcctttgagaacctccgtgctgcagcagcacttcaggaacctggaggtccttggccttggatcttgatggagccggaacaagcagtggacctagacattgcccaaggttgaagcaatgcaataacaagactgggctccttggtggatgagtttaacggagcttgtttacccaccagattactatcctgatgggcaagttaccatagatgaagacactgataactgaagtgcttctgtgaagcaaaaggacccaagactggacgtattcagagagacggatgctgatagacccacagtcaagtaagggtacgatgggcaagttaactgtgcccaggctgatagaggcctgccgggccttacgggctgaagagttgtctgaagatagcaggagctactggaagcccatcaccaagcatcttcacaggactagaccagaggcagcgcgtccagctgcccttcgcgcaatgtggcacacggctgccatgagccttgtctctcagccagttaaaatgtgtttctcctgaggctaggacagacctctacccaacataagtcgagggacttgatgttatagcgctgtcatgttgcnagtgtactgcgtagccctcccacatcggttgc

SEQ ID NO: 699278 - DNA, 687 bp, Homo sapiens
  misc_feature (118)..(118): n is a, c, g, or t
  misc_feature (183)..(183): n is a, c, g, or t
  misc_feature (188)..(188): n is a, c, g, or t
  misc_feature (191)..(191): n is a, c, g, or t
  misc_feature (214)..(215): n is a, c, g, or t
  misc_feature (252)..(252): n is a, c, g, or t
  misc_feature (260)..(261): n is a, c, g, or t
  misc_feature (265)..(265): n is a, c, g, or t
  misc_feature (267)..(267): n is a, c, g, or t
  misc_feature (290)..(290): n is a, c, g, or t
  misc_feature (368)..(368): n is a, c, g, or t
  misc_feature (411)..(411): n is a, c, g, or t
  misc_feature (477)..(477): n is a, c, g, or t
  misc_feature (659)..(659): n is a, c, g, or t
ataacctcaccagttcctgtaagtataagatgtatattagtatcaaagattagatgaatatatatacatctattccataggtctgtgcttgcagtagtcatctatgcaccactgtccnatgtcaaaagaataatgagatgctacctccagtttctgatcctgattgcatagtgtgatgtcacnaatcncanagctgagtataatattattttannattaggccacttgatatagatattaatctggttcacnactcttannatantnttctgagaacccattgatgaganatgtgtaggaaagcaatgttttctatgctagcggtaccaaacctggacctttaagtatcattttttagctcattactnatatagaagattactaagaccagtaagggagccattttcttcncctcctctatttttattacttatctctctcctctttactcttaaaattggcaatcttctgacaacnccagctaataaaataatatagctatatataattcaaataactaaagaacttttgagtccatatatgcaggatttttgaatacctcactacatttgctcttataccctcactgtcctggtatcataaatattattaagggaagataacttagaaggggaaagcaattccaacctgggataaanaagtgattaccaataattatcttctcgt

SEQ ID NO: 699279 - DNA, 421 bp, Homo sapiens
  misc_feature (21)..(22): n is a, c, g, or t
ctaatgaaacagctcaactgnnttgcagagccaggctccttctgccatgatacagtttggatgtttgtccctttctaatcttatatggaaatttgatccccagtgttgaaggtggggcctggtgggagatgttcctgttatcgggatggatccttcatgaatagcctggtgccatctttgtggtaacaagtgagttctcacttgattagtttctgtgagaactgtttgttaaaaagagcctggtggcacctccctcccttcttcctccttctcttgctatgtgatgctgctgccctttgccttccgtcatgagtggaagctccctgaagcccccaccagtagcaaatgctggcaccatgctgcttgtacagcctgcagaactgtgagccaaataaacctcttttctttataaattaaaaaa

SEQ ID NO: 699280 - DNA, 89 bp, Homo sapiens
caagcagtgagaacgactgggcgtgctggacggacgagcttgtgggagccaatggagcaccttggacatctggcagtctggcaggagtg

SEQ ID NO: 699281 - DNA, 679 bp, Homo sapiens
ggttcggtcggggcccgggctccggtcccggggcggtgtgtggggagcgatctgtgtgtgggggacggcgtggaggggtggccgctgcgtgtgcggttctgtggggtcggcggggccgctgggctgccccttcttccgcctcggtatgctcgctctcttgtgctttccctgtctgcccgccctgttcctcctcccggtcccggcaagctccgtgcccgggacctgtcagcagaggagaccaggtatatgctggtctcgtttcgaagagccgcctatgctatcaaggctggatgggaagaaaccatgcaaggtggatgaatgactcgagacaccttcaggctgaaggacttacgatcttggccaatccctaaggacagcttggatttatcacattgagagatagattagtaactggcatagacgactatgggcagggaagaaaccctttttgcttggagccagcagtatttatcacaatttactgatgggagcaggtgataccaccaggtggggtccaggatgaggtactggggagcactcagatggaatgacgcaaggtagaaaacgtatgatcttcgaagacgggcaagtcaattacccatttgtactacatgtagataaatctcatggcagaaatacacagaaggtctgagaaggtaaaaacaaacacacgaaaaaa

SEQ ID NO: 699282 - DNA, 248 bp, Homo sapiens
acctaaggtcagagcagggaaaaaccccccctccctcaacctgatcctttccacagaggccttttcccttttccttccccgctgggaaagaagtaaatacagttaggggtcctattcaacacacacatggttccctttcctgagtcccatccctgggtgattttgggggtgaaaagtgggttgtgaggtgggccccatgttaacccctcccctttttttttcaataaaacgcagttgcaaaccccgga

SEQ ID NO: 699283 - DNA, 388 bp, Homo sapiens
tcgatgtatagaatgcatagagaagtggagataagtcgggggtgacggtgcgaggtgggttagtgtgaaaaacggtaaatgccagttttaataacaaaaatggtactaaacgcagatgaccattacattaatacagtataaaagagaaccagcttcactaaactgggtatgcccctattacaatagcaacgttatgccagaatgaactgaagacatgaacagtttggacaattctcttttccgcctacttccaaatagaaatagtccggcttttttcctgtacatacgtttgatgcttggtctataccatatatagtacaacaataaattctttagcaacctacgaaacagttactaaaacctcttaaagtttacttttcttttaggc

SEQ ID NO: 699284 - DNA, 226 bp, Homo sapiens
tacagtacgaccatagacaggctctcacatatgacctggacagtaaacgtgctacactggtaacatactagtatcaaggagaattccatatcatacatagacatacacattatatacttttcatcaactggaatgctctgcttacaggcattaccaaatcacaccctagtaactcgacagtctagagatgcagtggatattcacatcacatttttctagcacaagg

SEQ ID NO: 699285 - DNA, 362 bp, Homo sapiens
cgtctgcaccggcggcaagcgctggaatgtgcttgtacagcatgaacaggtgactgtgtggcaggccgtgcgggcgctactgctggcggtcctcgtctatcgcgcgcaaggcaatgtcgcgtgcatcgtgaacgtgaggcaatgatggaattgaatcacgatcataacgagcgcgatcgcgcccgcattggcgctgctgccggcgcgcatggacacgcctggggcgcgcgtgatgctgctggccatcggcctgcaggaaagccgcttcgtgcaccggcgccagatcggcgggcccgcccgcggtttctggcagttcgagaagggcacgcgcgccagccgcggcggcgtgtggggtaccgagc

SEQ ID NO: 699286 - DNA, 158 bp, Homo sapiens
accctgaaaggcctcactgtccacccatcacaggcatgctcattaggaaaggttaaaaaagtcaaaggaactcggccacagtcttaccccgcctgtttaccgactacatcacctcctgcatcaccagtattagaggcaccgtcctgcccgtttctggt

SEQ ID NO: 699287 - DNA, 1194 bp, Homo sapiens
ggcggatgctggttcctctctctgtaggctttgaatagctcgcacccagcgaatagtttccgcgcttgtcgttccggctcctcatcatggggcgcattggggatcggccagccaggggttatagaggcgttcgcgcgcgcgcatacctaagctttgcgccagagacagcgtgatcacatatggggtccgagtcgctataagatggtggaacaccctcgccgcccggagggtggtagcacgggatgtacccggggggggttgcagagcggtcccatactattctcggcaaacgggcggctttccacgcaaatcggagggaataagcggtgtatgcgaggctctgggatagaggggccttccgctgcttggggccgtgggaggttgggtggcgtcaatgcgcggcgtgccaggggtctggacaggaaaacggatggtcggggcgagtaatagggggaagccttgggataagtagtcgccagggttaaaatggatggacgcagctttgggagcccggcgacaagaagaaaggcccagaaggggggacagaaagagccagggccgctcgcatagggatgagacggccagggcagcgccagggcggcgcgtgccctcaggcgcgcgcgcgcagagcgaggaaggagggcagcgcagcgcaagccaagtgcaggcgcagcgcaggcgtgctaggagggttcctccgcaaaaggccgccgcgatggcgcagcgtggctgccgccagcgccgctgggccgccgcagcggcgtgcgcagcgcgtagagtccgcgaggaggctgcgcgagggagccgccagccagcccgccgctgagccgccaggactttgagccagctagcgtctgctaaagaggtagaagatgcccagtaggaggctgcactggagcagcgtacggctgccgccaaggagccaggcctaaggagctcaggccctggcggttgccagccgcgcgccagcggccggcacgagaaagtagcagaatcagccgaaggggacgggaggagcgcaaaggacagttgtttcatcgctcgcatggcgcaggccaaacagagaggagcctgtggacagccggatcgcccgtgacgcgagagagttagctgactttacacggagcggattgcaaagcaaaccaaagcaagaataaaggcagctgttgtctcttaatacctaccgggtaggga

SEQ ID NO: 699288 - DNA, 409 bp, Homo sapiens
gggacctctgcgtatacgggctcccggaccagtagactaggcagtcgtctagcagcgctccgtcgcaacggagaacgtaggcggtcgagcaccgagcctagtgtagcgccctgacggccaattagaacaccacctagcggagggggttcctagcggcgtgggctcctcgtggtatcagctccctgggtagtaggggtcttgcaggaagacagctgacggaaatgtataggcaccccaactcaagtcccaggccccaggcatctttcctagccctgccttgctaggcccatccagtccaggcgcctggagcagtgctcagctacttctcctgcactttgaaagacccctcccactcctggcctcacatttctctgtgtttaaattccttcccccaccccgtcgggtggag

SEQ ID NO: 699289 - DNA, 420 bp, Homo sapiens
ttctgaagaaacacaggtttcctgacatgttgattttagcctggtaagagccattttcgactcctggccacccaaactgaaaataataaatttgtgttgttttaagccactaagtttttggtagtttgttacaggagtaatatgaaattaacacatatttggtacctggagtggggttccgcctttgggcatgggcaaaaactagaagcattttgaggaccacgttagaaaaagcctagattggcctggaaagattttgagtaccaatatggtcactagcaactctggtaatgaggactcagaggaagtgaggagcacagtagagaaaatctacatcatcttggagtatacataaatcatcgtaaacacattcttggtagaaatattggtggtgacagtgcagaaagagatgaagaacat

SEQ ID NO: 699290 - DNA, 143 bp, Homo sapiens
  misc_feature (41)..(41): n is a, c, g, or t
  misc_feature (49)..(49): n is a, c, g, or t
  misc_feature (133)..(133): n is a, c, g, or t
  misc_feature (143)..(143): n is a, c, g, or t
gctcgtcgggtccctcagaccccagcccaggacctgcgganggccgcancgaggagagccaacaggctttcctttgaactgggccggtgttgcacctggaagcccccgtttcctggggacccagcaggcggcngctggctcgn

SEQ ID NO: 699291 - DNA, 203 bp, Homo sapiens
aatactgtgatgtaattatagcaaggcttctgatatgattgatgtttattatgactctatctggctgaaatgcatatgtttactctagaggtatagactctagtatagtgatagaaaatggaaataaatagccctacatgtcttttttattgtatgaggagtacaactattatgatgctttatacatgtagcacacaatagca

SEQ ID NO: 699292 - DNA, 248 bp, Homo sapiens
cgatcccctttgaacgagacgactcctagtgtgtaagagttctgctctggagcttctaagcacgtagttgaactatccctgtagggattgtctgatgaagagaaggtaaaaggctataattgtatttttttttttttttttttttttttttttttttttttttttttttttttttttttttttttttttttttggggggggcccccccccctttttttttcccccccaccagttttttttcccccaaa

SEQ ID NO: 699293 - DNA, 410 bp, Homo sapiens
tgctacaccacgagattttcagtgtattccaaacagccttcttttggaagaagaaaccatctaggactttcatggagaagagaagttaatccctggcttaaaagcatcaaaggacagctcgtctctcttgttaggggttcatgcagctggtaactttaagttgaagccaatgctcatttaccattcagaaaatcctagggcccataagaattatgctaaatccactctgcctgtgctctagaaatggaagatcaaagcctggatgacagcacatctgtttacagcatggattactgaatattttaagcccactgttgagacctactaaatattaggaaaaaagaattctgtcaggtgtggtggctcacacttgtaatcccagcactttgggaggccaaggcaggtggatc

SEQ ID NO: 699294 - DNA, 573 bp, Homo sapiens
  misc_feature (15)..(15): n is a, c, g, or t
  misc_feature (23)..(23): n is a, c, g, or t
  misc_feature (50)..(50): n is a, c, g, or t
  misc_feature (132)..(132): n is a, c, g, or t
agcagatggcccaantggctcangccattattcccaacatttagaaggcntaggcaggagcattcacttgtgcctgggagttcttagactagcctgggcgagacttcatctctacaaaaaaagcaccaacgncaaaaaaaattagccaagcatagtggcacacccctgtagtcccagctacttgggaggctgaggtgggaggattgcttgaacccaagaggtcgaggctgcagtgagccaagattgtgccactgcactccagcctgggtgacagagcaggaccctgtctctattttataaattaaaaaaggctgggtgtggtggctcacacccataatcccaacactttggctcagcagattgcttgaacccaggaattcaagtccaatctgggcaacatggggaaaccccagctctacaaaaaaaattagcctggtgtggtggcacatgcctgtagttccagctactcaggaggctgaggtgggagaatctcctgagcctggaaggtccaggcagtgagccaagattgtgccaccacactccagcctgggcgacagaatgagaccctgtctc

SEQ ID NO: 699295 - DNA, 190 bp, Homo sapiens
aaaataaacaataggcgtgtggtgcgcacacctgtagccctatactactcaggaggccgacgtgggaggatgtcttgagcctgggaggctgaggctgcagattgcaacactgcactccagcctgggtgaccgagtcaggctccatctcaaaaaaaccccaaacgtatatatctgctatccccaaacatat

SEQ ID NO: 699296 - DNA, 737 bp, Homo sapiens
  misc_feature (11)..(11): n is a, c, g, or t
  misc_feature (48)..(48): n is a, c, g, or t
gccctctgcgntcctcactcttccatcacccgcgtctatcatcctcanccacttctcacattaccaagggtcactccccaagcgctagacagcatgcacatgcctctatttttctgcgggcatctaaggagacagcgcctggctccgaaacccaggctggaccacacacatgccattgaaagaatgcattccagcaaaaaaggaaatcccagaaggacggaagcttcggttaccaaaggctccccaatcattgaaccctacttcagccaggaagaaactaaggggggcaaccaacagcgatacccaacctgcgctaaataaaaagcccagcagcggggacgaacccaacccacaggtgaaaaaaggattgtagatactgccaaaaatccccgatacccacataaaacgctgaacaactgcaggcacatgcaaaacccgataaggtccccaaccccatttcaataagggggtctcagaaaacataacgctcacaaaaaaagtggtggcaaaaccactgacacccttctggctgataacctgcccagagaaccaccaactgggggggaaaaaggagaagatctttcaataggcagcacaccaatcagtggtaacgctgataaagcccaaacaacacagatgaaccaaaaaaacccccctcacacaaaactcaccaaggacccaggctaaaagcgtcaaaagccactttaacctccaaggaacgacatccttgacacacc

SEQ ID NO: 699297 - DNA, 283 bp, Homo sapiens
tagagccccccgttcatgtagtcctagagctgtatactgacccgaaaggaagaaagcctctccttcatgaaagaaacagagggcatacggtaaaacctcgaatgggctgctaaaatacatagaagagagatacatactccagagcaagcaaaggacgaactagctcagtatcagaagtgggatatcatgagacgagccctgtgaatataccagtttccagtcaggaacttaacgagacctcgtgccttgcatgaacagagcagcgtacggagctctgaattcg

SEQ ID NO: 699298 - DNA, 309 bp, Homo sapiens
tgatcaaccgcgtccccagtagagctaaatgcagctgaatagtaaaaaattccagttaagacatgatagacaacgaaagtggcttctcaatatctgaacacacagatagctaacagccaaactgggattagataccccactatgcttgagccctaaacgtcatcagttagatcaacaaaactgctcgccataacactacgagcgacatcgtacatctcttcggacctggcggtgctcatatccccctagatcgatgcctgttcttgtcctctataaaccccaatcaccttagtgggggagtcctctata

SEQ ID NO: 699299 - DNA, 490 bp, Homo sapiens
cattaacattctcgggggggtcaggtaccggtggcaggagtggacatatttacagggttcatcaacatatgcaggttctccagggccacattggttacgagcacaaactttaaataagtactcttttcctggaacaagatcaggaacggtgaattctagatcagtcacaaagtccataactttagtccaggttttccgggcggacttctcgtttttcaacaaggtatccagttaagggacttcctccatcatcatcagggggttcccaagtcaaaggtacggagtcctgggttatatcaccaaatttcaattcttggggtgcactggggcgagcaattacatggacatcaatttccccagaaatggttttcacacggttttctaatttcagggtataaaggccctggtctgaacgttcactgggagaaaggacaagttcggcataggcagacaaggtcttcattttcaccgggtcccctgaggatcactt

SEQ ID NO: 699300 - DNA, 150 bp, Homo sapiens
cagcgccagtgtcctgcaggtccatgctgcgcgcgcccaccagtcccgcacccgttcgggccagggtaagttagccctcagcatgcctgtgtcaaatggaggcaccaatgtgcttcaatatacctagctgtatcggatttaaccttcata

SEQ ID NO: 699301 - DNA, 762 bp, Homo sapiens
aagagaaccaaagcactgaagtgtactgctacctgatggaactggacggcgtgtcatatcaggtagaaccctccaacgtagccccattcagccatcgtaagctatgcaggatcacttctaacacgacaggactgggcagggaagggattggtcgtggtattcatgtaaatagaacaataagtgggccatgtttactgatagagtactctcccaagaagcaatccgatctgcacctctacagggatagagctgcagtcatacccgctttactgaccaacaggaagcacaagtcaaagtaccagtaattgtaacacgcgaagacgttggagttctcactatcgattgaacctggtgactcctgaagagtagaacacgttgacgttggcaaaaatggcccagagataaacgtactagacacagggacattgtgcccactttagagcgttccttgtaagcactcgcaagccattgaaactaattctgcgtcatggatgctacacaaccacaagacgttctttgtccgatacacagccttggataccctccaaagttccttttaaccttcacgtgttactctattgtaaaacaactcgagaggtgtttgggtctagtttagccaaaggcttttcaccatagacacgtgctaaccaatgaccagtttgtgtacaccttcggtgtggccatctaactttaaagatggcaaaccgtttccctttggttaaagacccagttttcattccagtttaaaatcatttttaaacc

SEQ ID NO: 699302 - DNA, 229 bp, Homo sapiens
ggggactgacaggaaccacttaacatgtaacttaaacggaattattttctttagaggatcctcttcaaaaaggaagggatagtggaaaactgtccttatttcttcagatccctagcagaaatgactgtttattccaaactatgtttaacttgtctatgatgtagtcaccttaactatctttcatttccatacttcccccgccccgatttcaaaggctaatggttgtatt

SEQ ID NO: 699303 - DNA, 148 bp, Homo sapiens
tgttctgagatcccaagcagtatacagactcatgtataaaaagtacatcatggttcaggaaacaagcccaccaagtagagagcaatcatgcatccgtggatagtcaaaggttagtcttaggaccacataagtctgtattaactgcttg

SEQ ID NO: 699304 - DNA, 574 bp, Homo sapiens
  misc_feature (1)..(1): n is a, c, g, or t
naggttgtgtcgtctgttggggcgagtgtagtgcctctcactgtgttcagacagtctctgtgcctcctcctcccaccccagttcctccggcttggtgtactgacgggggtgctgcggggctgaatggtactccatagctcgtggagctggggagtccacttttgcacccgccgcgtggctagctccccctgagctgttttggtcaattttgccatcatcctacccctcagtgccgttggtggttgcctgacgaaaagctgcacttaatagaaatcactgtggatgcaggagatggacggtgatgagctcaggaccagccagcaaccccatcaggcggtaatgcctaccatggtcacccatgacttcctctcgccactgctcggagctcctgcaaagccacaggcaacaacacatttctgctccgtacgagaagctcctattgtaagtcggtgacatggctggggtcttctctcagcaaatattgagcaaacactgactgtgccaggtgatgtgctgggtcccaaacccttcccagacccagccctggcactcacggagatccagctaggaagtc

SEQ ID NO: 699305 - DNA, 355 bp, Homo sapiens
tattaataattacttaatgtacgccttctcatcccagtcacagcatcagaaagggcaaatcgaatgtatgacaaagactctgaacacatggccatgaagtgctggccttgccatctgcaggacatctccctatcgatcggataccttcaccttcactctctgatacaaagtgagacagactgaacatagtcctgtgaacatttaatgcctgtgcccagaccatgggtctgtaccaattgcaggagtcaccgtggggaggagccgggcacttggagtatgactgccactgtctgaattccagatgagcccattcctaggccagtgcctgggacagttatctgacctctgagatcca

SEQ ID NO: 699306 - DNA, 376 bp, Homo sapiens
  misc_feature (33)..(33): n is a, c, g, or t
  misc_feature (53)..(53): n is a, c, g, or t
  misc_feature (111)..(112): n is a, c, g, or t
  misc_feature (311)..(311): n is a, c, g, or t
  misc_feature (318)..(318): n is a, c, g, or t
  misc_feature (359)..(359): n is a, c, g, or t
  misc_feature (365)..(366): n is a, c, g, or t
actatttcacacatacagtcccctggcatgtanaagggacttaatgttgaaanaaggggaggcattttaaaatccacatcaaaaaaatgttgttctgtttgggaagtgggnncacgcctgcagtcccagcgctttgggaagccaaggcaggtggatcacctgaggtcaggagttcgagatcaacctgagcaacatggtgaaaccccgtctctactaaaaatacaaacattagctgagcatgggggtgggatcctgtggtcccagctacttgggaggcttaggcacttgaatgagaatcgcttggacccggnaggtggnggttgcagtgagcaatgattgtgccactacctgggcaacangaagtnnctctgtctca

SEQ ID NO: 699307 - DNA, 520 bp, Homo sapiens
ggtctctggcctcgccggtcttggggggatggttccactcatggcgtcaatgcagaaactgactacagaaatgaactgtgtggctttgcaaaattgacccacctcctggaatgaccctttaaaatttgcagaacagacgttgttccaaaattcaaattaccaccagtggatggtacgacatggaaggtgccccaggtaccttatatgaaggggaaaaatttcaacttctatttaacatttagtagtcgatatccttttgactctcctcaggtcatgttactggtgaaaatattcctgttcatcctcatgtttatagcaatggtcatatctgttaatcccattttctaacagaaagactgggtccccagtgctctcaagtcccaattcaaggtttgggtccttaagcattattagcatgctttccagcttgcaagggaaaagagacgaccaccggataattcttttcatgtgcgaacattgtaacaagaatccaaagaaaacaaaatggtggtatcactga

SEQ ID NO: 699308 - DNA, 311 bp, Homo sapiens
aaaacctccaacacctcctcccccttcctcactctccagctgttaaccttacttcctatttcaggaaagtaacaaaaacagccagaagagaaacttttcagactcccaagaccacattgagccacctatctccatctgtgcttatgtactctgcttccttcttgttaggatgaacaatgggcgaaccttccaagttcctatttaaagttaccccaatctgtgcagaagatcctgtctcctcccacctactcaaggcattactctggcaattatttcctgtctttcttggatcatcaagagacagatcttac

SEQ ID NO: 699309 - DNA, 427 bp, Homo sapiens
taaactggttaaaaattctgaattttaaacagctttccaaacaagtgtggtgggaaaaaaaaaatagtagttggaaaatgttttgggcagcaaaactctggggttaaataaggacatgttcccccctgttgcccattttttaaaggactagggccctctttcccaattttggaataattggggggaggtttaaaacaaaaaagccccttttgttaaaaagctatttcctttattaccctggaaactgactcagccccatggtggccccaattaaggtttaaggccccccttaggtgccaaaaaaattatttttttttacaagtaaaaggaggtgattccccctttggattggaaaaaaatgaaaaagtttcccagggctttatttgccttctggccgcctttttatttaatggtcaattaattgggg

SEQ ID NO: 699310 - DNA, 410 bp, Homo sapiens
actcgagctaaacccagtgcgcaacgcgctagtgctgaggtagtgccccgaacacagtttccctttgcagcatgcagctcctggaagcgcgttttcagtcgtatcggagataggccctaggtgggtccctccctagctggccatgcttgggtagcaagggccaggcccaacagggcttcttcatgccaaatcagccttctccttgaaggagaacatgtgtggagttggtttcaagctgcggagaccaccagccaagcagcagtgcccacggagccagaggaagcccagaccctccttgtggctaatggggagcttaggggcaaggtgagaactaggccagggccggaatcctaagccaagccgcataggggctgaagtacgtaccgggttatgcgccactgggggatcct

SEQ ID NO: 699311 - DNA, 391 bp, Homo sapiens
  misc_feature (21)..(21): n is a, c, g, or t
  misc_feature (95)..(95): n is a, c, g, or t
tacagagtgaatgtccagcangatgaaacctacaacctgctcaaggactacctcgactgggcgctgtaccggcaactgcgcctcaagcacggttngtcctacggcccgtgggtggaacgcgaagtgctcggcggcgttgggttcctcagcctgaatgccgaccttgagcgagaaaacctccctgaagccgagcaggtcttgcaagacctcaaggcccagttgctcaaggatggcctcgacccaacggtattcacacgcctgcaacaagccgccattgcccgccaagcctgggcagtgcaaggcaacagcgcactggccgactattactggagtgcggccggcgactactccaatgagcgtttcagcgacccggtcaaacgcatcaaggccg

SEQ ID NO: 699312 - DNA, 467 bp, Homo sapiens
tgaccctgttccccctaaaaatcctgttcttgcattctacgatacacaaacctctagggtttcagttgacacaatccagttcaacttgtactgacagaaaatattaaaaaccttcctattgagtttttaatatcaaacagggaggttagtaaattgttttctgattcttctacaaaaaaaaagtctagaagagggacagggaatgtagtgtgcaccacttattattattctaagtaataatttttacttacgaggtcaacacgagtgcaaagggcttagtgatgcatcttattctttgattttggacagtaacaccctcagatggtattattattggtttgttttatatcccccttttccatttgcccttctgttttgaagtgctttttcttaaaacttaagttctttgcctccattttcttataaacccaatttcctctttagtgcaactctaccatttgaaagga

SEQ ID NO: 699313 - DNA, 694 bp, Homo sapiens
gcgtatggacgctgacggcggtaatgccgcgcgtgagacacaggttgtctgtgtgaagctcgccagtagagaggccaacgatgtggggtaagatgtgaaagaagatgtctattatctaacgattgtgcgatagagttgtgtgcagggtagaattcgtggtaaggttgcgacactagctaatgaggccaatcgtgtatctattagataatgctgagtgtgatagtcggactacatatggtaaacaagttcgtagaaaataaggatgaacgcgaggcttgatgatggatagggaagagtggctcgctgtcatgctagtgccgtgaggtacatgtggcatacttcgtgacaacgactgaaggccgtgaatcggctgggtaatctaccacttcgaatcgtcctcgctgtgatgtgaacacttttggagaaccggtcaacgttcaccctatgctagaacctatcaagttggagtgacgccgcatggcaacacccagaacccacgtcttcacttcaaggaacacgcctgaattcaccaggtggtagctctccgtcgaggacctggaactcgctggctagtcactaggactttgctaggcacggcaggatggttggaagtgaaatgccggcaagcatgcgttgatcttcctatgcaatgcgggcaagcacccggaccagccttgcacctaatctgggcgtt

SEQ ID NO: 699314 - DNA, 990 bp, Homo sapiens
gggatctggcctctagctgtaacatcgagtcgtggggatctggaacaagatccgttcggacatctctcccggctgtccgcatcggcctccgatgtccgtctgggcggatagcgaccctgccgaggagcatcgtatctcagtgccatcgtaccatggaattcgggtcacccgtgtcagtcaccgtttaaagtaggtcagctcctttctgtgccagatcgaacactatgagctccctaaattgcgtcagaaggattccaaccggacgtgtaggctcggcgtggagcatgcactggtccgcatgtagtactctgagaggcctaccgtacagtctacgcatcgtcttttgggcttctagatcgacctgtgatgatgtggctcgggagggcgtgagccatttcgtacccgtggatcggcacgtacgcataaagcgcggagggctaacaagcgtctcctgtgacgatgcaaaatggcgtgacgatgcggcagcgcactcatcccaagagcaatcaaaggaagtccagcctgctcatgagtggggtacaatgcgagcatgccgatgaaaggtagctgttgccctgtggcctgaataatcctgaacgacgcctggggatcctccatggccgggtctgcccgccgtgaccctcattctctgtagactagcctgggaatctccactatactacaatcacgcaagtgccgcgatcccgccatatggggtgaccagctgaacaagcctgcagagcgtggggggcagaggcggtggaagaaacctccgaagatcaatgccacgggaatacaggctctgaggcagaacaatgaacggcttgaaagaaaggcatgcaggccaccacaccaaggagcttaaaggctaaagcggccccgaaaaaccggggacaaaagaaagaaagcgggcgcccaaattacctgcggcagaaagacgaggacgcaggatcccacagaggtacacacggtacagaccgaaacagtccg

SEQ ID NO: 699315 - DNA, 296 bp, Homo sapiens
aactcatttaagtaacgaaacctgcatgtccttttctaaaacacacacaaaattaaaaatgatttctctcgagtctctttcaccctcccaaacacactttgagaatctattttcccagaactgatctttgggggagaaactcatgtaactcccatcttcctggcccactaaaatataccatctgatgaaattctattagcatattattgttttaaatactggtatctccgatagagggcagatatcttgtaaaaacataggctattataaattatttgtgaacagcaccaaaaaaa

SEQ ID NO: 699316 - DNA, 1156 bp, Homo sapiens
taagaaccctcatcaatagatggagacatacagaaatagtcaaaccacatctacaaaaggccagtatcagggcgggggctttcgaagccaaaggtgagtgtttgtggatgtgttaaaggtgaaaatatttaggtgtgggggatgtgaagcaaattaggtgaggaaagttgtgagccaatataagtgacgtgtgaagttccggggaagccgtggtggctctaccaaaaaattgtgtgacgccggataaatgtcgccggctcggagaaatggggagaagggagaagaacccagaaaagttacctctgtgagggctatggtgtaggaggggttaaaattaagaagacccagataaaaattgtggtaaataaggcagggtgcgttgtgacatttatatgtgggagttccaggagtgggtttcccatattctaagacttatgtggggagggcctcaggtgtgatgtggaaatactctcccgtgagtgcgagagtataaataggggagtggtgttatatagagagagatgtgggggcacttctcttaagagaggagaatttaacgcgggggggtgaagtgcccggtgttggggggcgccaagagtgccctcttccttaaatgtggggggagagaatgagggggggctatgagaggcagaggagagtgtggggttaaaaagagtggcgcttcgagaaaaaaaaaaactccctgtttgaggaaaagagaaaaaaaacacactttttctgtgggaagggggatacacttaacacactggagggagaataattatcccccggagataaatacgagaggagggggcccatatagcggggggacccgagcgtgttgggctgtgttgcgtgggcgagggcccctaggggcacaagagggaggctaaaacacaacgggtgggtcacaacactccgagcgccccaaatacaagagggggggaacatagtgggggacacaagaggggaagaaacagcggaaaaaagcaaacgggcccataagataatgcaaagaaaaagccgcgataaagggggacgcgggggacacgtagacaaactaccacatgtcggccaaaaggccccgaaaaagcgacacaacacgagaagggggcgctgaaagaggggccccctgagaaaaaggggagacacaggg

SEQ ID NO: 699317 - DNA, 248 bp, Homo sapiens
ttaagctcccaggcgcagtgctcatgctgtagtagtccagaactttgggagtcgaggtgggcggatcacttgagtccaggagtttaagacaacatagtgagaccctgtctctgattaaaaaaaaaaaaaaaaaaaaagctcccctggaaggcccaggttgaggtggtcacaccccatattaatcccagcactataggaggctgaggtgggaggataacttgaccccaggagtttgagaccagcctggg

SEQ ID NO: 699318 - DNA, 533 bp, Homo sapiens
ccttgagtatcctgataactcctggaatcgccagacacgaagtgtatctaagagcccaggcgcacgccatatgtaaatacggatgtgattgccctggatcgaggcctgggtgtgccactgcagtcaggaagcatgaattgaaggagctgcatgaataccagatgaacacagagccagtgaggtagagaggaactggctgtcaccatcaccaagagagtttcgatgaacagaatggagtcagtgtggaggaagggatccaagggcaaccagcccatctcctcagggctcactcagatcaaggacatttgtttggcaatacagaagattactttttcatgtgtgggtccatcttgaaacattgggcggggtaggcagatttaaaatgacagaatcaggcctcctaagctcccagagaaactggaacaattagttaaacgctaacaagttcatcccaaattgggataaattactggttatctagtcccacaaaaggccatatggaggtatgcccttgcatggggcgataggaaagt

SEQ ID NO: 699319 - DNA, 184 bp, Homo sapiens
  misc_feature (43)..(43): n is a, c, g, or t
  misc_feature (45)..(45): n is a, c, g, or t
  misc_feature (54)..(54): n is a, c, g, or t
  misc_feature (69)..(70): n is a, c, g, or t
  misc_feature (83)..(83): n is a, c, g, or t
  misc_feature (105)..(105): n is a, c, g, or t
  misc_feature (145)..(145): n is a, c, g, or t
gagagcgcggtacccaggtcttttcccctcaaattccccgcantnccaggcgtnatcatatcgttgcanngcttgggcacaangcacatgacctccacagcttgntctaggtctgcagtatccatcccagctctattgtaatacntgagaaaatccttgagcaccagctgcgtttcacttccga

SEQ ID NO: 699320 - DNA, 134 bp, Homo sapiens
tagataatgagtcagagaggcagatattgatggagacggactatgtcaatctatgaagaattcgtacagatgatgactgcagaagatgaagacctactttcaacttcctttttccccccgtctagcaagaatca

SEQ ID NO: 699321 - DNA, 383 bp, Homo sapiens
  misc_feature (379)..(379): n is a, c, g, or t
gcgaaccccgtgaaagcacacccattcatgacaagaaatcatgacatttttcaaaacccacaaaacaatctatcaactaaaaataacattctaagccttccaactgactgaatggagacctcctcttggccaagggcattccaaagtaaacctgaaactagttcaagccttgatggaaaatggaggcccaacatacttcattatacccttctccctttggaattcagacacaactgaccagcattaacattaaaacagagatcttaagactgagagaacagactcctgtagcaataagataccaaattccaacctgactctagtatagcattatatgacagataacagccctgaaagaaatcgaagtattttacctcanaata

SEQ ID NO: 699322 - DNA, 374 bp, Homo sapiens
  misc_feature (92)..(92): n is a, c, g, or t
cggggcgagcggccatatgttctggagcccgcgcagcaggagcgctttcggctggagaccgaggcgttgtgtgcgatgtaccccatccttgnatacggggatcgctgaagaaagaaaagccccgtcttcacgctggaatacggggcttttcaggtctgcagaaggctgtgctggcgcttcgcgatacagccgggttacagctgttgctgcgcgctgtagccttcgaacgcggtctgctgctggatcgcggtgatgatgttcttgcgggtggcctgctgttcgttgccatccttgtcgaggaacatctcgctttccagttccgcctcgtcgccttcgccgacaaagctgaagccgaggaattcgaagacttcacg

SEQ ID NO: 699323 - DNA, 897 bp, Homo sapiens
  misc_feature (252)..(252): n is a, c, g, or t
  misc_feature (262)..(262): n is a, c, g, or t
  misc_feature (273)..(273): n is a, c, g, or t
  misc_feature (309)..(309): n is a, c, g, or t
  misc_feature (324)..(324): n is a, c, g, or t
  misc_feature (326)..(326): n is a, c, g, or t
  misc_feature (335)..(335): n is a, c, g, or t
  misc_feature (340)..(340): n is a, c, g, or t
  misc_feature (344)..(344): n is a, c, g, or t
  misc_feature (346)..(346): n is a, c, g, or t
  misc_feature (352)..(352): n is a, c, g, or t
  misc_feature (364)..(364): n is a, c, g, or t
  misc_feature (366)..(366): n is a, c, g, or t
  misc_feature (370)..(370): n is a, c, g, or t
  misc_feature (374)..(374): n is a, c, g, or t
  misc_feature (376)..(376): n is a, c, g, or t
  misc_feature (381)..(381): n is a, c, g, or t
  misc_feature (387)..(387): n is a, c, g, or t
  misc_feature (392)..(392): n is a, c, g, or t
  misc_feature (394)..(394): n is a, c, g, or t
  misc_feature (396)..(396): n is a, c, g, or t
  misc_feature (402)..(403): n is a, c, g, or t
  misc_feature (405)..(405): n is a, c, g, or t
  misc_feature (407)..(407): n is a, c, g, or t
  misc_feature (412)..(412): n is a, c, g, or t
  misc_feature (414)..(414): n is a, c, g, or t
  misc_feature (417)..(417): n is a, c, g, or t
  misc_feature (422)..(422): n is a, c, g, or t
  misc_feature (424)..(424): n is a, c, g, or t
  misc_feature (426)..(426): n is a, c, g, or t
ctcactcacactgctggaaggttaaagtcgacttcacgctagtttaaggaaatagctgacgctgataaccatgtcccaagcactgctctaagttcccaatgtgtccggaattggtgggttcttggtctcactgacttcaagaatgaagccacggaccctcgcgttttagactatgctaaaaacagcctcaggaccttcagcactgatcaacaatcctgggcatgggctgaccgacagttttcacccagagantgagatcatngaggagccatnttaaattccgcccagcgcaggctcccaggaatcctnatgtcacgatctcantncagccaatntgacnaacncngcagtnattaagtctagngngctnaacncncctcnaaaagnattgncncntggtannantngaatngnatnaaatncntngaacccacaaaagtttcgaggtgaacatattagcaaaaatgctctagcttatccaagcgacagttcaaagtgtcaaaggacttctagactcccaatctttccaccggcagaaagcaggctcagtagcccaaactggcgcattttaaaatgcccttttcagaagtgtgatggacaaagaaggatgtgtcagtgcaggccagtgtgtgcgggaccaatggcaaactgcagctcctgaactaagaaagactttcatatctttaacaacagaacccggagacactaggaactatgtgatagagactgtatgtgggccacaaagcctaacatatttactgtgtagatctttacagaaaatgtttgccaactcctgtggcactcctgtggcaactcctgctgaagcacttccaggttgcagaaccaaagccttaattccctagcttaaagtaaagggactggcaagtttactccacg

SEQ ID NO: 699324 - DNA, 145 bp, Homo sapiens
actcacgtttacacacagactgctactcccccaatcccataacacacacacacacacacacagactgcctactccaatcccataacacacacagacacacacacacacacacagagtgtctactccccctatcccataacacaca

SEQ ID NO: 699325 - DNA, 257 bp, Homo sapiens
tgtctgattatttaataaagcataaagaggattttagaggattgacattaagatttgagtcctggctgtagaagtaataagcgatatgatcttgaagtttacttaatttccttaattctatttgtttttctgtaaaagtcagtttaatggtatcgatcttacatagtagttctatgaaatgagattaacagtacagttcccaatccatagtacagatgatccctgatttactatgggtcaatgtacatttttcaact

SEQ ID NO: 699326 - DNA, 202 bp, Homo sapiens
gatcttatttgcggtgcctttcccctgcaagttacttacaggacgagaagcaccgtggctgagtctgtaggagccagcagattttgcgccagaaccggggcgcaaggcgtgtgaccggcctgtgccaagaccatgaagaagaaggctgagggcaccgtgtccaccgatggaagacttccacgaagttccagcaggcaatact

SEQ ID NO: 699327 - DNA, 112 bp, Homo sapiens
gatctagaggatcccgtgctcatttcagtcatctcgggctcgaggggatggcagcttcgggggcgactgggaaaagactatcaacattcaaggcgtgattgtgatacttctc

SEQ ID NO: 699328 - DNA, 1703 bp, Homo sapiens
gattgtgcttggaccccactccgtcttcctcacccgtcctcctccagctgcacagggtctctctcccagcttgtgcctgtacgtcgaatcggcggtcgtctgacgctctgcccttcccgtgtgggaagccctcggatcaagcgtcaactgtcactactgagcatggtgggtcacagcgaatctacgtcgcattcgacatgggtatcgagcaagctagccaggagcacagggctcctcgggtagcattgaatagaaagctgtgagcaggtgagtggtcgaggcacaacatgcgtgggaggagacgcgagactcaccgtgtagtctgcgttgcgtcaagtgcgtcgcgagctactgtggtgacatgacccgtctaacgcgtcatccagtgctcctagcacatgcacatggttcttgatgggcattgcagggactagtacatgagtgtgatcgtagttcgaggaacgcatgagggtcccctgagtcaattacagtctggttgtatccgagactgcgtagggaacgcaaagggcttgatccagtcactagaggtcagaccccaaaggggctagagcgcctcgtacgggagtacgagctacatggtatgccccggtccgcgtacgcatacgtgggaagtgcaaggctttcgaaattgcgcaagacaatatgggctctagacactagagttagttagttcttcgaattaacatggtgacctattcattaacacccagtggggaagcccttgttgtacaagtctgtggccttcgcgagacgggcagaggagttacgacacggtcccccggtgcaaaaagggccgggggaaggtaggcgagaagcgacacatggaaggccgccttcgcaagaaagagagagagaggccaatgcgggagccacacggtcagccagacagtggcctatggcaaggcttaagccctttgtaaggcccttggagctggccctagaaagtcgaaggtgtgggagacgttcccccacaagaaaagggcttagcacgcttgagcccaggggtatcagcgcccatggaaatggcggacggcaccccggtggggaaggacaggtacacggtgggggcccgcccttaacaaggaagactggtcgcaataacaggggttcctcgaaaaacgaattcacagccccgcgaagccaaggggcgaacaacacattaggaacgcatgtacgtgagatgcccccatgggtgcaagcgcggatcatctatatccttaccaaacacccaaagtgggagtaacaaggccccttgtgttcccctggaagacctaatgaacaacccctcccacgagaagaaattcccccgaggggcgaatctcaggcagtaggagaacagcgcgaacaaacgaaaaaacagcgtgcgacgaagtaaatgtaaacagcacctaagtcctccaggaaccacgacagaccaacggcggtaggacgaagtacagcgcagcatgggaccgacatgatacgagggagaagagctactcgagcacaacgggtgcgtgcactaagtagacaaacaaggcgggcggggataagaatgcttgctgcagacacaacgcaacaaaagtgagcaatgaacaaagagtcggacttaccgtaagaacaaacttccgaggtacgaaatcagaaaaccaccgctctatcacctgaccgtctagtcgacacacagcaggtacagactgatg

SEQ ID NO: 699329 - DNA, 681 bp, Homo sapiens
aagaacatacattatgaaaatgtattataatatctggaaacacaacattttcctctggcaggtgactttgtacgaaatgaaaaaaaaaaaaccggtattttttttggtggtcctttggggattaaggatatacatttagtagtcttggttattaaagggaaccggctgataagtacaagtgtgaccatctcattcaaaggttggtggttatgatgcaaagggatatgggtttcaatagaagcgggatccttaatactggatttctggaattcggtttaatattggtgtaaagtagacatagctgaactcacatggaatcctggagtttggttatcagcagcttggcagtggggaaacaaagaaaccaaagctggagtggttttaaagaatgaacatatctggaaatccttgctctcaaaacaaaacaatataatctatcaaaggtgttttactcagtgttctaatttttaaaaaattttatcttggatatttgatcaaatatttctgtggtaacaagtgtttgtttaccctccttaaaatgactaaagttagtaatagttattgggtttaacctaatacacaagtgattaagtgcttaaattggtattaatgaaaacattctgccagggtgttacttgaggatagcgaatttattgaagttgtagttttttgtaatttgta

SEQ ID NO: 699330 - DNA, 234 bp, Homo sapiens
gtacgtctctagacggatcccccggagacacttacgccaatcatatttaataaaaataatcatttgcctaaccattatcttctagagttcctatagttcaaatactttatgaattattcaatgcacatcatcatcttcattgattttagaagggaaaatctgaccctaataagattttttttttatttcccactagaaacctatggcatactattggtcttaacgtgacttttt

SEQ ID NO: 699331 - DNA, 1645 bp, Homo sapiens
aagccaatgcgtacgtgtgacgcgtgaatatatccaaggcgtgggctgacgcatacgtccgtggactcacggatatccgaatcacgtggaacgcgtgatggggcgagggttgaacaagacgtgtcacaagactcggagagcgcgtgagtgaccagaacggacgtcgagacacgagctatggctcaccgtctcgcacgtagaccacgatgagacttggctcatggcaatgcagactcatgcagtaagcggagagcgtctccatgcgaccgtaggggcctccggacaaacgaaacggagaaaccggagatagaacggaggtatcccagccggagaaatcggccagccggaagcctgagttagagcacagggcaaactcgagctagtggactgccgaatgcaatagagtcgtgtcctttgcgcctaggagtgtggctggatagcccttggcggtaccgtcgggggctgaaaggctggacgcctcttggcttgggacttagcgcgcgtgcgcaagggggtgggccttccgtggtgcgtagactccgcacgctggtacctggggccggccatgggactaacggagttcccgtgattcgcttgaaccctcgagtatgtctaaatgccctgtgcatagcctaattcgcccagccagaatgactagagaaaagcgggtcgcctctgcgagcatgctacgagggcaccgcaaaaacttcgacgaacaaccagttcgaatacctggacgtatgcctagacataatcacgagcccaagtgacgcccccgtggacgaccaaagaggtccgtgggtggcctgagcgagagaaagcgccaccccgggctcgcgataattcgcgggcgcctcaaggacccgcccaaaacgttaaaaccgagaccccagatgcaaaccagacccttggctggaaccacgagggtggcctccttcgtagcccaccttgagcaagcacgggggcaacaacagggaataccccgggcgcttgcttcgggcccccaacatgcgagtccactcccccaaagagcaaggggccctacgctccccacggagaaagacacgacaggggccatcagccactccgccggacccatggcaagaacaggacatagggaacaccgaacactgccgcattgtgatcccacacatccgacttacgtcacgacacactcatcaacactgctgccacacacactggcagtccccacacaacagcacgatcgcatccacacacacgagagccacacacacacgtagtcagcaaaacagcgcaggcccatgtgggatgacaccacccactccacacaacctctcatcaagtcaaccaacctccaaccccaacctcgcggccgcgtcctcacccacctcagatccagcagcacacaccacagcactaccgcccagcaagcaagggagccacaccacaccgtactacaagccgacagagcccaaccagaccaccgcagaagacgcacacgcccacctccaactgcgacgccactcagtgcagccacccccagccgcacaccaccaccaccaccgccccccgcccgacccgacacacgcggctgccgtaaccgcacatctctcacacgcgcaacacgaccaccgccccgcactagcacccacaacaccccacc

SEQ ID NO: 699332 - DNA, 205 bp, Homo sapiens
ggtaaactcacttcgagttattaccatgtatagctagccacactagatgcgagcgtaaggtatctgtgatcactgtgagagaccgtgtgtcatagatatagaggcgtaagggatgcactgtgcacagatattgtagatgagtgtctctgggcctctgtatgcctcatgagtaatcgatcatctgtaactaacttatcaaggccgc

SEQ ID NO: 699333 - DNA, 890 bp, Homo sapiens
aaactgggggagtcttgtggagcaaaatccgtttcctccgcagtccgcaatgtattccgtcgaattttgtgccataatgcttgcgcgtgtcttgctcacaccccattgtctcgcgcgatgtgtccccccccgtgtgtgcgccctcgcgctatgccccacattggggagctcccccatgtctaccccgccactatgcatgagttgtctttctttggtgttacgctcccactgtgtgtgcataccctcttccctcggagggcgaagcacccttcttatgtggacacccgtgtgtagaacaccactcccgagacatttcgcgtgggtccctttgccccagcgagtgccacttcgtcttgctgaaaagagcagccctagctcccctgtctggtcactccattgtgcggacttgtccccccccatagttgtcttcgctcgggcgcacatccgccgttgctcgcacgtagttgtctttgacacgcccgtcctcccgcgacgagggcatccacactccattgggctggttgcctcctcccctcgagaggcactcgcgactggcagcgcaccactcgatgtctccaactcacaggggtcgcactcactcacgggcacgcaccgcggagtgtacacgctctgtctgtgatgaacggccccagtttgttctaatagggagcgagtgcaacacacgcaccaggaggggttattccctcagtgggagtcacccggacgagcattcagtggtgcgctcacagcagtgctccccagtaacaccacaccgagagaatcttccgtcccctgcggtacaaatgagttctcaccgaagcagccactcctgtctgttaagaggaagaagaacaagaatgaggttgctgctcgaccccatcataacgcaa

SEQ ID NO: 699334 - DNA, 239 bp, Homo sapiens
ggaaaatgacatataggcaggagcaatggtgtgaaccccggagtcggagctggcagtaagccgatgatcgccccactgcactccagcccgggtgacaaagcgagactccgtctaaaaaaaaaaagaaagaaagaaagaaacaaacaaacaaacaaacacttggttaatactatactacatgattccacttgtatgaaagctctaaaaaattacattctaattctatagttggccagaaa

SEQ ID NO: 699335 - DNA, 173 bp, Homo sapiens
aagtgcagtggagcaatcatgggcttgctggaagcctcagcctcccaggcccaggtgatcctaccacctcagcctccgagtagctggggactacagctggcatgtcaccacacccggctaatggtttctagtcctagtacagatgggggcttggccatggtggcccaaggggt

SEQ ID NO: 699336 - DNA, 121 bp, Homo sapiens
cgaatgagctggtaccctcccttctctcacgcgcagacggatcgtacacacgcgtcatctcgaaacttcgtgaccaagcgcgcgcataccccttggccaacccagttttcgatgacagaaa

SEQ ID NO: 699337 - DNA, 954 bp, Homo sapiens
gcttctctacccgggacggcttactattgcggctagcgccgagaaccccaccccctttctttgcggaatcaccatggcaggctggagaccctgtacacgtatcctgaaaactggagggccttcaaggctactcatcgctgctcagatacaagcggggctcaggtccgcgtgctctccgagaccagcccacattccatattatggaccaaaccaaccgcaccccatgaatttcatccgccaaatttcctgcacggcaaaggtcccagcaatatgagggtgatgactggattctgtagtgtgtagagagcaacgccattgcctactatgtgagcaaatgaggagctgcggggcaagtactccagaaggccgcagcccagcgtggtgcagtgggtgagctttgctgataccgatatagagcccccagccagtacctgggaagtaccccacctatggacatcatgcaccacaacaaagaggccactgcgaatgcaccggaggacgtgaggcgactactgcggctgccggactgcttactcgaccgacgaggactatactgcctgggcgaacacgtgccatcgggctgagatcaacaggatgtcgtgcgaccctagagcaggcatctataagacagagatactaagagaccttactaaccgaccaggaccaaaccaaggtaccaaccggagtggccctcaacctgcgataaaccaggccccgatccgaggcagcacaagagcggcaagtcaaccgcggagcgcacgcggcccccacgccagccaggcacaagagacgtacagcccgacgccgcggcaccccatacgcacgcacaccaccgcaccggaaagcacaccggggacacacgggagaagaagaccggaacccccacggcgagggcagaggacagcccaccacaggcagggcccaggcacccggagagcgcacctccgcccacgg

SEQ ID NO: 699338 - DNA, 775 bp, Homo sapiens
  misc_feature (25)..(25): n is a, c, g, or t
  misc_feature (64)..(64): n is a, c, g, or t
  misc_feature (66)..(66): n is a, c, g, or t
  misc_feature (74)..(75): n is a, c, g, or t
  misc_feature (105)..(105): n is a, c, g, or t
  misc_feature (119)..(119): n is a, c, g, or t
  misc_feature (261)..(261): n is a, c, g, or t
  misc_feature (263)..(263): n is a, c, g, or t
  misc_feature (278)..(278): n is a, c, g, or t
  misc_feature (283)..(283): n is a, c, g, or t
  misc_feature (285)..(285): n is a, c, g, or t
  misc_feature (290)..(290): n is a, c, g, or t
  misc_feature (292)..(292): n is a, c, g, or t
  misc_feature (328)..(328): n is a, c, g, or t
  misc_feature (359)..(359): n is a, c, g, or t
  misc_feature (379)..(379): n is a, c, g, or t
  misc_feature (385)..(385): n is a, c, g, or t
  misc_feature (397)..(397): n is a, c, g, or t
  misc_feature (415)..(415): n is a, c, g, or t
  misc_feature (459)..(459): n is a, c, g, or t
  misc_feature (461)..(461): n is a, c, g, or t
  misc_feature (502)..(502): n is a, c, g, or t
  misc_feature (519)..(519): n is a, c, g, or t
  misc_feature (531)..(531): n is a, c, g, or t
  misc_feature (540)..(540): n is a, c, g, or t
  misc_feature (558)..(558): n is a, c, g, or t
  misc_feature (645)..(645): n is a, c, g, or t
  misc_feature (692)..(692): n is a, c, g, or t
  misc_feature (773)..(773): n is a, c, g, or t
taagtgtattaaaaataagaaatantcgtaagatggcagtataaattcatctctgcatgtagangncggaaaannagcatgttcagtacttcaccaaaaaatttnaacattgcaaacanaggaaattgagaactgacaaacagaaatactaggaaatgcaaagtcttgaagctccaaaacaaaaacagcaatcttggaaaggcccctaatctacctcctcaatggtggggcctgacccagaccctcccttaaaaccctgancnccgaagcccccaggnccggnancaccngnaccctggtacagtccgctgatgatggggttacacanctgctccagctccttcctcttgtgctcaaantcgtccttctcggccaaggngttggngtccagcacganatgacctcttgacactcntccagcaccttcttcttgtcggccttgctgattttgctcttgancncctcatcctccacggcgctcttcatgttgaaggggtagggntccagggggttcttggntgataacctttngggctggancttgtcctccgctttgtncttctccgcctcctgcaccatgcgctcgatctcctccttgctcaggcggcccttgtcgttggtgatggtgatcttgttggccttgcnggtgctcttgtccgtggccgtgacgttcaggatgccgttggcatcgnatgtcgagggtcacctcgatctggggcacgcccctgggggccggggggatgccgctcagctcgaagcgccccaacagattntt

SEQ ID NO: 699339 - DNA, 108 bp, Homo sapiens
catggatttgctggtgcagtacaactaggcttaatattgtcaagagtttcagatagaaaatgaaaaacaagctaagacaagtattggagaagtatagaaaaaaaaaaa

SEQ ID NO: 699340 - DNA, 102 bp, Homo sapiens
tggtgaatggactgaggtggatggccaggaagctgtgtagactgggaggagaggagcctcttttgctggatgacgagggtttccagttgagtgtgtggagtt

SEQ ID NO: 699341 - DNA, 383 bp, Homo sapiens
  misc_feature (11)..(11): n is a, c, g, or t
  misc_feature (81)..(81): n is a, c, g, or t
  misc_feature (123)..(123): n is a, c, g, or t
  misc_feature (163)..(163): n is a, c, g, or t
  misc_feature (165)..(165): n is a, c, g, or t
  misc_feature (172)..(173): n is a, c, g, or t
  misc_feature (178)..(178): n is a, c, g, or t
  misc_feature (180)..(180): n is a, c, g, or t
  misc_feature (185)..(185): n is a, c, g, or t
  misc_feature (193)..(193): n is a, c, g, or t
  misc_feature (197)..(197): n is a, c, g, or t
  misc_feature (211)..(211): n is a, c, g, or t
  misc_feature (221)..(221): n is a, c, g, or t
  misc_feature (228)..(228): n is a, c, g, or t
  misc_feature (232)..(232): n is a, c, g, or t
  misc_feature (271)..(271): n is a, c, g, or t
  misc_feature (273)..(273): n is a, c, g, or t
  misc_feature (278)..(278): n is a, c, g, or t
  misc_feature (281)..(281): n is a, c, g, or t
  misc_feature (285)..(285): n is a, c, g, or t
  misc_feature (287)..(287): n is a, c, g, or t
  misc_feature (300)..(300): n is a, c, g, or t
  misc_feature (364)..(364): n is a, c, g, or t
aaagaacagtncatttctgtctacattccgacaatccaacgaggcggcatgggtcacatccagtttgatgaggtgacaganccagcagtcaccatccatgggcatggttcccaggggattggngagacacagaccatacatgatacaaaatgattctgcagcnantttgaannagtgnancttcngtcctaanactnttgtattaacggcnagggagtagngaggtgntgantgtaagtatgagagtttggtagtgatagagagaggtaantnactgnggnggangnaggccatttgtgngggtagtgtggctttttctgcagttgcttctgttacaaaattcggtcttttcgcttgggcagcntttttttttgcttcacgtc

SEQ ID NO: 699342 - DNA, 373 bp, Homo sapiens
  misc_feature (170)..(170): n is a, c, g, or t
tgctctaaggatcctactgggtgaggagtgatgtctagtaagaatgaggcacaatgggcagagcataagcagtctgataggatgcatgttggagttaacttttcttcccaggtgagcatccaactgtcctgagaagggggcctacatgcccaaatatgcaacatcttgtntaaataggttttcaagaatttccaaagcaaacagtgaggtatttactggtttacagttttatcttctcaggcaagaatgttctggaataaatggtcatgttgacacaggtggtttcagtctacagtcctgataactaagccacggggacctctgtcctcaacacacacagtcactcctcacccaagctagggtaccgagctcg

SEQ ID NO: 699343 - DNA, 114 bp, Homo sapiens
actcctcgagcgaccattctcaccgacgcatcatgctctcctcccctcctccccaactccctcactcccctccttgagtgccgcggggggtgatcccccacgcgtcgaccgtgc

SEQ ID NO: 699344 - DNA, 555 bp, Homo sapiens
  misc_feature (404)..(404): n is a, c, g, or t
ccaccctccccccccccacatctcctgttggtcgctcccgccttcttctctcgcccccaccaaattataccgccctccctctcccccatcgcgctcgcggcattctatttctccccaccccttccgcggccccctccaattttgttgcgcgcccacacaaaacgccccgttcctccttagcgttcatttctccccctctgccctgcgtgcgcaagcgttgtaacccccacttcccttgtgtttacagaatcccccgcgggacaaaagtgttccaggtgcttgagatgtcccccctcacgcgctgtgacgtttcttccaaacaccgcctggttgttacaggttccggggagcacgcccccgtgtaccagatcccctattgaggggccttgttgttgtaatcccantcgggttctttttttaatccccccccttccccccccccaacaagggggacatggtggagggaagcgggaaggtttttttgtggcatcgcacgatttagtttgtggtgtagactggtccccatcccgtgtaataaagcccccgggaaaggca

SEQ ID NO: 699345 - DNA, 254 bp, Homo sapiens
catgccccatagtcactgggaaaggatagcttcagccaggtggacccatgtgctcatgggcctttgcctagagggtgaccagcccggtctcagcccagcccccaccggacccagcacctaccctgctccccagagcatagccgtgaacgaaccccagcctcagccgaggggggtaaacagcctcctgcctgtatttggtggttgtggtgtgaatatggaggcagttgtccagtcagcggcagggtgagcggccg

SEQ ID NO: 699346 - DNA, 87 bp, Homo sapiens
acttagtttgggaaaaaaaaataaattgaaattgttaggcttttggatttccctttcttgcaaaaaaaaatttttttttaaatagta

SEQ ID NO: 699347 - DNA, 616 bp, Homo sapiens
  misc_feature (604)..(604): n is a, c, g, or t
  misc_feature (610)..(610): n is a, c, g, or t
aaaagtgaaattgatcttgttcttagagaaaaattgtacctatctgtttggatttctctactgtggtacagtagcaacaatgatagagaattcattcacatccatcaatacgagtatgaaaacactattttgtaaatgctttgattcaatttacagaacaaaaaccccatttaaatgatatatcttagacagtactgggaaatgctctaatactgtattttcctttacatttaccacgtgcagctataattttgaagcagacacagctacagaatgtacaatgtttaaaaaatttgacaattctaacattattagtatatttagtttccctgtgagctaatactatctctcttgaaactttctagagattaaaaatataattgaaggaggatgggttgaaattgtataagacaggatccctattttttttaaaaagtgacaataatatttttcatgctttagttgcaatattgggcagccatttttgcaaatatgggaggtagataattgtgaaaagagaagtgttaacatctcacatataaagcaacattatagaaaacaatatgtactattaccgtatcacacattcatcatgatatatgtntatatntaaata

SEQ ID NO: 699348 - DNA, 773 bp, Homo sapiens
  misc_feature (365)..(365): n is a, c, g, or t
tggctggggtctacggggaaaatgaagactattctcagcaatcagactgtcgactttccaaaaaaggtcgactttactctgaagggacgcacagtttatcgtgaagggccccagaggaaccctggcggagggacttcaatcacttcaatgtaaaactcagccttctgggaaagaaaaaaaagaggctccggggtggacaacaggggggggtaacagaaaggaacgggcttaccggttcggactattggtagtcatgtacagaacatgatcagggggtgttacactggggcttccgttacaagatgaggtctgtgtatgctcacttccccatcaacgttgttatccaggagaaggggtctctggtngaaatccgaaatttctggggtgaaaaatatatccgcagggttcgggatgagaccaggtgtggctggtcagtatctcaagcccagaaagatgaattaatccttgagggaaatgacattgagctggtttcaaatccaggggtttgattcagaagcacaacagttaaaaacagggacttccaggaaatttggggagggtatctatgttctctgaaaagggaactgttcaagcaggtgatgaataagatctaaaagttacctggttacagaaaagaagatgcccggatgacattaagaccaacttgtgatattcaagtgtttggcatacaggactattgttgtggcacaacaaaccaacaaaaaaaaaacatccggggatctaaggggggggggaaaaaggtaaaaagggcg

SEQ ID NO: 699349 - DNA, 143 bp, Homo sapiens
gttcattgacaccacctccaagttgggacatggccgcttccagaggatggaggagaagaaagcatgcatgggaccacgtgaagaaagcaccgacattgcaacaggaagaaggagcttaatgccaggacctagatttcgcagtt

SEQ ID NO: 699350 - DNA, 903 bp, Homo sapiens
  misc_feature (98)..(98): n is a, c, g, or t
  misc_feature (120)..(120): n is a, c, g, or t
  misc_feature (422)..(422): n is a, c, g, or t
  misc_feature (431)..(431): n is a, c, g, or t
  misc_feature (449)..(449): n is a, c, g, or t
  misc_feature (620)..(620): n is a, c, g, or t
  misc_feature (669)..(669): n is a, c, g, or t
  misc_feature (675)..(675): n is a, c, g, or t
  misc_feature (680)..(680): n is a, c, g, or t
  misc_feature (730)..(730): n is a, c, g, or t
cctagagtaacacgctctgctccagattccaaagtgttgggcgtcagccaccgtgccgggccaagtatgctttttctccctaggcaagcaaatggttntaggactaaactggagtaaganacagcaggacctgagtagtacaaaccattgattggagacaggagaggatggagtctctcaactcactatttacacttcacatttgttttgcccactgatcctcaggacaccaggggtcagtgatttatccaaagtcacacaactaaataattagtattgagctaaaacttgaacccaggcattctaactcctgatctaggaactgggtgaggaggagaattaataaagatatttaactgagtgggctgagagagaactcagaagtgttttcagaggcacagctgtgtgtgtgggcgtgtggntgtgtcggnaagagagttctccggaantgttatccatcactgttttaacaggacaatgtttggaaatttctgagcacaaacgtgaataacaaaacaaagtgcaaggcggctggctggccagtttgttttgagaggtaaatccaggagagccagagtagagaggcaactacctggcttgcctgtaactgcaggcttganccaatgaactcaagtatggtactgtcatcctgcccaatcaaatcttaanggctgngctgngcaccggggctcacgcctgtaatcccagcactttgggaggcccaggtggntggatcacttgaggtcaggagttcgagaccaccctgatcaacatggtaaaaccccgtctctgccaaaaatacaagaaattagccagacgagatgttgcatgcctgtaatcccagctactcgggaggctgaggcagaattgcttgaatctgggaggccgagaggggatcctcta

SEQ ID NO: 699351 - DNA, 1151 bp, Homo sapiens
ggctgtaccggactggaatgtttagtgatatagtggatccacgcgtgtcgtcaagattaatatgattctgctcccgccattctccttaggagagcatggttcgtagctcgtggacaaagatgtgggtccaaggtcctcatcccatcctccctctgccaggcactatgtgtctggggcttcgcatccttgaggtgcaggcacgggctgggacacgcggcttccctcccacccttacctgccttgcgcaccgtcacacgactgcccacgcaggcaaccactcttcagggactctcccatgctctgcgctcaccggcacgcggccctgcgcacactgcgcactacccgcaccaccactctccgccgcgtcgcccgcaccgcacctcgcctccccccgcctcaccctcgccccctctccactccctcgcaccacggcgcccatggccccctctgctcccccctctgcccccctctccacgcccgtcgtcgcccccctccccttgcccccctctgcgccacagctgcttccccactctgcgccacggactgcctcccctctgtccggcccccaacgcccccctgctacgtccccccccaccactccccccgcgcctcgccccttgctaccccccccggcgctacctctcccctcccccgccagtccccccctctcaacttctccctcacttcccacaccccctcccatgcacaccccaccacaatccccaccaccgccctccccctactctagcaccaccccctctcgctcccaaaactcgcctccaccccgacaccacccacaccccacccacccaccgacacacctcgccttacacacaccccctaccacccctcccaccctctcctccgccctcgtaccaccccccaccccacttcatctcccccccccctccccacccccccctaccaccctctccccccccctcccccctctctccttcactactcccccccccctaaccactacacatcttctctcttacctcacacaaactgtcgccatctctcccaccaccaacttctctcgttccttcttactaacaacaacaacaccaccattcctctccgatataaccctcccccctcccttctcccaaccacacctactctactacctaactacactaacaccc

SEQ ID NO: 699352 - DNA, 403 bp, Homo sapiens
cttcctcagaaacacgcagcagccttatcatttaaacaaggacacaccctggccgggcgcggtggctcacgcctgtaatcccagcacattacggaggccgaggtgggcagatcacgaggtcaggagatcaccaccatcctggctaacacagagaaaccccgtctctactaaacatacaaaacaaattagccaggagtggtggcgggtgcctgtagtcccagctactcgggaggctgaggcaggcgaactgcttgcacctgggaggtggcggctgcagtgagctgagatcacaccactgcaccactccagcctgggcaccagacgcagactctgtctaaaacaaacaacacaccaaaaaatccaaaaattctcagaaggctgcccaaaaccccttgagataact

SEQ ID NO: 699353 - DNA, 159 bp, Homo sapiens
gtgaggaaacattgaactgcttttcaacaaagctgtaccattttactttcccagcggcgtatgagggttccaatttgtccacatccttgccatacttattttttgttttttttcattataggcaccctcccgccctccacccctcccaaaaaaaaaaaa

SEQ ID NO: 699354 - DNA, 395 bp, Homo sapiens
aaatcattccacacaccaagaaacaggaaaatgtttccgaatggaaaaaagaccatcagtagatgcaaacaatgaggtgacagatgttggaattatctgataaggattttacagcaggataggctggaggcagtggctcaagcctgtaatcccagcactttgggaggccgaggcgggcagatcacaaggtcaggagatcgagaccatcctggctaacacggtgaaactccattctctactaaaaatacaaaaaattagccaggcgtgacggcaggtgcctgtagtcccagttactcgggaggctgagccaggagaatggcgtgaacctgggaggcggagcttgcagtgagccaagatcatgccactgcagtctagcctgggtgacagagcatctc

SEQ ID NO: 699355 - DNA, 1116 bp, Homo sapiens
  misc_feature (1096)..(1097): n is a, c, g, or t
ggaaagatggacggtgtggggacatggacgctgggtgtagctgaggagactggcctggagaccccataaaccggtgtctcctgtgtctccctccgtggaagcggatcaacccagcccatctgctctggcccccgttctggacccctgcagggtagtggtggggacggttcgaaattgaggcgcgcgaagtgggtaacagtcctctatctcactgcggttcaaatgccccccctttccttcaccggttgtttatcccgagccaggacccaaatcagcaacgagtgccctatcggaaattccaggacacaagacacgctggcttcagatgtggcttgggtggcgacagacacagggcacttgcaaggccttggaacacttgagacgagaagctcctgagttgccgtgacaagaatccccggggaaagaaaggaatccaactggcgtggccaatcgcaggggacaattgccaagtacgagccgacagaagatttcggcccaagcttggctggtctgtggggctcctggtgaacagttgcctcaaggcgggcatgatcagcgtgtggacagtttcccccttctttgtggctggaacacccgttcccagctaaacttttcaacgtggccctaaaagaaattccgtgggaagcctttctccaacggggccgcacgaagggccttcccacgaaaagaaaattatttttgggacggatacacttctttccacacggggctcttgaacgtgatttggggcagggcacacttataacgctcctgtatgcagaacaggacacacacctaaatttaaggggaacgttttaagcccccgggttcggtaagtgttcacatatggaatccttcaacgtgaagagaggattgtccagtgcagagatgagccatgaaaacagcgcgacagaagcatgatgtactgaaggatgcaccaaaatgggagcggtccacccttgaaacataggcatcgggcaaacgcgaaagtgcggtgtaaagacgagtagatacaggagcactcactgatatgatcctgtgtgtcttctctcgtcttcttctctcgtcgctcctcgactgagtgctccgttgatcnnagtggagagaacgaactga

SEQ ID NO: 699356 - DNA, 907 bp, Homo sapiens
  misc_feature (159)..(159): n is a, c, g, or t
  misc_feature (169)..(169): n is a, c, g, or t
  misc_feature (351)..(351): n is a, c, g, or t
  misc_feature (863)..(863): n is a, c, g, or t
agaagagataaagaaaaagaggaaagaaaaaagagaagataaagaatatgaaaaagaagaaaggaggaataaaggagggagagagaagataaagtaaggaaagaagagaaaataggtaaagtaggggaggaggatgagggagaagagaggagatgaagnggattggggnaaaaatgatgtgaatgatgatggaggaggaggtaaaaaaggaaaaagagaaagataagaaggagaaataggataaagtaaagaaaggaaaggatataagataaaagaagaggaggaaaaaataaatgagatgttaagagaggttgaggaaatgatggaggaaaagaagaaaaaattgagaangaggtggaagagatggaggaagaagaagatgatgataaagaataataagaagtgaaaatggaaaaattaaataaaagatataaaaatgagaaaaaaaaagaaaagaaggttggaaataataaaataaatgtgaaaagagaaattaaaaagataaaaaaaaaaaagaatggaaaaatggtattttaagagaaagttataaaatatgtgggagaagaagaaggaagaaggagaaaagagtgaataatagaagaggaatgtgggaaaagaatgtaatgaaagtttgaaagattaaagtaaaaatgaaagaaatgaaggggaaagaggatgatatgaaaaagggaaagtgagtgatgtggagaaaagatgtgtgtatggggtaaatgaaaaaaaatggaaaaaaggggaagaaatgggaaaatatgtgaaaaaaagagggaatgaaagaaggggatgtgatgtgaattaaagagaggaatgatgttaaatgtgtgaaaaaaatgaaagtggagggngagatttgaatgaaaagaaaaaggattatggaataataaatggg

SEQ ID NO: 699357 - DNA, 391 bp, Homo sapiens
cagaactgcatgttcggcggcaggaaaccgaggtccatatagtagttgatttcaacggcccaggtcgcacgatagctcacgtttccgtcggagttacaggtcacgccggcaacgcccgcaccgaacaggccgcactgcgtgaacgagttgtgattcaggaactcccagtacaccaacggggcgacgtcgatgtagcccttgtaggggcaggtcgaaggcgaactgcagaccgctgacgacgtcgcgctttgcgggcgcgaggaagttgttctcggtattcgcatccataccgacttcgaacgagatgttgtgcagcgggcccatggtgaaggccttggtgttgaacaactcgttccagccgaaggtggagcggaacaggccgtagatctcg

SEQ ID NO: 699358 - DNA, 171 bp, Homo sapiens
ttttttcatgtttctcactgcctgtataatcaggtctttattcaaaagaagctgtcaaaatgattgacctttatggaataacaattaagagttatcgagcacgaggcttcttctctgcaggctcttcagggctggttctggtagctgctgctttcacagagctctctcgct

SEQ ID NO: 699359 - DNA, 1180 bp, Homo sapiens
attcagaaacatgcaacagcgacaagacattgccccctactttaacacgtctatgctggggaaacaagcagccttgctagcagattgacgaaaggttgttctacaccgctaagctactcccagagtagactattgtggctcatcgaaactcaagacagaacggtgtctagttaactgcacgagcagcttgatgcccgatactgccctacccttcacaacggcacttactgcacgcaacgctagcgagcgctgctggcgcttactgctattcctggccatgaggcgtgccgacacattgcccaaagttcttacaactttctagcctagaaccaaatcctgcacagctaattgtcactggcgtgaccctgctgcgccttgcacccagaggaaccccagacgtggcatttacacgcggcaactttattgcacacgggccaggccacaaagtttccccacgaatacaaaggaacggaaacaaccccgacaaagcaagtccccccttggctacgaggaggattggccaacagcccccaagataacgttgggaaacttgaacacccaaacaaccaccatttccgttggttgaccctggggcccatgtggcttcctttacaacgatttacaccccatataaggcgaaaaacgccaacccaagcccccgttgtgccagttacacttgcagtcgcacgaaacttggccccgctgcggcccaacgaatttggcaccccactttctggaccccggaatattccaaccgaaaacacccctttggccgcaaacgcagggacagggcgggaacatcaagcacccaattgggcggaactaaactttgccctaggaaatcctatgggcggcgcacactttccctgtaaacaagtggcgcgcattgctcgtgcgccactttacaaggtaccaagggcccaattggagctagaccatgagacgcttggaggcccaatctagacacacccctcataccttgagcagcatgggcatggggccttaaactatgggattacgcaacaaccgggggacgatgtgcaaaccccatattctaccgacccaacatttccccccgaacaaggggacaaaaccccattggcaccaggcctttactcccaagccccaaacagcgcaaaacacgcgactctgacgcgcctcttggttaaagacgcaacac

SEQ ID NO: 699360 - DNA, 294 bp, Homo sapiens
gagcggagcgagcagctcagctaggatcctgcctccccagagctgacagcctcataggaacagacttacagtaacggagtttgagctggatgcataggagatgccagtccattcctttagtgcccgctgccctcccttactgagatgggggcctgagcgagcacctatgtacaggagcacccctctacagagggagagagctgatatgtttgtcaggggagacttgctactacacctgccacgaggcggcatccatccggcagtagactcctagctcagagtgctcctgtgata

SEQ ID NO: 699361 - DNA, 868 bp, Homo sapiens
  misc_feature (1)..(1): n is a, c, g, or t
  misc_feature (63)..(63): n is a, c, g, or t
  misc_feature (87)..(87): n is a, c, g, or t
  misc_feature (118)..(118): n is a, c, g, or t
  misc_feature (128)..(131): n is a, c, g, or t
  misc_feature (140)..(140): n is a, c, g, or t
  misc_feature (142)..(142): n is a, c, g, or t
  misc_feature (163)..(163): n is a, c, g, or t
  misc_feature (182)..(182): n is a, c, g, or t
  misc_feature (189)..(189): n is a, c, g, or t
  misc_feature (191)..(191): n is a, c, g, or t
  misc_feature (203)..(203): n is a, c, g, or t
  misc_feature (231)..(231): n is a, c, g, or t
  misc_feature (297)..(297): n is a, c, g, or t
  misc_feature (338)..(338): n is a, c, g, or t
  misc_feature (340)..(340): n is a, c, g, or t
  misc_feature (418)..(419): n is a, c, g, or t
  misc_feature (543)..(543): n is a, c, g, or t
  misc_feature (549)..(549): n is a, c, g, or t
  misc_feature (560)..(560): n is a, c, g, or t
  misc_feature (601)..(601): n is a, c, g, or t
  misc_feature (612)..(618): n is a, c, g, or t
  misc_feature (631)..(631): n is a, c, g, or t
  misc_feature (634)..(634): n is a, c, g, or t
  misc_feature (639)..(639): n is a, c, g, or t
  misc_feature (641)..(641): n is a, c, g, or t
  misc_feature (643)..(644): n is a, c, g, or t
  misc_feature (650)..(650): n is a, c, g, or t
  misc_feature (652)..(652): n is a, c, g, or t
  misc_feature (663)..(663): n is a, c, g, or t
  misc_feature (670)..(670): n is a, c, g, or t
  misc_feature (697)..(697): n is a, c, g, or t
  misc_feature (700)..(702): n is a, c, g, or t
  misc_feature (706)..(706): n is a, c, g, or t
  misc_feature (753)..(753): n is a, c, g, or t
  misc_feature (775)..(775): n is a, c, g, or t
  misc_feature (842)..(842): n is a, c, g, or t
ntcacccgagggcaaatggaaatttattaattttttttgtccttttccatctttccccaagtngcttttccttgcaaaatgcctganatgacaccagaagggaacctggaagcagggngcaccccaannnngcagcccangnacttaaatacaagctggaggncagggcacaggtgggacangcaagananagcacgaggganatggcttctcagggagaccaaagacttnctttcttgcaggaagcagctgttccagagggcaggggactaggatcctgggtgcagagtgggtaancagagaggcccccaatcctggatggaacccacattccccananaagtagcggcaggggatgagggccttccctggtgggctccagaaacggagtggggagtgagccagatgtgctaccttnnggaaagggaggaggtgctagcagagttagggttaaggctggtgcccagcctctggcacggtgggccttccgcctccgcctgaaatggggacaaaggggcacggtgggcaggcagcgcatgggtntttctntggcagggcanagggcggcaggagcagactccctccaggctcaagacacaancccagcatttnnnnnnnttcccccgccccnganatacncngnncccacngnagctggacggntcgagcngggagtataggaagggagaggaggcantannnagangaaagggtgggctgctgggcccctgtggcctccatgcctgtcctgangtccagcccagggccctggatnccaggtcctggatccctggccacattcctcgccctgggcactgactgcagccagggcagtagaggcnggggagacctcagttcttgggcatga

SEQ ID NO: 699362 - DNA, 186 bp, Homo sapiens
  misc_feature (105)..(105): n is a, c, g, or t
tgtgcaggtgacggtatctttaacaactgatcccacacttgcaactgatcaagagctgtgcttctccatttgcctgcagagcaacgtttatcatttcccgtgcgnatccatttccttctgaagtactgagtgtatccattcttttacggctcctctttatctcctttcttaagccgctggcgctat

SEQ ID NO: 699363 - DNA, 744 bp, Homo sapiens
tggtctgcaggctcatctgtgtccggctttcactccactaatgctgtctcagtgttttctctctctctctttcgagcttggcactccggtacccgacccggacgcccgtggtcgccatcccatgaccggggggccagtggaacagaagacatggccgtaccagcccgtgcccggcctgcggggggggcagcccagcgaagccactgccacaccagccacgccatgcgctcatcctgacttcagccacatgactctattgtttcgcagtccccttggggcctccgtgtcatggtggtgtgagtgcgaagctagctatagaagactgatgacccggtcgcgtcgagagcttctcacacgcacgtgtgagagttggccgagtcgagcactctaggctaccatgagtccgtccgtactggacagcatccgtctacttgcattgcaacagcagcacgagagcaggagagcagagcatcgggatctcaaaaggtgaggtattataagattggtactgctcgtagttgcacttcttactcattccctcattacatgatctctccaaaagttgatattttcccttttctttgaatttgagatctcctataccacaccttctccttacgtttccgacttcccacgttgtccattatgtaccatgtacaccagggttcatgcatgtccatcgaggggtaaagaacaggatccttctttacacgctgcacatggctgacaatagttctcaagcca

SEQ ID NO: 699364 - DNA, 360 bp, Homo sapiens
  misc_feature (107)..(107): n is a, c, g, or t
  misc_feature (240)..(240): n is a, c, g, or t
tgatctccaggatcttgtgaggtaagcggggtcacggtttcgtcgaggccttcaggagcctggtggtcgcccttcaggtagcgccgccaccttgatggcaccttgtnatagtcgcagaactcgaagaagaagtccacaggagtgtcgcgctgctggtgacccgcggagtcactgcccaccgtccagtatttgcctgtggagtctttgatgttgtaggcgccatcgttgaactccagctgnaagacgtcatagctggagcggttggcgtcccaggggtggccgtgacctttgcggcaggcggattgaagccatggttcccccggttttaaactccgcggggtaccggaggctcggaattcg

SEQ ID NO: 699365 - DNA, 246 bp, Homo sapiens
  misc_feature (48)..(48): n is a, c, g, or t
  misc_feature (88)..(88): n is a, c, g, or t
  misc_feature (116)..(116): n is a, c, g, or t
  misc_feature (140)..(140): n is a, c, g, or t
  misc_feature (172)..(172): n is a, c, g, or t
  misc_feature (196)..(196): n is a, c, g, or t
  misc_feature (208)..(208): n is a, c, g, or t
tcttttcctatagtgcaggagaggcacagggagggttttggtcaggangtagtagttggatctgatttatatgatttttaaacttttngaaataatttcaaacttacaaaaaaatnacaagattagcacaaagaatttcngtatgctcatcatccagatgatttccatttanaagagatggtttgggctacgcggnggagaatggccntagggggcaggatcagttctgtcctcattacatgccag

SEQ ID NO: 699366 - DNA, 310 bp, Homo sapiens
  misc_feature (32)..(32): n is a, c, g, or t
gattttttttaaaggcagaaaaacttgaaatnccccccttctggccaaaaaaaatccgttttatgaagagtaagtgggacctggggtcccgggcccaaaaaagggaaattttgggccaccctttttgtgggggcccccttccctgttgggcagcaaaaacagattttccgttccttttttccccccccgtattatagtttaaccaaaattgtttttttcttggaaaaaaaaccttttgttttaaaaaaataaacaagtgaatgttggaaattagtctgttaatgtttttaataaagggtttttggggtta

SEQ ID NO: 699367 - DNA, 142 bp, Homo sapiens
  misc_feature (37)..(37): n is a, c, g, or t
gaaaaccctgctctaggccaggcgcggtggcttgtgnctataatccctataatcccaacactttaggaggccgatgcgggtggatcacttgaggccaggagttcaagaccagcctggccaacatggagaaaccaccatcttt

SEQ ID NO: 699368 - DNA, 417 bp, Homo sapiens
ggggggggcccccccaagggccccccggggttttcccttttagttcccgcccggggaggggggggggaaggggggggggaaacaatttcccccggggggagggttggccccggataccccccgcccggaaaaacccccccccaaagggggacaaaaaggggggccccccccgggggggggcccttttaaaaaaagggggccccccgggggccgggaattgggcccaaaaaaattttttgggcgcccccccggggtttttcccccctccccccgggggggggccccaaaaaaccccaatttggggggggggttttccccccccaaaaaaaaagggggggggaaataaactttgggaggggggggggggggggggtttttttttttccccccccccccccccaaaaaaaattcctttta

SEQ ID NO: 699369 - DNA, 152 bp, Homo sapiens
  misc_feature (25)..(25): n is a, c, g, or t
aaaagcgggaacgttgcccgggctngaaagacaggccctaagggccggacccgcggccggaaaaaaaaaaaccccccccccccccccccggctggcggcgcgctgccggcgctccttcctcctgggctcgcgcctaactcagggaacctcca

SEQ ID NO: 699370 - DNA, 220 bp, Homo sapiens
tattaaagagaagaaaaagagaaaccgtgggactatgttaattaagttaggatactttggttggtaagtaatagattagggatggctgggaaatggttcctttggattaataggcatccattataattagtaaacaggtgttccaataaaaaggatttaccttggattaggttaacaagggcccaggaaaggttgagtttccttgaaggaaggtctttgg

SEQ ID NO: 699371 - DNA, 267 bp, Homo sapiens
gggggggggggcccccccctggggaaaattttggggggggggggcccccctgggaaaccccccccttgagaaaaattttgggggcctttttaaggggttcccgcttttcaaagggggggggtttcaaaacccccaaaggccccccccttggtaaggggttttgggtcccaggaaaatttcccaattttttgggggttttggcccttttttttttttttgaaaacttccccaaattttgaaaaaaaattcccccccttttttttttta

SEQ ID NO: 699372 - DNA, 881 bp, Homo sapiens
tacaagtaacggcaaataggaaaccagaaaagggacccccagggtgtggaacaaatctctgtggtttacccctctccccaaaaaaacgagggcggaggaggtgtggccccttacccccttttcgtggtctcgattctcgggccccctttcttcactcttgggtgcagaacatctcctataggagggcaggggccctcaacactttcccgtgggacacgtggggatagatcgagtccacccagaggctgtgccattgccccaagacccccttctttccccaaaaaagaagttactcgtcgggggcaaagcgggaactcaggggcgccacaaacccacgggaggcgcaaatgagcaggcgatttgaaacacttttgtgcgccgcctgtgagataaccgacgccagcacactcctgcacaggcatgtgtctgaaaaaaaagatgtggacaacctctgtgacccaaaaaaaactaaaccaaacactgtgttccaagacgggctatcttggggttagacacaaatagggccacacactgtggaacacccagaaaaccgttagggcgagaggcagaggaagcacaacaagagcaggaggagtactgtggaaaaccagctaaccacgggtgaaaaaacctcccatgtgcaaaagtgggggtgcccccacatttctcgacaagcaagcggcgcagaaccacagcgggatacaaagtatgtcactgacaacgccacacaactagggagctatcgagggaagaacatgccccaacacgacccacactctatattttgcggcgggccacaaaagcgggtactcactgcgggccccacaaccctgtgggacaaaacaacgtgcaacacaggcgctcactcaaattcaacccaa

SEQ ID NO: 699373 - DNA, 106 bp, Homo sapiens
gctaaaaggagtcaccatagccagtagaggtgtgttagcccaacatacactccgagtgctagcgaagaagcggggatccaaaggcaagtaggaagcaatcatcaca

SEQ ID NO: 699374 - DNA, 102 bp, Homo sapiens
ccggagggcggggcgggtctccaactccggacctcaagtggatccagccacctcggcctcccgaaagggctggggattacagggtggtgagccacggggccg

SEQ ID NO: 699375 - DNA, 161 bp, Homo sapiens
cctttggacactaggaaaaaaccttgtagagagagtaaaaatttaaacacccatagtaggcctaaaagcagccaccgatttaagaaagcgttcaagtacaacacccactacctaaagagttcgcaaacacataactgaatgactcacacccattgggacca

SEQ ID NO: 699376 - DNA, 147 bp, Homo sapiens
cgataaggccggcgatacatacttcacaaagaaggcccctggtcagccaggaagacgcactccaacctgattgaggcctccgaggaagttttgtcaaagagccaccggaagaaaaaatctagactggtgagacccagggagggcagg

SEQ ID NO: 699377 - DNA, 371 bp, Homo sapiens
  misc_feature (33)..(33): n is a, c, g, or t
  misc_feature (75)..(75): n is a, c, g, or t
  misc_feature (108)..(108): n is a, c, g, or t
  misc_feature (206)..(206): n is a, c, g, or t
  misc_feature (357)..(357): n is a, c, g, or t
gtgccttccccacccagcaccatgcggggggtnccatgggggctggtggccacgtcctgtcctcatggagctcanactctagcaacacatatggggtttccatcaaanctctcctatcagctgggcgtggtggctcatacctgtaatcccagcactttgggaggctgaggtgggtggatcacctgaggtcaggagcttgagaccancctggccaacatggtgaaaccccatctctactacaagtacagaaattaggcaggcatggtggtgtgcacctgtagtcccagctaccagggaggctgaggcaggaggattgcttgaattcaggaggcggaggttgcagcgagccgagaattngccactgcactcca

SEQ ID NO: 699378 - DNA, 847 bp, Homo sapiens
attactcctttcatctgtggtatttctgttataatactttaatgtgtgcatctgacaatactgcctcttctatgttgtattcagaaattaatatacttataaaattaagattgattagccaaacttgaattctagttgttaaaactgatgtgtgaatttgatttttcagatattgatgcattacacaccttagctataagaaaaaaaagggtctggattatatgcttcttgcaagttgaatctcgttatttaaacaaaaagtttggggtctgtctatcggagtatttgtaacttctaaattttgaaagttgactgaattaggaattgggatgcttattctttggtagatgcgtgttggctaaaaaccaatttacaaagtctgactgtctcttgggagagggaggtgccttgcaaatttcacattaagaatgtgcctgaggctgctttactctggaatagtctcagatctaaaatttcctctatataaggtggcatatgttaagtttggttcattggaccgtttagaatgctatgtacaatgttgcattctgttagattgtaatatatagccatctctgatttggtctccttaagtgatacggatttgtattctaaaggtgataaactctgaaaatatcagaattctgcgtttacttgaaatttggcgaataaccacgtgggtgaccattggaggtttgtgccaggctacacgtcaaacgccgtaggtcagaacaacactttaacccaagtaccctcggtgatgtttttggctgtacctccattgaatgggcaattcagggggggcccgagacaagtctatacaatagggttggtcaaggatttggag

SEQ ID NO: 699379 - DNA, 695 bp, Homo sapiens
  misc_feature (438)..(438): n is a, c, g, or t
cgaaatttgctcagagttgtccgagcattactgtggacagattatttgagttctgtcatttgaacattttagtttaaaaacgaccctttggtgtcaggttgccattgtttttgttcgacaggggtgtatttagatgaagggcttttggttgttctgttggtaagagagatcaataacgatttattttggccattggtcgaaaattagcattattgtcttcatgcagtattctcaggatgggaaacatgcttcatgtttcttataaataaccctcaattatgagggcgtactttgcactttgaagaaaaattgacttgcattaaagtggctaacaaatatctttcctgggcaggatgtcaaatttgtcctctcctctaataccagtactgttgagctcacattctcccacttttcctcttttcaggtggttcacgtatngggatccatgaaacctcagacagcagacatgttaactttgcttatcttgttattccctgaggtagtcctggggctcttaagagattaccgttcttaaaacctggaaagtgacccagagaggtagatcttagtcccaaaattaacgttacttctaggcataaaaccttttcaaaatcccatcacatttatcaattcgttatcctgaccttatttggggggaacacttggcccccctgcattctcttacactgggaacg

SEQ ID NO: 699380 - DNA, 299 bp, Homo sapiens
aagggcagtgacgcgggagacacagttatgggaacgtaccgggcacagtgcatcgagagcatgacccgcctggtggtgaaggaacggaatcgcaacaaactgactcgggaaagtggtaacgacttccccatccctgctgtcccaccagggacagatccagaaactgagaagcttatccgagagaaagatgaggagctgcggcggatgcaggagatgctacacaacatacaaaaacagatgaaggagaactattaactggctttcagccctggatatttaaatctcctcctcttcttcct

SEQ ID NO: 699381 - DNA, 124 bp, Homo sapiens
tccctatcctggtcgcagtccttggtgttggacagttggaaagttgtgaatagcagtacagaaaggaccacagatggctggggtaactgctttgcataaaagctggctgagatctatattgttg

SEQ ID NO: 699382 - DNA, 108 bp, Homo sapiens
gcggccgcctactactactactgctcgaattcaagcttctaacgatgtacggggacatgtcactgtactctagctggggcgacagagtgagaccctgtcttgaaaaaa

SEQ ID NO: 699383 - DNA, 854 bp, Homo sapiens
ggcgctgtgcccggggcgctccgggaggagggaccaggatccggcgccggggcgcagatactgacaccaagggaatccgggtgccccccccgccgaagccatgcgggccccctatggtaaactggctccagcgcagctcggttgccccgttggtccacggccccatatcctggaccaggctggagattctgacggacgattcaggagatcgggcttcgtcactgagaccgtcaggcctcttgcgcagtccattcccacgtcgccatacccctagtcatcctcggcaggtctcagtcccggttccatctgtgccctcgctcccagccgcagctatgttgcacaccgagggccacagctcttcttcgggcggtgggtcagggtaagctacgcttggccctgtttgcttctggagtgaggctgcctacgtgaatgagtggtgatgccgcagggggagactgccgctaatggaaagcctgttcgggcccgatacgacgatccccagaacaaggcacgcctggtacggcttatcttcctggtagcatagggctgcggaccccaaatatcgcagaccggacttacgggcgcactggcgctcattgccactgctttgcagccgggtagatgggggtgcagcccgacggggtgtagcatcgcttgcttccttatcacacaccagacgcaaagacacccctgtctaggtcccagagattccaccgctggggacgacctcagagagtcttggttccacagggcccattggaaccccgactggaggtgaccagctgaatgatcgcttttggcgcacaagcattggccttgatgacgtgcctattgcaacgggacacacaaggggg

SEQ ID NO: 699384 - DNA, 473 bp, Homo sapiens
gggcacgatagggcaataaaagcaggctgtccgagccagcagtggcacccactcacgtcccttccatgctatggaagctctgttcttatgctctttgcaataaatcttgctgctgctcactctttgggtccacactgcctttatgagccataacactcaccgcgaaggtctgcaacttctctccagaggccagcaagaccacgaacccactgggaggaatgaacaactccggacgggaggaacgaaccactctggacgcaccgccttaagagctataacactcactgcgaaggtctgcagcttcattcctgaagccagcgagaccacgaacccaccagaaggaagaaaatcttgaacaaaacccaaacatcagaagggaaccaactccgaacacatcagaaggaaaaactgaggacatgccgcctaaaagaaactgtacactcaacaagagattcttacggcttcggcggtca

SEQ ID NO: 699385 - DNA, 374 bp, Homo sapiens
tgtagatcatatcctgtgtgtgcgtatgcatgctccacagagataacaggttttgttgcttatcaagtagcctttcagtcctgggccccctcactagctgagagccacacccttccttggcttcaaagccagcccagcactaagccattttagtatgttatggtttagacgggggttctcagaactaccttgggacggggaccaagcgagaaacaagacgactgttttatttggtcctcagaatttaggacggtcatgatggtggacgcgtgactttttttattttataacgttgcagtaaaaaccttaacaatatggacccggtacgctttggggtacaaggattactaaagacctaaacgcagacgtttaac

SEQ ID NO: 699386 - DNA, 764 bp, Homo sapiens
  misc_feature (94)..(97): n is a, c, g, or t
  misc_feature (99)..(99): n is a, c, g, or t
  misc_feature (101)..(101): n is a, c, g, or t
  misc_feature (103)..(104): n is a, c, g, or t
  misc_feature (108)..(108): n is a, c, g, or t
  misc_feature (110)..(110): n is a, c, g, or t
  misc_feature (112)..(113): n is a, c, g, or t
  misc_feature (115)..(115): n is a, c, g, or t
cctgaaacttttccttcaaagagggaatgatctcctggaattcaagcttctacaaggtggctacctggtgttttccacttttgccgtctcctannnngnancnntcangncnngncctttcaacccactgaacacataaacatgctttctccttaactgaacttatggccacgatgaacttgaactctgagattcacagaggagagtttgttttaacagctgcttttacaatgaagccctggagttactactctcaagacccctggttctgataggccatcttttcactgtcctctgcattttctaatgcccagctgtcaaggaacacccactgaagttttccaaaacaaaggcacgaaacacaagaaaggcaagagaatgctaatcaccagatgcatgggcatcctatgggggaaccccttacatgtggaatacggtttttctccccaatttatttttataaatttattgatttctttgctagtttgttattaattgttagagatgtcctgttgcctgaggttgccctgtccgatatggtagccaccagcgacaggtagctatttagagtaatttaaaaattacattaaaaatgcagtttccttgtcacttaaccatgtttcaagtgctcagtattaaccacatgtgactagtggcttccataaaggaaggcaaaaatagagaacatttacatcgctgcagaaagctactagatttttttggccaaggcataagctctttctcataagagaaaggggattgca

SEQ ID NO: 699387 - DNA, 597 bp, Homo sapiens
tggtacaggggaggctacagtgagctgagatccctccactgcactccagcctgaagacagagtgagagtgcagtggcgcaaactcagctcacagcaacctccctttctttcttttttttttttttttggaaagggactcttgctctgttgcccaggttggagtgcaggggtgcaatccgggctcattgaaacctctctctccgggttccaagtgattctcttgcctcagcctcctgagtagctgggaataacagggcgtgtaccaccatgcccagctaatttcctcattttaataaagagatgggtgttacaccatggtgggccaggcgggtctggaactctgggctcccagtgatccaccaacctccacctcccggggataacgggcttgagccaccacgcccagccaattttctattaatcatgtccgttttaaatggcccatggaagcactttggtgagggctatttaaaaatcttaatcagataataccaacgcacataccacgtgggcatcttaggatggtcttttctcatccaacgtgagattcccggtgactggtatgaaagtgatggtcccggggggatctctagagtc

SEQ ID NO: 699388 - DNA, 124 bp, Homo sapiens
gtctcatcacggatcccccactgtggttcctggagatgagctccggcttcgagaacgcctggtctgggcttttcactgtagcacgcgcaagggtcagagtagcataggatgtgcgggagcaacc

SEQ ID NO: 699389 - DNA, 83 bp, Homo sapiens
aatatccccaaagcagcatttatttaccctttttttttttactcgcagcaatgttgcctttcttaaggtcctctatttctctt

SEQ ID NO: 699390 - DNA, 119 bp, Homo sapiens
cttgggttatgtaccgcttgttttaggcgctgctactgtcagtataaaccctcacctgaaaaatgccagcctggtacaccaaacactgagccccttcaacaggcacattatttcccccc

SEQ ID NO: 699391 - DNA, 340 bp, Homo sapiens
  misc_feature (181)..(181): n is a, c, g, or t
cgggcccccccctcagggccttccgaagccaacacttgtcccccccctgggcctggggccttccctctccagctgggtaagaggggtttagaattccccttctctttttttagggcctcggccccgcccaagggggcggcccttcctgacatccccccaggttgggcagcctcccggggcntggagggggggccgccccccccccccccccctcccccccccccccttaactttgggctaggctgggctgggcctgccccgctcaggggtatccggttggttcctattatttatttttttaattttttttttaattattggaataaaggttaggtgggga

SEQ ID NO: 699392 - DNA, 822 bp, Homo sapiens
  misc_feature (822)..(822): n is a, c, g, or t
tggaaacagagtctggctctgtcgcccagaacgggagtgcaggggcgtgatcggggctcactgcaacctctgccttccaggttcaagtgattctccttcctcagcctcctgagtagcggggattataggcacatgctaccacactgggctaattttggtattttaagtagaggcagagtttggccacgtgggccaggcgggtctcgaacttctgacctcaagtgatctgcccacctcagactcccaaagtgctaggattacaggtgtgagccaccacgccgggccagtgtatctgatttctgccttaagtttcacattggcttgggtctcttcttccttttcatggtatgtttaatttaattatacatttttaatttggtagagacgggtggtcactatgtggcccaggctgggtcttgaactccggggctcaaatgattctccggctctgctcccaaagtgcggggattacaggcatgtgccaccacacctgggcccatggtataataaaaaaaaattttttccctaagtaggttataattgagggttccatttatccatccatgtgtctccacggattttttaagaccaattctgtgccaagcacaggcctacaggtggtgaacgggaccagatgggcttaacagacccgtagctgcaaaactacggtgtgctgctctccaccaatttaaatagatccggcttatggggagtttacctctttggaacttttatggaactacctcttaacagaaagggtaggcttcacttccaggcaggagacaaaaattctcctttaaagggggacaaaagggtcccgcn

SEQ ID NO: 699393 - DNA, 158 bp, Homo sapiens
ccccgtgtagtcacatgagtccgcaaaaggcccacacctcaaaaaggttaagaacacttgtcctgcttactgatttagagtaacaaatggcagagtatttctctactgtctctctactcttttttttttttttttcttttttttttattttttttttt

SEQ ID NO: 699394 - DNA, 1107 bp, Homo sapiens
ggcgctggagcagtttataaacaaggtcgctggtcatcctgctggcagcagaacgaacgttgtcttgcacatgttttgtacaaggatgaaataatagataaaagctagtactccatctaaagataagacatgcctgagaatttggcaagaacggggcaaaaacgtgactgattagatgattgagtaagcaccagtgaagaaagttgctatacttttaagcatgcgtggcgactagaaacgtgggtattaacatgcgcattcaggtatactaagcatgtcatatgctcgagttattgtaaaggttattggcagttgatcgacgaacgttaagttgtgcatttagtaaaaatctcctcattccaagcctgttctatgagtaaatgagctgcgtttctgtgctgttgttgacatgggggtggcacgagctactagcgctgagagaacctgttgattccagttgtacatctgcacgtgtcgtaaccttaagttactggcttggtcgtcatttgcgacagtttgggcgtctgtgcgcttctggacatctgattaactagaatattgctctttcccccttttaatttgggatgtcactttgaacccatttgtgtgtagggagcactacagcatttgggttccaatgatgcgaactgagatacatattgtgtggccgaagcatctggcccaggtggataccttatgaggggcagatttatgcggggcgaaacttgttatccggggtaacagacacaggccacgttaatctgcgcaccactgtgcgccaacaacccacggtgtggtcacacacaattacaatcgcgttgtctgtatcacaaaagacaaacacataatgcgacgtatacacacacccactacacgcgcacacaccaaggagacctctctcaacgaaaaaaggctcacgcgagaggaagcacgggagcacaggaggactagaagaacagagaatcgagggagtatgttgtccacagcttcgacgcgggacagctaagaggagaagatatagaagccaactaataacggaactcacgacatgtatgtcgtgatcggtacggcaccacacacgccactaccacaacggccgggtagcca

SEQ ID NO: 699395 - DNA, 128 bp, Homo sapiens
  misc_feature (4)..(4): n is a, c, g, or t
  misc_feature (75)..(75): n is a, c, g, or t
  misc_feature (125)..(125): n is a, c, g, or t
gtcnaccacatttctcgccctattccaagttctacagtgtgtatttctcatttttcaagtttttcaatgatttcntcatttttcaagtcgtcaagggcatatttctcattttccatgattttganttt

SEQ ID NO: 699396 - DNA, 484 bp, Homo sapiens
  misc_feature (106)..(106): n is a, c, g, or t
  misc_feature (148)..(148): n is a, c, g, or t
  misc_feature (220)..(220): n is a, c, g, or t
attttccaggagatggctgacaagtgctcgcccaccctttttttgttcaatgggcaggcggccttccacatggcccagggccgctgggaggccgtttagggccttnttcaggaggcgctaaacaaggatagtgggtacccaaaaacgntggttaaccttattgtcctgttccagcacttgggcaagcccccttaggtgacaaaccgatacctgttccagntgaaggatgcccccaggttccatccctttttcaaggaggaccaggccaaggagaacgacttttcaagggtggggttaccagtacgctcccagggccttaggttggcccaaaactgtcaggaccattaagccaggacaaaggccaggagccagccctgcagccctccccccccggcatccccctgcatcccctttgggggcaggagcccccccccagcccccccctttgtttataaattttttaactccagggtgttccccctta

SEQ ID NO: 699397 - DNA, 927 bp, Homo sapiens
  misc_feature (27)..(27): n is a, c, g, or t
  misc_feature (64)..(64): n is a, c, g, or t
  misc_feature (70)..(70): n is a, c, g, or t
  misc_feature (82)..(82): n is a, c, g, or t
  misc_feature (107)..(107): n is a, c, g, or t
  misc_feature (113)..(113): n is a, c, g, or t
  misc_feature (130)..(131): n is a, c, g, or t
  misc_feature (147)..(147): n is a, c, g, or t
  misc_feature (160)..(161): n is a, c, g, or t
  misc_feature (166)..(166): n is a, c, g, or t
  misc_feature (195)..(195): n is a, c, g, or t
  misc_feature (203)..(203): n is a, c, g, or t
  misc_feature (206)..(206): n is a, c, g, or t
  misc_feature (209)..(209): n is a, c, g, or t
  misc_feature (211)..(211): n is a, c, g, or t
  misc_feature (213)..(213): n is a, c, g, or t
  misc_feature (261)..(261): n is a, c, g, or t
  misc_feature (288)..(288): n is a, c, g, or t
  misc_feature (304)..(304): n is a, c, g, or t
  misc_feature (316)..(316): n is a, c, g, or t
  misc_feature (319)..(319): n is a, c, g, or t
  misc_feature (323)..(323): n is a, c, g, or t
  misc_feature (328)..(328): n is a, c, g, or t
  misc_feature (334)..(334): n is a, c, g, or t
  misc_feature (342)..(343): n is a, c, g, or t
  misc_feature (345)..(345): n is a, c, g, or t
  misc_feature (368)..(368): n is a, c, g, or t
  misc_feature (370)..(370): n is a, c, g, or t
  misc_feature (386)..(386): n is a, c, g, or t
  misc_feature (391)..(391): n is a, c, g, or t
  misc_feature (403)..(403): n is a, c, g, or t
  misc_feature (413)..(413): n is a, c, g, or t
  misc_feature (423)..(423): n is a, c, g, or t
  misc_feature (425)..(425): n is a, c, g, or t
  misc_feature (433)..(434): n is a, c, g, or t
  misc_feature (443)..(443): n is a, c, g, or t
  misc_feature (448)..(448): n is a, c, g, or t
  misc_feature (456)..(456): n is a, c, g, or t
  misc_feature (468)..(468): n is a, c, g, or t
  misc_feature (478)..(478): n is a, c, g, or t
  misc_feature (499)..(499): n is a, c, g, or t
  misc_feature (513)..(513): n is a, c, g, or t
  misc_feature (924)..(924): n is a, c, g, or t
ttgatcttatgcaagaagctgcacgancccgcgcccgcttgtcgccacggcacttgaggcagcnggaganaatctgagttantcggagcccgacgcctgagggtganatgaangcgctggcctccctaanngtccggacctgtgatngcttctggcaganngaacnggcgctcctgcccccggggtgacgcgcantcccagcngcncanananatggccccaggccaagcaccccatcaggataccccgtggagggatgcncaccctttcttcctcctgtccccagtnatgggcctcctcagcngcgcctggagcngcntgangggcntggganctctagannantggctggtggaagaagtaaaaananaagctctggtagaagntggcntggagggagaanataggaatcntctggcaatnanccataaannttggggcanaagcnctgaagangaggctgaaganagtggaggcnctggagaggacagagaaacantggggctgaaaacnagcagttcccttcctgaagcctggggacttttggatgatgatgatggcatgtatggtgagcgagaggcaaccagtgtccctagagggcagggaagtcaatttgcagatggccagcgtgctcccctgtctcccagccttctgataaggacactgcaaggttctgataagaacccaggggaggagaaagccgaggaagagggagttgctgaagaggagggagttaacaagttctcttatccaccatcacaccgggagtgttgtccagccgtggaggaggaggacgatgaagaagctgtaaagaaagaagctcacagaacctctacttctgccttgtctccaggatccaagcccagcacttgggtgtcttgcccaggggaggaagagaatcaagccacggaggataaagaacanaaa

SEQ ID NO: 699398 - DNA, 769 bp, Homo sapiens
ctaggtagaggctggtgttaatcggcgaggagactagtctcgtagttttttgtttttgtataaacccctaagggtcacagtcatcagggggaactaaaatcacacacaaaggcaaatcatgaggaaacgttaaattatttcaaaaggcccacgaggcgtgccaaaaacagggctgtatctatagcacaaaaatcgtgggaggccaaagctaaagcagtaggggctactagcaacttctagctctttcctggctgcttatttggtatggtatggatagagggggattcaggtgagggggttcgggtctctcaggaagttatggccataatttctgcaggtccagtgataaactgggatccatcccagtgcggctctagaaacgtggttcaggaaagtgggaaattctctataatcaccatccgtgagagggaataagtatgttcattcagaatgactgggcggctcacgaatctcacagacctaagtgcatctccacggaggtatatggtggcaaccttctgggctaatacaagggaaatggtggggcactctccccattaccgggattagaatcgtccggggagttgatcacttccacaaggccccaccaattggtcaaacaccaggccgagttctaacagtggtcaattataagggagtaactacccctataatctgaatagtgatatccgcattcgaaatgtaagccatggtcaggtcagtcttgaatcccaggcatcgggccttggacccatccattctactccac

SEQ ID NO: 699399 - DNA, 391 bp, Homo sapiens
acgctggtctcgaatacctgaccttaggtaatcctcccgactcaactcccaaagtgctggaatcacagggcgtgtgccaacagctacagaaattgatgtatatcttatatatactattgtgtgtgtgtgtatatgtagttactcattgttaattccctcagaattaaccctccggcatagatatactacgtctgaagtctcggattattcaacaagtagatctgccacccctcatgctttggatcaacaccagggtttgaccactgaaagtcgtgagacacactacaacggcattcatttgcaaaccccaccgcctcaatagttccaggcaaaccccctgtctgcaggcccccccgaaagttacgcgagcaaatactcaggccgccacacc

SEQ ID NO: 699400 - DNA, 1542 bp, Homo sapiens
  misc_feature (1109)..(1109): n is a, c, g, or t
tggggttaggttgtggttttttctaagagagattcggcaatggcaagggtctctttgacccctttgccacaacctggaaacagctgggcccgggggtccccggtttcagggggtttccgtgggaccacccacgtgtgttctccccaacctctggatggcgctggaactattcctctataagcacacaggtgtggtccacactctcccaggggtcctctggacccaggtgtcaagaagtattgtccctctggcacatggcaagaggcaggagaaggctctacaggttggggcgcctggaggagtgtgtccgcgtgctccgagaccctgtggccgagggcaacgaggttttcctccgcgtggagaatactctgtgtggcccccacgcggagagatatctgtggtgagcccgagttcgagagaggagagggaggaagaagaggggagcccccttcagagcgagagagtgtgggcgcgccagagtctatctcacgctctcagagaaagccgtgtggtccctcctgtgtgaggtttctccaaaaacccccagagaaaatagtggcctgtggtggtgggggacctttataaaagctcttctcccagaggggggccgcggtgcgccagtgtgtggggagagccccccacaattcctcttttaccaacaaagcgcggccaaccccaaatttaaaacccagaggttgttggtggggccttttgtggagaatttccccgcgcttccttacgtgggtggtctttgagtgcccccacgacatttcctcgaggggggcaccccagtggagagttgttcctcacaaggataacaattctcccagcggctttaccccccacaatgtaggcggacacaaacccctctgcggtgccaccaggctgtccccctctgttcctgtgtagaggccccccccaagtatatttgtcttctcgcgggcacttttggcgaccccaacccacgcccgcggggttgggtgttccccccatttggttcccaaccccctttgggtcattcccccttttcacctgtgggcgggaaccgtgggggggtgttttccgcgccccatactgggttggacttaccgagcggggcacggatacgnggggcacggggggggggtctgagagcgaaacctattaggtgtgcacacctacacaaaccgatcaccccacgaataaaaaacgaggcgccgggcgggataaaccagccaccacaccttcttaggcgggggcgggcgggacatactagggggaacccccgcagacggttggcaccagaagaaggagatttgcgcacacacaaagctgcttcgaaaaaggcacggtacagctgtagaaaagacccacggcggcccagacatgctcggcggagagacctacctagcaggagcttggggtaccacatggaggcgcacgtgaagagctaacaacaacagaaggcagccttccccgagaggcgggagcggccggccctatcaacggcccgagtagagcacacgccaacttacatcggagagagggggaagaccgacccat

SEQ ID NO: 699401 - DNA, 890 bp, Homo sapiens
gaattggggtgccaaaggactatcttcaccatttcccatttcatttccaaaatgtagcctcccattttttcccttgggatgagaggttctttttcccagaagtaggaaaggcttttcagcaaattaaaacaaagtaataggctgaatttcagccttacagtgctggaaactgggaagatatgaactataatatacgcatctgtccacacatacacacatactgttagtgtacacacacacaacatgcctgtgcacagagccagactacccttcaaaagtgtgctatgggtgtgtacctctggataaataagatgcatgccaagccaacccacagattttcaccactgtggggcaagtcaccaggcacctgttcaatgagcttgtccacatggattgaagatgctttttaaaacacgagtaaactcatggcttcaatggcgagacttactagtctccatttcaaatgccaactctgagcttctgtacagcacaatctattccctattctctctttgaaaacagttaacccaccttacaggtgaatgaggagagaagactcgtgctgttcatgcattcagtctgcattactctgtgtgtgaccacatagcaagagtaaacttgcacctcagtgcttcagtctcagatggggtttccaacccacagtataattaggggtgtttcagagcatccccagttatctagcacaacactgaaggagcacatcccctcactcatttagacttttttccccattcttacagccactgccttctatcaggtatttgtagaggtttgatttcacacccggtgctagtagtcattgtatgcagtttttgttttgttactgatattgctatgcttttctctgataaaattcatatacgacgtac

SEQ ID NO: 699402 - DNA, 316 bp, Homo sapiens
atttctttcatattgtacttaggtgttgagtggggtctggatgtatcctgatgctaatggggaataccagtctcctattaacctaaactcaagagaggctaggatatgaccccatcgcagtatgagatgtccgcctctccccaaattatgtggtgagccgagactgtgaagtcaccaatgatggacataccattcaggttatcctgaagtcacaatcaggtatattagaaaatatgtaagtgtggtctttaaaactagaagtcagcgtcgagtaatagaactgtgatttaacttgcacaatataaacagtacaact

SEQ ID NO: 699403 - DNA, 609 bp, Homo sapiens
ttcctggaatgggaaaaaatagtccttgctagtgtgctgtaaggtatgatggtatccatcctagtttgtgaccatactaagatcatttatgcatgtatgtcagcgaactggaagacttaatcaataatagaggtatcaagtctatagtgcccatcaggtagataatcccaagtgatcagcctaagtgtgaaggagccatggtcatgagctatcttgcgcttagagtgtgagatagaagcaatgtccacgtctgacagtcctgcatgtgtgttaattgtctagcacaaggctcctggactgtagacagagtccacatcatgacgactcgattgacactagagtatcttaaactcagtggtccgatcagtagaggcatctatacacgttgagagtctcaaacgtcatgtgatgagtgctcaaataaggtacgactacagaatcctttgagtgtagtcatggtctatatcgttagcactgtaccatatagcataacagtatgtatatctcagttgcacggcaatgtatccaatctcaccataaagataagtcatgttcgttacatctgttaggcagtgtattgtcacagactaagcatgtactcaagtctag

SEQ ID NO: 699404 - DNA, 294 bp, Homo sapiens
accgaagaggctgagagcgccaactctctgaggccgggggctctctgcttcagccggatcacacaagacatccccaagtcacagcgcagcgacccggcaggagctagctatgctgctgctaccctccaggcttctagtgctgcctcctcagcctctccagtctccagggccataggccgtacctccaagccccaggagtctcccaaagggaagaggaagttggatttgaaccaagaagaaaagaagacccccagcaaacagaccagcccagctgtcgccatctgtccccaagcc

SEQ ID NO: 699405 - DNA, 332 bp, Homo sapiens
aaaaaggttggggactgctgcttaagaggacaactagaaatgtaaagaagggctgggcatggtggctgatgcctgtaatcccagcactttaggaggctgaggtgggtggatcgcttgaggtcgggagttcgagatcagcctggccaacatggtgaagccctgtctctactaaaaatacaaaagttagccgggtgtggtggcgggcacctgtaatcccagctacatgggaggctgaggcaagagaatcgcttgaacccagggggtggaggttgcagtgggccaagatcgagccactgcactccagcctgggcgacagagcaagactctgtctc

SEQ ID NO: 699406 - DNA, 242 bp, Homo sapiens
tatagtgcttgaatcaggaaactgcagaaatttctgtagtagcgctacattagtgatataaactacgaaataatgcatctcggatataagtcagatgtgactgctattgcatagagttcccacataaagtacagctgtatgcctatgtcacacgtgtcatgaggacagaatatttccatttttcaacttaattttaaggaacacttaatcatttgggctaagtatccattttgggagtggat

SEQ ID NO: 699407 - DNA, 179 bp, Homo sapiens
tccactggagtgacatgagtaataaagacagatcaatagacagtgccatatgcacgaagaaaacaataagaacacaaacactcagcaaacatgagacaacggcaacagatgcatcagaaagtcacgagtctgcagcgagaacttgtagaaaacagaccaaccatattctacggaccgta

SEQ ID NO: 699408 - DNA, 428 bp, Homo sapiens
tcattgacatttgtatttaggtcattaacatttttttgaacggtattagcttgtgattgcgtatctgctaacgtttgtcttgtttctgctaattttttgtccattgatgttttaatatcattaattagaacatcaacgattgagatataattcccagcctcttgcgctgttaaatcgactgcgtctaatacattaacacggaaagatgcccctgacgctgtttcatcttgtttagtaaacttaaagtaagcgtttttaaattcgccttgatcttgtcccatgctttagttggcgtatatgtaaattcgccttgtaaagcgtttgtaactgtaacagcgctatcaacgattttaaacccaccagcagttgtacccatgaatgttgtcgtccaaccagttaagttaaacggttcgcccttgcttgttact

SEQ ID NO: 699409 - DNA, 358 bp, Homo sapiens
gggactagccagatgcgctgataagtcacacagacattgttgggctgtaacagtggagacgagagtgcagctgctgtggagatctggatgctatggcggccgtacccaggcagatgtggtcgcaccatgtaggaacggaggctcaattcgaacttcttgtcatagatgtggactggggagggggcgggattctctaagttaagccgatcactgagcacctcactggacacgagagaaggcaagcccctcggaggacagaagggaagagccacagacttggaggctgtgaaagtggagacaggtggatctggggtggcagcaatgcgtgaaatgccagtgccgtgccccctgccccagt

SEQ ID NO: 699410 - DNA, 254 bp, Homo sapiens
  misc_feature (33)..(33): n is a, c, g, or t
ctgccaaataattttaattacctataaactacnttagaaattttttttttgagacagagttacgctcttattgcccaggctagagtgcaatggtgcgatctcagctcaccacaacctccgcctcccaggttcaagtgattctcctgcctcagcctcctgagtagcttgggatttaccagacatgcacccaccatgtctggctaattttgtatttttcagtcagcagaacagggtttgctccatgttggtgctgt

SEQ ID NO: 699411 - DNA, 344 bp, Homo sapiens
cttttctccccccccttaaaccccccggttttaccaaccagccgatttttggtgatgggggggaaaaaatttatttttaaaggaattaagggggttttccttttggaaggttaaaaaaaattgggtttttttttaaaaggaccgggccaggcccttggttacttttttttgggggtacctttttttccattattcccaaaaacttttttaaaaaaggaaataaccccttggttggccaatggtggggaaattttttccccttttgcctttggaattaaggttttttaaaggaatgggaaaggtttaaatttttaagggaaaaaatttttttggtttttggttta

SEQ ID NO: 699412 - DNA, 389 bp, Homo sapiens
ctctagagatcccccatttgaccgtactgtcgtattacacgggtacgtcccatgctcctcgtgcgaccggacaagcccgggaagcgagccttgcgatcggtcgcactcatttacccggagacaggagaggctctctgcgtgtagtgttagtgcagagcttaatgcatacaggaagcatgagaagagatccccttgttgccacctgctcttgtcctcggagaactagctgtacgagcaagaaggagccgtcgaattccagcacggaaggcgtgaccttgtagtagctctccggatgccaatggttctcccattccagggagacttcgctgggatagaagcctttgaccaggcaggctcaggcttaccttgtccttggccggctcatcccg

SEQ ID NO: 699413 - DNA, 602 bp, Homo sapiens
tgccaacctctgacaaaggccgcttctatgcctttggtagagtgttctctggggtggtgtccacgggcctgaaggtccggatcatgggccccaactacacgcctgggaagaaagaggacctatatttgaagcctatccagagaaccattctgatgatgggccgctacgtggagccgattgaggacgtgccatgtggaaacattgtggggctggtcggagtggaccagttccttgtgaagacggggaccatcactacctttgagcacgctcacaacatgcgcgtgatgaagttcagcgtcagccctgtcgtccgtgtggcagtggaggccaagaacccagctgacctgcccaagctggtggaggggctgaagcggctggctaagtctgaccctatggtgcaggtgtgccactaggtcttggcttattgtggttggagagggggaacacctggcaaaagcaggggagggctgaggctaggcctgtattggctgttgtcatagggctgagccctatgcctggggaggacggcagggtgctgaccattgttcccacagtgcatcattgaggagtctggagaacatattattgctggcgccggtgag

SEQ ID NO: 699414 - DNA, 369 bp, Homo sapiens
  misc_feature (203)..(203): n is a, c, g, or t
  misc_feature (243)..(243): n is a, c, g, or t
  misc_feature (247)..(248): n is a, c, g, or t
  misc_feature (250)..(250): n is a, c, g, or t
  misc_feature (256)..(256): n is a, c, g, or t
cctttctattagctcttagtaagattacatatgcaagcatcccgtttccagtgagtggccctcgtaaatcagcacgatcatgaagggacaagcatcaagcacgcagcaatgcagctcaaaacgcttagcctagccacacccccacgggaaacagcagtgattaacctttagcaataaacgaagtttaactaagctatactacnccagggttggtcaatttcgtgccaccacccggtcacacgnttanncnagtcantagagcggcgtaagggtgtttaggtcacccctcccattaagctaacttactcagtgtaagctcagtgcacaatgctcgagtgctcattccttgggggctgtctgacgtacccg

SEQ ID NO: 699415 - DNA, 325 bp, Homo sapiens
gtgaggcgaattctccgggctgctaggattgcttaacttgaagacggggacttttctcgtgggcgaacgagtgaacattggctgacatcacagttgtctggcacctgttgtggtctctataagcagtttcagagctcacttgccgccagcctgtcccataccaaccgctgtcctcactgcataaccagccccagttacggctgtcttggcgagtgaaactattgagagatggccagttgatgtcaaagttgcagagagcctcccaaagatacacacgaagagaggttacggagagagcagagtccagtcagcgagagagaaagct

SEQ ID NO: 699416 - DNA, 354 bp, Homo sapiens
gaggtgactctgaggatcccagacgtccattctgattctaacagaactagaaaaaacaattctaaaattcatatgggaccaacaaagcctgactagccaaagcaatcctaaacaaaaagaacaaagctggaaatatcacattacctgactttgactatactacaaggctatattaactgaaacagcacggtgtaagtacaaaaatagacatatagatctacggaacagaacagagaacccagaaataaaaccacacacctactaccaactgatctatgagaaagctgacagaaataaacaatgcggaaaggacaccctattcaataaatgatgctgggaaaactgtccagccac

SEQ ID NO: 699417 - DNA, 104 bp, Homo sapiens
ggaccaaaatacccgattatgagaggcactaagataactcctgccattgcgccttcgtctccgcggcctcgttgtcccacggcccggcacgcgcgcaggtttgg

SEQ ID NO: 699418 - DNA, 228 bp, Homo sapiens
tgctagctggtaaatgaatactgcagactgtgggtagtaaccctccagtgcagaagggcagtgtcaaagccaccagtgataccagcaaaaacccctgcccgctccaaagccaccacacagatctgatgaaactccaaagtcagggagatcgcagcggatacgagcagccccggatccccagtgcactcccggcagccgctcccgcatccctgtcgcacagggatacca

SEQ ID NO: 699419 - DNA, 182 bp, Homo sapiens
tcagatggtcgcacggaccccaggaccactggtgcgtgtgatcagagctgactgtagatgggattccctggacctaaaggtagctgctggagagccctgacaaggctggagagcgaggtgtacccggaacccctggcgctgtcggtcctgctggcaaagatggagaggctaggagctcaggg

SEQ ID NO: 699420 - DNA, 617 bp, Homo sapiens
  misc_feature (14)..(14): n is a, c, g, or t
  misc_feature (75)..(75): n is a, c, g, or t
  misc_feature (102)..(102): n is a, c, g, or t
  misc_feature (124)..(124): n is a, c, g, or t
  misc_feature (148)..(149): n is a, c, g, or t
  misc_feature (157)..(157): n is a, c, g, or t
  misc_feature (189)..(189): n is a, c, g, or t
  misc_feature (211)..(211): n is a, c, g, or t
  misc_feature (230)..(230): n is a, c, g, or t
  misc_feature (250)..(250): n is a, c, g, or t
  misc_feature (266)..(266): n is a, c, g, or t
  misc_feature (288)..(288): n is a, c, g, or t
  misc_feature (329)..(329): n is a, c, g, or t
  misc_feature (341)..(341): n is a, c, g, or t
  misc_feature (371)..(371): n is a, c, g, or t
  misc_feature (386)..(386): n is a, c, g, or t
  misc_feature (392)..(392): n is a, c, g, or t
  misc_feature (402)..(402): n is a, c, g, or t
  misc_feature (430)..(431): n is a, c, g, or t
  misc_feature (452)..(452): n is a, c, g, or t
  misc_feature (553)..(553): n is a, c, g, or t
  misc_feature (615)..(615): n is a, c, g, or t
tgtttaggcacgcngctgtgggatgctacttctaaaaaaattgttggccatttttcagaatatccttttggtttnaaatacgggtcaggaaaaacaaatgangtaaaaatacgtgaataatttnctattacagaaatgaaaaactganntgcatctnaaagtgcaagaggtgaagtaatttaacccttncacgcagacgatatggcaatanacaatatattgcttgagcngtttgagaaggctgggatgnatttttgaattgacanagaaaattataaattacattgnattaggatccataatcactgatatagagtacacaaaccagntgctaaaaaaanacactggtttaaatttatgagttaaaaccncacaaggtacagtanacaatnagcatgcttnggtgccagaatttgatttcgacgtttgnnaatactagcctgtcaaatgancgcactcgaatgccattagcagcacgagcacttgtcaacggacttgcctaaagaggattaacttcagagtcggttaacactagtgcagatatgctctgaanatgttcattaggtgatgcttgtgaacaaggtaaatttttggtgaatgggttaaaaggcaganga

SEQ ID NO: 699421 - DNA, 1026 bp, Homo sapiens
  misc_feature (251)..(251): n is a, c, g, or t
  misc_feature (1026)..(1026): n is a, c, g, or t
gtggacagctcaccgtaaggttggtaatggcttacaggcttcccgagacgtacctgactcctggtcattttgtgcctgctcctgcctagacctgtgctttcgagacgggcagttgccattcccaaaccatttcgcctatctccagtgcattgtttgacgaaacgcctagtgactccagcgacccaatcagtgcgtgcgagccatgctaggactatatgacacgctatccagagaggtataaaacccgcagnaccttcacctcatgtaatctacagcagatctagttcacgaacaccactctcaagcagggtaaggaagaacacaaccaagtaaataccaatccgtaaaagcatgactcctggattctacccatgactgctacattccaggtacgtcggctcgtgagcccagtgacacgttacctacacggaagatagtcttctgcacaaactagtgctgtgtagtatcgggcgcactcatgaacacgcagagcggtcgtatagacgcctcccgtagaatggacgcctatgacaggcaacggcaatcgctacaactgcgatgagtagggtgacgtgcttgagacagattgaggagagctccccttggagcttggtgccagatactatcaacgcctgagccttacaagcgaatggttctgacgacaaaaactctaacacaatcagaattaccgcgactaactccacatgaagctaccggggcttgctactacgtgggttcaagggaagtgacagtcgtagactctggtctaagaaaagattcctaggggcaactattgactatggcgacgtcccttgtttgaaggggcccgttgttcgtttattaaacttagcccggggttgggcattccttggttgatcctttgccccaagtggcctactccttggcccttggaaagttagcactaccacttggcgcccaagcctttgtgttactcaaactcaatattcactatctacgagcggccaccactcgcgggggcggggacatcacacgagacggtagacn

SEQ ID NO: 699422 - DNA, 747 bp, Homo sapiens
ggaaggagccagtaaggatgtgtcttcagttggagactgacttcagcttgatctcatgggagctctggagcatgaatcatatcggagttggtcccaccttgaggaaaggaggccagccttttgcattcccatgacagctggtcattggttataggctgccctagcagagtataccgtggtctaacttcctgggtgagggaactctcaataggccaagggcaattctctgcgttggaagggtacacttacgtgcttatgagcattttaacagccaacactcagggcagctggaagacaggttcacctacctagcaaaggggacctgggaggggcatcaacaatgtccacaacattggaaggcttgggaggcatggatctgtggtggtcatggatgtaaaaatggacataaggcagatgggattggtgctgatggcgtctgagctggatttgctagctgcccttccgtatctcttccaacatgcccctccaacatgcccggtgtcccagaagcctgacctctatggttccattgcctgggcttcttcaccctctgattttccagttgccactgggacatgccaacaagagatggcagggtgagacaaggtctggttccttaaaatctttgcttcctccaggcaccagttggaacactggctgcattctctttgaggccagagccccttgtcctgcagggcctttcctattactgagctcttgttggggttccataacaggttcccaaca

SEQ ID NO: 699423 - DNA, 124 bp, Homo sapiens
ccttgagacaggcatgttagcacttggctcagcatgttgtcaccattccaccagaaattggcacaaatgctactgtgtcggggttgtagccaacttttcttaactgtaacgatgctagacttcc

SEQ ID NO: 699424 - DNA, 819 bp, Homo sapiens
ccattgcccggtaaggcccggcagtgtgacggaatgaagcagagtcgcagggcacggagtgtgacagatcaagagcgtggagttcagaatgacacgagagaacaaggagttcgagtgatactcggtcgactcccttcacgatcggatcgatgaacgccgaggagctgtataactacatggtaccccgattgaactatctacagacggcgctagaagcggaggccaagcagatgatctgccgtcgccgacgagaaccagaaccaccacctggagcccgaggaggtgctcaagtacagcgagttcttcacgggcagcaagctggtggactactgctgcgcagcgtgcacgaggagtttttgaagcgcccggccgctgccccgctgccacacccaccactgcaccacctggtggcggcctcgctgggtgactcctgggctcctgtggctgtccctggaccccacctcttccctgccgcccgccaccggccgaccgaccgcggattgccccagttgatgagcgtgcgtgtccccatctgcagcagcgcaccccgagcggggcattaggcatgtgacagcggtcggggcgacggggactgggctgtggcccctgcggcgccagaccttcctaacctggtaccctcgaaatccgtggcatctcaccttcctgagaacggaaatctcgctttcagtcactctgccgaagggcgcatgacgggcatcaggagcggaaacctatgggaccggcactaccaaggccgtcgtacgtggggaaaaaacactctccatatctttgaaactgacgcttataacaattgataac

SEQ ID NO: 699425 - DNA, 870 bp, Homo sapiens
  misc_feature (826)..(826): n is a, c, g, or t
ctctctttctctttttcttcttaagacggagtctcgctctgtcctccaggctgaggagtgcagtggcacgatctcagctcatgaacctccgcctcccagttcaagcgattcttctgcctcagcctcctgagtagctgggactgcaggtgattgccaccaaaacccagctaatttttaaattttagtagagatgggattttgccacgtggtccagcctgtctcgaactcttggcctcaagtgatcagccctcctcagcctcccaaagtgtggcattacagggcatgagtcactgcgcccagcctgtggggttttttttgtggaaaaaaacaaaaaaaaattcatcatcctttccttaaaaatgtttttttttttaaggaaaacatttttccacacaaaagggctcggtttaattcacatggaaatcctctatttaaaaagtggctaaaggtgggaaatcaactggtggttgaaccataaggacctttttacccagtttgtgttatgtgatttagttcccaattaatgttttccaagaaatgtttagcaccaagcatttctcaatcacatttaaaattgatgctaaggggtattttgggaaaactttaacaaggggttgggatcttggtcaattttatcgtggtaaaccgtgaggctggaattccaaattaaaaattcattggtgaatacgtatgggctaatggtcgagtgggggtggttaatcccaagggcgtgagaaaatggtcaaccaatgaggggagttaaagacggaatttggtttaacctaccttaaaagtcaattggggggttacagcataaatttgcganggccgttttttaaataacttgtgggcgacaaaacaaaaaattcg

SEQ ID NO: 699426 - DNA, 143 bp, Homo sapiens
tctgcactgttgtcataccacaaatgatgatatgaggagggtagagccatcttgactgcctctgcccatgccccccgatacagcgaccaggtatgaacaacagtgcaggtatgaacaacagtgcaggtatgaacaacagtgca

SEQ ID NO: 699427 - DNA, 449 bp, Homo sapiens
  misc_feature (3)..(3): n is a, c, g, or t
  misc_feature (11)..(11): n is a, c, g, or t
  misc_feature (88)..(88): n is a, c, g, or t
  misc_feature (96)..(96): n is a, c, g, or t
  misc_feature (169)..(169): n is a, c, g, or t
  misc_feature (440)..(440): n is a, c, g, or t
  misc_feature (442)..(442): n is a, c, g, or t
  misc_feature (445)..(445): n is a, c, g, or t
  misc_feature (448)..(448): n is a, c, g, or t
aanaaaggggnccctaaaatttcccccccccaaagccaaaaatttgaaaacccccccattgcaaaaaattgggtgcccttaaaagccnctgtaaanaatgaatgggtttcgacttgccttatatagccttaaaaatacatttcctggttatcaaaaattgaggcccaancgtggtggctcatgcttgtaatccccagcactttgggaggctgaagctagtggatcgcttgatctcaggagtttaagaccagcctaacaatcatggtgaaacctcatctctaccaaaaatataaaaaattagccgaacatggtggcatgtgcctgtggtcccagctagttgggatgctgaggtgggaggattgctcgagcctgggaggtggaggttgcagtgaggcaaggtcatgccactggactccagcctgggcaacagagccagcccngnttnatna

SEQ ID NO: 699428 - DNA, 502 bp, Homo sapiens
agaggtatccccaagatgtcagatggactgtgtgaattatttggtaatgtgttactatgtggcttgatacaataatagatcaaaaaaggtaaatgacaaagatgtgtacattacagcatgctttttaaagacattatgcatttgtgctcactattccctatatatgcttgtttccacaagggttctcatgcctactagactccagctggaatttctccggagaagaggcagagacagtttggcgaaaaagacacagggtaatgagggggtgttgagaggagaaagccgtccttgccagttaaggatcagccctcagttaaaggtcagcttcccgcaggctggcctcaggcggagtctgggtcagagggaggagcagcagcagggtgggactggggcgttctacatctcattcaggtcaagcagggtctggtccagcatcctttgtgtacagaggtgctcctctttggtgcatttcagtttatcttccaggtcatcaattgtc

SEQ ID NO: 699429 - DNA, 379 bp, Homo sapiens
ctgtttaagccatgctgagcttctagtgttcctcttaccttttgccagacccaatgctctctgaattatcacagagcgcttagaacccacagaagccggcagaagatgacgacctttatagatgcatggctgtttggcctgtcgacataggtgtcctgcaggcacgagcacgtcaagcagtcagactctgaagctgccctaagcctagactcacacagatgggacgaatatgaagcaggaacctgtgaatcagcccagagcctctgcagcgtctccttgaacagagcgagctcgagtcaggagagacaggaccgagcctggccagtgccctcggtctctagtccttgccagtcatcatctgtctccaagaggccatagg

SEQ ID NO: 699430 - DNA, 296 bp, Homo sapiens
gtcggtccagagtgatgtagaaaaagaagaggatagaggtgaagactaaatgtggacttaggaatgaaaccaaacttgccgaccaaaaccacctctgagcactctctgaggggcctgccagtgtggctcagtgcactttggtggctactgagtaaaggaaaggccaatggcttgaccacgaggtaaaaaacacattgtgttttgtttgctgtagaactttcctttgggatctttgtaaagatcagtctgtgtgacgtgatgagcagcgtcttccacatccttacattcactctgta

SEQ ID NO: 699431 - DNA, 299 bp, Homo sapiens
  misc_feature (48)..(48): n is a, c, g, or t
gcaggtctaaatttagtctaaagccaccatcggaaagaggaaattccncctttcctgtaaattaaagtacttatatgagaaagatatttaaaagttcatgtaagatgaagagccaatcttggaaaggtagcattttggaggaaagaaggttaaaagtaagggagagatggcctctgggaaacttcataatgaaggagaaagaaaaaataaggaaaggagtgaaatttaagatctcccttatgaaagaaaataaacaaattcaagtatgcactgcctctcacctaccaccttgctacaga

SEQ ID NO: 699432 - DNA, 154 bp, Homo sapiens
  misc_feature (82)..(82): n is a, c, g, or t
taacactactacagggcgatgagtgcgcggaggaatggaatggcttttggatgcacaaactttcattttatttctacgatgntagatatggtcagtagagagactgaggtggagtagaataggcgtagacagaagtacgagttaaggagggcgc

SEQ ID NO: 699433 - DNA, 219 bp, Homo sapiens
ctgggattacacgtgcccgagcccatgcccagcatggtgaaaccccatatctactaaaaataatttttttaaaaattagccagtcacgttggtgtctgcctgtggtcccagctactcgggaggctggggcacaagaatcacttgaacccaggaggcagagtgagccgaggttggccgatgcactgcagcctgggctacagagagcgaagactctgtctc

SEQ ID NO: 699434 - DNA, 399 bp, Homo sapiens
ggtgctgaggtcattccttggttactcggaatctgtgacaggattttttcttttctttcttctgtatgttttttttttccttcctggagaaaggggtgtcactctgtcacccaggctggagggcagtggtgcagtcatgtttcactgcagcatcaaactcccgggctcagttgattctctatttcagcctcccgagtagctaggactacgggtgtgcaccatcatgcctggttaatttctgtatttttggtagacgtggggttttgccatgttgcccagggtgttctcaaactccgggactcaagctatcctcctgccttggtctcccaacatgcggggattacaggcatgagccaccgtacctggccaagagtggttacctttcaaagttcaccttgc

SEQ ID NO: 699435 - DNA, 855 bp, Homo sapiens
tgtgagtcttgaggcatatgagatgattgctttcttactatatgtcgcccagcgggctctgcgtagcaatctggtgctcctagcgagatcataattcgtgatctcgataagcggaactggacaagcccgaaagcatgggaatactgagtgggtgactcaagccctgcgagacgcctgtactttctgtccaagactcatcgctgcgagttgagctcggcacctctgttctagcactcttaaaaggagagataaatctacccttctgcttgtgtactctttctgatcatgtagatcacagtgatcacctgttaaacatgtcagaggtgaagctgtccagtagttctcgttcaagggtgttcatcacaatttcccaagaggccgcttcggctagcccgccgcaccagtagacgttctgtccccgatctggtctgtaggggtggccaatccgagcaacctgccgacctagcccatccagcgtggggccttgtcctcgctgtacatgcagacagtagactcacggcgtcaggttttgccagtgcgaaggcagaggtactggttacaccgtcggcgtctgcaggctgctccctcactgtgcgggccatctggtcaaaggccaccaccttcaagcaaccctccatgaaccacagcgacatttggttcccgccatgtcccctgctgtcactgctcatatccctgacactgcatttactttcccctatctgatgtttctctgtagtgttgttcagatgatgccccaccttctgcttgcccgagagcaggggcttggcatgtcggcctcagtatccccagtacagagaaagggcttagcgcccaggaggcagtgccctcgggaag

SEQ ID NO: 699436 - DNA, 844 bp, Homo sapiens
  misc_feature (168)..(168): n is a, c, g, or t
  misc_feature (500)..(500): n is a, c, g, or t
  misc_feature (507)..(507): n is a, c, g, or t
  misc_feature (563)..(563): n is a, c, g, or t
  misc_feature (580)..(580): n is a, c, g, or t
gggtgacactgcagtgctcgagccccgtgcagggtgagcttgcgggagtgatcgaccgacagacggactgcacgccgaggcactgctgcccccagcccctgcgccgtggtgccacctgcagcccgaccccgtgccgccagtccagccgcccctcgcccggtgcctagngtgcccggccccacacctgccatgctgctctgtggcgccctgggtccgccatgcgctcctgcctgctgtcctggctcttctgctctgcgccgggcaagtcactgcgctccctgtgaacagccctatgaataaaggggataccgaggtgatgaaatgcatcgttgaggtcatctccgacacactttccaagcccagccccatgcctgtcagccaggaatgttttgagacactccgaggagatgaacggatcctttccattctgagacatcagaatttactgaaggagctccaagacctcgctctccaaggctgccaaggagagggcacatcangcagaangaaacacagcggttttgaagattgaactctcagaggttcttgagaaccagagcagncagtgccgagctgaaangaggcggtggaagagccatcatccaaggatgtaatggagaacaatgagaggattccaatggacgtgcagagaaaagttggtgaagccaacagactgggagccatggccccagtgccctccctggagcccatgcagtgagtccaatggctgagtgggaacaatcagtgcccctggggaggaagatggaggatgaggagaatgcaccaaaaacccaccctcaagtcagcctccccagacagaaataccatgccacatgccgatgtg

SEQ ID NO: 699437 - DNA, 364 bp, Homo sapiens
gaggactctacgtaatatgtaacaatttttttgagacagagttttgtgccgtccaggctgaagtgcagtggcgcgatcccggctcactgcaacccccacctcctgggttcaagcgactcctgtgcctcagcctcccaaatagccggaaccacaggtgtgtgccaccacacctggacaattttttgtgtatttttagtaaagatgggattctgccatgctggccaggcctctcgaactcctggcctcaagcgatctgcctgccccagactcccaaaacccaaagtgctgggattacaggcatgggccaccatgcctggccgaatgtaacaaattttttttttttttggaggttacattttacggt

SEQ ID NO: 699438 - DNA, 501 bp, Homo sapiens
  misc_feature (14)..(14): n is a, c, g, or t
cagggttgaaaganagccactagcctctctaagccttcatctctgtagctcattatccaaaaggtacagttgttcttctaggatccagtgttaaccctttggatcaatctccggggcaatttctggatcagtcgagggaccatggcccatgtttattgaggcctggttcacatgagcatcctgcagctaagtagcagggatggctgtgaatacaagtgaacaacaatcccagcagggaccgtgtgggacagaggagatgccacatctgcccccgtggaaagagagccactagacaagcaaaaacaatagctagtgattaatgtgttagcctgcctttaaagaagtatttctgatggcataattttgtattcctctaaaataagttgtagtcagagtaggagtaggccagtacccactggagaagaagtactttcttgagcagcgggggtcagtgccctcaccatcaattatagtaccttaatctgcttaaacaatacagtt

SEQ ID NO: 699439 - DNA, 1426 bp, Homo sapiens
tgccccaagccaccaacctctgcctgtcaccccatgactcccagtctggaccttacccattcagcccattccctgcaaaccagtggagtatccgctgcagctgctgcacagccccccatgccacagtggtgaagacggcactggcggacaatggccaagcgcacaccagccggaatgacaggagacccaagaccagacccacatgcacaaacaacaccagaccaaaaaccaaccagcaaccacgcacaaaacacacgccacaaaacaccccatacacacgacaacccgcaccacccaacaaaaaaaaaacccaagcaaagaaccagaagaggcacaacaaccacacaccacagcaggaacgggacgagcagcggagcaagcaagcgcgcagcgcccacccggcaacgcaacgcgagcaagggaccgagagaaccaaaggaaacaacaacacccagagggccggcccgaacaagaaagggagcaagccgcgagggcgcggaaccgagaagaagaaccaagcagggaagaagaagaaaaaacagcgcgagaggaaaaagaagacacgacaagcgcagggcgaggggaccgcgagacaccgcggacaaccacgcggagcggaggagcgagacaagaccccaaacggacagagaggacaaggcaaggaaggaaaggagcgaggaagcagcaagagagcaaacgaaagaggacagccgcgggggcccagcgaaaccacagacaagggagacaaaggaaaggaaacagaaggacactcccaccaggggccccggccggggacggtgagaggagcaccccgagcacgagcagagacacccaggaagcaaaccgagagccaggcgacagaaacaaaggagaaaaggcagaaagcgagcaggcaggcccgagaaaacaccccccgggccacccgacccgcaggagcccacgcggacgaccgggagcgcggccagcccgcgcagggaccactacacgaacccagcagccgcgcagacagcaacaacagcccacagcaaccaccagacgcggccagcaacgcagcaccaccggggcggacgccgggggggggaaggaaaacggaggtgcgaaacgaagggacgagcagatggaaccacagcgcgagagcgggcctgaaccggggggcacaggagggccgaagaagaagaggggccggggagcgaagacggagaggaaaagacccaagagagccaaaggcaacgacgcaaaacacacaccaaaagccgaggacgaaagtcaagggagcaccagcacacccaaaggcgcagaaagaaaacggaggggcaaaacaacccgaagaaacaaagcagccggaagaagggaagagacccaagaggcaaacgtgaagaacgagaacgaaacagaaaaaaaaaggaaaaaaagaggaaaagcgaag

SEQ ID NO: 699440 - DNA, 211 bp, Homo sapiens
gagtaaacatccagtctggtcacacatattgcaaactcacaccacaaagagttgcacacacactgaacgcagatgctggatcacagagacacattcttatgcacgcacacactaggacgtaccagacacagtcatgcacacaccgacacatgctcacactgacgtacaagcacagcagtaacatgcacacacaccatgcgtgcattgccag

SEQ ID NO: 699441 - DNA, 812 bp, Homo sapiens
ggtctcggcgagtcacgatgatggcggcaccatcctgtggtgagctagcggattccctgcttgtactcgaccgacacccctcgacgccttctgcagactccgtggctggcgctcggcgcgtgaggaagcacggcggcccgagcttcgctgcggaaagtgccgaagatcgcggagtgcagcggcgcggtccggggcacgggctgggggagagggcacgctccgcatgggcgacatgtgacaaagcccggaaacgcacgaaaacaagacacatacctcacagcacacagccgccgaaggacgcagcagtggacgaaaaccgcggggggaccccacgacgcagtgaccaaaacggaacacaggagccacagaagggacacagcgcacccgtggacgcaaggagcacccgcgcaaaggccggaagcgcagaacaacgggacaagggacagccacacgagacgcggaaagacgccacgaaacgaagcccggaacaaagaaagcaagagacaagaaaagggaaaacaggaagaaggggagcgcacacagaaggagcagacccagagaagaacagcagcaagccaggcaaccagagaagcacaaggacacaggaaaagaccaagcaagacgacagggggagcaaaccaacagagagaacagaccccgcaggccgagccgaaacggaagagaacaccagggacacagcacaaaccgacggaggcgagaacagaggccaggcgaagcacgtcgcacacgcacggcagcgcggccacaccgcacagaacaagcaagaaaactcagaaagagaagacaaccaa

SEQ ID NO: 699442 - DNA, 1361 bp, Homo sapiens
accatgcagtgcccctagcttagagcctccctcaattccaccctggaccaccaccccccactctgtgcctgaccttgcagcgcagtctctgtgtgccatctgcctgtgcaattagctccacttgcgtgcatcatgtcctcatattggctcacacattgacaaccgtggcaatttgctggggccaatctcattcaatcagctgccattcaaagtccagtcaaccttcacctctctcagcggcaggctcggcggcgccaacacaggtctcacatcttctgctcatttctagggagcttttctccgcttgtacctctcctccggcgcttctcttcctaacacacatttgcttctctcttgtgcaccagggctttcatcgcctccacatccccatcttctcctcatcttccagattgcacgaattcaacaaaacacaacacacacacaaacacacacacacacaacacacccaccaccacacacacacacaacaacacacacatgtgttgaagtcttcctatatagctcaataccatatatctactctactactcttgactcatgacctggtcccccacccatccactctccatcgcacacaagcgtaccagcccaacctatctctaatctattgctgacgcacccacccataccgactccaccacccctactatcactacgacctaatcaacaccatccacatataactcactacccccctcacatccaacctatatccttccacctcctccctcatctaacactctctcctccaccatcttgctctctatcaccaccacactttgcatatctccccgcacaccccacatatcccaccaagtcatctaaaccgatacaatttattacatcattttataatacaccaactctacaccaacacaacacaaatcaaactcctccgttaccctcctcgcccacccgacaccactccgaccttctcgctcattctcacagacaccctcctacctcctgcctatccttcccccaaccacatcttttttccctcacactcacatctcctctacacacaccaaccacctatcaaaccacaatcacccttttcattcatcacacttctctcttcacactccacctcagtggcacacattcactcccacatcacacaccatcgtacctccatcctgctgacctctgcctctcatgtcatctcttacttctaccacacaccacacactgcagcgtcatccaacacacactcgctaaccatctcctctctcccctcactcctcagtacacaccacctcgccacacaaccccaaacaccagccccccatctcatccctcatcaaatcctataccactgctacaccgcaccacactcc

SEQ ID NO: 699443 - DNA, 370 bp, Homo sapiens
  misc_feature (136)..(136): n is a, c, g, or t
gagagggttacatttagtcagaatggtcttgatctgacctcgtgatcggcgcgttcggctcccaaagtgctgggattacaggcgtgagcatgtgcccggcccaaatttttttacagtctcttaacaaggtcctgtncttaaaagaaagttacaacaacaattaggggggggactattcacagttgtacagtgatggtcagttctacctgtggtgctggaatgaggggagtcatagggtgcatatgagaaatggcttattacaagaggagcttggctgagtgctgtggctcacacctgtaatcccaacatttgggcaggctgaggcgggttggatcacctgaggtccggagttggagaccccgtttccaca

SEQ ID NO: 699444 - DNA, 617 bp, Homo sapiens
gcatatcagtaagtcattgctcatcaggtcacccatcaattctggaccatcttccaaagggttgtatatggatcatgacttgaaagtgccaaggttcatgctcaatagctgcagctcacgtctacaagtgtagattattgctcggatgatgtgcacatggttacaaggtcagctagtagcactgtatgtcttgctctcactcaatatagggtctgtagggcacgcataggtattgtagagctcatctccattctcgatatgggttcacgagatctcttgatccatgtgcacagtgactgtgggacaatgagcatacatcagctctggctctacctgttgtctacgcattacaagtggcatagatggcaatgtctgccagtgcccccttggcatgccgtagctattaggactcgctgttcatgcagttggcaccattgaagatgagacgagttcatccgtgtcaggcataggtggtatcgatgacatcatggtacgcggcaatgatggtatcagtgcctatttgcagctgggcatcacagttgcatcgtaacagtacgctgtccatcagccgttgcaccattgactgccacacggacttcatgtcctcttgagtttag

SEQ ID NO: 699445 - DNA, 975 bp, Homo sapiens
cctcactcagtgctccggctctctcctcctcctcttcctcctcctccacttcatctcctgttttgggcgccccctcttaccctgcttctacccctggggcctccccccaacacgccggtgcccctcagcccctgagtagctcgagggccagacgagccagaaggtcccaacagcagtgccaaacagtcgcaaatatgtctacccaaccttggtcttccatcactcagggcgtccccctggataccagtaaactgtccactgaccagcggttacccacatacccatacagctccccaagtctggttctgcctacccagccccacaccccaaagtctctacagcagccaggctgccctctcagtcttgttcaagtgcagctcctcaggtgggcagcccccaaggccaggcagtctcattatgggacacacgtacccaacatgggaccaggtgggcacatgggcaacagtacttaccaccggccaatgagtgacttcaacctggggaatctggagcagctccaccctggagagcccatcagaccaacctggtgctggatacccccctggcatttctgaagggcctggatcctcagcggcgtgcggggccacatgggctggcccccaggatcccacaccttcacccacccagaaatgacccaccggtcccggccaggcctcaggcctaacacagccctcccaggggaccgccctcaccaggaatctccaacgggaaatgcgccagccctgcggcacggcctggcccgaaggcgccccacccgcaatggcacgcatcgccggcccaccaacaaccagcctcccggagccacacgcgcctgcacaggccaacccgtacgagcgcccccgcgccgcagccgactcaccggcagcgacatgcccaggcgcgtccacccgcaccccacacccccgcatgggcgcccacgcaacagcaggcggacgcgaacaccactgcgcagct

SEQ ID NO: 699446 - DNA, 122 bp, Homo sapiens
gctggctagctcctccaagatcctgattcctcgtgttaccacactggccttgctctatttcgccccacaggctgcacagcaactccttgctcctctgtgctctcattttctagttctgccag

SEQ ID NO: 699447 - DNA, 178 bp, Homo sapiens
catcagagaggaactgccaggaccaccctgccaggagtgtctgggtccagctctgaggtccgaactgtcgtccaccaagctgttcttgctgtagagggtgcctgggcccggccccagggagtctggggcgtagagccggcatttgtctctgtagtcacgaagctggaggctggtgcgg

SEQ ID NO: 699448 - DNA, 511 bp, Homo sapiens
cgggagtgactacactatctgctggaggcatagatcggtcaggatgcttgaacggtgtcagcttggatgcaacggctcgatgcgcttctctgtccgttgcttggccttagagacctcagtgccagctgcttctttcctgctcggatgcccgggggcttcttctttacacctctctgcttcctgggataaggactccactttgcgcgagagaagctgttcactctgcatcagctggtacaccccaacatctacgtcattgactggagagaccttggcacgtggccctcgggcaaacttcacaatcttctccccgttctgctcgaggactgtgaccctctcctccttctgcagctggagcaacaccaagtagaaggtcctctcatctgggcaggagttagcacagagggtgctgagctctgacagggccaccacggggtgtgaggaagagggcgcgttctgataccagacgatacacctcctcagccttttcctgtgggaaaggcaacattgg

SEQ ID NO: 699449 - DNA, 403 bp, Homo sapiens
  misc_feature (376)..(376): n is a, c, g, or t
gctcgacgagagggtatgagtagatagtactataggcatctaatgggtagaagccacggatcctgctaaatatcctgcaatttacagggcagctccccactgcaaagaatcatccaatcccgaatgtcagtagtgctgagggtaagaaactgaagccaaagttagaatcttgcctctgtcagttaaatagctgtgtgatcttgggcaagttaccttccctctgtaagattgaatgagctaatgtatataatgtaggccgggcgtggtggctcacacctgtaattccagcactttgggagaccaaggcaggcagatcacctgaggtcaggagttcaagaccagcctggccaacatggcgaaaccccgtctctactanaaatagaaacattagctgggcatggtg

SEQ ID NO: 699450 - DNA, 933 bp, Homo sapiens
  misc_feature (29)..(29): n is a, c, g, or t
  misc_feature (67)..(67): n is a, c, g, or t
ggcaggtgcctgaggtcccagctactcgngaggctgaggcagaagaatcgcttgagctagggaggcngaggttgcagtgagccgagatcacgccactgcactatagcctgggtgacagagtgagactctgtctcaaaaaaacacaaaagtttctcttttcaaaacattttactttaaaaggagccaatttaaagaaaactgttaatagttcaggtaacaggcagatacaggaaaagctgctgacagtgttgtatgaggtttgaggattttgatccaagctggtcccactcagtccatagcagagaatgaaagggcccagagagggtggtgacctctgcctgaagtcacacagtgagtcgaggacagggaggtgaccccaggtttctatgtgtagggcgggaggatgttctgggacacagttcaattctcatttgtcacacactttggctattagagatcaaccccttcgctcctgtgtcttgcaatggcagccttggcaaacgctaaatgaaaatcgtgacaacacttgtgttatgaagcatttactttgtgttcaccttgtactactcgaactcatgtcttaactcacttatccctcaaaaacaactctaggaggtagggccaagtaggaccatcatccctgcatttcacatggagctcagagaggttaagcaagccgtgcaaggccacacagctcataaatgcagagccaggatttgaacccccgtggcctgaccccaaagccgaaaccactcggcactgcaggttcgtcccttttctctgagatgggggtatccaatcttttggcttccctgggccacagtggaagaactgtctggggccacatataaaatatactaatgatagctcatgagctaaaaaataaaacaaaatcacacacacacacacaaaaaaacacaaaccaaaaaaaaa

SEQ ID NO: 699451 - DNA, 393 bp, Homo sapiens
ttacaatccccacgatcactattagaatactacaaataatattagcttgggagtgtgtggacggtgcacctatagtcccagctgctaggtatggctgatggagggaggatgcttgagcccaagtgagttgaggcaacagttagctatgattgtgtgccactgcactccagcatagggtgacaataacgagactctgtctcgggggcacccaagaacaagaaactgaattgctgagttctattgctgtggtacattattttctaacttagtaaaccagtttctcagcagtgactgcttcagacattctacaacaatttgaatattctgagtattagaaactttgactaccatttcacacaccaaccagttcacttgtgaccccagatgttgtca

SEQ ID NO: 699452 - DNA, 254 bp, Homo sapiens
  misc_feature (37)..(37): n is a, c, g, or t
gagatcggatgagacgtattacacgaagtaaccgcanatgcggaagggcgaggggattgcgagtaccgagtttccgcgcggttgaggtactggggaaacggaatcccccaccggccaatcatgttggtggtggggtctctccggtggccagcagtggttgtcagtaagcgggcggcactccctttccgatacgtcttttcttttttcatttttgagacggatgtctcgctttgtgtcacccaaatgctggagtg

SEQ ID NO: 699453 - DNA, 603 bp, Homo sapiens
  misc_feature (580)..(580): n is a, c, g, or t
cgaacatctcgtggctagaacttccaacactatgttgaataggagtggtgagaaagggcatccctgtcttgtgccagttttcaaagggaatgcttccagtttttgcccattctgtataatattggctgtgggtttgtcatacatagctcttattattttgagatatagcaaaaacagtactaataggaaagtttataaaaatgagtgcctacatcaaaaatgtataaaaccttccaattaacaacctaataatagaactagaaaagcacgagcaaaccaaatggaaaattagtagaagaaaagaattaataaagatcagagcagaaataaattgaaataaaaaaacacaaaacatcaatgacatgaaaagttgttttctttaaaaaataaataaaatcaacaaacctttagccagaataaagaaaaagagaaaacccaaatagataaagatgacaaatgggacatacaaccaataccacagaaattcaaagaatccctggagactactgggagcagctatacgccaataaattggaaaacgttgaagacatggataaattcctagacacacagaaccttncatgattggatcagggaagaaac

SEQ ID NO: 699454 - DNA, 105 bp, Homo sapiens
atcgacgatcaaggtacggcatatatttacagtaggaatagacgtagacacacgagcatatttcacctgagcaactttcacaaaagctgccttctgtgccaacaa

SEQ ID NO: 699455 - DNA, 309 bp, Homo sapiens
  misc_feature (298)..(298): n is a, c, g, or t
cgagacagagtcttgctcagtcatccaagctggaatgcggtggcactatctggtctcactgcaagccccgcctcccgggttcactccattctcctgcctcaggctcccgagtagctgggactacaggggcccaccaccacatccggctaattttttgtatttttttttagtagagccaccgcacctggctttttttttttttttagctgagacagggttttgctctgtctctcaggctgaagtacagtggcacaatcctagctcaagcagttagaataggatttttgaacataattangcacaataaaa

SEQ ID NO: 699456 - DNA, 117 bp, Homo sapiens
aggagtcagactggcctgggcaacacacatgagacccatctttaccaaaaaaataaaattacattaagaaattagctgggtacggtgacgtctgcctgaggtcacattcaagaagct

SEQ ID NO: 699457 - DNA, 235 bp, Homo sapiens
tcacttaaaacttttgtttgctcttttggtttgaaactggaattttttttccaggaaggattatcccatcatatttctgtttgaaccatcgcatggcctcctctttggtgattcggtgtttgtccccaatttagcctttcctgggcttcttgtcttcgatgctgaaacctggcctaccgagcaccagttagaagttcaggccttagataccaatgcttgggtcatattttatacc

SEQ ID NO: 699458 - DNA, 889 bp, Homo sapiens
tctggaacaaagagaagataggaaggaaaaaaaaaacagaggacggactgtgaaaactccgtttgtgacacgaggccgcggggcaaatgagatgcatagacgcggccaatttaccataagccaaccggacacggggaacccggggagcaccccgcagccctttgggaaacgcccgtgggtctaatccagcatggcggaaaaacaccacggggtcactcgcgacagtggacccacctgaaccatcggtgcttattcgccccactgtgctgcaatatacccccctggatcggtgttctcatgctgtgcaccgaaaattcataggaaggaggaataacgccccggggcaccccacctgctctcaaggttctcagagctcctgatacaggcaccgagagggtgttgacaccgccgcctgagaacagggggcagtcccacccagcacccacgaagtgatgcggaacaccctgcaacggcgagtgttccacaccagaaaagaaggggggccctcgggccccaaacgacccggggccaaagaagaccccacacgatgtggcgtcgcgaatagaagcaagcaacaccagccatcaaatggctaaaatgaccccaacagtttgctttagcacgtctcgggggcccccctggccagtagtgaaaacccctgctattttgtcgacccccaggagaagatataattggttctctagacgtgcagacactggcggagaacaatggacaactagaaacaccaaaagaggggccccgtttggcaaggttccgccgccagacgcagagactgtttcttcggacccaagaattagcgtacccccctacggagtgggtctctttaatctcccaccaaaaaccccctttttgggaacccaacaagaca

SEQ ID NO: 699459 - DNA, 546 bp, Homo sapiens
  misc_feature (475)..(475): n is a, c, g, or t
  misc_feature (489)..(489): n is a, c, g, or t
  misc_feature (491)..(491): n is a, c, g, or t
agttggagccgcaccactgcactccagcctgggtgacagagtgagactccaactcaaaaaaaaaaaaaaaaaagatcttggggaggcagacagccccccagatgggcctctcctaaagtagctacaaactgctgatccaggtgacccaggatggcgtgggtgaagaagctcacgacttttcccagcctcctccagggctccatttaaacagcaagcctggtgcagggtgggagagtctcaggtgtggaggcagcttacaggattgagggggcagtgaagaaagaggtttctgatctacatgagtaccttgctctgagcctcccagctcagaaccctccagcacctcatggctcagcaccaaggcccggggttggtcagaactcttaccatgagcctctgacctggctggagatggaggtatgttctgtggcagacatgtcaggacagtcctccagccctctgctcctgatggttntgtgacattgggtntnttgagggcagtggagtgtcacacagctaataaagtacacatttcatgttggaaaa

SEQ ID NO: 699460 - DNA, 408 bp, Homo sapiens
  misc_feature (4)..(4): n is a, c, g, or t
  misc_feature (59)..(59): n is a, c, g, or t
  misc_feature (69)..(69): n is a, c, g, or t
  misc_feature (87)..(87): n is a, c, g, or t
  misc_feature (97)..(97): n is a, c, g, or t
  misc_feature (350)..(350): n is a, c, g, or t
gggntttcacctaatatttgtaaaagcacctaggaaacaattttgtatacatcaaaatnaaatttgcanctccttataattagaatnaaaaaatttnccacaacaagtttactgttcataaaattgcgtagtacaggctaggcatggtggctcacacctgtaattccagcactttgagagaccaaagttggtgcatcacaaggtcaagaggtcaagaacatcctggccaacatagtgaaaccccatccttactaaaaatacaaaaattaggtgcgcatgctggagtgtgcctgcagtcctagctactcaggaggctgagacaggagaatcgcttgaaccccaggagtcanagggttgcaagtgagctgggatcactccacgtgcacgtctatcctggtgacagagtga

SEQ ID NO: 699461 - DNA, 277 bp, Homo sapiens
cgctccgcacatgcgtgcatggtggttgcattctccacatgcgggtggggcatggggtcatggtcattagagttgaggtcatagctatcctcagaggctatagttgggtgcaatgtcctggatggtgtgttccactccgtcatccactaccaccagcgtcacccctcgcccagtcacattgcgttcccacacacccgtcacgttgatgtccctgcccgggctccgtcggttattcaggtgccattgctgcgggtacttgggggcgggagacaatgag

SEQ ID NO: 699462 - DNA, 299 bp, Homo sapiens
ccataagcagtggttgttcttaaagtggtttgggttttcatttgacaccacagtacagttttctcttttacaaaacccaatgagtgcttgctgtggcatttggatgtgtgttaatgtatttgtttggtctttaaaaaaataaaacctttcttaatttaagctctcattctttaaaggatgagtattttttagctttaactgtgagttcaccttgtaaacaactgtgttgaggacagcctggtacatatatacaatttgtcatcggcctatggattaaaaaagggtaataattctttgta

SEQ ID NO: 699463 - DNA, 1217 bp, Homo sapiens
tcacagggcttccttctccttcttttcctagccacccaaattattagggggttaatttcaacctaataaaagcaatggggggggctctcatggccgggtaattcccaggcactttgggagaggcttgagggcagagacagagactcactggacgcctcagggagtcgagaagaccagccggggcaacagggagaagatcccagtctcataaaaaaaaagatacaaaaaaacagcagaggggcagttcgaggcggaggggcggcgcgtggaaaagaagcacgacgaggacacacacacagagggaggccctgaggggccacacaagagaggtccccctgtgagacacccaagaaaggccgagagaggaccacgagaggggggagccgtggagacacgaaggtgcaccccagtgagaacctcgcaaagcccggtggcacaacctcggacgacaaaaagacccgggcatatcaccccgagaaagacataaaaaagaaacaccgagaaaaaacagcgaggagcataacacatctgcagccggaggggaaggggaaacacaaaagggagcgcaccgacaaacaaccggggccaaacagggggagcacaaaaagacgagaacaacacacgagaacacagaagagaaatatagggtggacaccacacacagcgaggaaaaaaaaatatgcgcagcggaaaaccacaccaacataaagagagagagagagaaagacaaaagcaagagcacgcgagaaacaaaccacgagagtcaaacacaaggggaaagaaacaaaaagaaaaacatcgggggagaacagccagcgaagaccacagaagaagcacaggaaccagagaaaggaaagaacgcaaagagaggcgagtaaccgcggacacaaccacaagcacgagcaacaaaggcggagtagagaacaacacacacacaacgcgacgaaggcagtaagaaagcaacgagcaagacaccagcagaagagcaaaaagaagaaaagaaaacagtaaaagacatagaaaaaacataacgaaacaaacacaacagcacaaacagacagaagatagaaaaaagaaagaaagacaaaggaaaagaaaagacacaagagaagaagcaagagaagaagaaagacgaagcgaaagaagaaaaaaaaagaaaggaagaaacagaaacgagaagaaccaagcaacgaaagaagagaggcagaagaggagat

SEQ ID NO: 699464 - DNA, 362 bp, Homo sapiens
tttgaaatatttgtccagttgagtagctgctgctgtacccccaggtgttgtaacacaactttattgattgaatttttaagctacttattcatagttttatatccccctaacactaccttttggttccccattcctttgttgtattgttgttcccaagatgtacttatcatgctgttttatatcgttcctaagtataggtgtggatcatgttcggtctgtaacaacagttgctagtactttctggcagtgatacactctgtgctgacaaattattgctccctgatatctgtaatgcaagtcagcttacatctttctacctcattttttctagtctgccaatatttgagacaattgatacttat

SEQ ID NO: 699465 - DNA, 154 bp, Homo sapiens
cggacccgaacccaggccgaaacgggctccccgtcttaacgatttggcgtctcccatcgaccaccacctctttgtgcagcagcccgcgggcagaccctgatccgagggcaacgctcaccagtcccacagggcgacccggaaaaagatcggacaa

SEQ ID NO: 699466 - DNA, 623 bp, Homo sapiens
tttagctaaaaccacaagatgatacagtggaacgtggttggagtgctagtcaggtaaaaccttaggttttatccattcgtttgagactcgagctcgctttctgtgatggttgacatatggtgctgcattaatttccaggggccgatttccttactgaatagccacgtcagcaaatttcagaccaacctggctgctctatcaggcacagattaatgcaatataatacaatatgccggaggcaaacgacaacccgggccccactgccgacctcttgattctcccaccttccctcaagaccctaggaatttaatgtgcttatggctactggacagacagaacgaggcagggtgctggggcgaattggtacccgaaatactagtgaagtttatctactttattatttttctttagatagaatagaattagaaataataatgtggctgggtgcggtggctcccgcctgtaatcccagccctttgggaggccgaggcgggtggatcccgaggtcgggagtttgagaccagccgagatcaagcccctgccctccagcctgggcagcagagtgagactcttgtctcgaaaataaaataaaataaaataaataatagaattagaaacaatca

SEQ ID NO: 699467 - DNA, 679 bp, Homo sapiens
ggctggttgatgatctatgctggctgggcgcggtctgtgctctggaggctagcgtgcttttagtctctcgtctcgtcttcttactgcacgtatcctagaggttgctgtgctcagcgactccgggatggcatcgaatctccgaatggaacactgcgaacgagtgaggcccccgtgacgttccccgaagaactattcttatcgggttgtgaacgtggatcaatgccgagcgaatcgattatcacgtttgattaccgtgcagtaaactcgatgatcatgatgcacgccagttatctgtaagaacggtcagtttaggggctggtgcaaaggatgagttgcacattgttgaagcaagacggcaatgaattacgaaggcagtccaattaacacgtaacactggacaacttctgacaacactgtctgtacagaccaacggtttcccttgggggcttttgaaataacaccaccagatggtcttaaggttgaagtgtggttcagggccagtgcatattagatggacaggaacttaggtagatgtggaggaaagatgcaagagtacaagaagatgaagaggaaggaaggatgtgaacactcttaagatatatctggaaagaggtctgcacatggaggtggtagcaaaggttccacagaaacaagtaaaagttgcagcttgatgaagata

SEQ ID NO: 699468 - DNA, 160 bp, Homo sapiens
tggtcgggctacacgctgtaccacacactcagcataacagagactgagaacctgtagccctagccactcaggaggctgaggtgggatgattgctttgaacccaggagttatagtgctacagtgcagctatgacttgcactcattgcctgtccaatcctgg

SEQ ID NO: 699469 - DNA, 372 bp, Homo sapiens
tgggtgttgtgatgtaagccatgtctactttagggggccccacaagacgagtaatgctgtggttcttgcagactcatagaagtgctgccttgatggtcttggacaagatttaggagaattatctggattacctgacagaaactcctgtttctccccttactttctccaaagcaaacagagtctctttctctctctgttctgagtcacctcagctgaaagtggagtgacacacacacccctgtgggccagcactacaatgactgcactggatcagatctgaaacagcacaatactgcatctcgcccatggcctgctgtaaccattccctggctactgcctatgttcactcaagtctctggggctcgtcgacgc

SEQ ID NO: 699470 - DNA, 251 bp, Homo sapiens
aacttgtcacgaattccatcttgtaaaggatattaaatgttgctttaacctgaaccttgagcaaattagttggtttgtgtgatctatacatttatgtgggtggcttctagtttctacttctaagggataagtattaatagttcagtttatggctttttttgtgttgtatcgttgtacggtttggattatcttaaattttgacggacactgtggtagactttctgtttactaatatcctttttgttttgtat

SEQ ID NO: 699471 - DNA, 364 bp, Homo sapiens
  misc_feature (29)..(29): n is a, c, g, or t
  misc_feature (33)..(33): n is a, c, g, or t
  misc_feature (92)..(92): n is a, c, g, or t
  misc_feature (96)..(96): n is a, c, g, or t
  misc_feature (108)..(108): n is a, c, g, or t
  misc_feature (119)..(119): n is a, c, g, or t
  misc_feature (132)..(132): n is a, c, g, or t
  misc_feature (141)..(141): n is a, c, g, or t
  misc_feature (146)..(146): n is a, c, g, or t
  misc_feature (165)..(165): n is a, c, g, or t
  misc_feature (197)..(197): n is a, c, g, or t
  misc_feature (231)..(231): n is a, c, g, or t
  misc_feature (233)..(233): n is a, c, g, or t
  misc_feature (237)..(238): n is a, c, g, or t
  misc_feature (241)..(241): n is a, c, g, or t
  misc_feature (249)..(249): n is a, c, g, or t
  misc_feature (261)..(261): n is a, c, g, or t
  misc_feature (266)..(266): n is a, c, g, or t
  misc_feature (269)..(269): n is a, c, g, or t
  misc_feature (280)..(280): n is a, c, g, or t
  misc_feature (289)..(289): n is a, c, g, or t
  misc_feature (319)..(319): n is a, c, g, or t
  misc_feature (330)..(330): n is a, c, g, or t
  misc_feature (335)..(335): n is a, c, g, or t
cgggccgcgcctgggcgaacggccggagngggntgggctgggcccgggatggcggtggccctggcgccggtcccggtggcgccccgcgcgantacntgagctggtgcnagggaggtganacctcctgcagcncccaacatncgggnaggcacaggccccaccgtnacattggccctgatgctggcggtgtcatgggncatggagctcaagcccacagcaccacccatcttnantggnnggncctttgtngtagcgtgggangtgcncanacaggactgtngcccacgcntcaaggtgccactggacctgaatgcatttnatgtgcaggcntaaantaatgagggttttgtgaaccagaatatta

SEQ ID NO: 699472 - DNA, 212 bp, Homo sapiens
gttaggctggtcgcggctcaagctgggcagaggacatggttgccatggtctggaaaggcctgtccttggaaagctggtccttcaacttggactggatttcccgttgatttccttcgggccaaaacctggatgtgactagaaacctgttttcgagttcgggtcttccccgttctcagcttgagacactcgactctcaagctggagacacgcga

SEQ ID NO: 699473 - DNA, 536 bp, Homo sapiens
  misc_feature (530)..(530): n is a, c, g, or t
  misc_feature (533)..(533): n is a, c, g, or t
  misc_feature (536)..(536): n is a, c, g, or t
cccgagaattccgatctcatttccttggcttcaggataggcctaataagaaaacaaataattccaattcatatatgaacattttgcctccttatttcttgaaaatgtggaattggaattccccgaggaattccgatctcatttcctttggcttcaggataggcctaataagaaaacaaataattccaattcatatatgaacatttttgcctccttatttcttgaaaatgtggaattggaattccccgaggaattccgatctcatttcctttggcttcaggataggcctaataagaaaacaaataattccaattcatatatgaacatttttgcctccttatttcttgaaaatgtggaattggaattccccgaggaattccgatctcatttcctttggcttcaggataggcctaataagaaaacaaataattccaattcatatatgaacatttttgcctccttatttcttgaaaatgtggaattggactcactgagaattcagtgctcactgagaattcagtggactagtantantan

SEQ ID NO: 699474 - DNA, 246 bp, Homo sapiens
cctacccgagaagacagccgcagcctcaatgcctttgaccccacactcccgagacgatgacgcattcctagagcagggagagccaccctctgaggcaagaagagccctgctgcccagttgccagtcctaccacggcggggaaccttcctggctccagcacacgaccagataagggggtgtgtggcatgaattatgtggaccactgcaaagaacaacgtcccgtgcccaaggagcccatcatctcag

SEQ ID NO: 699475 - DNA, 446 bp, Homo sapiens
  misc_feature (192)..(192): n is a, c, g, or t
attcgcggccgcgtcgacctctgcttggacctccccctgttctccttgccaccagcaccactctgctctgtctgccctggctccaaatccctcctcctctccctcattctcatgagcctttctgtttgctgcccctctccctaccttgctgtctgtccttcatctctctgtacatccagcttttctctacanttctccagttgcttttctcctcctgctttgttatcttttgttttttcacttttgctgtctcttggcaaatccctgaccatcccctactttgccatctgttatgggtctttctccttcttcttttatctgagctgttgtaactggagctgttgtaactgcccattctggacgtggtaaaccgaatcagtagcgggcgtgcgcgccacttttccataatgtccacgttgctatcgcgttcatttgtacttgcgtca

SEQ ID NO: 699476 - DNA, 235 bp, Homo sapiens
tttattggtttattaattatcagtcaggtattgctctatatgcaaaatgattaatacggtctgcaatgtcgtctaggattgttttcttgtgatttttaatctgaattttctatttattattaaaaatggggtattgatgtctacaattatattctatgtattatctggctttacttgtgtcaatcattgcatttatatatttaggagacctgcatgtaatatatacatatacata

SEQ ID NO: 699477 - DNA, 1011 bp, Homo sapiens
cgcgaagggtaacgaccgagcccggggatcctctttgcgggaccacgcgagagtgccccccgcgaaggggctctcccaccagagggctcccaccacacagatgacgcctgcgagaggaaagttgcagcaagggccaagatgtttgcccagaagggctctccccaccgggtgccccggcaccccccccgtgcaagcggtggttggcccgccgtgacccagagggcgtggcccacaccccgaaaggtaatcacggggcggaagagcatgaacacaaacagtcgaaggcctaacaaaaccccctttgtggcccgtggcagtattccgccattggggcggtacctggcatttcagcattattcaaataagtgatataagcaggccgacgcctggttagtcccggcatggatggcggtccaaatacggcatactgcggaccgtcctttcatgggtatgcattaaccatggtttgcggagccgcgagctgcaaccaatgtcgtgggactctgaccagacacgtgctgcactccccacacagcaccgttatggcgagagcgtgcatgcttactctttcaattgggggggaacactacaagatgtttgtttctaggcgactagcacaggactctggtggcgacgactgtgagatctatgtacatagtatttcgccaccccaagcggatgtgttagtagtacaagttacggccggttacacgtcgggcatcccacccgacggaatagtgatgctaggcctatgacatagtgggcggagaatacaggaaaaaattaaatacattttggcacacgggaggtgacttgggagtagatcgttggatagtaaaaccgagatgagagtacactctcttgtgtaccaacatagaaaaggacacaaacatgacccatggttagaagacgatgttagggtagacgagacagcacgcctggatggccgccggattcgatgacagttcttgtccgccccaatcaaaaaacaagaataaaccgccacatgac

SEQ ID NO: 699478 - DNA, 650 bp, Homo sapiens
  misc_feature (490)..(490): n is a, c, g, or t
  misc_feature (540)..(540): n is a, c, g, or t
  misc_feature (632)..(632): n is a, c, g, or t
  misc_feature (650)..(650): n is a, c, g, or t
ccatgctggtggctactggcactcctgcatactgagtggggccttgcgccgtcggaattgaatgctatgatgctatgctcttgaatatcgatctctaacatgactagcagctgatgataccagagacctctgcggaatcttacatgagagattccgtgattgatggccaactacctggagccttgcgaatcacctgtctcctgatcataccggattacacgatgatctacggacagtgtaagacagtgagacatcactgtagacaaccagacatcacaggtggcactgctgatatgagcattccaactcactatatcttactgacgaatcagctatacctggtatgatatacgctgagtacttgaagctgacgaaactgtatcacgagctcttgatgcatgaggcatcaagggtaacacatgactcaagtattcgatatctgcaggatatatagtgattagatagatcgccttgcaaagactctgtgcanatccatgacatcactggggagtgtcaagacattgccaatatgggagctanacatagcagactgtactatattatacctgtgagagctaaccagcagttctacatatactgagctcgatgggccctgtatatggcatgactgngttctagactagacttgn

SEQ ID NO: 699479 - DNA, 292 bp, Homo sapiens
tgatgatccagagactgtcatattactcagtgcccgtgaaattgatcaggaacggctaatggagttcgcccttgcatgctcccaaaggtgcgtatcggcatactgcaacgctattcgcgccaaaagtatgaaggccgagagcgctgcataaatgtgtctaactttaatgccgagcatctaaagccacaccgttgatgacaccggcgtagtgccgccatcgttttcggcgcagattttgcgtaaaggtcaattcaaggagaatgacagtgaagtggatggatgatgagctgga

SEQ ID NO: 699480 - DNA, 889 bp, Homo sapiens
ccttgtcagttgtgtgttacagtagcgtgagacgtcccctccgtgcccgccaggtgtaacacccatggggtccctcccctaagcgcggcgccgtctattgtagaggcccccatcttgtgcacaccattacagtttcctcccgtcgcgagaattgcgcggtttcccctatcgccggggtctgctttgttactacacgaggtactcctgaggggaaccagcttggtaaaaaccccgcctggttctccccggcgggtatcaaagtgcgccgcccctttttgggcccgggattctccccaggagaacgtggcccccaaatttccccggagggcgccacctctttgccccggctacaaaaaaggctgtaaagggaattacgtggcgcaacccccaaaagagaagcaccaccatgggggcacccccagccaccggaatactagtggggcatgttttgttctcacaaacccagtggtagtctggatggacccgcccaaaccctttttctcccaaaaggcgaccctgaggagtttttagagcggtttgacatccaccacagtcggcgtcaagcgttccaaacatatgtgaaatgttagggttcccgaaatatcaacaacaaaagtatactctgttaatcccctgccatttcatattgtttacaaccaccccccgggcacttcttttaaatgaccacacttatggagagcattcgtaaacccgcagtcttcctcttagcacccataaaacaacattctcgcagaaaaatccctctcttccccacggcttccaaaaaattggatttatcacgcacagagaagtttacaatggggatattcacccacataaaaaaaatttgggctccactgtaaaaaaattaaaaaaaagcccaaaaaaa

SEQ ID NO: 699481 - DNA, 82 bp, Homo sapiens
  misc_feature (54)..(54): n is a, c, g, or t
gcacgagcctttgtgactcaacacgctgcaagaatacagtctgcattaaataanatatatcagcattgtggtctgggaaaac

SEQ ID NO: 699482 - DNA, 606 bp, Homo sapiens
gataaactgggtgagagagtcagaaaactccccagataaacaaccgtaagacttcatacaaacacaatactctgatactgtagactcgatcacagtctggcgaagggctacctgaacaagaagtacagttgatctcatattctggcatgccagcttcttatatcttttctcatcgaccatctctaaaacttcagacttcctgatcctgacttggtatcactggagaacagtccaattatcctcactcgtctcagcgtatacacgaagagccttcaacacccacttgaaaattgtcctcaacacaggacagcggtgcaaacacgacgtacaggaatgctatgtatatcaagtggttctgtactctatctattaatatgtcctctatgcatggatctcgtatcactctgatgtatgtctgtctcctgatatgttactggctaccaaaacctcctaggagtctcgcagactttgtccaccaattcaggtcttaaaacatactgggtcatcacgcatgtcagaccaggataaagcaatactggtataaacagatcgcactatgcctgagctagaaagagctttcttaggtgaaagaggtcaaacgattag

SEQ ID NO: 699483 - DNA, 592 bp, Homo sapiens
accagagaaaatcttcctttggctgggtgcagtggctcatgcggtaatcccagcaatttgggagaccgaggcaggaggatcacctgagcccaggatttcaagaccagcctgggcaacatagtgagacttcatctccactaaaaataaaaattaaaaaatatcaaccaggtatggtggcatgcgcctgcagtcccagctacctagcaggctgaggtggggggaatcaccagcatctgagaggtcgagctacagtgagccaagatggtgccactgcactacagcctgggcaacagagcaagaccctgattaaaaaaaaaaaaaaaatttcttccctcaaatttatttttttcccaagggttcccctccctcactcttatatctccagtgaaaagcctcttccaagtgatcgttttggactcctccctcttcctctcgggcctccggtttgtaaactcccaagtccttccaattttacctccaaatcgtgggcctcaaacctcaaaccctcaatcatagctcagatctccgtcattgaaagcccagattctgggcagtccggtaaatagggtcccagagggcaggtgtccggggg

SEQ ID NO: 699484 - DNA, 581 bp, Homo sapiens
gaaggggcagtgagcacttgggctaaggatagctatctactcctcgggcattgtcttcttacagagttgagagctcctctgcacttggtgtatgccatcggccagctgatagtacttggcaactctgatcaatcaacatgcttgcagatggttacaatctggcggtttccccatccacgataatcgcttggctgtatctaaatgccagttaactgagtggtatggctcagcgctagcgctgagcatacccaaagactaaagattatggactattatgagaggaaggagaaccagatggagcggcagaggaaactccagatgtccacttggatgaatcaggcgagattcaaggtcctcagagcaaggagatgaccttatcacagacctactaattgaggcaaaccagagactcagcaggtgggtaaaggatacacccaggtcccaggtgcggctggatggcctggtcctccagggtttgtaccagttgctggagccccgaatgattgtccgtggcaggaaacaagatttccctctggtaagggctgcggtgcagacggcatttcctatgtacaaaatgggca

SEQ ID NO: 699485 - DNA, 147 bp, Homo sapiens
aagctctttagactcctgtcagacagtcgaccaagcccaaggacattattgaatctggagagtcctggggccttgtcgtgtgaaacagacttgaaatactacataggaggaaagacattaaaaataaatgttcacttgtctctgcac

SEQ ID NO: 699486 - DNA, 108 bp, Homo sapiens
tctcccaacctacaatatgcggatactgatcccacaataccggcacgttaaagcgccactccccgtcaacaaaagatttcagcagaaactgaatcacccagccaccgc

SEQ ID NO: 699487 - DNA, 335 bp, Homo sapiens
gaagaaaaaagaagtttctttattacaatttggtatctcatcccgaggtcagggccccttgcttagtgggaaaaaaaacccttttggactgattcttggaacagtacctgttgtcctaaacccaacttttttgggatgcccggatttcttgattttgatccagtagctggtcattttcctgccttttacatttaggggattcaagctttgttatttctcttagctgggcctgaatgtctgtctttctgcagggcccaacttctcctttagtgagggcagccaccccgccgtaaccagatagagcagccttccctgcctacttgagcaaagaaggg

SEQ ID NO: 699488 - DNA, 271 bp, Homo sapiens
ccctggtatcccacccatccgttgtggtctgatctgacccttgtatctgtgccgcctcacacgctgggcccgctccgtagggctgtgacaatgcagtcagagcagaatctgtggaggcactcctatggtggtcatacgtattcttcaagcatgtccagggcagatagggcacattgagttctagaatagcaggtgacccgagggggaaaccaggcaatactcttgtgcccatcccatatataggcttcccctgcgggggtcccggtgcagg

SEQ ID NO: 699489 - DNA, 458 bp, Homo sapiens
cgaatcatgattcagattgtaccattacatgtttcagtgcagcatggttactaacgctatgtcagactaatattaaaatcagaaaatttaaatgctggtgctggtcagactttttttgttagattctctcatttaaaaaaaatactgtttgtttaaagcatgcataaaaaatttatgtattgaaatatacttaaaaatcgagtgctttcccttttgtgtaatatttcctgggggacctcgtatttaggtgtcttaccgtgaattgagtctccaaggtctccatgtgaaacaagcaaaaagagaattatctgtaatgttgtaatttgtacctaagttttttcccagtttcctctgcttcctcaaccctttccattcataaagggttttgtttttcaaaggaatttgtcctttccttcaataatttgctttaaaaaaaataaaagataatgatttaatgc

SEQ ID NO: 699490 - DNA, 225 bp, Homo sapiens
tcgttgggctctcatcgtccctcttcatagcagcctcccaggcttccgtgcctctttggatacatccagtccctccacttccttgacgtcctcatacagcaaggtttacttcctcaatggcatttgctatctgctacgctgtcaacagacgtacctcgagccactgttcagtatcttgtgaggttcaggggacctactcgcttgaattctcgtagttgcatacgt

SEQ ID NO: 699491 - DNA, 174 bp, Homo sapiens
  misc_feature (80)..(80): n is a, c, g, or t
agacacgtatatattcgtaagcgctagaatagcactgaaacagaaaacagaaagaagcacatttcgaagcgcttctggcnaacaacagcgggacagactcgctgatgagttcattgttcactgcctgtctcccctgtccgggacacaagctccaggggggtagggggcttgtct

SEQ ID NO: 699492 - DNA, 358 bp, Homo sapiens
  misc_feature (39)..(39): n is a, c, g, or t
  misc_feature (56)..(56): n is a, c, g, or t
  misc_feature (58)..(58): n is a, c, g, or t
  misc_feature (75)..(75): n is a, c, g, or t
  misc_feature (83)..(83): n is a, c, g, or t
  misc_feature (108)..(108): n is a, c, g, or t
  misc_feature (113)..(113): n is a, c, g, or t
  misc_feature (120)..(120): n is a, c, g, or t
  misc_feature (180)..(180): n is a, c, g, or t
  misc_feature (189)..(189): n is a, c, g, or t
  misc_feature (232)..(232): n is a, c, g, or t
  misc_feature (247)..(247): n is a, c, g, or t
  misc_feature (253)..(253): n is a, c, g, or t
  misc_feature (267)..(268): n is a, c, g, or t
  misc_feature (280)..(280): n is a, c, g, or t
  misc_feature (282)..(282): n is a, c, g, or t
  misc_feature (300)..(300): n is a, c, g, or t
  misc_feature (313)..(313): n is a, c, g, or t
  misc_feature (326)..(326): n is a, c, g, or t
ccggaacaccattcttcgccaggccgggaatcacaagcnccgggtggataaggcantncttcagcagcggcactncaagccgnaatcagatgagaaggcggcggtttnaggcnagaagcnggtggtaggtaagaaaggaaagaaggctgctgttggtgttaagaagcagaagaagccgcnggtgggaanaaaggcagcagctaccgagaaaccagcccgggaaaagaagccngcagagaagaaaccnactacngaggagaagaagcnngctgcataaacncntaaatttgattattccgnaaaggtcaaatcnttttggacagcgncgtttgaataaagaggggattatacaggcagt

SEQ ID NO: 699493 - DNA, 755 bp, Homo sapiens
  misc_feature (36)..(36): n is a, c, g, or t
  misc_feature (65)..(65): n is a, c, g, or t
  misc_feature (72)..(72): n is a, c, g, or t
  misc_feature (92)..(92): n is a, c, g, or t
  misc_feature (99)..(99): n is a, c, g, or t
  misc_feature (106)..(106): n is a, c, g, or t
  misc_feature (110)..(110): n is a, c, g, or t
  misc_feature (113)..(113): n is a, c, g, or t
  misc_feature (120)..(120): n is a, c, g, or t
  misc_feature (141)..(141): n is a, c, g, or t
  misc_feature (159)..(159): n is a, c, g, or t
  misc_feature (161)..(161): n is a, c, g, or t
  misc_feature (170)..(171): n is a, c, g, or t
  misc_feature (191)..(191): n is a, c, g, or t
  misc_feature (194)..(195): n is a, c, g, or t
  misc_feature (200)..(200): n is a, c, g, or t
  misc_feature (223)..(223): n is a, c, g, or t
  misc_feature (264)..(264): n is a, c, g, or t
  misc_feature (267)..(267): n is a, c, g, or t
  misc_feature (287)..(287): n is a, c, g, or t
  misc_feature (290)..(291): n is a, c, g, or t
  misc_feature (302)..(302): n is a, c, g, or t
  misc_feature (308)..(308): n is a, c, g, or t
  misc_feature (312)..(312): n is a, c, g, or t
  misc_feature (319)..(320): n is a, c, g, or t
  misc_feature (327)..(327): n is a, c, g, or t
  misc_feature (334)..(334): n is a, c, g, or t
  misc_feature (363)..(363): n is a, c, g, or t
  misc_feature (369)..(369): n is a, c, g, or t
  misc_feature (376)..(377): n is a, c, g, or t
  misc_feature (400)..(401): n is a, c, g, or t
  misc_feature (403)..(403): n is a, c, g, or t
  misc_feature (409)..(409): n is a, c, g, or t
  misc_feature (438)..(438): n is a, c, g, or t
  misc_feature (530)..(530): n is a, c, g, or t
  misc_feature (550)..(550): n is a, c, g, or t
  misc_feature (599)..(599): n is a, c, g, or t
  misc_feature (675)..(676): n is a, c, g, or t
  misc_feature (680)..(680): n is a, c, g, or t
  misc_feature (716)..(716): n is a, c, g, or t
ggatcctccatcccatccaactatcatcttcctccnctccgcctccaccctcccataaatcactntccaccnctccaccatcactttcccanatttttntccaccncccnccnccaccancccaaaaaacatctgcccctntcttcttctctctccttnanatttcaaanntccccttttctcgcttcttnctnntactnctccttctgactgtccaattctncgttacaaccttctctccttttcaattctctcccttctccnccnaaaaactctctctcttcccnccnntttcctcctcnttctcntaantcacccnntcctccntcttctnctttttccctattttctcccttcctcttntctccnctttctnntgttctacttcactcttctcccnntnactcanttgccgcgcgctgccgggggagcagcaanctctgcacgccctcacccgcggccaaagcgcctgcgtgcaggagtctgacgcctccgctccccatgctgcagaggcagggagccctgaaaanccagagagcacggagataantgaggaggagctcctggataatttccatctgatggccccttctgaagangatcattccatcctttgggacgccatcagtacctatgatggctcgaaggctctccatgtcaccaacatcaaaaaanngaangagccctgccgaatagaactctacagagtcgtaganagtttagccaaggcacaggagacatcaggagaagaaatt

SEQ ID NO: 699494 - DNA, 449 bp, Homo sapiens
ctgttatacataggtaggctgatggtaagctgaccactacctaggtcagccgtggggcgcaacgtctctttcaagcagtcgtgactgtatccatgcgctcaggggcatgctagaggcctgggccgctgccacgttcgcacaagcccgtgtagagaagtgaatgctgggactcagacttcagacagagaggactgtaaggagggcggacaggggcctggagatcctcctgcaaaccacgcccgtcctgacctgtagcgccgtctccagtgggctgcttcctcctggaaatagacgcgggtgtgtcttgtggcagagctaggatctgaactgcctccatccaaggccaggttctccgttagctcctgtggccccaccctgggccctgagctggcatcaggaatatttaccaacgagtgatagtcttttgcttttggcaaacctctacttaa

SEQ ID NO: 699495 - DNA, 251 bp, Homo sapiens
tgacaaaatcattttgaaaatcctttctggtattgacaaaagcacagtcctcttgcagttccgacgacaaacacgtgtggttcatacactacaatgcaggccacttcggctttggacgtgcccaattctttacacatggactcgagacctgacatgaggaatgtccccaccatcgtgcttgacgaggactcttcatcttcaacggggagggtggacagtgcaacttgccccatgatcaccgagtgcggccg

SEQ ID NO: 699496 - DNA, 383 bp, Homo sapiens
aaaacttctcgctccccgccccaaataacagctttaaaaagcctaacaaagaatgtattcattaattggtttaatgaagaataaagtaataaaacacacctaccctagctccgaacctggtaatcagtctgcatacaaactctttgggaaagaaacgaaatgtattgcacatgtaaaatatgaaacttactctctgtgtgtaggcatcctgtatttttttgactctaaagaaattctttctgaagcttggtgaagctgtgcaatagctcatgaattagtgtatttttttctttcttttttaaaaatatgtaaagtgcagtcttctgattcctgcatattgtatatcctgatatgtttcctagcagttaataacataattacgt

SEQ ID NO: 699497 - DNA, 171 bp, Homo sapiens
cgaaatactgaactgcggtgcggtcgatttcggttccgccgcgggcctcgcagtggtgctcgcgcgcgcgaacggaacccgatccatacggtctacgtgttctcccgccccgagtggaccgcgctggtggtccgcaaggattcgccgatccgctcgctcgcggacctgaag

SEQ ID NO: 699498 - DNA, 535 bp, Homo sapiens
  misc_feature (40)..(40): n is a, c, g, or t
tttaatttaatattcccctcttgaaaagggatgacaatanagtcacatacaaaaaaattaatccaactggcctttcttgtttttctaaaaacttttcattcaaacatttcttattatcatttattgcacatagcatggattaatcaaataagtttaaaataaaataatagactagagaaaggtgctttattttaaaaacagaaacaaaaagaaggtacgtggattatctgatgctacatcacactctgggagagacttcccttctttcagagagcctctcatttcttaatgtggatcattttgctctttccccctgataatgctcacttactctctttcataatctccccctctttcacttgttcttttctttccaatcatccaatgatccatcaaggtactttggtgttcagtgctttctcatatggttcaactcagatcatgtagtctttctcacccaaccaattcaactactgtttcctgagaccccactatgtccttgactctgtaaggagttcctgaatacaaaaaaaaa

SEQ ID NO: 699499 - DNA, 350 bp, Homo sapiens
atactccgttgataaaactgaggatgttaccagctagaatataaattactaaagtgagagcaaaccattttcaatgttctgtaaaacagagtaatactgatctgcctaggtaaatatttttccctaggagcttatgatgaaatactgtagcaaaggcagagagtagcaatgaaatgataaagcggatgctggaattgaaatgtgttagctctttcagtctactttttaaaaaggggtttattttttaataaaaagaagtttgcattgggggaaagggaacaaaaccatttatttaaagttttgtccctaaattaattttaaaaaaaatttgggggaaaaaaaaaacattt

SEQ ID NO: 699500 - DNA, 299 bp, Homo sapiens
agaccacgtatagtgtccacatagtaactaccaatcacaacagtgtcaaataaacacatgtacatgggcagaaagcagcaagcgatatcaaccatcattccaaacattcagacagttgaaaataacacctcatagatatttaagtccagtgcaaacaagaagacagcggagtgtgtgtgcacatgtgtgcacacctttaggtctgcactgtcaacaacagacacagagaagcccaagcagcacgcagtccacagacgggggcgttagagtcgggaataccaatgggtcaccctgcatca

SEQ ID NO: 699501 - DNA, 126 bp, Homo sapiens
  misc_feature (55)..(55): n is a, c, g, or t
aaggtactctagaggatctccaccttatccgtggcgaaacagcagactccgtctncaaaaaaaaaaggatggatggaccgaaggactccttgtctgcatgcgtctccatgaagggtatgagatata

SEQ ID NO: 699502 - DNA, 187 bp, Homo sapiens
tgtgcggatctggtggcgcggcacccatcccctccacattcccacagcccaggcatccatttgtcaacaaatcctcaccaaccgcaccatcaaaaaaccagtgggtttttttttttttttttttttttttttttttttttttttttttttttttttttttttttttttttttttttttttttttttt

SEQ ID NO: 699503 - DNA, 651 bp, Homo sapiens
tgaaacagagccttgctcctgtcacccaggctggagtgcagtggccgatctcagctcactgcaagctctgccacccctcccgggttcatgccattctcctgcctcacagcctcctgagtagctgggactacgggtgcccaccaccatgcctggctaatttttggtatttttagtagagacggggtttcaccgtgttagccaggattgtctcgatctctggaccttgtgatctgcccacctcagcctcccaaaatgctgggattaacaggcatgagccaccacaccgtggctatttgccggtatttccaagtacacacacacttacacttacacgcgtgcgtgcacgcgcacttacacacacacacgaagctatttatggtgtgtgtgtgtgcacagttcactcttgtttgcccaggcttggagttgcaactgggcgtgactcttgggttcagtgcaaacctttttgtccgccccgagttcacaaggtgacttcctccctgccattcaggcctcccagaatttattggggaaataccgggcatttgttcacaccacgccccgggaataaatgtcggggtacttatcaggtagaagatggggggttctacccaagtgttgggccacaggcgtggctctcaaacctcttgacct

SEQ ID NO: 699504 - DNA, 1192 bp, Homo sapiens
agcggaggttccggcgaaagtgaccggaagtaaccgccgggccaagatggctgcagaggaaggggtcgcgagtgctgcttcctgcctgtgcggtaggctgtgtgggcacctgcggccatgtgggcgtggttctacccgattgcttgttggttgccagtccccgccgaggcggatggggcagctctggctcccgggcgctggtttgcgcacaacatggcctggaggctcttgggggaagcccttgaccgtgcttggcagtggccatgcccttcccataaacggttgctttttcttttttgacgctctttgtgcaatgcccctgggtaacgggggagagtcgagcttgcgttgcccttgggacgtgggccccccatatcatgggacaaccatttatcattaggtggagggaggtagcatatcttccggtataactaagtgaggtaccaacccatatccttgcacaatagaaggcccaccaagatagcttggtctgttccggcatttcatatgtgggatgggaaacaacaaattatccagttgcaaatcccttgtcctatctaatttcgttacattggaaaatttttttcaagactttgtggacaacgacggcaagtgcacaacaaggcaattgggcttggaatgggcagggaccgcccatttgtgatgtgggtaaattcacggcccttggtatacagcataagtggggcgaaggcgcccacttttgggacacacagaaagggccgttccaaattttagggacgcgggaatccctgagcagtaaatacacttcaaggcataattatatcaccgtttaaagtttggcctcgcgttgatgtggaaacggaaaaagttccgccgtttgggttaccagaattttatgtagaaaccgaatagattaaacaaaccacaagccagacttttacacagcatttaagcccgtggggattgccaaactatctcacacaccgcaatcacaaagttaggttgagatataaaaattcaccacgtttcagacctaagtttaatttataaagtaaattttttctacaccccgtgggaaaactaagcgagacaccgacagttagtgcatctgggacaatatcttatatagtgaagtagtagtatacatacaccaaaaaactaagttgggatctatccaagcaccacattttatcgccccccctagtctgtg

SEQ ID NO: 699505 - DNA, 107 bp, Homo sapiens
acatttactcatatattggagaaatacctagattctatagcagtgtaatcctatttaatgtgctgtactagcaatatcatgttaactagagaaaacagttacagatg

SEQ ID NO: 699506 - DNA, 728 bp, Homo sapiens
gcgccgctgtccctggagcagcagcaggccttggacttcacatgtggagaacgtggagaaggtatgagggctctggggtgggcactccagtgacagagcagaagttctggggactgtcactgatggcagagctcaggcctgggctgggtgcccgctggtatggtgcccccagagcagccgtggacatttgctctcttgctgggcaggcagtattgcgaagtgccctaatgggctattattgtctttccttacaggcaggtcccctgtggatagatactctagggtcttgggatggtcccttcagggtgctgtgacttgagccttccgtccagacgtggctatgttccagagtccatgggaacatgcatgagcgagtgcatgtaggaaactggggaatcccatggagacctgctagtgtcagtctcctggaattatacgtgatgccaaaccatcctggacctggtttggttgagccacagggctcagaacactaatcgtggaactaagaacatggtctgggttgtgtgtgacgtcttcggagaagggtccttccttgatggtgatgtgaagccaggaccagtcctgaccagagcaggcctggaggctagtctcgcttcgttctgtgctgagtccaaggagtcctggccctgctgggagccttacagggctcctccctactcgactgcccacatagctccctgcatggcctcccaggctccccgatgaca

SEQ ID NO: 699507 - DNA, 417 bp, Homo sapiens
  misc_feature (16)..(16): n is a, c, g, or t
  misc_feature (24)..(24): n is a, c, g, or t
  misc_feature (46)..(46): n is a, c, g, or t
  misc_feature (63)..(63): n is a, c, g, or t
atggttgtatgacctnagagtgtntaccgtgtgtgtgccatgcatntgtgtgtgcatgtaccnacaaacactgaattatttgctttggggatgtgaggaaattatagattgttggttttaaaaagattatatggcagggcgcaggttgtcacgccatgtaatcctagcactttggaaaggcgaggctggtggatcacctgaggtcaggagtttgagaccagcctgaccaacaaggtgaaaccccatctctactaaaaatagaaaaactagccaggcatggtggtgggcgcctgtaatcccagctactcaggaggctgaggcaggataatcgcttgaacctgggaggtggaggttgcagtgagccgagatcgtgccactgtactccagcctgggcaacaagaatgaaactctgtctca

SEQ ID NO: 699508 - DNA, 1782 bp, Homo sapiens
tgccactcgttctacatcaatgatatactagcaatagatccatcatgcagatacatgagggacaatacgtaggtgatactcgcgtgcacaccgtcgagtactaggtccgctatgtatggcctatgaagcgccaatagttacgtaatcgcctggtcgcagtcactacggcgtacgtcatctagtaacaccgttccagaagactcgcaacagtccccttgcattgaggcactaaatcattgggatctgccgcattagacggcacgagcagctcacgatcgtctgtagacactcggacttcgactagaaagcactagacaacggcgtcgcggcccattaggcaaccctacactatagatctaccaaaatcactatccaaacccacacatcacttgcgacacataaggaactaaccagtacacaattcaaaccactaaaaaaacacttacacctcccaaaattcagactcaaaaagaacacttaaaaatacaggtgccacagacacaccacattatgcatcacatactacacttatacaccgaaacgtgagagcaccaattagacacttattcacaccaaagaaaaaaaacaagaaagctccaaaattacatgtaggaaaagatccaagaacggaagcaaaaagagccgaaccgcacgaccacacgaccgacatcaaaagttatcaagttatcacgagcacatgtccgaattccgccacgttccgctacaacgttataagtgtatacatggtaaaacccgcacaaaagttcgactacccaaagccgaagcgccattagttgctcagaaggcacgtgggtagaacggccccgaaacacgccgctgtcagaaccaacaaccacggtaaccccccaccagaatcacacagccaacagcacgacacgagcagcagtccacgcagagacagactacgcatacaacagctagaaggcccaatcggaacaaatcacagaacacacgacacatatcaaacgcaagcacccacaaagagacgaaaacagacaacaacacgagacacaacccgcgtacagtccccgaaagcaggagaacccaaccatacactcccaacggaacacaagaccaaaacaagaccaatatacgacatctcatgtcgtacaagtcacacatagaaatacactcagcacggtagaacaaaaacagtactagccgatacatcaagtacaattcagaacaagtaacgaaccagagcaaccacacgaggacaccatcacgtaacatgtatgataacaattagtcccccgtcgagaagcggcgaacgccgaacgaaaatgtcgaacatccgcccacacaaccgaaagtggagacactaaaccaatacaaacacggaaaggcagcagacgacgaccggagccaacaaaacagcacccagctaaacggccaggagtgaaccacacaacaaggagccgaatacaaagcaacgacaacagaaaacgaaagagaaacgcccacacccacacataaggacaccaacaggcaaaacaaacagagcacacagtacaagacacagcacacacgatacggcgcccaccaacgaaacgactatcgcgaacaagcagacacaaccagccacaacagcacaactccacaaccgcgcgagcagaaaacaagcgaaagatggcacaacaaacacaaaaagatgagcgagaagacacacagcacacataagagcgcacagacatgacagcagcaacgaagccgcgaacagacaccaacaaggagagcagaagaagcaaacacacagcaacg

SEQ ID NO: 699509 - DNA, 889 bp, Homo sapiens
catctggattgtgatctgttaaaattgttgcccccttcccggtcccccgcctgttatcgttctttcccgctttcctgtggtgtcccttcccaccttggagaggaggccacacaccagtttttcttggaaaatttcctaaagctttatgtctttaaagaagaaattctgttggggaacacagacatttctttaaggatgacccgaatgctccgtagttatttatggccacaacacgatgttgtctaaccaactttctctgtttgcttggtcaaaaccagcatttggggaactccaacatgctgttcatgttaaccatcaaatagtttatgaagactttgaccaccaaggtgacagacacgcaattataaatctgctaaatatgtattaagggtatttattattgaacagtccctttcccccaactcgactcctatggccattatggactccctgtttacccagaacatttaagtgcctcagcatctgtatgatatagtggacaggtgctgacataggtacccgctgacatgatgtgtcactagactctgtgggatgattgccacatacatggaacacctgggagatgctggaaatgtactcgggatcgaagatgaccaagatgtgttttcattcacagtggaggctacatcaagacaaggggaggtcccgccctcttgcaagtgtggtgagaggctctactagccaagacatgggcaccggagtaggtcccctgtagcaagcgggtgctgtagaggaaattcagtgacgtacatggctctggttctggacaccaaatctgtactggagaggaaatgactgctgaataaggcgattgtatgaatatttcaaatgcctgggaccacttaagttaagtaatgatatttccaga

SEQ ID NO: 699510 - DNA, 481 bp, Homo sapiens
cgccctgtgctttatgcgcccacaccagcaccactcagccctcacatgggtgccagtatgctcacagtcgcctgcacacagaggagcacacagtggggccgggggtgctgccgcgtcctgctctcccccagtcccagcgagcacaggagttaatgacagagtgtggggctcaaatgcccaggacacactgtagccctccacagcctctcagggcctcagtttccacatctgtaaaatggctcagtgacagctgttacacagttgtcgtgaggatgtaacaacttcacacatggagaccccgagaacagcactctcaggaggacccgtgcacgattcatctttcagactaacagacgagctgagcgacggacgagctaagtgatggatctgagaacgggagtgatcgggaagtgaacagtttcatcatctgctgctgctattcaattgtcagggttgaaataaacggaaagccagccaaaaa

SEQ ID NO: 699511 - DNA, 368 bp, Homo sapiens
taaggaaaaacacgagtggaatggaatgcaatggaatgcaatgaatggaatggaatggaatggaaaggaatggaatggaacggaatggaattcaatgtaatggaaaaaaagcgagggaatggaatggaatggaaaggactggaatgtaatggaatggattggagacaacccgattccaacgcaatggaatggaatggaatggaaaggaatggaatgaactggaatggaattgaaaggaatggaatgaactggaatggaatggaatggaatggaatttaatggaatggaatggaatggattcaacctgagtagagtggcaagaaatggaatggaaatgaatgcaatggaatggaatggaatggaacgga

SEQ ID NO: 699512 - DNA, 148 bp, Homo sapiens
ccctcccaagataaagggaaccttttcttaccacacacccccccccttatagtccgtccagggggggcctttttcggatttttctttaccaacccggcgggtttcaacccccagagaaaacaccttttgataaattccaaaccatttt

SEQ ID NO: 699513 - DNA, 481 bp, Homo sapiens
ccgggtcgcgaagacctagtctggatctgtcacccacgcttggagtgcagctggcacaactctcagctcactgctacctccacctcccagattcaagcgattctcctgcctcagacctcctgaatagctggactacaggtgcctgcaaccatcaacgcagctaatttttgtagttcaagtagaaatgggttttcaccttgttggccaggctggtctcgtactcctgacctctagtgacctgctcgccttggcctcccaaagtgctaggatttacaggtgtggagccagtgtacgctggccaagtagttattcttccacatgcttaaggagacccgttctgcagattcttggaactttctcgttgtagctccctcctctttttgtgtgctaccccacgaaactctagctgccttggcttcctcgaagtctcatctgattcgcaagattatatcaagtcaatgagactgcccagctccactat

SEQ ID NO: 699514 - DNA, 677 bp, Homo sapiens
  misc_feature (14)..(14): n is a, c, g, or t
  misc_feature (75)..(75): n is a, c, g, or t
  misc_feature (77)..(79): n is a, c, g, or t
  misc_feature (89)..(89): n is a, c, g, or t
  misc_feature (93)..(93): n is a, c, g, or t
  misc_feature (99)..(100): n is a, c, g, or t
  misc_feature (108)..(108): n is a, c, g, or t
  misc_feature (117)..(117): n is a, c, g, or t
  misc_feature (245)..(245): n is a, c, g, or t
  misc_feature (374)..(378): n is a, c, g, or t
  misc_feature (392)..(393): n is a, c, g, or t
  misc_feature (399)..(399): n is a, c, g, or t
  misc_feature (404)..(405): n is a, c, g, or t
  misc_feature (459)..(459): n is a, c, g, or t
  misc_feature (476)..(476): n is a, c, g, or t
  misc_feature (521)..(521): n is a, c, g, or t
  misc_feature (572)..(572): n is a, c, g, or t
  misc_feature (578)..(578): n is a, c, g, or t
  misc_feature (669)..(669): n is a, c, g, or t
gttgaccagggctntctcgctgtgctcctcacatacagaaggcaagccagcaggatgctccccgaaacctctttnannntgggccttcntccnagttcnnagagaatncctcatggnctagtgatctcttaaagaccccacctcttgatgccgttacattggcaacacttgaatttgaggggacacatacaagccatagcaaactgaacatttctcccatgccagaaagcaccatgttctttgtnagtaggtggtggtagaggggcactgcaggataaaggggcttctttcacttctaagatgatactgtgacagttaattttatgtgttaacttggcggggccacaggtgcctagctactgggtcatacttannnnntttttttttttttnntttaanttttnntctttttttccaattataaggtcaaacattattctaggtgtttctgttagggtnttttatatgagattganatttaaatcaatcagtgaactctgagttatgcagattgtcctccncgatgttagtgggcttgacccagttaggtgaaggtctgaagagaaaaaaanaccgtnctcttcccagaacaagagaattctccaacagaaacctttggactggaccttgcaccaacagctttcctgggtttccagcctcctgcctcanactccagc

SEQ ID NO: 699515 - DNA, 887 bp, Homo sapiens
atagagcacgctcaggctgtgttctcaggatgaccgagtgggagacaggcaggaccagttggtggcagttagactcccagtagcatctaagctctttggtgaatgtgtgagctaccgatgatgtgcaggatcgatgacgatttccctgcaggattacattgcagtgaaggatggaagtatgccaagtacctgcctcacagtgcagggcggtatgccgtcaaacgcttccgacaaagctcagtgtcccattgtgtgagcgcctcactaactccatgatgatgcacggcctgatagatacggcgaagaagctcatgattgtgcgcatcgtcatagctttgttcttcggatcatgcatacatctgctcacaggcgagaaccctctgtcagcgtgctggtgtaaacgccgattcgatcaaacgagatgggttctcccggggaggaactcctaaacgcaattgtggcagcgaccgggggactgtgagaggacaaggttagtgagtatgtgtgccccctgatgcctgtgtgaaccgaggcatcttggatgttgtggacaggcgcatcgtgaaggctgtcttccggaacattaagagcattgtgaatgactggtgatgagctcatcagtgctggcaggggctccatcggaggtccatagtggccattaagaaacgaaggacggagcttggacgcgttgtggggcaacgtgcagacggatgaatttatcctgactgtgtgcccagataagactgtgttgccttgggggcggtccctacaagtggtgggtagagtctcagagaagcaagcctcgcggagaaaaggtgaatatgcaggaggggccgggtaagaagcccggaggggacgccgtaaaaggggctaaaagtaaacggggg

SEQ ID NO: 699516 - DNA, 982 bp, Homo sapiens
  misc_feature (426)..(426): n is a, c, g, or t
  misc_feature (441)..(441): n is a, c, g, or t
cctttttgagaatcggatctagtatttgtaagctcctggaggacataatatcattcacggttatagccataatgcctggtctgcttctattatatagtaaatggtcaacaaatgtgtgtgtttgaggaggtggtggcttttaaaattgaccacactgaaaaacatgcaggttcaaacaatgcaaaagggtatacagtgtacaataaatctgccccagaagcagccggtgtcaagttttcaagattttccatgcatataaaagcttatctattacataaaaagaacatcatagtacgtgagctgtaggataccttgcttttttcacttaatgatattaagtgatattaagtttggaatgattttctatctgtgattatagatttactttatttctttcagtggcttcagtttctgttttatgatatnccattattgaagcantctcctgttgatgagtgtgctataaacaaggttgcaacatctttgttcttgggtctttgtgcgtgtttttatctgtaaaattgctaagagtggaatttctaggttaaagctttttgcgtttaaaaatgtgtagatactgcaaatcaattgccctccaaaaaggaccacaccaatttatacgcttataaacaaagcctgtgagtgtttcttacctgacaccctcagtcccactggatactttaaaactctttcatccttaccaatctaatcagtgaaaaatggaactgcaggttattggttttcccttgctcatttaaaaaatgttggtgtgaatgatttggggacccttggtctatcaaagaaattacctttttgtcgtatgtattctatgtgtattccctagtttgtcttttaactttaatttctgcttgtaaagatatttctgtacagtgttttacatttcaatgtaattaagtggatcagtttttttatttatgatttctggagctcaataaatattaagtgaatccaaaaaaaaaaa

SEQ ID NO: 699517 - DNA, 1204 bp, Homo sapiens
gtctctgtacgagcagcaggacgccggtctctgtaccgcaggatgggtgttatgttcaacagtgttcaagcacatcaaggcctcacttttcacagcagcatcacccaagatgcaacatttcagcacagcacgcacgcagcagggtcacacacactgcattcattcatgctccggcacaacgcttggtgagaaccaagcatcaaaacatcacacatcacacaccaccacccacacacatcaccaggcatgcatcagattcggttgtgcaccaacaccagcagcatcatccattttgtccagcatatgcgtatcatagccacgtcatcagcagagtgggcatcatgcatcagtctagcgccagcgtcatgccaccacgcacactgccacaacatcatggtagtagcacagagtttggaccgtagcaccaacatttcatgcatgcacagccatcatctggtcacttggcctcgcctagcgtggccgcagccaggctttatctccaatcagagctaagggccaatggggcacaacatgcaatcttcatggcaaagagccccacagatagggcaaggcgtcgccacatgggatagcatagcaaattaaccgcaatcggttgggcacacatgcccatttggcaatcgggatcacacgcccaaggattgcaacatataccaccctaggccttcataaaggggaatgcgccaggcacttatggcccacaggcacacccttacagcaaactttagggcgcacactacagcagaacggttcacagggcgctggccccccttgaacaaggggggacgactgggtcgggaattatggacgtggcttttggttccatcataccaccatacaaacaggatgacacccgcagacagcgtacttcacccaccatggggtcttcattggcagattcttcgacaacatgccaaacgggtgcactattttgtaacatgggcgcacggaacaaggattaacagcatagggggaaaaggcaaaggaagtaatattggggagcgccagcaaaattgggtttgggacacgacgtataacacaagttgggcgccgtgggagtagacaattggtgaaggggacaggactgtgaaatgactgtggatatttacaggaagagaaaaggcacggtgatcctatcatcagactatacaagttaacaggaaaacaagagtgactagagtcgcta

SEQ ID NO: 699518 - DNA, 397 bp, Homo sapiens
ctccagcccagatgctatgaccctgcagcgcctgccttttctaatgcagacctgcggctgttcttaactgactctgggaatccgctccaggtccctccctgagcctgcttgtggcaggaatgcctgagctcccattttaagtcctcctcccgcctccctggggcccggatgggtgtctgctttcattcttgcagctctgggatttgaggcaccgcgtatcactggatggtgcagtgccgctaggcacatgggcttgggtggaggaaaatcagtctggtgaagatcaggcagtaaccgtccaggtgcagtcgtcacgcctggaatccctgtgctttgggaggctgaggcaggagttcaagactagactgggcaatatagtgaaactttgtccctatta

SEQ ID NO: 699519 - DNA, 448 bp, Homo sapiens
  misc_feature (22)..(22): n is a, c, g, or t
  misc_feature (100)..(100): n is a, c, g, or t
aaagaccactctacttcctgtnggttaaatcgatgattcctaagtggtactaggcttagatacaaaagtcaatgataagaatatcttgcataaatccatngcttcttacttagataaaattcttatttaaaaatttttaatttgcttaatgccctatagcttacaaagcactttttaaatcataattttgtttaatccttagaataatgttataagataaacaaaactcatcaatcccattttacctgtgattgcacactgtgattgagctaataaatggaagaattgagataccaactcagattttgtagcttctgtttcaagtgattaacctgtagcaacaggcttttgaattatttttgtgttctatatccctgaagataaagattctgtattaaagagccaagattttatatctcacaaattaaaaacttaaaagacatgaaaa

SEQ ID NO: 699520 - DNA, 541 bp, Homo sapiens
aaatttaatggctctgagagtgggtcaataaagataggtttggctctgaggctctcatgagattgccagtcaggatgtagggtgtggccgcagtcaatctgaaggcttgaatatgcctggaagacccacctccaagatggctcactccaatggttgggaagttgatgcccgctgtgggcaggatgtctcagtagctccctgtgtagatcctccatatggcttcttgaatttccttataacccagtggcttgcttcctccagagcattcaatccaagaagagctcggcagaagcagtaattgtcttttatgacttttgtttttggaagtcatacactatcttatccctatattctaatgctcatacatgaccaaccctgacgagcttgtaaatgggtgactacacaaagtcattattattagcaggtgatcattcactggggggcatcttggatgctgactactgtatgctgtaaccagtattggtgtaatatttggtggagtaaatccaccagtattccattttttatttcaataacctct

SEQ ID NO: 699521 - DNA, 296 bp, Homo sapiens
taggatccagctccacagagatcgagacatctggcacatgtgaaactctgtctccactaaaattacaaaagaaaaaaaaaaaattagccaggtgtggtggtgggcactgtagtcccagctactcgggaggtggaggcaggagaatagtatgaacccaggaggcagagcttgcagtgagccaagatcacaccactgcactccaacctggggcacagaatgagaccctgtctctaaaaaattttttttaaataaataatttaacctcttctaataatgatttggttgcaggaaatgta

SEQ ID NO: 699522 - DNA, 457 bp, Homo sapiens
gttggccgctgactcaaaagcgtaagcctgcagttaagctacatagtaaacggaagatgatataccatttgcttaaactgtttaaaacagcagagtcgttaaaacttcaggaagggtgactgcaagggcattttacttcatgatggaaaaatatttgataaatttgaagaaatcattggcagaaaaacttgaaccagtccacaactaaagacgctattaaaaataaataccttcaaacacttgactatattacgcatggctagatcatacattccagtgtatctgaatatgaaaatatctccatctagtgtaagctagttgaacagatttagacttcaatatccaaatgtagattttacaggccaattctggcttatgcaagataacaaatatgaaagagaaaaatcaaagctacagaaacttattaaacttcatttataaatctcaaaaaaaaaaa

SEQ ID NO: 699523 - DNA, 345 bp, Homo sapiens
ggtcggtgttgtcacagtcttcactactttcttgaccgtggtctctgtgcgccaagtggtcccatcatctgagtgtctccacagagactacacacatggctccctcaggatcctcctcggtgtaggtctccacaatctgccccggttcttgcatcctgggaatggtgctatatagaaggtgcctgtgatcttggggtccgttaagtttcaaatctgaaaatttctgtctttcaaggtcagcttggcccacaaaccggcggttctcaaatgtgaagttctaaaaatcagtcctttaagaaagaaactcgccacctcttcctcctttcggtatctctcgtgctcttc

SEQ ID NO: 699524 - DNA, 391 bp, Homo sapiens
tacgagtagccagtccggtgtatgtcattaattgccgcaccgcaacggtgctctgaagtgtctgcataatgagaacttaattgacaaagagtctgcaagtcttcttctggcatttgcttgttctcttatgcggacttcatgggaccgtggtagggaccgccattgctggagcttctgttacgagaccacaggaccacgtgtggcttcctgtgaagtctgcccaatgaagcaatcctgattgatttcacgattgaggcattgaagcaggtgcacgaggatgagtctggtgaggcccagctctctttcctcactggtggtccggtggctgccgccagctcgctcgagagagataccgagaggctcagggagcttttgctgtatggccgtaaga

SEQ ID NO: 699525 - DNA, 103 bp, Homo sapiens
tggagacactgagataaagacatcggcagagataaagggggatacagttaaatgtagcaactctggagttcattttttcccacggtagcaaaattaatgcttt

SEQ ID NO: 699526 - DNA, 525 bp, Homo sapiens
gggtagaatctactccagggtatctccagagctaggataatgctccttaatgcaatcccacggcttatgaccatggcagtagaacaagtcaatatacaacactgggatgcgttaagtgtgctttcctagcagaaagcaccaggttggagtcaccagtccacatgctaatactgggaagtatttctagaagggggtgctcaatagagggcagacatgatgcaagttcttcatactagaaaggtgtcctgtgtgtgcttgcacagctggatgggggcacacaggagcaagcgcagaattgggttttctccagtcaagtctaccctgatgtgatctgtgcacggccacaatattatctggctgcctttctagaagatgctgtagcagggtaagaaatccaaagttatggtttgggccagctgacggggatacgaacctttggtctgaaaggccctatgacttggcctgattcgccattcactattaaggagggactacgtctagccaagaggctcatctagagctgct

SEQ ID NO: 699527 - DNA, 428 bp, Homo sapiens
  misc_feature (179)..(180): n is a, c, g, or t
caggaactggagacacagcacaggcagctggccccaaaaagcctgcgtgggacgggccggtggcacatgctggaggccgcccgtttccgcctgggggccagctggcggatggggccgcactttcccgtggatccgtccgccaagcagggcatgccattgggccgcatccagggcaaagnntccagttcccgtacccaccatcctccaccggcccactgcccatgcaccgcggcgggcacatattgtcccgcggcccgggtggctgcagcttaggtttctccccggaaggaaagcttgaggcgcacggttgcggtcggccggctgcggggggaccaggggccacacctgccgcggaggttacagtcggtaaagtagagcggcgacacgaacttctccacccgctccagcgtggtgcgccagtgcttcaa

SEQ ID NO: 699528 - DNA, 138 bp, Homo sapiens
tacatggatagcggatgacgtgtagtaattatctatttgcctaaatgggtttgtcaggtatccatatataacaaagaagtctgtgtacatatagtaaaagacctatcagtgttccaccatgcacttctattttttagg

SEQ ID NO: 699529 - DNA, 418 bp, Homo sapiens
gggctcggaaccagtggacttggggtgtatgtcatcagagatgaaaaaggaggcattacaagtgatatttcagaaataaaaaatacaagctactttgggtaactgaatgccaataaattagttaacctagaggaaatggataaattcctagactcatacaactcactaagattgaaccatgaagaaatccaaaacctgaacagaacaataacaaacaatgagatcaaatccataatacatctttcaacaaggaaaagcccagaacctgatggcttcactgctagattctaccaaacattcgaggaagaaataataccaatcttactcaaacttccaaaaaataggggagaaaggaatactttcaaactcattttacaaggccagtattactgtaataccaaaaacagacaagaacaca

SEQ ID NO: 699530 - DNA, 1034 bp, Homo sapiens
  misc_feature (45)..(45): n is a, c, g, or t
  misc_feature (92)..(93): n is a, c, g, or t
  misc_feature (101)..(101): n is a, c, g, or t
  misc_feature (108)..(108): n is a, c, g, or t
  misc_feature (111)..(111): n is a, c, g, or t
  misc_feature (133)..(133): n is a, c, g, or t
  misc_feature (220)..(220): n is a, c, g, or t
  misc_feature (510)..(510): n is a, c, g, or t
  misc_feature (540)..(540): n is a, c, g, or t
  misc_feature (1007)..(1007): n is a, c, g, or t
  misc_feature (1014)..(1014): n is a, c, g, or t
  misc_feature (1017)..(1017): n is a, c, g, or t
tagcaacgatccaagagagatgcatgacacgctattcaaatgctntatatatattttagacatctcactttgcgcccagccgagtcagtgtnnatctcaancagtgancanttgcctcccgggctcaagcgantctcctgcctcagcctcccaagtagctgggattacaggcacctgccaccatgcccggctaatttttgtaattttagtagagacaggnttcaccatgttgcccaggctggtttcgaactcctgacctcaggtgatccacccgcctcggcctcccaaagtgctgggattacaggcttgagcccccgcgcccagccatcaaaatgctttttatttctgcatatgttgaatactttttacaatttaaaaaaatgatctgttttgaaggcaaaatcgcaaatcttgaaattaagaaggcaaaaatgtaaaggagtcaaaactataaatcaagtatttgggaagtgaagactggaagctaatttgcattaaattcacaaaccnttatactctttctgtatatacatttttttnctttaaaaaacaactatggatcagaatagccacatttagaacactttttgttatcagtcaatatttttagatagttagaacctggccctaagcctaaaagtgggcttgattctgcagtaaatcttttacaactgccccgacacacataaacctttttaaaaatagacactccccgaagtcttttgttcgcatggtcacacactgatgcttagatgttccagtaatctaatatggccacagtagtcttgatgaccaaagtcctttttttccatctttagaaaactacatgggaacaaacagatcgaacagttttgaagctactgtgtgtgtgaatgaacactcttgctttattccagaatgctgtacatctattttggattgtatattgtgtttgtgtatttacgctttgattcatagtaacttcttatggaattgatttgcattgaacacaaactgtaaataaaaanaaatggntgntaaaggggtccggctca

SEQ ID NO: 699531 - DNA, 870 bp, Homo sapiens
  misc_feature (843)..(843): n is a, c, g, or t
  misc_feature (850)..(850): n is a, c, g, or t
  misc_feature (853)..(853): n is a, c, g, or t
cggcaacgaggataaagcgcggtatttcccaatatatttgaccttaagctcactacctcgcctcgctcaagcagaggcacccatattatcactaagatcatcccacttctatacaataactctcacaggagaagtccaacgtatgttgcccccaatctaattattgccaccccaggcggtgtgtgggaccttcagttaacaccaattttatcgtggctccaatttttttttgcatctgaactgtgaagagacccaggccgagagacgtattataatttccccatcttctaagcccaatccaaatggcgtctggaagtccaattggcaaggaacacaggtcttcatggaatctacaaattccacaccttttattgacacagaaaatgttgagaatcccaaatttgattgatttgaagaacatgtgagaggtttgactagatcatggatgccaatattaaatctgctggagtttcatgtacaagatgaaggagaggcaacatccaaaatagttaagacatgatttccttgaatgtggcttgagaaatatggacacttaatactaccttgaaaataagaatagaaataagggatgggattgtggaatggagattcagttttcatttggttcattaattctataaggccataaaacagaaaactacatgggaacaaacagatcgaacagttttgaagctactgtgtgtgtgaatgaacactcttgctttattccagaatgctgtacatctattttggattgtatattgtgtttgtgtatttacgctttgattcatagtaacttcttatggaattgatttgcattgaacacaaactgtaaataaaaanaaatggntgntaaaggggtccggctca

SEQ ID NO: 699532 - DNA, 237 bp, Homo sapiens
gggagacaggcgggagtcaccatgcccagcctaaaccaggcaagataataaataaccttggtaagggacgtggggcacttggctggaagccactctttagggtaccaagccagcaaggattccttgtgagcatctgacacaagagagaggcaaccagacaaataagccaacaaccctaccaacaggcctaagccacttggtcggaaagaaaaagaggaagaagccagaactgtgaca

SEQ ID NO: 699533 - DNA, 212 bp, Homo sapiens
tcgaccttcatcccgtagtgtgtgcggattagacgaccggtgactgtataggttggggctagcgtgtcccaggggtggatgtgtgactttgcgtgtgtgtgcagtactgtgtgtgcgtaagtagcaggtctgtggctgtgcaggtgcaatttgtgtggccccgtgttctgtgtgagagaggagagtgtgactggctgtgaggcagagggtaa

SEQ ID NO: 699534 - DNA, 484 bp, Homo sapiens
taatgatagagcaaatacagttaaactgaacaagtaggatgtcaaaatactgtcatagaatccagggccaagggtatgtgcatgtgactgtacaatgcttgccactagtctgtttgaaagtattcatattaagacattgcaggaaaatattcctactgatcacatgcaatcctgccttggtggcaaagactcttgacaaaaacatctcctttcaaggaagactacaattttaagagctacgtagtgatggagatgtgaaaaagtaggcagtactaaggtatcagatgactaatgcaaaaagacagaaagttataaagggtgaatttaaggtttctaaaaatggcttcctgatgctcctcccacttagcccaactccaaacttttactgtaactatcatttgaaattaaaacacacacacacacacacattatgtataatttttttggcttatcaagaaaaaaaaaccacattatgtataaaatc

SEQ ID NO: 699535 - DNA, 142 bp, Homo sapiens
cgcacccatacattcttccatcttatcattagtgaaaacctcaccaagtatggcaggctcttcagccagttcggtcaaggtcatgaatccatattcacaggggtgaaggggagtgttgtgggtactttcgtaatgtctcttg

SEQ ID NO: 699536 - DNA, 928 bp, Homo sapiens
  misc_feature (928)..(928): n is a, c, g, or t
ggcattacacgaaggcggtggcgatggcggtggggatagtggcttctcgcagtactccgtggacctcactgacccggtcgactgaccggctccaactacccgggattcagtattagccttcggctcacgtggttcctcgtgcacgagaggcgggttccggagtagccctcggtgaagccccagaccacagctatgagtcccttcgtgtgacgtctgcgccgaaacatgttctgcgatgtccagctcaaccggcgccgatgcaagaggaatgcagtgaacaacggtcttctggcagagagatggtagagtgcttcaacaagatttcgagagagctgactgtcgggtcggtggtgatctctgcgtgcacggacatagatgttgtcactgcaggtatagaccttgatggacatggtcttcggacatgcctgcagcccgaaaggagatgatgtggtccggatcagctggtgacctccgtgacatcatcagcttcgataccaaggagacttcacccgtcctcgagaggtgcccaagccgtgattgtggcgtcatgggggctgataggggaggtgtggaacttgtcaccgctgtgcaatcaggtactgtgccaggatgttcttccggtgcaagaggtgacgtgggttggctgcgatgtccgaaactgcgcgcctgccaggtcttcgggaacccactgtcacgagctgctcacggccgaatgatggtgaggaagctgcgcatggggggcgcggggtcccaacacagctgtgtgcgcgccacgctgggcgcatccccaacccgcggggagcaacaggaccgcggtcccggaccggcgggacacctcagggcgcacactacacacacctcggcgcgaaacgacccctccgtcggcgcgggggcgcccaaggagtgcctcacccacaaagccatccgn

SEQ ID NO: 699537 - DNA, 445 bp, Homo sapiens
  misc_feature (14)..(14): n is a, c, g, or t
ctaatatggccaangggttgttttagcctcccccaaaaagcccccttattaaccccagaaaaagacaaggtgaggcctcacattgcccccaaatgtgggacaaatattaataataccttaaactttatgttgataaaagattgggggaaaagctttcctcatatagatcaagaagaatttcaaaagattctaggagaaggcccaggcacagtggctcacacctgtaatcgcagcactttgggaggctgaagcaagagattgcttgagcccagaagtttgagaccaacctaggcaacaaagtgagaccctgtctctataaaagtaaaaactaaaaaattagctgggcatggtggtgtgccctttggtcccagctactcactcaggaggctgaagagggagaatcacttgagccaaggaggttgagacagagtaagaccccctctca

SEQ ID NO: 699538 - DNA, 762 bp, Homo sapiens
  misc_feature (41)..(41): n is a, c, g, or t
  misc_feature (128)..(128): n is a, c, g, or t
cttcagctgctgtcgttggggtgcttccagccagcctggtnttcccttcctgtggctttgggaggggaaatgagcatgggtcacctgcctgccactgtctgcctcctgcctcctctgaggcctccctntgtcctgcagcccaggtgaccttcagaaagacattggagaaggaagcaaagggagaggagcccgacatcgcagtccccaagttcaaacagaggaagggggagtccgacggggcctatatccaccgcatgcagcaagaggcccagcatgtgctgttcctcagcaagaaccaggccatccggcagccagaggtgcaggcagctcccaaggagaagtctgagcagaaaaaagcaaaaaaagcgtgagtggaggcgggagggggaggggtctgccctgggagccggagggaagacagggttcccatgacggccctctgcaggtaccctgcatagccatggggcagcctggattcagggagaccaagccagagccctgggagttggcgagtcggagcatccagctgggagccagtgagggtgtggcctccaggaggctgcggaacctgggaactctgcggagacctcgcttggtccttgctttcacaggaaaagcaccagaaagccctagccctgtgggaatcagccctgagggggtcggtctgagggtgacgtgcccaggggttctgtttccattagaacagaatgtctctcgtccaagagactacaccttcctaatatacgtgccgaattcgtgcag

SEQ ID NO: 699539 - DNA, 1406 bp, Homo sapiens
gcctgtactatgtctacatggtggctgcgtggcagctggttctgtaccaagtgccgagtcaagtatcctagcaggaattaacgggcctagcaggctggccaggtcacataggtcatttctgtcttccagtcatgtgtcttacaaccgtggatagcagttgcgaaggctgatcggtcgggcatgatcatggtctttgtaccctctactgtcactgcataccacgttctatattgttcacgcactattgtgagatagctctcaccgacaactggctacccaatcacgggctggtacagctgcggcagatacgcttcatgctaacactatcgcttggccatgacctcatgccgttggctgcggcactatttgaggaccacttcacgcaaagaccactgctactatatacttacatgccccaatggctgtccaaccttcctactacctcacctggcctacacgctcctggcatactcatcccgctgcgcctcgtccacccgcgactacctcatgactcaactatcaagcacaggcaacatctggacgcatgagctatctcgcaaagttccaccgaccaatgagcctcctcttccttgggcaccttctataccaacaggtggcgagagagcactccagcctggtgaccagctacaccacgagtgcagcactgcaaagatcgggtgcaccttcgcctgacgatgtacaccaacattgacccctcatcaacgttgactaccttcacagccctgggggcccaataccgtgcagcagaacacgcgtcacatattagggcacctggccgacagaggtggcagacatccagggccaagcgccggcacaccgtaccacccacatcacgcaaacaccacaccacgcaccggaacactcacacaacagaacgcacagaccacacccaggacaccaacagcgcagcacaaccccacacagcaacacaacagacaccactcgaaacaagaccgaaccaaccatcaacctgcgagtccacacaacgtgccaccatgcacacggcgcacgacacacaacaaactaacaagacccccagcagaaccaatgacgccacacacaccttcaatctccccccgcaatccacctgcgcacacccgccaaggctacatcatgacccactacacgcatcatgcactcgacctctcccacactctgctcattcacatcacaacatctaactactcaccacacctaagttacctacaacgacgacaccaccaccccgctaccacccaccactcaatcacagccactcacaccacatcgacacattatcgacccaccccacatctctaattcactcacgctgatcttaattacaatcgataaattactcatctccgaacaccagcatataaacaatcatacagcaactatccata

SEQ ID NO: 699540 - DNA, 2114 bp, Homo sapiens
  misc_feature (4)..(4): n is a, c, g, or t
gcgnaagtggcttctctagggagcctcccggcgtggagatggcgggagctggtcgcggagcagcggtgtccagggtgcaggcgggtcctgggagtccccggcgagcgcgggggcggcagcaagtgcagccgctggggaagcagcgcccagccccgtggcccgggcttcgcagcaaagagaagaagaaagtgaactgcaagcccaagaaccaggacgaacaggagattcctttccggctccgggagattatgaggagccgccaagagatgaaaaacccgatcagtaacaagaagaggaagaaagcagcccaggtgaccttcagaaagacattggagaaggaagcaaagggagaggagcccgacatcgcagtccccaagttcaaacagaggaagggggagtccgacggggcctatatccaccgcatgcagcaagaggcccagcatgtgctgttcctcagcaagaaccaggccatccggcagccagaggtgcaggcagctcccaaggagaagtctgagcagaaaaaagcaaaaaaagcgttccagaagcggcgactagataaagtccgacggaaaaaggaggaaaaggcggcagacaggctggagcaggagttgctccgagacacggtgaagtttggtgaggttgtcctgcagcccccagagctgactgccaggccccagaggagcgtaagcaaggaccagcctggcaggagatcgcagatgctgcggatgcttctgagccccggtggtgtgtcccagcctctgaccgcctccctggcccgccagcggattgtggaggaggagagagagcgggccgtgcaggcctacagagcgttgaagcagcggcagcagcagctgcacggggagcgaccccacctcacttcccggaagaagccagagccgcagctgtgatggagagacacccggggcctggccacgctctggggcaactggcaccaggagctgctacacctgggtaggagagaggcaggccatgccagcagtgtggggtgaggcctccagctacttgttcacacgttgggcactagtgggtccacatcttgcagggggtgagtgcccgatggactagggccaaggcctggttgacagacggcccgtggggcccggtgtcactcacagctccatctctttgttttgaacgtccattctgagtctcagcccaggtggaccttaggaagggctggatccctgtccctgaacaccaactaccgagacagctgatgaggctggctcagtgtgtgacggaggcccccgggagtcagcagagccgagcgtacagtgcacatcaggcagagcaggccacgggcagggacgacgcatcgggacagggctctgcaggggaccgtgactacaggccagctgtgagtggtcccctacagaggctgcccacccaaggtttggttggggtgaaacatgatgacaacacatacacttaagaaggtgggaaccgggggccgggcgcggtggctcacacctgtaatgccagcactttgggcagctgaggcgagtggatcacctgaggtcaggagttcgaaccagcctggccaacatggtgaaactgcatctctactaaaaatacacgaagaaaaaaaaaacagtgggaacagagttgtcacctacctaacagggctctgagagagccgggaggcccaaagtggctggaagaaggtaaaggaaaaatcctgtcttgggctcaaggtcacagagtggggcccagggggagttcctgctgagggcagggccttgccaggcttcagtctccagtgccaaaggaggaaatgcccaggctgtcagcatttccagatgagagcagaagggagaagcttaaacccaagtcacacatccagcaatggagtccgacagcccagcaccatctgggaactgagaagcacctctgcccggcccccacaccgtgtggaaagtgaggagcacctctgcctggccgccaccccgtctggcaagtgaggagcgcctctgcccggccgctgtgcaaccttccaagtgtgaagtgacagccttgtgtgtgatgttttctgccttccccaagtttgcactttcgacattaaagtttactttttagttaaaagttttaaaaaa

SEQ ID NO: 699541 - DNA, 109 bp, Homo sapiens
  misc_feature (3)..(3): n is a, c, g, or t
  misc_feature (82)..(82): n is a, c, g, or t
  misc_feature (85)..(85): n is a, c, g, or t
canggctttgctctaaggcccctaacccggggcttggccagccctgccaaaggaggccacggaggagcaggagctcgtaccnggngtctgctgaccttcgtgctggcgc

SEQ ID NO: 699542 - DNA, 1789 bp, Homo sapiens
  misc_feature (4)..(4): n is a, c, g, or t
gcgnaagtggcttctctagggagcctcccggcgtggagatggcgggagctggtcgcggagcagcggtgtccagggtgcaggcgggtcctgggagtccccggcgagcgcgggggcggcagcaagtgcagccgctggggaagcagcgcccagccccgtggcccgggcttcgcagcaaagagaagaagaaagtgaactgcaagcccaagaaccaggacgaacaggagattcctttccggctccgggagattatgaggagccgccaagagatgaaaaacccgatcagtaacaagaagaggaagaaagcagcccaggtgaccttcagaaagacattggagaaggaagcaaagggagaggagcccgacatcgcagtccccaagttcaaacagaggaagggggagtccgacggggcctatatccaccgcatgcagcaagaggcccagcatgtgctgttcctcagcaagaaccaggccatccggcagccagaggtgcaggcagctcccaaggagaagtctgagcagaaaaaagcaaaaaaagcgttccagaagcggcgactagataaagtccgacggaaaaaggaggaaaaggcggcagacaggctggagcaggagttgctccgagacacggtgaagtttggtgaggttgtcctgcagcccccagagctgactgccaggccccagaggagcgtaagcaaggaccagcctggcaggagatcgcagatgctgcggatgcttctgagccccggtggtgtgtcccagcctctgaccgcctccctggcccgccagcggattgtggaggaggagagagagcgggccgtgcaggcctacagagcgttgaagcagcggcagcagcagctgcacggggagcgaccccacctcacttcccggaagaagccagagccgcagctgtgatggagagacacccggggcctggccacgctctggggcaactggcaccaggagctgctacacctgggtaggagagaggcaggccatgccagcagtgtggggtgaggcctccagctacttgttcacacgttgggcactagtgggtccacatcttgcagggggtgagtgcccgatggactagggccaaggcctggttgacagacggcccgtggggcccggtgtcactcacagctccatctctttgttttgaacgtccattctgagtctcagcccaggtggaccttaggaagggctggatccctgtccctgaacaccaactaccgagacagctgatgaggctggctcagtgtgtgacggaggcccccgggagtcagcagagccgagcgtacagtgcacatcaggcagagcaggccacgggcagggacgacgcatcgggacagggctctgcaggggaccgtgactacaggccagctgtgagtggtcccctacagaggctgcccacccaaggtttggttggggtgaaacatgatgacaacacatacacttaagaaggtgggaaccgggggccgggcgcggtggctcacacctgtaatgccagcactttgggcagctgaggcgagtggatcacctgaggtcaggagttcgaaccagcctggccaacatggtgaaactgcatctctactaaaaatacaccacaccgtgtggaaagtgaggagcacctctgcctggccgccaccccgtctggcaagtgaggagcgcctctgcccggccgctgtgcaaccttccaagtgtgaagtgacagccttgtgtgtgatgttttctgccttccccaagtttgcactttcgacattaaagtttactttttagttaaaagttttaaaaaa

SEQ ID NO: 699543 - DNA, 409 bp, Homo sapiens
tttctctacggtgttacacagcccaagaggtctgatattggcactgtagcccaagaggtctgagccctggtgtgtttccagatcgatcctggatgctctcactcactcattccttcactcatccagctagctaaaaccttttagctgaccatgtactacgtgccagctctagttttcagccttgggaggttttattctgacttcctctgattttggcatgtggagacactcctataaggagagttcaagcctgtgggagtagaaaaatctcattcccagagtcagaggagaagagacatgtaccttgaccatcgtccttcctctcaagctagccagagggtgggagcctaaggaagcgtggggtagcagatggagtaatggtcacgaggtccagacccactcccaaagc

SEQ ID NO: 699544 - DNA, 2222 bp, Homo sapiens
  misc_feature (4)..(4): n is a, c, g, or t
gcgnaagtggcttctctagggagcctcccggcgtggagatggcgggagctggtcgcggagcagcggtgtccagggtgcaggcgggtcctgggagtccccggcgagcgcgggggcggcagcaagtgcagccgctggggaagcagcgcccagccccgtggcccgggcttcgcaggtgactgcgctgccccgcagaggccgccacacttccccagagaaggggacgccttgaaggctccgcccgggaccccctagggagcgttcgctcggaccccttccccagcaaagagaagaagaaagtgaactgcaagcccaagaaccaggacgaacaggagattcctttccggctccgggagattatgaggagccgccaagagatgaaaaacccgatcagtaacaagaagaggaagaaagcagcccaggtgaccttcagaaagacattggagaaggaagcaaagggagaggagcccgacatcgcagtccccaagttcaaacagaggaagggggagtccgacggggcctatatccaccgcatgcagcaagaggcccagcatgtgctgttcctcagcaagaaccaggccatccggcagccagaggtgcaggcagctcccaaggagaagtctgagcagaaaaaagcaaaaaaagcgttccagaagcggcgactagataaagtccgacggaaaaaggaggaaaaggcggcagacaggctggagcaggagttgctccgagacacggtgaagtttggtgaggttgtcctgcagcccccagagctgactgccaggccccagaggagcgtaagcaaggaccagcctggcaggagatcgcagatgctgcggatgcttctgagccccggtggtgtgtcccagcctctgaccgcctccctggcccgccagcggattgtggaggaggagagagagcgggccgtgcaggcctacagagcgttgaagcagcggcagcagcagctgcacggggagcgaccccacctcacttcccggaagaagccagagccgcagctgtgatggagagacacccggggcctggccacgctctggggcaactggcaccaggagctgctacacctgggtaggagagaggcaggccatgccagcagtgtggggtgaggcctccagctacttgttcacacgttgggcactagtgggtccacatcttgcagggggtgagtgcccgatggactagggccaaggcctggttgacagacggcccgtggggcccggtgtcactcacagctccatctctttgttttgaacgtccattctgagtctcagcccaggtggaccttaggaagggctggatccctgtccctgaacaccaactaccgagacagctgatgaggctggctcagtgtgtgacggaggcccccgggagtcagcagagccgagcgtacagtgcacatcaggcagagcaggccacgggcagggacgacgcatcgggacagggctctgcaggggaccgtgactacaggccagctgtgagtggtcccctacagaggctgcccacccaaggtttggttggggtgaaacatgatgacaacacatacacttaagaaggtgggaaccgggggccgggcgcggtggctcacacctgtaatgccagcactttgggcagctgaggcgagtggatcacctgaggtcaggagttcgaaccagcctggccaacatggtgaaactgcatctctactaaaaatacacgaagaaaaaaaaaacagtgggaacagagttgtcacctacctaacagggctctgagagagccgggaggcccaaagtggctggaagaaggtaaaggaaaaatcctgtcttgggctcaaggtcacagagtggggcccagggggagttcctgctgagggcagggccttgccaggcttcagtctccagtgccaaaggaggaaatgcccaggctgtcagcatttccagatgagagcagaagggagaagcttaaacccaagtcacacatccagcaatggagtccgacagcccagcaccatctgggaactgagaagcacctctgcccggcccccacaccgtgtggaaagtgaggagcacctctgcctggccgccaccccgtctggcaagtgaggagcgcctctgcccggccgctgtgcaaccttccaagtgtgaagtgacagccttgtgtgtgatgttttctgccttccccaagtttgcactttcgacattaaagtttactttttagttaaaagttttaaaaaa

SEQ ID NO: 699545 - DNA, 1884 bp, Homo sapiens
agcgttgaagcagcggcagcagcagctgcacggggagcgaccccacctcacttcccggaagaagccagagccgcagcccaggtgaccttcagaaagacattggagaaggaagcaaagggagaggagcccgacatcgcagtccccaagttcaaacagaggaagggggagtccgacggggcctatatccaccgcatgcagcaagaggcccagcatgtgctgttcctcagcaagaaccaggccatccggcagccagaggtgcaggcagctcccaaggagaagtctgagcagaaaaaagcaaaaaaagcgttccagaagcggcgactagataaagtccgacggaaaaaggaggaaaaggcggcagacaggctggagcaggagttgctccgagacacggtgaagtttggtgaggttgtcctgcagcccccagagctgactgccaggccccagaggagcgtaagcaaggaccagcctggcaggagatcgcagatgctgcggatgcttctgagccccggtggtgtgtcccagcctctgaccgcctccctggcccgccagcggattgtggaggaggagagagagcgggccgtgcaggcctacagagcgttgaagcagcggcagcagcagctgcacggggagcgaccccacctcacttcccggaagaagccagagccgcagctgtgatggagagacacccggggcctggccacgctctggggcaactggcaccaggagctgctacacctgggtaggagagaggcaggccatgccagcagtgtggggtgaggcctccagctacttgttcacacgttgggcactagtgggtccacatcttgcagggggtgagtgcccgatggactagggccaaggcctggttgacagacggcccgtggggcccggtgtcactcacagctccatctctttgttttgaacgtccattctgagtctcagcccaggtggaccttaggaagggctggatccctgtccctgaacaccaactaccgagacagctgatgaggctggctcagtgtgtgacggaggcccccgggagtcagcagagccgagcgtacagtgcacatcaggcagagcaggccacgggcagggacgacgcatcgggacagggctctgcaggggaccgtgactacaggccagctgtgagtggtcccctacagaggctgcccacccaaggtttggttggggtgaaacatgatgacaacacatacacttaagaaggtgggaaccgggggccgggcgcggtggctcacacctgtaatgccagcactttgggcagctgaggcgagtggatcacctgaggtcaggagttcgaaccagcctggccaacatggtgaaactgcatctctactaaaaatacacgaagaaaaaaaaaacagtgggaacagagttgtcacctacctaacagggctctgagagagccgggaggcccaaagtggctggaagaaggtaaaggaaaaatcctgtcttgggctcaaggtcacagagtggggcccagggggagttcctgctgagggcagggccttgccaggcttcagtctccagtgccaaaggaggaaatgcccaggctgtcagcatttccagatgagagcagaagggagaagcttaaacccaagtcacacatccagcaatggagtccgacagcccagcaccatctgggaactgagaagcacctctgcccggcccccacaccgtgtggaaagtgaggagcacctctgcctggccgccaccccgtctggcaagtgaggagcgcctctgcccggccgctgtgcaaccttccaagtgtgaagtgacagccttgtgtgtgatgttttctgccttccccaagtttgcactttcgacattaaagtttactttttagttaaaagttttaaaaaa

SEQ ID NO: 699546 - DNA, 1946 bp, Homo sapiens
  misc_feature (41)..(41): n is a, c, g, or t
  misc_feature (128)..(128): n is a, c, g, or t
cttcagctgctgtcgttggggtgcttccagccagcctggtnttcccttcctgtggctttgggaggggaaatgagcatgggtcacctgcctgccactgtctgcctcctgcctcctctgaggcctccctntgtcctgcagcccaggtgaccttcagaaagacattggagaaggaagcaaagggagaggagcccgacatcgcagtccccaagttcaaacagaggaagggggagtccgacggggcctatatccaccgcatgcagcaagaggcccagcatgtgctgttcctcagcaagaaccaggccatccggcagccagaggtgcaggcagctcccaaggagaagtctgagcagaaaaaagcaaaaaaagcgttccagaagcggcgactagataaagtccgacggaaaaaggaggaaaaggcggcagacaggctggagcaggagttgctccgagacacggtgaagtttggtgaggttgtcctgcagcccccagagctgactgccaggccccagaggagcgtaagcaaggaccagcctggcaggagatcgcagatgctgcggatgcttctgagccccggtggtgtgtcccagcctctgaccgcctccctggcccgccagcggattgtggaggaggagagagagcgggccgtgcaggcctacagagcgttgaagcagcggcagcagcagctgcacggggagcgaccccacctcacttcccggaagaagccagagccgcagctgtgatggagagacacccggggcctggccacgctctggggcaactggcaccaggagctgctacacctgggtaggagagaggcaggccatgccagcagtgtggggtgaggcctccagctacttgttcacacgttgggcactagtgggtccacatcttgcagggggtgagtgcccgatggactagggccaaggcctggttgacagacggcccgtggggcccggtgtcactcacagctccatctctttgttttgaacgtccattctgagtctcagcccaggtggaccttaggaagggctggatccctgtccctgaacaccaactaccgagacagctgatgaggctggctcagtgtgtgacggaggcccccgggagtcagcagagccgagcgtacagtgcacatcaggcagagcaggccacgggcagggacgacgcatcgggacagggctctgcaggggaccgtgactacaggccagctgtgagtggtcccctacagaggctgcccacccaaggtttggttggggtgaaacatgatgacaacacatacacttaagaaggtgggaaccgggggccgggcgcggtggctcacacctgtaatgccagcactttgggcagctgaggcgagtggatcacctgaggtcaggagttcgaaccagcctggccaacatggtgaaactgcatctctactaaaaatacacgaagaaaaaaaaaacagtgggaacagagttgtcacctacctaacagggctctgagagagccgggaggcccaaagtggctggaagaaggtaaaggaaaaatcctgtcttgggctcaaggtcacagagtggggcccagggggagttcctgctgagggcagggccttgccaggcttcagtctccagtgccaaaggaggaaatgcccaggctgtcagcatttccagatgagagcagaagggagaagcttaaacccaagtcacacatccagcaatggagtccgacagcccagcaccatctgggaactgagaagcacctctgcccggcccccacaccgtgtggaaagtgaggagcacctctgcctggccgccaccccgtctggcaagtgaggagcgcctctgcccggccgctgtgcaaccttccaagtgtgaagtgacagccttgtgtgtgatgttttctgccttccccaagtttgcactttcgacattaaagtttactttttagttaaaagttttaaaaaa

SEQ ID NO: 699547 - DNA, 1739 bp, Homo sapiens
cggcatggggttgtaaggggagcggggacttggaggcagccacctgttcttgggtccctgctctgccacaggggatcccttgtgggtggggcggcctctgcctcctccctgggtggaaagagaatttaggaatctgagtgacatgtgctttcttccccaggttccagaagcggcgactagataaagtccgacggaaaaaggaggaaaaggcggcagacaggctggagcaggagttgctccgagacacggtgaagtttggtgaggttgtcctgcagcccccagagctgactgccaggccccagaggagcgtaagcaaggaccagcctggcaggagatcgcagatgctgcggatgcttctgagccccggtggtgtgtcccagcctctgaccgcctccctggcccgccagcggattgtggaggaggagagagagcgggccgtgcaggcctacagagcgttgaagcagcggcagcagcagctgcacggggagcgaccccacctcacttcccggaagaagccagagccgcagctgtgatggagagacacccggggcctggccacgctctggggcaactggcaccaggagctgctacacctgggtaggagagaggcaggccatgccagcagtgtggggtgaggcctccagctacttgttcacacgttgggcactagtgggtccacatcttgcagggggtgagtgcccgatggactagggccaaggcctggttgacagacggcccgtggggcccggtgtcactcacagctccatctctttgttttgaacgtccattctgagtctcagcccaggtggaccttaggaagggctggatccctgtccctgaacaccaactaccgagacagctgatgaggctggctcagtgtgtgacggaggcccccgggagtcagcagagccgagcgtacagtgcacatcaggcagagcaggccacgggcagggacgacgcatcgggacagggctctgcaggggaccgtgactacaggccagctgtgagtggtcccctacagaggctgcccacccaaggtttggttggggtgaaacatgatgacaacacatacacttaagaaggtgggaaccgggggccgggcgcggtggctcacacctgtaatgccagcactttgggcagctgaggcgagtggatcacctgaggtcaggagttcgaaccagcctggccaacatggtgaaactgcatctctactaaaaatacacgaagaaaaaaaaaacagtgggaacagagttgtcacctacctaacagggctctgagagagccgggaggcccaaagtggctggaagaaggtaaaggaaaaatcctgtcttgggctcaaggtcacagagtggggcccagggggagttcctgctgagggcagggccttgccaggcttcagtctccagtgccaaaggaggaaatgcccaggctgtcagcatttccagatgagagcagaagggagaagcttaaacccaagtcacacatccagcaatggagtccgacagcccagcaccatctgggaactgagaagcacctctgcccggcccccacaccgtgtggaaagtgaggagcacctctgcctggccgccaccccgtctggcaagtgaggagcgcctctgcccggccgctgtgcaaccttccaagtgtgaagtgacagccttgtgtgtgatgttttctgccttccccaagtttgcactttcgacattaaagtttactttttagttaaaagttttaaaaaa

SEQ ID NO: 699548 - DNA, 390 bp, Homo sapiens
gagtcaagaatcctcatgggcttccagtgcctggttcaaggtgtcaggatctatacagcctggcttctctactgcctgaagggaaatgagacaagcaggactaagtggaaacccagctccaagaacagcattcaacccaggatgcagggctgacacagaagagccagggcaactcaccaaaactatgggaactcccacctgatgtgcctttaaaccaggccccctcctgcctcaacctcctcttcacccacacgtaagcaataaaaacccaggctaataagatcgcaagacagagaacatgtgggtggttatttatgtttcatacccttctccattaagttacatgttggcctaagtccttctgaaaataaatgtctgttttaaaacaaa

SEQ ID NO: 699549 - DNA, 1403 bp, Homo sapiens
  misc_feature (4)..(4): n is a, c, g, or t
gcgnaagtggcttctctagggagcctcccggcgtggagatggcgggagctggtcgcggagcagcggtgtccagggtgcaggcgggtcctgggagtccccggcgagcgcgggggcggcagcaagtgcagccgctggggaagcagcgcccagccccgtggcccgggcttcgcagcaaagagaagaagaaagtgaactgcaagcccaagaaccaggacgaacaggagattcctttccggctccgggagattatgaggagccgccaagagatgaaaaacccgatcagtaacaagaagaggaagaaagcagcccaggtgaccttcagaaagacattggagaaggaagcaaagggagaggagcccgacatcgcagtccccaagttcaaacagaggaagggggagtccgacggggcctatatccaccgcatgcagcaagaggcccagcatgtgctgttcctcagcaagaaccaggccatccggcagccagaggtgcaggcagctcccaaggagaagtctgagcagaaaaaagcaaaaaaagcgttccagaagcggcgactagataaagtccgacggaaaaaggaggaaaaggcggcagacaggctggagcaggagttgctccgagacacggtgaagtttggtgaggttgtcctgcagcccccagagctgactgccaggccccagaggagcgtaagcaaggaccagcctggcaggagatcgcagatgctgcggatgcttctgagccccggtggtgtgtcccagcctctgaccgcctccctggcccgccagcggattgtggaggaggagagagagcgggccgtgcaggcctacagagcgttgaagcagcggcagcagcagctgcacggggagcgaccccacctcacttcccggaagaagccagagccgcagctgtgatggagagacacccggggcctggccacgctctggggcaactggcaccaggagctgctacacctgggtaggagagaggcaggccatgccagcagtgtggggtgaggcctccagctacttgttcacacgttgggcactagtgggtccacatcttgcagggggtgagtgcccgatggactagggccaaggcctggttgacagacggcccgtggggcccggtgtcactcacagctccatctctttgttttgaacgtccattctgagtctcagcccaggtggaccttaggaagggctggatccctgtccctgaacaccaactaccgagacagctgatgaggctggctcagtgtgtgacggaggcccccgggagtcagcagagccgagcgtagtgcaaccttccaagtgtgaagtgacagccttgtgtgtgatgttttctgccttccccaagtttgcactttcgacattaaagtttactttttagttaaaagttttaaaaaa

SEQ ID NO: 699550 - DNA, 789 bp, Homo sapiens
acggaggtacataggaacatggtgaacccggcaaggcaacggctgcaaaggtcgatcaacaccatggtcccccaggtacacaggcgttgtcaagtcacgacactctgctgaagctcagcggagctcccaccctcttcggagcgtcctctggaaacgcggggccaacatgtctacgaggactggctcgaccctcgggggaatagtagcggtgaatttgatggcctccaaagttccgtggacgacaacgatgcccttgcctcttgggtcatcgtaggctctcttcgtggaaggaaattataacagacggagatggacaaatgtggagcatagggtgaaacccagcacgagtgacacgagccgctgagccgcatcggggcagaagcgacagcacattaactaggaggaacttcggatcatgcaggccaagctgagatgccacggtgatgcttgtcataacctcagagtggagaggcagaaaccagtgtgcagagagctgggagactgactgctgtttccagaggcgtcgttagtctcaccgcaacagtgatgttcgtagaagcacgagacgcacatgttgatatgctcctggaatatttccctccggctttggcaatttgcaactcccatctgtggacccatcgtgcacaagcccagctgacggggagcacagggacaggtcggctagggtgagagtgccgacctgcagcatgacacagagtgtctgcagctggggacacaagctgcccgggactctaacttccaggaatacgacgtaggcacacaaggagt

SEQ ID NO: 699551 - DNA, 1485 bp, Homo sapiens
  misc_feature (4)..(4): n is a, c, g, or t
gcgnaagtggcttctctagggagcctcccggcgtggagatggcgggagctggtcgcggagcagcggtgtccagggtgcaggcgggtcctgggagtccccggcgagcgcgggggcggcagcaagtgcagccgctggggaagcagcgcccagccccgtggcccgggcttcgcagcaaagagaagaagaaagtgaactgcaagcccaagaaccaggacgaacaggagattcctttccggctccgggagattatgaggagccgccaagagatgaaaaacccgatcagtaacaagaagaggaagaaagcagcccaggtgaccttcagaaagacattggagaaggaagcaaagggagaggagcccgacatcgcagtccccaagttcaaacagaggaagggggagtccgacggggcctatatccaccgcatgcagcaagaggcccagcatgtgctgttcctcagcaagaaccaggccatccggcagccagaggtgcaggcagctcccaaggagaagtctgagcagaaaaaagcaaaaaaagcgttccagaagcggcgactagataaagtccgacggaaaaaggaggaaaaggcggcagacaggctggagcaggagttgctccgagacacggtgaagtttggtgaggttgtcctgcagcccccagagctgactgccaggccccagaggagcgtaagcaaggaccagcctggcaggagatcgcagatgctgcggatgcttctgagccccggtggtgtgtcccagcctctgaccgcctccctggcccgccagcggattgtggaggaggagagagagcgggccgtgcaggcctacagagcgttgaagcagcggcagcagcagctgcacggggagcgaccccacctcacttcccggaagaagccagagccgcagctgtgatggagagacacccggggcctggccacgctctggggcaactggcaccaggagctgctacacctgggtaggagagaggcaggccatgccagcagtgtggggtgaggcctccagctacttgttcacacgttgggcactagtgggtccacatcttgcagggggtgagtgcccgatggactagggccaaggcctggttgacagacggcccgtggggcccggtgtcactcacagctccatctctttgttttgaacgtccattctgagtctcagcccaggtggaccttaggaagggctctgcaggggaccgtgactacaggccagctgtgagtggtcccctacagaggctgcccacccaaggtttggttggggtgaaacatgatgacaacacacacaccgtgtggaaagtgaggagcacctctgcctggccgccaccccgtctggcaagtgaggagcgcctctgcccggccgctgtgcaaccttccaagtgtgaagtgacagccttgtgtgtgatgttttctgccttccccaagtttgcactttcgacattaaagtttactttttagttaaaagttttaaaaaa

SEQ ID NO: 699552 - DNA, 101 bp, Homo sapiens
aaggattcaagctttggtcagccaaagtgctgggattacaggcattgcactgcgcctggccagcaactgtgtttttacaaagctcctggtgactctgacca

SEQ ID NO: 699553 - DNA, 930 bp, Homo sapiens
  misc_feature (4)..(4): n is a, c, g, or t
gcgnaagtggcttctctagggagcctcccggcgtggagatggcgggagctggtcgcggagcagcggtgtccagggtgcaggcgggtcctgggagtccccggcgagcgcgggggcggcagcaagtgcagccgctggggaagcagcgcccagccccgtggcccgggcttcgcagcaaagagaagaagaaagtgaactgcaagcccaagaaccaggacgaacaggagattcctttccggctccgggagattatgaggagccgccaagagatgaaaaacccgatcagtaacaagaagaggaagaaagcagcccaggtgaccttcagaaagacattggagaaggaagcaaagggagaggagcccgacatcgcagtccccaagttcaaacagaggaagggggagtccgacggggcctatatccaccgcatgcagcaagaggcccagcatgtgctgttcctcagcaagaaccaggccatccggcagccagaggtgcaggcagctcccaaggagaagtctgagcagaaaaaagcaaaaaaagcgtgagtggaggcgggagggggaggggtctgccctgggagccggagggaagacagggttcccatgacggccctctgcaggtaccctgcatagccatggggcagcctggattcagggagaccaagccagagccctgggagttggcgagtcggagcatccagctgggagccagtgagggtgtggcctccaggaggctgcggaacctgggaactctgcggagacctcgcttggtccttgctttcacaggaaaagcaccagaaagccctagccctgtgggaatcagccctgagggggtcggtctgagggtgacgtgcccaggggttctgtttccattagaacagaatgtctctcgtccaagagactacaccttcctaatatacgtgccgaattcgtgcag

SEQ ID NO: 699554 - DNA, 1318 bp, Homo sapiens
cgctgtttgtatagctacgtactttaactgctgcgtccaggtcgcgtcgtgtctgtggtggtgcatttctcctcttggctcgtgtttagattttcctgcctgctcttgcgtgcctcgtgtggttgttttgcacttctcgtttgtggttgatgagtagcttcttaccttgtgttgggttcccccccccctcccgctgacgtttttgcggccccactactacgtcctctcttcttagagcccccgtttcctccctttttgtcccagcacacggcgggttgtgtgggctcccgacaacggttcgggggggtgtggggttatacacgtgtgcctctccttttagaggttcttttcttgcgaaattcgaagagtgtgtatatctttatagggatatattggcacagaatctttgtttgtatttataaccctttccaacagaacttttgtaagaaaattccaagaagtctcccaaacttcccgttcagttcacattcactgccccccacaaagcccccttgttcccgggaatttctccttcccggtcgaattggtgcacacataatgctgcgagttttcctggatctttagacactttgggagccctcctgtcgcccccagttgatgtgtgcccgcgtgttcgagacgtgctggtggacccctccgtgtctggggttcttccctctctagagaggttttctactgggactgtgtcccagcttgttgcacacactgcccggtcttccggccccctgtcacccctgcacgcgtgaagttcacttaccctgaaggaccccctcactcatgtgtcacttgccttgggctcccaacctttctggctgcctcctaaggatgtaaagcgtctcaactttcttaaacacgtgtaccacagtgtgcacaatgtccaccaacctcttttatctcgttctctcccacccttcacagtttaagcgtcacttcccaaaccaccaccccttgccaaagctttgtaactgccccacccccacagagtgattctccacggcacgctcagatctctttcctgcctttgccctgcacctgttccccggtacttcctccctttattgtagcacctcacgctccccacgcccatctgtacactccctccacgaggcacgcgatctgatgaattggtttttgaatccccgaaagggtctgcccactggagttgccacgtcactcccggtagatggcgtatgattttgctgaattttataatataaaatgaaaacccaccttaattaccactgatgcttttattgacccttgaccactggcctaaataaaaagactctgactttta

SEQ ID NO: 699555 - DNA, 184 bp, Homo sapiens
ctggaacccttgtgggagctgggagaggcatggcagagggttggatttgttttcagtggacatattagcacattctttgtgggaaatcacctgggacctttctctttatttgcttaaagtgtctaaccattaatgtaggtccagtgtctgatagtctaatgtataacaaaaatgtctggtattt

SEQ ID NO: 699556 - DNA, 861 bp, Homo sapiens
taacaagttatcatgactaagacactggtgacttgctgtcgttctattcccgctcctagggttaccaggtttaaaatacgccgtcttttgccagcttttcatatatggcccttccctgtgatacccaatccggtgcccacttttaacaccgcgcggccttatctgcccccacgcaacgctctttattacacgcacaaggccacccaaggcactaaattcggctttcgcagactgaaagggttttttttggtccgcggggctctttttaactattggccctaattgggggaaccctcccgcgtgtgccagcagggaaacccgtgggggttttcaaaatcttatgtgaagcctccccgcagtttcctcctccatatcatccgggccctccagtgaggtgtgaggtgcaccaccggtcgtctcctccaggggggactcctgtttgggcaactttttcgccccagccacccagtttttcggagggtaaccaggagcaagacacggtgtgcttctcccaagctcgggcccgaccaaccggttgttctcccagccaggtctgtctatggcactattatgggggaacaaaccatcttgtgccagacgggcgtgcccaccactgcaaggagtatttaacccgggacgccccccgagccctattgtgtgttgcccccctgcgggtgtactgtggcggcacgaaaccctccaccgagacactctgggtgggcccccaggggtctccacacctccccctgattgcccttcacctcggcggtgctcttcataccccccttgtcgggcaccacatacaccagggcccccccggttttcaaccccaaaccccccttatcccggaaaacaataaca

SEQ ID NO: 699557 - DNA, 145 bp, Homo sapiens
attaatgaatgattgattcgtgctctgaaaaatgttgtctttacgctaagttaataacacgcaacatactgctctgtatataggtggaatctgtcatcatagtgatatttcagagcttctgctcctctcaaaatcacattaagca

SEQ ID NO: 699558 - DNA, 155 bp, Homo sapiens
ccacagctccaaagcggtttattacaggcttgacgcaccgcgccggccggtcattcattcttgcaaaagcatttatagagcacctactgtgtgctcacagtaaagaaacgtgatcttatcccagtagaggtagatattctgaacaagaataattc

SEQ ID NO: 699559 - DNA, 916 bp, Homo sapiens
gccttgtccttgtgaaacaccctcggttggtaattcagtccgtactctcctctcctctcttcttgttcgaacatgtgtgcgtggactagaatgcagtacgagtcgttcctaggcacttcactacggatacacagtcgcgtgcgcttgctccgagacccccgaggaaaaggtgcttgcgtctcttcctactctctgccgactgaattcgactatcaagtttccatctggaggagagagcttgaaaattaaatatcgctatgtggacggtggaaccccgttctagctgttgcgcccatagtcccagatcttggccactagatggtaattcgtgagcacattcttgtagtgtttgtcccctctcaatacgattcttggaaaaagacgaatcaggatatactctgcaaggaggcatcgtatgcaacgtggcttgagtcgacaagcgcaacagtagaatcaagcattgtacctctttgcaaccgtgcatcgactaccaaatggatgcaacaagaggaatagcaacatttctcgattgcgatactttgagtatccgtctcctttgttttgaccctaggtatgtcctagacatgtcccagtttaccacctagaatgctggtctgtttcccagatttacgtcgttagctttgaaccaggcagttttacacttaaaacatgagtttacggttccaagattttacgactcgttcaacagacgtacgcttgtgaaccatcttggatgagagttgagtagaggacgttaactttatcggtaagctttaagcttgagtgatttcacataataaattgcatttgtgtgcgggttctcttattaaccaagattgaaagttgtctaggttctttgcttaaccaatccacacgtcatttgcattcgtcgttcctaatttcacaagtattgtcg

SEQ ID NO: 699560 - DNA, 958 bp, Homo sapiens
agcggatagccacgcgcccccgacgaccgcccgacgtgcatacccgatatcctattaggtatccaagtaccaatataggcaactactaaaggatcagctgagtttataatacttactaaaggacagaacatgacctccgccagaaaaaatattacagtatgttgtgggtaagatgctgttggtcatggggctgtagcctaacagtaagatgtagatagaggggtacttgagcagatatatcgtgtacacgaagtaaataatctgagtgattattaaagaagaacgtggagatgatatgaagatagcacgcaggcgtaatctattgaaaaaccagataatctccaatatggaaaatcagcaaatcttataccaataatgatatttgtcaggtcaccaatgctaatacggatatggctgattctgttaactgggtcgtcaaggcatatgaagtccggacttaatagaatgctgatcgttagcaaagacttgaggtatttaacagcaatcgctagaggatatgatggcagtctgaaacttgaattaacgtaagaatgcgtgacgttatggaacaagagcaatggatgaagtatgattatagaagaaggttggatgcattggtgatgagatttggatgctgtagaacgttcttattcggatgcggaagatctgacactgaattacagccggtgttcatactgatcaaaaccaaggatggagattatggatgcatgaattcggcatgtgagagactaatggatttctcgtattcgcatcattacgacattttcgtaaattaccaattttttggggacttcgggtattcttacttttcaaactttgagataacagctttaggtttatttcactttcttgaaggagagtttcattactggatactctcttttcacactttgctgatactgatggagaaatcggttctttggtctcaattttggtg

SEQ ID NO: 699561 - DNA, 786 bp, Homo sapiens
  misc_feature (247)..(247): n is a, c, g, or t
ctccgtgtcatgcattgccaagaaaacattctcttgagtcaccttctgtgcccagcatatgtcgtaggcacctagcaacctaaaataatgttggtgggagggtctctgaacgaccaagtgtcaattaagatgccttcgacttgcccagtgcctgtcaaccgtgctgcctgtcggagaggaatcatgtacgagacggtgggaacacgatctgtgtgtcgatcgagggtaacatcttgcacgtgacatncgccgaaacaatgaatggtccccttatccgactggtgtctacgacccaatcgtgcatatacatggcctcagtgaacgtggagttcgccgtacttgtgcctgaggagtgcatggattctcccagtgtactaattgcttgtcccattgcacgatgctggtattactgaaagagcgacatcctgcctagaacatgtgccgtacttccggacgcgtcatgggaccttgttccttcttgcttgatggttcttaagcgcgttcagggggaatgctatataactatatgatcaacgagttatcgtctaaatgagggagtgtgtgaaggtgctctccactctactgtacgcggtgtagggctggggtgtgaagtattggatgagtcatgttcttatggtgagcctaccccattattaagtgcctatcatctgttgacttgagattccctaggtgtgacttgagaactaaaagacgaaatgccagaccccctaagatttggagaacgccgggacccccacttagggcaacaaacaacacttagcaatc

SEQ ID NO: 699562 - DNA, 1037 bp, Homo sapiens
  misc_feature (40)..(40): n is a, c, g, or t
  misc_feature (401)..(401): n is a, c, g, or t
  misc_feature (466)..(466): n is a, c, g, or t
  misc_feature (1015)..(1015): n is a, c, g, or t
tgctgcgcctgctctagggctctggagagtgactaacaancagccctttgctttctaagaagttgatctacttccagctgcaccgggccctctagatgatcgtggagtcccgtggtagccacatggtcgagatgacgttgcagtgggacctcaatgcctggaccaagagtgccgaggccttcggtcgagattgtggcagagcgtcctggcactaagctcatcaggccctggcacccatgggcccctcgcaagagccccagggcccctggagcaagcagggctctggcagcagccggcccatggagcgtgcaggagggctatgggctttgggtctggcagatgatccctactcacagtgcggagccccatgtgtcaggtgtcgagacggtcccgctcaggtnagggcgaggtgagcggccttatgcgcaaggtgccacgagtgagccttgaacgcctggacctgganctcacagctgacagccagccacccgtctatcaaggtacttcccaggcagtaccactgaggactacaacctatatatgttattagaacgtggctgctgcctgctgcagctaccggccagccagtggactgcgcctgcaggaacccctggtgccccacccctggctggcatggccattgtcaaggaggaggagactggaggctgccattggagcccctcctactagccactagagggccctgagaccaaacctgtgcttataggctactatagcggaagggtacctggtgctagagggtccccgcctggcctacaacctaagtggcagcaccagctcagtggcttggaaggtaggtaggctacctgagtggtacctacaggccccaggtggtggcccgggaacccttggatgacagttgccaccattttgccggtgtctgccagaagccaggcgatactggtaatgtgcaaccagtgtgagttaggtaaccacctggacttgtcacctgaccggccctgcaggatgtaccaggtgaggagtggagctgcancaactcttgccatgtgcaccct

SEQ ID NO: 699563 - DNA, 196 bp, Homo sapiens
gggtcagagggcaagcgatacacagtgtactgaggatggggcgtgaaggcatcccagtgccagtgacctgagaagcagtgcacccaagtgaagggatgcttagctctgacttagaccaggatattcacacgaagaactggccaaagatggaatccaagggacctgcagcagctcttcaaggatgttctagggctcc

SEQ ID NO: 699564 - DNA, 233 bp, Homo sapiens
taccaccagaaactttctaacaaagtcccaggcttgacaatggaaatgttcacactataggaaactgcagtgcagttccttcgaatgtgccctgactcacactactacaaccctggtcatcacattcccaaggccccaggctccttgccccagcattgtcctcaggcacgtacctgtcacaatgggagcatttaaaaggcttggcccccggtgtgctttcggaaggtgcctgg

SEQ ID NO: 699565 - DNA, 608 bp, Homo sapiens
  misc_feature (34)..(34): n is a, c, g, or t
  misc_feature (294)..(294): n is a, c, g, or t
aaaaaggtaacagttactatatttaccaatttanggaaattattaaatttttgaaagatactagttttaattttggttcattttttagagacagggtctcgctgtgttgcccaagctagagtgcagcggcccgattatagctcactgcagcctctaactcccggactcaagggatcctcccgcctcatcctcctaactgggaccacaggcgcatgtcaccacatctggctgattttaaaatttttttgtggagacagtcttgctgtgttgcccaggctggttgtgaactcttgnctcaggcagtcctcatgcctcagcctcccaaagtgctgagattacaggcatgagccaccgcacccagcccaaataaagttttaagaaattacttggccaggcatagtggggcctttgtagaaaaacatagcttttctatgagaagatgatcaatattttcttttcttttcctttgaatttggaattaccattttggaactgttgtcaacaatgcataataatatatcagaatgcttcctagtatattattggagaaagaacaaacaaaagtttaaattgatataaaatgcatataatggaacaagcaaccctgc

SEQ ID NO: 699566 - DNA, 328 bp, Homo sapiens
  misc_feature (28)..(28): n is a, c, g, or t
  misc_feature (34)..(34): n is a, c, g, or t
  misc_feature (78)..(78): n is a, c, g, or t
  misc_feature (123)..(123): n is a, c, g, or t
  misc_feature (150)..(150): n is a, c, g, or t
  misc_feature (204)..(204): n is a, c, g, or t
  misc_feature (209)..(209): n is a, c, g, or t
  misc_feature (213)..(213): n is a, c, g, or t
  misc_feature (228)..(228): n is a, c, g, or t
  misc_feature (241)..(241): n is a, c, g, or t
  misc_feature (275)..(275): n is a, c, g, or t
  misc_feature (284)..(284): n is a, c, g, or t
  misc_feature (294)..(294): n is a, c, g, or t
  misc_feature (299)..(299): n is a, c, g, or t
  misc_feature (315)..(315): n is a, c, g, or t
caacagccggggtgatgttgctgaaccnggaggncatgcgccagtccccgctctacagccgcctgctggagccggcgnaagtgcagcagctggccgacaagtaccacttccgcggccacctcngggaccaggacttcttcaccatgatcngcatggagcaccccaagctcttccatgtgctggactgtaccccgaaccggcagntgtgnaccnggtggagggaccatnggtacagtgacgncttcgaggcctatttgaggtgtgagggccacgtnaagatctancacgggactngcaanactggcatcccggggnagtagggggtccc

SEQ ID NO: 699567 - DNA, 838 bp, Homo sapiens
  misc_feature (526)..(526): n is a, c, g, or t
gaagttcacacggtggcagccagcgtaatcaggtcgctgtgtcgtgcttccttctacatgccaatatgaagaggcctcacgttatcagagaggctaacgttagaacgcattgaccgtgcccttaccgacggtgcagtgacatactgccaccataataggctctcgaggaagagtctacctccgtatacatctcatgacaagtgcgtgtcctaaagatagccgtgagtttccacatatcgaaagtctatatggtagaatgatccccaagagtggttccctcacatagtagcctccctattttagtgggagcgctcatatcattaaggggaagcgcgtggagcatatagggtaaagattaagtaggtgctttcgccatgcattatttaaaatcaagtcaaggtacgtaagccttgtacaaggtgctgaggacggtgatagcatgatgaactagcaaaaagaggcacttgtgacatccgtaactcgccgtgtattattttaaggccaattcaaaaagtgtgtggaaccnttaatgggcaaacaaggggacggttggggggcctgtgtggcaaaaaagcggtgagaaatctaaagcacaacgttcgcgcgcaaaagcaggaagttcacaagaaagcgtgttactgcgcaaggagagctttaacaacgaggggtgactctgaaaggccatcccgagttgtttggtcctaagaagggttgtttgtggacttgcccagaagaattccttctgtgggtgtgcgagagttgtccctcaagtgttagacaagagcggccattgtggtccagaagctgggcacagagaacaaagctgggtagcttaatt

SEQ ID NO: 699568 - DNA, 972 bp, Homo sapiens
catcttcgctgagcgttatgaagtcatgggaagatgatcaagttccaaagtttcactatggtactcatactcaacgtgcaagttagttcttgcatggctgctatgaatagaacccgttgtagcaacttatttcctaaatttgcacaggaggcgagttgatcatgcagatcgaactttttcatcaatttccagagcttggcgaaacagtcagcgtgatacctctgatattaaggagttgatccctgaattgtattatctccctgagatgtctgtcaacttcaataattataatcttggagtgatggatgatgggacagctagtgtctgatgtcagtaacttcctccttgggccaaaacctcagaagaattggtctcacataaacagattggccctggcagagtgaattgtttcctgccagcgtttcaccaatggagttgatctcattgtgggctataaacgagcaaggaccagaagctgtcggagccctcaatgtgtctatgtacgtagagctatgaaggagctgtcaatctgaatgcaataactgatcctgtgttgagagaggctgttgaagctcaaatccgaagtttggacagactccttctcaatactcatagagcccatcctcccagagattctgcatgcaagtgtatctcctcctgagagtccattgatgttcacagacaaggccaagaaggagttatcatggtcctcagtttccctcactcacggttactcacgggtggcgcaacaccagctgctcggactcccgcgggaatcacggcacgtacaggtatttgggggaaaacagggaaacctccggcacaaggggcgaacagaccgcatcacggcgggaaaagacctacagcgacacgaggtagacggaaatagcctacaagatacaaggacccggggactacaccactcttggcgggaaaagataacaccatacgggggggacacgctgaaaaaaa

SEQ ID NO: 699569 - DNA, 353 bp, Homo sapiens
attgtgcagtgataaattcgtgaggactgtctttaccgtgtgcaacacatggatgtcagacattagaggactaccggggcatgatggacactctaccagaggataagccaggatctgcagctctccatcctccccggtagctccagctgcagggctgagactgcttcctatcccctcagctctgatctctgccactacctctcttgtgtgagaaagtggaacactcctggtatgccatgcatttcataatgggaggaggctcctgtaaggaacggtgtgcgcctcgtttacagttggtgggccctccagcatggtttctgactctgtcagcccccatgcgtgaattgccaggt

SEQ ID NO: 699570 - DNA, 398 bp, Homo sapiens
ctactactactaaattcgcggaagtacgaccacagggacaggatgccaggacattcacatatcgctaagttccgcccctcaaacacagacgagctcatgtagtaccagtatcatcagaaccagctacactcggacatcttcagcttaatatttggtgggagagccgggttggcgaggaatacgaggaaggagctcagctttagcaaggtggagctgaaggtgaagacggctagggatgacagtgattcgctgcgctcttctgcccgaggctgagtgctctctcaaagtcaaactcaaatagtttcattggcatgaccattcatgtacagtcagtgttgtcaaagacaaaacaacaagcaacaatgaagctaactgggacggaacgtcgacgcggccgg

SEQ ID NO: 699571 - DNA, 196 bp, Homo sapiens
  misc_feature (117)..(117): n is a, c, g, or t
accggtgattccagacgcgagacccaaactgacttgcttctagaagaggggcgagcccggcgcaaggtctttcacgtagctaagtcatcgttgcttccggcttcttacctgttctcnccctttgtaaaccggttacctccatgaaaacccaggctctccttccaacagtggttctcaatggaggctcacatgtgct

SEQ ID NO: 699572 - DNA, 363 bp, Homo sapiens
tggtgggagacagccttccccagttgcatatggtacactattcgctcaagctgcctaagcataacatggtaacagatgctgccgcctagcgaggaggtgcaggttcccttggagaggtaattaatcctgacggcaaagtagccggacttgtttaatgctacaggcttaaacattagaggaagctaccctaatgtgtgctgtgggtttaaactgacaaaggattccttaacagaaaaacaccaagatgttagcagtgtagatatttcagacaactgtgcttaacctagtggctgccactttgtaggtgtgctcttatttgattgttaaagaaataataacaaagatttcaaggtcctcccacca

SEQ ID NO: 699573 - DNA, 333 bp, Homo sapiens
  misc_feature (61)..(61): n is a, c, g, or t
  misc_feature (63)..(63): n is a, c, g, or t
tggtcatgcctgtaatcccagcactattgggaggcgaggcaggcggatcgctgaggtcagnanttcaagaccagcctggcatcatggtgaaaccctgtctctactaaaaatacaaaaactagccgggcatggtggtgggcaactgtaatcccagctactcgggaggctaaggcaagagaattgcttgaacccagaggcggaggttgcagtgagctgaaatcgtgccactgcactccagcctgggcaacaaaagcgaaactccgtctcaaataaaaaaataaagtctagagcagaagttctccctgtacagtgttacctacccacaatcacctg

SEQ ID NO: 699574 - DNA, 192 bp, Homo sapiens
  misc_feature (33)..(33): n is a, c, g, or t
cacgcgtccgcgctacattgtcctggccaaggnacttcgagaaagcatacaagaccgtgatcaagaaagatgaacaggaacatgaattttacaagtgacctcctccccacacttccccaggcacctgtcccaaaggctagttttctctttacccaggattggtttagtcaataaatggacgtgattggatct

SEQ ID NO: 699575 - DNA, 280 bp, Homo sapiens
agtttttgccccaggttgtgtgctggaatcggggggtggctttcctgccccccatggggagcgccaggaaaggagggtcatggaggatgttggggctttgaccccaggagtggggtggagggcggagccttttgggggccctgccttcccaaaaattccgcgtgctgggaaggcttttggggtcccctgagggttttccagggtggctggagagcccaaacgcgccagggagccccctttgtgctcctcagagttcaataaatgttgtggcccctcctca

SEQ ID NO: 699576 - DNA, 271 bp, Homo sapiens
tgaggtgaggatacaggagagagaggtccaggtcggcgatggtgcgagtggaaggagatcgaagagcggagagaatctacgtctgctatttatactaagggacctcagagtatttttcctccttcacctccctttcctttcgttttatttaatgaactcctttttcttttttttttggacagagttttggctctggtggctaagggcgggagtgcaatgggtggcaatctcgggctcattggcaacctcggggtaccggagctcggaatcc

SEQ ID NO: 699577 - DNA, 371 bp, Homo sapiens
  misc_feature (71)..(71): n is a, c, g, or t
  misc_feature (126)..(126): n is a, c, g, or t
  misc_feature (135)..(135): n is a, c, g, or t
  misc_feature (182)..(182): n is a, c, g, or t
  misc_feature (191)..(191): n is a, c, g, or t
  misc_feature (216)..(216): n is a, c, g, or t
  misc_feature (324)..(324): n is a, c, g, or t
  misc_feature (332)..(332): n is a, c, g, or t
  misc_feature (368)..(368): n is a, c, g, or t
cccccaatgaccaaattccactgatgcccccaattaaatgattgcctgtttattagaaccatgagaatccnttattagtattccaccatgtttccacttgcctctgtacctaatatagtctctccnaatggaggnagttagatagatggaataagttctagtagttgatagtacaatggggnaattatacntaacaataattcactgtatattccnaaatagctagaagagaattgtaatgattccaacacaaaaaagatgaatgttagtttggatgcatatcccaattaccccgatttgatcattacacattatatacacgtntcaaaatntcacatgtactacaaaaatgtgtataactgtaatanatg

SEQ ID NO: 699578 - DNA, 393 bp, Homo sapiens
agaaacaagggcttaatggtaaagatgacatatgactatattaagaaactgaatggccctttgctcacaaacagtaacccacacagcattgctactgtggcatgcccactgctctgcactgacctcatggagcagagaacctccttcagacacctcacgcaccccctgaggagctaatgtttcttcccaacatggaaaaattctggaaagacggcctaattctttcacaggttgtcactttctcaattttggaaaggaatatgcgcccaaccctttaatctcccgaggcaaagtgtggcgaaggagggtctttggggttccagctggttcccagcagaggtggtgaaagtcaacaacagggcactggacacacatagaaatgtgacccacagc

SEQ ID NO: 699579 - DNA, 149 bp, Homo sapiens
cctggccgagttttctccgattcggagtggactgcccctccttactcatgttctgaccctctgtgcactggatcctcggcgtagcggacggacacacctcatggactgagtgccagagccccctgtggcccattccccattcatttttc

SEQ ID NO: 699580 - DNA, 191 bp, Homo sapiens
gtatttagaggatccccgtgggacacgggggcggtagtcgccataacgtggtgtagccagctccctcgtcgcacgggcagagcccaagatgacgcgactgcagcgatgcctgcgactgggtcagctccgagcacgggccagattgccagcgtgaccctccccagacgccgggccctcttccccagcccagt

SEQ ID NO: 699581 - DNA, 174 bp, Homo sapiens
  misc_feature (10)..(10): n is a, c, g, or t
ttcacatgtnggccaggccggctcaaactcctgacctcaggtgatccgcctgcctcagcctccaatagtgctgggattacagccgtgagtcaccgcgcccggctgccttgaccatttttttttttcttttttttttttttggaaaaagattctcattttggtggcccgggtaaa

SEQ ID NO: 699582 - DNA, 278 bp, Homo sapiens
  misc_feature (22)..(22): n is a, c, g, or t
tatctgtcagataacacacaantatagttatttaaagaaacatgggaatagtagaaatgactgcagtgcagcagaaaataatggtgccactgttcgctatttgagattggagtatttctctacaattcctgatgacaatgttttaggttgtttttgtagtagaagaatgcaggcgagcgttgttcacaaaagtaaatgtacagtgatgtagaagtacaataaaatgatggccagagcagtggtcgtcccaactaataaatattagaaggacgtgcatg

SEQ ID NO: 699583 - DNA, 897 bp, Homo sapiens
acgtctatggtgggtgcccctactagtagtatatcacgctctacctaggtgaaaatcgggatcttagctgccccggtgatctgactttgcgtctcatttttataccccccttgtaactgctgggtttccgcgggacgccatcttgtatgcccgaaattatattctgcggtgtatataccgctaactaatatgtggggaaaaccaggtcaacaatctctgggacacgcgtgtccgtggcccccagggacgttttttcaaggcgccaaagcctggcgacattgctcccgcggggcacaccgggtattcccggtttcggggaaccccgattcttttcgcatggtacgaggaaacaatcacatgtctcccttatgcgggcactttcacaatgccgctctccctgcgcccaagggtatcaaaatggcatcagcggctctgccctaataccctgggtatactcctcacatcaggcgtaaattactctcccaatggcgtgtgtaaccccgcgcatgctagtcgcggcagcacacaggtgttcttaaacccgccccaccaaggatgagcgccccgctgttcaaatggaacaggaagggcagaaccacgcgctgtcctctaaaagggggcaacatgaatgaaatcactcttgcttgcatagcgggcaccgcccgtggaagtcacttccttcatcaagcctggcccccacacgtgctgtcgcaaccccgagagttccgaatcccggcgctttggagaatcctgattctttcagcacaagcgactcccccaggttgggctggagatcaagaaatcatagcgccacgccctctttcagtgccagccgttgtctcaacctttcccggccacaccattaagagcggaacaaaactctttctctacaaaaca

SEQ ID NO: 699584 - DNA, 839 bp, Homo sapiens
ctccttgatcaactcaaatgtgggtttgtgaccatgatctgtgcagtgctcaattgaagatgccaaatattagttatgctgtggaaagaacttaaagagcagctgggcgaggatattgattccatgagtgaagggaatggtttgttctcaagaggaaagctgggtgttgcttgatgtacctaccgcatcagtaacagaagatacaggagaaatggcatgattcacgacgctggcagctctctgtgggcacagatgcaagcagagactggaaggaccacgggaaggatatggacggcttcaggggacagcgggaaggcagtcgaggcttcaggggacgaagcgggacggaaacagttaagattctagaaggacaaggggtaaggcagtatgaggcccgagagggacagggatcaggaggtgggaataaaagtaacagatcccaaaaaaaggcagaagcggagtttcagtaaagcatttggtcaataattagaaatagaagatttatatagcaaaaagagaatgatgtcggaatatagaactgagcattattttctccaatgcaaagttgaaaagcacattgtgcctccttttgaccactggggccaagtccctgtctctttcagacacagacagcttcatttacattaatttcatctgctcattatcatttgatgactttaatgggtacctgcatcagttttcctttggaaggggtgtgatccctgaccttccatctaagtctatccggggattgaagataaaccggagttttgcgcaacaggggggccggggataccaagggcgaaaaggggtccgaaaaaacggggggcacccgcggc

SEQ ID NO: 699585 - DNA, 601 bp, Homo sapiens
ggtagatgattcgtggccgcgagggagctagtcgggaagggaagatgggattcccgtgttgcactagtgatcatcgatgtgtcactcggattatgtgcttgttctctcatctagcaatctaagaatgagggcccctgcgagaggtttatccgatgaagtatcttgcatgcagaattgtcacgcatcgcgcagtctcagaagggctcgtcccacaggtgtctcatgcaacaaggacggtaccaaagcaagtctcgaactatcacacattatgacgcggatgttgtggtggtggatggtgttcgactcctcattttgctgtctggcacttcatataaagacctgatgccacatgattgtggctagagcagcgcttcacgggtctgtgcatcggaccagtgtcccctaaggaagtacgttgatcatatcatctttggtacagttattcaggaaggtgaaaacaagcaatgtggctacgagaggctgacctttggagcttgcttctctgacaagactcctgctcacactgtcaccatggccttgtatctctgccaaccaagccatgaccacaggttgttggctcgctttgcttctggccagtgtg

SEQ ID NO: 699586 - DNA, 716 bp, Homo sapiens
  misc_feature (133)..(133): n is a, c, g, or t
  misc_feature (142)..(142): n is a, c, g, or t
  misc_feature (144)..(144): n is a, c, g, or t
  misc_feature (161)..(161): n is a, c, g, or t
  misc_feature (163)..(164): n is a, c, g, or t
  misc_feature (166)..(166): n is a, c, g, or t
  misc_feature (168)..(168): n is a, c, g, or t
  misc_feature (171)..(171): n is a, c, g, or t
  misc_feature (179)..(179): n is a, c, g, or t
  misc_feature (184)..(184): n is a, c, g, or t
  misc_feature (188)..(188): n is a, c, g, or t
  misc_feature (193)..(193): n is a, c, g, or t
  misc_feature (201)..(201): n is a, c, g, or t
  misc_feature (207)..(207): n is a, c, g, or t
  misc_feature (229)..(229): n is a, c, g, or t
  misc_feature (231)..(233): n is a, c, g, or t
  misc_feature (239)..(239): n is a, c, g, or t
  misc_feature (244)..(244): n is a, c, g, or t
  misc_feature (251)..(252): n is a, c, g, or t
  misc_feature (267)..(268): n is a, c, g, or t
  misc_feature (280)..(280): n is a, c, g, or t
  misc_feature (300)..(300): n is a, c, g, or t
  misc_feature (305)..(305): n is a, c, g, or t
  misc_feature (310)..(310): n is a, c, g, or t
  misc_feature (312)..(313): n is a, c, g, or t
  misc_feature (325)..(325): n is a, c, g, or t
  misc_feature (329)..(329): n is a, c, g, or t
  misc_feature (350)..(350): n is a, c, g, or t
  misc_feature (391)..(391): n is a, c, g, or t
  misc_feature (396)..(396): n is a, c, g, or t
  misc_feature (408)..(409): n is a, c, g, or t
  misc_feature (430)..(430): n is a, c, g, or t
  misc_feature (441)..(441): n is a, c, g, or t
  misc_feature (445)..(445): n is a, c, g, or t
  misc_feature (452)..(452): n is a, c, g, or t
  misc_feature (456)..(457): n is a, c, g, or t
  misc_feature (461)..(462): n is a, c, g, or t
  misc_feature (476)..(476): n is a, c, g, or t
  misc_feature (479)..(479): n is a, c, g, or t
  misc_feature (481)..(481): n is a, c, g, or t
  misc_feature (484)..(485): n is a, c, g, or t
  misc_feature (501)..(501): n is a, c, g, or t
  misc_feature (506)..(506): n is a, c, g, or t
  misc_feature (508)..(508): n is a, c, g, or t
  misc_feature (510)..(510): n is a, c, g, or t
  misc_feature (520)..(520): n is a, c, g, or t
  misc_feature (546)..(546): n is a, c, g, or t
  misc_feature (549)..(549): n is a, c, g, or t
  misc_feature (566)..(566): n is a, c, g, or t
  misc_feature (701)..(701): n is a, c, g, or t
ctggatttggactaaagaaaaaaggaaaggctagcagtcatccaaaagaatcatgagacagactttgccttgtatctacttttgggggggccttttgccctttgggatgctgtgtgcatcctccaccaccaantgcactgtnanccatgaagttgctaaantnnancnacntaaaaatnaactnaagnacccnataaatcnacccanaaacaaaaaaatataaaacctnannnaaaaanaacanaaaaaannacaagccgcaaactnnaaaaggaaaaanaaacaaaaaaacttggatgnaagantaaanannatctaaaaactngaanaaaaattgtacaaaaaaaatnaaaaataaaaaattataaaactccaacacaataaacaaacnaaacnttctaaaaaaannttaaccttaatgaacgaaatnaactaaactcnaacnaataaanaaannaaannaaaaaaaaaaaaanaancnctnnatcaaaaaaaaaaatnaaaanananaaaaactaanaaaaaatgaaataacataaacaaaantangaaaacaggaaacaacnaggaaaatctccaagagcttctattatcaaacaataaaattcaagcgctaaaaagtgaagaactggatatctttgccaattcatctttaaaaaaattagagttgtcatcgaatcaaattaaagagttttctccanggtgttttcacgcaa

SEQ ID NO: 699587 - DNA, 228 bp, Homo sapiens
  misc_feature (191)..(191): n is a, c, g, or t
tgtatttttacttttcaccatgtcggtcaggctggtctcaaactcctgacctcaggtgatctgcccacctcagcctcccaaagtgccgggattacaggcatgagccaccgtgcccagcccttaattgctgtctgaacctttttttttttttcaacctgacctgaggcatcaattcaggcacagtataactntgaccagtaagcggaagctaacccaaatgctttccag

SEQ ID NO: 699588 - DNA, 383 bp, Homo sapiens
agaagcttcatgatgaaactgacagggtgaccgggccaagccgaatccctgacatcaaggataggcaagagatgccctacatggatgctgtggagcatgagattcagcggatcatcacactcgcgccctacaacctgtcccatgaagcaacccgagacaccatcctcagaggaaaccttaaccctaagggcacagtaggcgtgccaactgtggactctgtactgtatgacagaccaagaatttcctgatccaggtttaagccagaacacttcctgaatgacaatggaaagttcaagtacagtgactatttcaagccatttgccacagggtgcgccattttgcagcaattgtcggcctctcgatgactcacaggatagcgcctt

SEQ ID NO: 699589 - DNA, 341 bp, Homo sapiens
aaaaaaagggtttttttaaaaagttttatagggtaaacaaacaaattggccccctttgattttctgggaatacaaaactcgtgatgcaaagctgaatttgggtgtccaaaacttttgacagtggggcttttttaggggggggggtttttttaaaaaaagaattttttgtgaaccatccgggattaataaagatttcctttaaggcaaaggctggccaaaatgctgctgttattttctgcctaaaacaaacagtataagggggtttgtttctaaaattcctacccccagtttctttgggccaagtttccacatccccttgcgtatgggaggggggtgaaaag

SEQ ID NO: 699590 - DNA, 427 bp, Homo sapiens
gaatgaggaggaatgaaaagaaaggaaacgtaagtaagagaaagagagaaaaggaggaacagaaaagacagggagataagaaaaagacagaatatggagaaacaaagacatgaaagataagaatatcaaggatggaaagagaggatatagagaaactgacagagacaaacagttaagaagagaggagacaggctaaggcaaataaagagaaaactaaagaaaaagagaatggaaacgagtaaaaaactcaagagagaagaggagaagggtgaaagaaggaggaagaagaaagagcgatcagaggatcaatgtctcggaatcacacacactatctctctctctatatctctctctctctctctctctctctctctctctatctctctctctctcaatctctctctcctagtgccgaattcctgcagcc

SEQ ID NO: 699591 - DNA, 588 bp, Homo sapiens
  misc_feature (40)..(40): n is a, c, g, or t
  misc_feature (131)..(131): n is a, c, g, or t
atgtatattcatctcatcatttcatctcaccatttcattncatcatctcatctcatttcatttcatcattcatctcatcatctcatcattcatctcatcatttcatatcattttatctcatctatcatttnatctcatttcatctcatctcattccatcattacatctcatttcatctcattttatgtcatcatttcatgtcataccatcacatctcatctcatcatttcatctcatcatttcatcatttcatctcatttcaactcattgcatctcagctcatttccatttcattattccatttcaccatttcattcattatgtcatttcatctcatcatatttcatctcatctcatcatttcatctcattttatctcatctcatcatttcatcatttcatctcatttcttctcatctcatcatttccatttcattttcatttcattatttcatcatttcattattttatttcatctcatttcactatttcatttcattatgtcatttcatttcatctcattacatttcatctaatttcatttcacctcatttcatctcatcatttcctttctctcatcatttcatct

SEQ ID NO: 699592 - DNA, 260 bp, Homo sapiens
  misc_feature (40)..(40): n is a, c, g, or t
  misc_feature (131)..(131): n is a, c, g, or t
atgtatattcatctcatcatttcatctcaccatttcattncatcatctcatctcatttcatttcatcattcatctcatcatctcatcattcatctcatcatttcatatcattttatctcatctatcatttnatctcatttcatctcatctcattccatcattacatctcatttcatctcattttatgtcatcatttcatgtcattttatttttacgttgttagatatggggagtagtgtgattgaggtatccgtgacggg

SEQ ID NO: 699593 - DNA, 100 bp, Homo sapiens
acagcgacgactctgtcttaaaaataataaattgtccatctgtctcctgttatacatgttgtatatatgctgctttgcagttgcattgtccacatccatt

SEQ ID NO: 699594 - DNA, 2010 bp, Homo sapiens
caagaagtggcgaagttacctttgagggtatttgagtagcggcggtgtgtcaggggctaaagaggaggacgaagaaaagcagagcaagggaacccagggcaacaggagtagttcactccgcgagaggccgtccacgagacccccgcgcgcaggcatgagccccgccccccacgcatgagccccgccccccgctgttgcttggagaggggcgggacctggagagaggctgctccgtgaccccaccatgtcctctcctaccacgagttccctggatacccccctgcctggaaatggcccccctcagcctggcgccccttcttcttcacccactgtaaaggaggagggtccggagccgtggcccgggggtccggaccctgatgtcccaggcactgatgaggccagctcagcctgcagcacagactgggtcatcccagatcccgaagaggaaccagagcgcaagcgaaagaagggcccagccccgaagatgctgggccacgagctttgccgtgtctgtggggacaaggcctccggcttccactacaacgtgctcagctgcgaaggctgcaagggcttcttccggcgcagtgtggtccgtggtggggccaggcgctatgcctgccggggtggcggaacctgccagatggacgctttcatgcggcgcaagtgccagcagtgccggctgcgcaagtgcaaggaggcagggatgagggagcagtgcgtcctttctgaagaacagatccggaagaagaagattcggaaacaacagcagcaggagtcacagtcacagtcgcagtcacctgtggggccgcagggcagcagcagctcagcctctgggcctggggcttcccctggtggatctgaggcaggcagccagggctccggggaaggcgagggtgtccagctaacagcggctcaagaactaatgatccagcagttggtggcggcccaactgcagtgcaacaaacgctccttctccgaccagcccaaagtcacgccctggcccctgggcgcagacccccagtcccgagatgcccgccagcaacgctttgcccacttcacggagctggccatcatctcagtccaggagatcgtggacttcgctaagcaagtgcctggtttcctgcagctgggccgggaggaccagatcgccctcctgaaggcatccactatcgagatcatgctgctagagacagccaggcgctacaaccacgagacagagtgtatcaccttcttgaaggacttcacctacagcaaggacgacttccaccgtgcaggcctgcaggtggagttcatcaaccccatcttcgagttctcgcgggccatgcggcggctgggcctggacgacgctgagtacgccctgctcatcgccatcaacatcttctcggccgaccggcccaacgtgcaggagccgggccgcgtggaggcgttgcagcagccctacgtggaggcgctgctgtcctacacgcgcatcaagaggccgcaggaccagctgcgcttcccgcgcatgctcatgaagctggtgagcctgcgcacgctgagctctgtgcactcggagcaggtcttcgccttgcggctccaggacaagaagctgccgcctctgctgtcggagatctgggacgtccacgagtgaggggctggccacccagccccacagccttgcctgaccaccctccagcagatagacgccggcaccccttcctcttcctagggtggaaggggccctgggcgagcctgtagacctatcggctctcatcccttgggataagccccagtccaggtccaggaggctccctccctgcccagcgagtcttccagaaggggtgaaagggttgcaggtcccgaccactgacccttcccggctgccctccctccccagcttacacctcaagcccagcacgcagcgtaccttgaacagagggaggggaggacccatggctctccccccctagcccgggagaccaggggccttcctcttcctctgcttttatttaataaaaataaaaacagaaa

SEQ ID NO: 699595 - DNA, 524 bp, Homo sapiens
cgggtgaggtacagctgagtggcaagagcctgggcagcgccccgaagccagtggaaggtaggagcgccctgttcgcgggcaatgagtggctggtgacccatacatccagtattgtctgagtcctgggagacgacacagaactccacactgcttacagcatgtgactcctatggcaaggcacagaggtctgccgtactgcatggtgctccatgctagggtggcttgccaatgaatgccaccctgttaaccttatgcctgaaaatgggctgagcttgcgccaatgtccatttatctctggatgtccctggacagcccactggttgtccatacataggatgccctggggatgaccctggcggaacatgctaccccctgggcctgacactgggccttttattcactggtcacaagtcccggctccgaggaaggttgctgtgcgactcactgcatctggcaacaagccagaaggcggtcaagtcctgcctggtgtgccaggcctccttctgcgagctgtacctcacccg

SEQ ID NO: 699596 - DNA, 231 bp, Homo sapiens
cctgtattttggtttaggagtcacgcagctggagatgacaagattctgacactcctccaattgctcctggggataacattactattctaaggcctaacatcagtgcttgagatgttttgtagaccctgcccttgatggatcagctggtactacccagaccgataaactggctcgtcttatcttgtggcccccacccaggagctgactcaatgcaagaagactgttctaact

SEQ ID NO: 699597 - DNA, 2085 bp, Homo sapiens
caagaagtggcgaagttacctttgagggtatttgagtagcggcggtgtgtcaggggctaaagaggaggacgaagaaaagcagagcaagggaacccagggcaacaggagtagttcactccgcgagaggccgtccacgagacccccgcgcgcaggcatgagccccgccccccgctgttgcttggagaggggcgggacctggagagaggctgctccgtgaccccaccatgtcctctcctaccacgagttccctggatacccccctgcctggaaatggcccccctcagcctggcgccccttcttcttcacccactgtaaaggaggagggtccggagccgtggcccgggggtccggaccctgatgtcccaggcactgatgaggccagctcagcctgcagcacagactgggtcatcccagatcccgaagaggaaccagagcgcaagcgaaagaagggcccagccccgaagatgctgggccacgagctttgccgtgtctgtggggacaaggcctccggcttccactacaacgtgctcagctgcgaaggctgcaagggcttcttccggcgcagtgtggtccgtggtggggccaggcgctatgcctgccggggtggcggaacctgccagatggacgctttcatgcggcgcaagtgccagcagtgccggctgcgcaagtgcaaggaggcagggatgagggagcagagtgagtgcagcagggagggggcaggtgccaggccatggccacaccgacatagcacctggggttcatgctgaggcctgaatcccccatacaggcatgcgtcctttctgaagaacagatccggaagaagaagattcggaaacaacagcagcaggagtcacagtcacagtcgcagtcacctgtggggccgcagggcagcagcagctcagcctctgggcctggggcttcccctggtggatctgaggcaggcagccagggctccggggaaggcgagggtgtccagctaacagcggctcaagaactaatgatccagcagttggtggcggcccaactgcagtgcaacaaacgctccttctccgaccagcccaaagtcacgccctggcccctgggcgcagacccccagtcccgagatgcccgccagcaacgctttgcccacttcacggagctggccatcatctcagtccaggagatcgtggacttcgctaagcaagtgcctggtttcctgcagctgggccgggaggaccagatcgccctcctgaaggcatccactatcgagatcatgctgctagagacagccaggcgctacaaccacgagacagagtgtatcaccttcttgaaggacttcacctacagcaaggacgacttccaccgtgcaggcctgcaggtggagttcatcaaccccatcttcgagttctcgcgggccatgcggcggctgggcctggacgacgctgagtacgccctgctcatcgccatcaacatcttctcggccgaccggcccaacgtgcaggagccgggccgcgtggaggcgttgcagcagccctacgtggaggcgctgctgtcctacacgcgcatcaagaggccgcaggaccagctgcgcttcccgcgcatgctcatgaagctggtgagcctgcgcacgctgagctctgtgcactcggagcaggtcttcgccttgcggctccaggacaagaagctgccgcctctgctgtcggagatctgggacgtccacgagtgaggggctggccacccagccccacagccttgcctgaccaccctccagcagatagacgccggcaccccttcctcttcctagggtggaaggggccctgggcgagcctgtagacctatcggctctcatcccttgggataagccccagtccaggtccaggaggctccctccctgcccagcgagtcttccagaaggggtgaaagggttgcaggtcccgaccactgacccttcccggctgccctccctccccagcttacacctcaagcccagcacgcagcgtaccttgaacagagggaggggaggacccatggctctccccccctagcccgggagaccaggggccttcctcttcctctgcttttatttaataaaaataaaaacagaaa

SEQ ID NO: 699598 - DNA, 184 bp, Homo sapiens
  misc_feature (1)..(1): n is a, c, g, or t
ntgcatggtagtcttactgttaaaaagaaactaacagcacatattgagtaattgagtgcaggtactcagtgtgtcagctgctggggcaccagcttgtaatagggctccacagcgggggcatcgctgggcctcgcctaagtgcagtcaaaatcagacgacgctggtatagtcctcttcacagatg

SEQ ID NO: 699599 - DNA, 368 bp, Homo sapiens
  misc_feature (290)..(290): n is a, c, g, or t
ctggaaaactgtctgcaaaataggctactttctgtagtcatttttcatttccaaagcactcagcaaaagctggctgttttattgtaagtactctggcaattcacctttcaattcaaatatcctgtagagaacgcttcctctgagaagccactggatgtctgtatggtgcaggaggttcatgtgctgtctgtccaggtttttgttttgggtgtttttttttttttaacatttttggcataaagtgggtctttggatacaggtaaccagttttggtaacatttattcagaancttcacgtgttttttcaagtttttggaatatcagcattctctgtggagaaaagcagtggtgctactagtgtcaacact

SEQ ID NO: 699600 - DNA, 860 bp, Homo sapiens
  misc_feature (860)..(860): n is a, c, g, or t
cagtgcgggactccggtagccgccctccggtagccgcccctcctgcccccggccgccgccctatatgttgcccgcggggctcttggggcatggagcacgctgcccagccctggccgatggcaacgggcgacgggggtggcggaggagcgcctgtggccggctcgcctacctgcagtgcgccgtggctgcgcggcttcgcgcggaatcgtcagacgaacctcagttgtacggccgccaacgcgcttgcccagcccaaggctcccgagttgcccggcgcgggcccgccttggttggtgcagggagcttgccctccgtggcccttgccggtctaccagttacgccagtgagtccggcccgggttcctccgaggcgcgccaatgtgttcctccgtggcaaggttccttcgtccacttacgggccatcgggtgctaattaacccctttttttgatgcgaggagggacagcccttttggcactgggtggcgggtcaccaggggcgaattatgttctggacctgtagcgggctattgtgcacacgcaggtttctggcgccattgtgccgtgtctgcctggattcgccttggttacaagaccccccgtttcctaaatagggtcggcttgtggtcaacggcctgttgttaaccctccatcaggtcattccgtaggaacctcagacacccggggattgcgggttccacaccgcagaggggcgtatttgacatcctactgcgccccttttgggggcaacctgggggggggctaccccgcccctgtgtcacgggggctcgtcccccctggttccttgtggcccacatgtggctcggcttgagccgccacacactcccgtggggcgcggcaan

SEQ ID NO: 699601 - DNA, 166 bp, Homo sapiens
cgttcaacgcctcctactcattccctccaaaagacctcaaggtaaagagtaaacacatgctctacaaacaacgtgtgttcagcagttaaaacaccattaaattccaacggaaagcacccttaccagctctggctgaaagctggccactgtgggcagcccagtaacc

SEQ ID NO: 699602 - DNA, 1339 bp, Homo sapiens
  misc_feature (33)..(33): n is a, c, g, or t
gccaggactgagtaatgagccacgtgcggggtntgagggagcagtgcgtcctttctgaagaacagatccggaagaagaagattcggaaacaacagcagcaggagtcacagtcacagtcgcagtcacctgtggggccgcagggcagcagcagctcagcctctgggcctggggcttcccctggtggatctgaggcaggcagccagggctccggggaaggcgagggtgtccagctaacagcggctcaagaactaatgatccagcagttggtggcggcccaactgcagtgcaacaaacgctccttctccgaccagcccaaagtcacgccctggcccctgggcgcagacccccagtcccgagatgcccgccagcaacgctttgcccacttcacggagctggccatcatctcagtccaggagatcgtggacttcgctaagcaagtgcctggtttcctgcagctgggccgggaggaccagatcgccctcctgaaggcatccactatcgagatcatgctgctagagacagccaggcgctacaaccacgagacagagtgtatcaccttcttgaaggacttcacctacagcaaggacgacttccaccgtgcaggcctgcaggtggagttcatcaaccccatcttcgagttctcgcgggccatgcggcggctgggcctggacgacgctgagtacgccctgctcatcgccatcaacatcttctcggccgaccggcccaacgtgcaggagccgggccgcgtggaggcgttgcagcagccctacgtggaggcgctgctgtcctacacgcgcatcaagaggccgcaggaccagctgcgcttcccgcgcatgctcatgaagctggtgagcctgcgcacgctgagctctgtgcactcggagcaggtcttcgccttgcggctccaggacaagaagctgccgcctctgctgtcggagatctgggacgtccacgagtgaggggctggccacccagccccacagccttgcctgaccaccctccagcagatagacgccggcaccccttcctcttcctagggtggaaggggccctgggcgagcctgtagacctatcggctctcatcccttgggataagccccagtccaggtccaggaggctccctccctgcccagcgagtcttccagaaggggtgaaagggttgcaggtcccgaccactgacccttcccggctgccctccctccccagcttacacctcaagcccagcacgcagcgtaccttgaacagagggaggggaggacccatggctctccccccctagcccgggagaccaggggccttcctcttcctctgcttttatttaataaaaataaaaacagaaa

SEQ ID NO: 699603 - DNA, 117 bp, Homo sapiens
gaccaagcagaacaattctttagaagtggccatacaaacaacggggctggctggcgggacatcccgattctggtttaattatcgacatggtgcaaataccctttctggttatagaag

SEQ ID NO: 699604 - DNA, 409 bp, Homo sapiens
  misc_feature (211)..(211): n is a, c, g, or t
ttcaccacatataccttctaaggtgtgtcaccagcttaagaagtataaccaaatatcatggatatcaaacttttaacatatatcacagaattcataacctgccattagattttattttgcacttttagagacctatttgtgcactggttttacagcctaagagagtatgtgagatcgcttagaagaagtgagtttccagaactttgtcatngccatactatcccgtccgttctacatttcctctatgtctaacgaataagctagtagaatctttgtcatttaaagaaggcgacgctgtagattgtaagtgtttcctctagttacaggagaagaaaagctaagcacgtttgttgggcaagtggaaaatgcaatagtgggcaaagtgctcagaacctaggcaatcaagctt

SEQ ID NO: 699605 - DNA, 1171 bp, Homo sapiens
taaatctgaaggttctggtaacctgtggtgtattttatattttcctgtgactgttttggtttggttttttctcctttttcctccccttttgaccctattcagtgtctctacccactattgcacagattaaacttcacctacaaactccttaatatgatcgtggtggagaatgtacacagtttaaacacatctaattaaattacctttaagctttcccaaaaagaacaaaaaaaaaaaaaaaaaaaaaaagaaagaaagagaaaagaacaaacaagaagaaaaaagaaagaagaacaacagagaagaagagagagagaagagagaacaggaagagaagaaggagagaaggaggagaaacaataaaaaagaaaaaaaagaagagaaaaataaaaaaaacaaaaaatacaaaaaataaaaatagaaaaaaacagataggagacaacaaaacagagtgaggaggagagggcagaacaacaaaatcacatcacacagatgaggagagaagtagacaaacacgacaaagaagcaaaagaaaaaaacaaataacaaaaataaaaaaaaaaaaaaacaaaaaaaaaaataaaaaagtaagataaaaatatatataaaaaaaaaaatcaaaacataaaaaaaaaacaaaaaaaaaaaaaaaaaaaaaaaaaaaaaaaaaaacaataaacaaccaaacatacaaaatacacataaaaatacagaaatacataaataaacatcaaaacacaaaaataacaatatatatacacacaacataaaatacaaataaaaaataaaatataaaaaaaaaaaaaaaaaaagaaaataataaaataaaaataaaaaaaacaaaaagaagcaaagacatcatagaacgctattagagaagggacagcgacgagcaaagcagaccgcaacctgacaacgcatgatacactgcgccgcagacgtcacgcacgcaccggccgcaacgcgagagccaaaactaaagaagagaaaaagtagaaaacaaagagccgaagcaaggatactcagaggaggcgcccgagacgagggagcgcgagtaagaagcaatgtcgaaaaaggaaaagagaactaggacagcgaggcgaacaatacagaagaaagaaagacgacaacaaaaaagtaaaataagtcgttagtaaaaaaaaaaccaaaa

SEQ ID NO: 699606 - DNA, 103 bp, Homo sapiens
gcgccgcgggctacgacctgtacagtgcctatgattacacaataccacctatgcagaagcatgttgtggaaacggccattcaagataggcgttcaattcatgg

SEQ ID NO: 699607 - DNA, 1324 bp, Homo sapiens
  misc_feature (352)..(352): n is a, c, g, or t
  misc_feature (1324)..(1324): n is a, c, g, or t
ggagtgcagtggaatgacctcggctcactgcaacctctgcctcccagggttcaatcgattctcctgcctcagcctcctgagtggctggtattataggcatgcaccaccacgcctggctaatttttgtatttttagtagagacagggtttcatcgtcttggccaggctggtctccaactcctgactttaagtgatctgcccgcctcagcctcccaaagtgctgggattacaggtgtgagccaccactcctggccccaaaaacccaaaaaaaaaaaaaaaaaaaaaaaaaaatttggggggggcctgggcctgggaaagggttttttaaaccaactccggtgggcgggcgcggngccccaggtggcgtccgggcgacacgtgcgcaaaagcgtgtcccaatgaagaaccgggcgtcatgactaagtgcgcgcgcgtttcctccacccaataaaaaaaacgccggggcggcgcagccggagacgttccggaaccaactccaggaaggggacgaccggagggccaataaggggtatcctaatcaacggggggttccacaaggcgaagctcgaacaatacaaatagccgcgcggccgccgcgagagcgacacaacacacagcagacgaagcgacaacgagacaacgcgagcagacagcagcgaaagcaggacaccgaggagctagcgacagcagagagcagggagcagacacgatcagacgcgacacagcgacgacgaccgacgacgaacaacaagagcaagacagaaagaggcaacaccaggggtagcacccacagagcaagtaagaaaggaacaagcaaacggacaagacgagagcagcgcacgggaccgaacagaggaaggcagacgacgaaggcgagaaagaagagaaacaaggagacgagccacgtcacacgtagctccagcggagtgtggaggcgagagagaaagcaagagcacgaggcgagaacagcacgacgacagggacgaggaacgagaagaagcgaagagagaggaccacgaagaaagacaagacagcaaagaccagaggagagcgaagagtcacagcaggcgcccaaaaacggtaacaagcagcagagaagggaaatagacgacgagcgacaagaaggaagcgagaaacaaagcaaagagcgagaagcagaaggaagaggagggcgaaacgaaaagaggaagcagaagacagacaaacacaggaaaggagaggagggcaagaagacggagaagggaagacacacgagaacagagagagaaggaaacagaaaagaacacgaaacagaagaagagcgaaaaagagaagagagaaaaagn

SEQ ID NO: 699608 - DNA, 468 bp, Homo sapiens
  misc_feature (54)..(54): n is a, c, g, or t
  misc_feature (155)..(155): n is a, c, g, or t
  misc_feature (160)..(160): n is a, c, g, or t
  misc_feature (168)..(168): n is a, c, g, or t
  misc_feature (173)..(173): n is a, c, g, or t
  misc_feature (180)..(182): n is a, c, g, or t
  misc_feature (184)..(184): n is a, c, g, or t
  misc_feature (187)..(187): n is a, c, g, or t
  misc_feature (191)..(191): n is a, c, g, or t
  misc_feature (196)..(197): n is a, c, g, or t
  misc_feature (199)..(199): n is a, c, g, or t
  misc_feature (206)..(206): n is a, c, g, or t
  misc_feature (224)..(224): n is a, c, g, or t
  misc_feature (260)..(260): n is a, c, g, or t
  misc_feature (263)..(264): n is a, c, g, or t
  misc_feature (275)..(275): n is a, c, g, or t
  misc_feature (313)..(314): n is a, c, g, or t
  misc_feature (316)..(316): n is a, c, g, or t
  misc_feature (322)..(322): n is a, c, g, or t
  misc_feature (325)..(325): n is a, c, g, or t
  misc_feature (327)..(327): n is a, c, g, or t
  misc_feature (335)..(335): n is a, c, g, or t
  misc_feature (338)..(339): n is a, c, g, or t
  misc_feature (365)..(365): n is a, c, g, or t
  misc_feature (371)..(371): n is a, c, g, or t
  misc_feature (383)..(383): n is a, c, g, or t
  misc_feature (386)..(386): n is a, c, g, or t
  misc_feature (393)..(393): n is a, c, g, or t
  misc_feature (452)..(452): n is a, c, g, or t
cgtacttctgcaggcactgccgctcatcccgggcctcacggtgcaccaccagcncggctgcaagtagaggaggtagaagtaggcgcagcaggtgtgacaccccgcaggccaaggaccaagccagacccactgatgaggtctccaagaaaataggnatggnggaccatnccccnccacccnnncnccncccntttcnncnctgtggntgtagaaatggtctcccncccagccactcaagggtcagaaggattctttcgganagnntttttatgggntttcgccccacggaagatgtagtccccaatagcattgnngnggcagntgncngcccgccntgnncaaccccaggcgctgcgggtggtggngggggnactgggcctggnggntgtaggngaagggcaccaggccatgtccccaaacgccagcatgaagccaaacccgtcatgtgtganatccatggtggtgagg

SEQ ID NO: 699609 - DNA, 1149 bp, Homo sapiens
ggcaggctagggatgggtgcggaagtatcgggctctggctctaggctgtaacctctggcactggaactgcgtcaggagtcagcgtctgagtccgggagcccgaagcctggacacctgtctctgattctcgtaggtcgggggctgcatgcgtccaagcagatggttgcagggttcgaagcgctgggagggagttcccttgcctggggtccagatctgtcaaaagttgtctgccgcgtgttctagggagcccgttgccgaccggctgggactcttccagtgcagttgagactggttgactactcattatgcctgggtttggaacctacaggtggcactggaagacagactggtgacctggacgatgcccgtggtgtgaacgcgcaggggccctaatacggctagcatggtaaggccgggtacagtcttctaccgtatctatgtagcagactttggtcggtggaggctgtggcaaagggaacaggtctgtgaggaagacacgcgagataggtcatgtagctagttgggtcgatccgaggtaccgaccgtatcaatcagacttgaatctggctccgaggtccttgtcctgtcactggcgcccagtttccatggaggttgcccctgtgcgatgtgggtaaggtctaaggtcgtaatggcatatccttgggacgatttattaacctagtgggagatgggctcctgtaccaatttcatcggaccattcaacccatgtgtattacacctccgagatgtgagtgagtgctcctttagcgaatacaagtctcgtgtgtgacatcggtaaccaatgtacctgaaatttacttcatggcattcggttttgcagtatagtacgaatcctcggccagccacttcggtcgatgagtagatggtctgggggatcgatgggcgtgtgatggggggcgtcattcatcctccaggactagaagggaatgccattaggcgtttgaagaaacgtttcgcttaatattttgaggtgacagaggtctcgcctggtacgagtgtattgctggtacactgaaaattgttttgtcagtagagggagtttttgctttcaaggaacaaaagggaacgagcaagatggttgatattatagagtaggtgatagaaatgagttgtgctgggatctgggac

SEQ ID NO: 699610 - DNA, 884 bp, Homo sapiens
ctttctgcccgttgggcttattgaaatcccaactgctgccctttctgcttctttctccgacatcccccttggcgtctccctctatactccttcccatatctgtctccccaggatgacatatgaaacaatgtttgtctgcccgagcagtcaaatggcaatgctcaaacacccaagtggcccccagcctcgggactgtgctggcagtcaggagccccatggcctgtctgtacctagaggttcgtcaaaattgccaataaaggcattgcacctactggacaactcaacatggactcttgcaaaatctccccttcgataaaaagaggaggtcatgccgggggagccaccagcccctcactgggttcggaggagagtcagggaagggccaagcacgacaaagcagaaacatcggatttggggaacgcgtgtcaatcccttgtgcccgcagggctggtgcgggagagactgttctgttccttgtgtaactgtgtagctgaaagactacctcgttcttgtcttgatgtgtcaccggggcaactgcctgggggcggggatgggggcagggtggaagcggctccccattttataccaaaggtgctacatctatgtgatgggtgaagtggggagggaatcactggtgctatagaaaattggagaatgccgccgccccatagcacaagacaaaatgttccctttattgattcaaaggtctaattttaaattcccttgaataattcttttccttaaatgaagaacaccaaatctggtggaattggggaacctgttgacaatttttaccaaacggcgacaattcaacaccatggagaagaaaaacgttatgcaagtcccagcacaaaccccagtacaacaataacaccccacctcca

SEQ ID NO: 699611 - DNA, 194 bp, Homo sapiens
cgagcggccgcccgggcaggtacggggggtcctagccagagcagtcgggcagggaaaaaaggtgcccaaattgagggggaagaagtgaaattgtccacattgtttgcagatgacgtgatcttatatatttgaaaattctaaagactccatttaaaaaaaaactgttagaactaaaaaatgaattcagtaaagtt

SEQ ID NO: 699612 - DNA, 220 bp, Homo sapiens
tacgctagaacacaaaaagtgtaactgaaagctgacctgggccacgtctgcccgattatgtgccattgggcacgcttcatctaaacatggaacaaggtacagtataaacgataagaaattgtacacctgtatagggcacttaccgtgaatggcgcttttaggactggaagttgctctggtaaagtcagcgagtgagtggtgagtgaattgtgaaggccta

SEQ ID NO: 699613 - DNA, 1154 bp, Homo sapiens
tagttgttgttattgctgataatacactcgattattttctgggctcattgtttattgtgcgtctattacggtggtgtgttatctaccatgtggggggttttatccttctctcatgtgtggtggataatctgccccttggtggctctttgtcaacttctgacagtgtgggtatctatgtccacgattttagcggagtatcttacgtggtagactttgggtgtctggtcttacatgcatagaatttgtagtgtgctggcttcctgtcgtagatgtgttccactttctggtttgatactttgttcccatttcagatgcctgtcatgtgaaactgttgaagcatgtcaatatggtgtggaaactcgcatatggtccaggttgggttagtccgctgtcagtgctagtattgccatagtggccagcatgaatggatgcagatgttgctgtctggagttagaagagtgctgctgactcccaggtgcttctcgtgctgcctcactttgctgcagaggcttcttcaaggatcaccggcttgaagactcaatccgagctagaccgcatcgatgccaagtacctggaagtcaagtgcggtgctatgatccttatgttgaggatggtatggagcttcagattttgtccgacttcttacactgttgagaaagctcggaagttcatctgtcctgattacgggaccgtttggagggagccagtcacctacaggagccacggacatggatgaactcatgacaggtcctgaatctcctatgaggtccttggggaggagctcttgacatgactggtgcaacgagtacatccagtactcatagcacggctaacaggagaacaatacggttgggccctccaggtagttcagcaacgcgtctaccgttgagtctctggacagggcacaggagtacatggcttctgcatagctgcgtgcctcctaatcttcgcgtgctagtgggaccaccatgtgcgacctgggactagccttcagtacaagggagtgtggaaatgcttacgcttgccacactgcagtcaatttaggcactctcgcgggtttctctgtatattttatgacctgggcctcttctggataatctagacaggtagatttatataatttctatagcatcgcggtgtgtcagtgtcaggcc

SEQ ID NO: 699614 - DNA, 361 bp, Homo sapiens
attcgcggccgcgtcgaccactattttgttttatttgtcttattaatataagaaggcaggaatgtcaggcctctgagcccaggccaggccatcgcatcccctgtgacttgcacgtatacatccagatggcctaaagtaactgaagatccacaaaagaagtaaaaacagccttaactgatgacattccaacattgtgatttgttcctgccccaccctaactgataaatgtactttgtaatctcccccacccttaagaaggtcctttgtaattctccccacccttgagagtgtactttgtgagatccacacctgcccaccagagaacaaacccccttgactgtaatttcattaccttccttat

SEQ ID NO: 699615 - DNA, 400 bp, Homo sapiens
cttcctcagacacacaccgtgagggagatgggactcccctgagaccatcataccgcggagaggcgggacacccccagccagcctcacccacaccccctgaggcgcagaaggtaagccactgctctacttcatggccacccctcctgttcaccacgatcagcggtcccacggggacatccgctacgtctgcaatatgcctgcggacacgcggaatggacgcctggaccactggctaatgacatgacgaatgtctactggactggctcgtagtgccacagcccccttcgttaccgcatggacacataccccccttacctctcccatgcgaacccacagtccggaacgcccgctaaacgaacatgacttgccgggactacctctgacctgctcagccctcgcc

SEQ ID NO: 699616 - DNA, 1204 bp, Homo sapiens
tagatacactcatcaaagttcgaaatagacaccataatgtagtccctacgaaggcacagaggaatcatagagtataaagatgccatgtacagttgacccagtgcaccaatgaaaatcttcaatatggtcttgtgagtcgattgtacatggaacgcgtatttctacgtcgtgagtgctgatgaaccagcacatacttatattatagtgactcagagacaggaaacccaagcacgataggaagcattgatccgtaactgtgatgtggtagcagtggtccaaggtatgtactgtattggtgcacttccctgatcgacaatgtacaagtatatgattgatatatctatagattgaggtgagtctgtgaatgaatttatattcggcagaggtgttccattgattggataaatgtgtatcttcaaaggtgcttagctttagagagtcaggagtatgagaacattcggctagaatatggattgaaaaatccaaatataggtgactaaagaagccagtatgtgtatatgtcgtatctgagtctctgaaagtgcacatatgggtaagattgggatgcaggcacgtgtctgaatttttctgtcaatgaaatgttgacacatcatattgtcatgtacagtaaactgtgccttgggtggatatttttagattaggggtgaataaacgaaccctggcaaagaattatttggacgaaacctggtggcctggggagtaaacctgcgcatttccaagcgtgttataaaacagcaagttggtattatcacgaagggccttggaggaggtgtgaacagggatgacaccggggaacacggaactaagtatatagatataccacaaaagtaagattacaccaggtgcactggggcagtggtcgtaaagtagagacaaacaagttgacaacccaccgcggaaaaaaacacggcgggtgcggccgcagccacaaacaaacaggagctaggtagggacatcaaacacagaccaccagggacgcgcaagcaccgctcggcacagacagacgcggcgacccacactggcagaaacggcaccgcccagacaatacaacgacacggagggacccactccccccagaccaccgcgaggagcaccacaaacccgcccgccagccacgacgcgcacagcagaccacccagtgcacagcagcgaagccaccacaccaggcgaccagtcacaccgc

SEQ ID NO: 699617 - DNA, 526 bp, Homo sapiens
  misc_feature (196)..(196): n is a, c, g, or t
  misc_feature (339)..(340): n is a, c, g, or t
  misc_feature (345)..(346): n is a, c, g, or t
  misc_feature (366)..(366): n is a, c, g, or t
  misc_feature (368)..(368): n is a, c, g, or t
  misc_feature (393)..(393): n is a, c, g, or t
  misc_feature (440)..(440): n is a, c, g, or t
  misc_feature (462)..(462): n is a, c, g, or t
  misc_feature (464)..(464): n is a, c, g, or t
ttgccgctttgttaacgagtgcgccaatggttttaactgcctgttcacgcacaaccacaacctgattgatcatttgattggagaagtacagatcggagaggcgcttcagaagttgcagcttgattatttccagatcggtttgcgattccaatatcttggattcggcaatttcgcgtgtcgctgtggttctaccgcnggtgtaaagcggccacagaacattgacctgggaacgtatgccgctcctctcgatatcaatttcagttcttctattgataatcggaatcaggaatgaaatttctttttcataggcaattccggcaacggtcaggctgagttgcnncaggnncaggttgctcaaggcctggnantcgaactcccgtgcttgaatgtccnattgttgaatcagggtttggcgcactgtgctaagccgcttctcagcntcaacgaaactaagtgcgggcncnactgcggcaggacccacaggtacaggttcggctgcgtgcacctgcgtgcacagggcggccgc

SEQ ID NO: 699618 - DNA, 868 bp, Homo sapiens
gaagggaacacgttgaatgaatttctggctttgagaaaacattttaaggcaaaattgggagaaacctttttggtcgaacccgggttctgggagacaaactatgattactgagttactggggtggaaccttcttaattaaccataaggatggagatctccatggatcactccatttgggacccaatggcctcatatctcagccaacatgggcagccaatcctttcatgcatggctggtacagggatagggcagaccagggatccaagccattaattggcaaaacctcaccaggtctccagccttaaagcgtacaggggaagaggggaaatccacatccatattaccaggggtatttgggacacaaatataacatattgcgtaatagcacagttaaatagaaagattttgcaagggcctcaattacaattagccacccccttccatattctccatcctggcaattcctgcagcgcaaattggagcaaaccaagcatgcaccatcagatggccatggtgcaagcccccaacaatggtatccccatcatatctcatgcattcaaggcgtcaaaaaggagcaaattcagcttaagggataaccaggccaacctggaaccctggcttaattggccagcaacttagccagtattccggcctgagtctggtcaccgggaacatgctgggcctgggagcagggcttccctggttttacaaacctggcctatcctttgacataagcctcttggagacggttccctcttcctttaaacagactcttcccaaacaatgggaggcactgaccgtgaatgctggtctatccaatttcctcttgaatagatggtccactacccggggggggtaggggaggtgt

SEQ ID NO: 699619 - DNA, 1228 bp, Homo sapiens
  misc_feature (21)..(21): n is a, c, g, or t
  misc_feature (44)..(44): n is a, c, g, or t
  misc_feature (47)..(47): n is a, c, g, or t
  misc_feature (50)..(51): n is a, c, g, or t
  misc_feature (692)..(692): n is a, c, g, or t
cgcgctgccgcgccgccgcgncgccgctactgctgcgggggccncgnggnngcgcactggggcgcggctcggaggggaggctagggggccgtgccaggcccgaagccgaggcggggccgggatgcggcgctgaggcccagcatggccggcccgggccccaccttcccgctgcaccggctcgtctgggcgaaccggcatcgcgaactggaggccgcactgcacagccaccagcacgacattgaacaggaggacccccgcgggcggaccccactggagctggccgtgtctctgggaaacctggagtctgtgagagtgctccttcgacacaatgccaacgtgggcaaagagaaccgccagggctgggcagtcctgcaggaggcagtcagcactggagaccccgagatggtgcagctggtgctccagtatcgggactaccagagggccacgcagaggctggcgggcattccggaactgctcaacaaacttcgccaggcccccgatttctacgttgagatgaagtgggagttcaccagctgggtgccccttgtgtctaagatgtgcccaagcgatgtgtaccgcgtgtggaagcggggtgagagcctgcgagtagacaccagtctcctgggcttcgagcacatgacctggcagcggggccggaggagcttcatcttcaagggccaggaggcaggagnccctggtgattggaagtggaccatgaccggcaggttggttgcatgttggagacactgggggctcactctgcaaggagcccgaaacactgctggccgccatgcgggccagcgaggagcatgtggcagtcgctcactctcctatcgtctccaccacctggaaactcgtaatgtggcctttgagaggaacaaatgtgggatctggagctggaggtctgagagaatggcaacggttaacccgctaacaggccaagtggaccatggccccacgtggacccggttcacgccccacccgcgcaccctcggaataagaaacagcgcgagacaagagaagaccacagcggaaaaacatccacccgtaccagcgaggcagaccgactcccaacacgggaccgagagtagagcacaacaaaccaaaactccccaacactcaagacaacagagaaaagaagtgccatacacgcaacaacacgaggcagcgaaacccacccacgcaccacaaccggaagaccgccaccacgaacaccacggcgcccgta

SEQ ID NO: 699620 - DNA, 458 bp, Homo sapiens
aattaggtttgaccgtacaagtgttgatgaggatttggagcaaaggaaatgctatacactggtggtaaggggtgtagttttgttcaacaactttaaaatacaagttgacgttatattgtaaagctaaacagcacacactctataaaccaggagttctacccctactgtataccctagagaaatcctcatagagaggctgcagaaggcatatacaagagtgttcagagaggcaatgttcaaacagaaaaaaatctggaaacaacctagatatccaccagtaggaaaagacatctactacataaattgtatattcacaaaataaaaacagcattgaatatgaacgaacttctctatacgcagaatgtggatttgttctggaaacactgttgagtgaaaaaagcaatttacagaaaaattatatatggtatgacatcatttttaaacaactcaagagcaaa

SEQ ID NO: 699621 - DNA, 188 bp, Homo sapiens
tcgataaggggccaatgcaggcagatggttgagctcaggagtcaggaccagcttgggcaacctagtgagaccctggtctctacaaaaaatacgatgtcaaaaaatcaaaaaattagccatgtggaggggcaggcgcctgcggccctagctactcgggaggctgaggcaagagattggcccttatcgag

SEQ ID NO: 699622 - DNA, 316 bp, Homo sapiens
gttacaacgatgaccagcaccagtctccgtcctctccttctcctgtcagtggtaacaaacttaatgggcattgacaaagaattcacacagttaggatctgcatgatggggttgtggagggtcgcccttggaccacagctcctatagaaagcactccatgctgaagatgtgtgggtgtctttggagctcacagctgcttagggaaaagttccaaatggctatgaatccttggtggtagcctacatacagttggtgggaagtgggtgggcctggaaggggacttcagtgatgaggatcagcagagatacgacattgtg

SEQ ID NO: 699623 - DNA, 562 bp, Homo sapiens
  misc_feature (20)..(20): n is a, c, g, or t
  misc_feature (39)..(39): n is a, c, g, or t
  misc_feature (242)..(242): n is a, c, g, or t
tggccccagtcagacagagncaaagcaagagagaagcanagctgtggggcccgggcgagaaaaaggctgctgcaaaggggacgtccaacgaaagagaccacctgtccttcgagcaggagttaacacgtccccaccttggtggagaacaagaaagctcagctggtggtgattgcacaccacgtggatcccatcgagctggttgtcttcttgcctgccctgtgtcgtaaaatgggggtcccttnctgcattatcaagggaaaggcaagactgggacgtttagtccacaggaagacctgcaccactgtcgccttcacacaggtgaactcggaagaaaaaggcgctttggttaagctggtggaagctatcaggaccaattacaatgacagatacgatgagatcccccgtccctggggtggcaatgtcctgggtcctaagtttgtggctcgtatcgccaagctcgaaaaggcaaagggtaaagaacttgcccctaaactgggttaaatggaccctgttgagttttctggacataaaaaaaattgaaataaaacaaattttccttcca

SEQ ID NO: 699624 - DNA, 516 bp, Homo sapiens
gctcgccccaagtcttttgttttctggtttttttcatttgtttggtttttggtgaggtttttttttgtttgtttgtttttgagacagagtctcgctgttgttgcttgggctggagtagaatggcacaatcttggctcactgcaacctccacctccggggttacagcaattctcctgcttcagcctcccgagtagctgggattacaggcacccgccaccatgcctagctaatttttgtattttttagtagagacggggtttcaccatgttggccaggctggtctggaactcctgacctcaggtgatccacccaccttggcctcccaaagtgctgggattagagacgtgagccaccgctcctagccacaccttctttttctaaaaagaagcaaaccagatcacggagggccacgtgatgggggctttcatcccccttctgagtggcagtcggaagtgggactcgcctcttcctgtgcttggcccgtggggccgctgtgaagttcacatgcagtcccag

SEQ ID NO: 699625 - DNA, 251 bp, Homo sapiens
tagtcttacatgttatctacctaggccagtctagcatcaggctgaagggtgcaggtcagaacgtcaggcggattcttttgcttataagctagcacgtctacttacgcgtgatcttttacactagtgtgtcagaaggcatcctctgaaaccctctctgtgcccaagtacagtcccattacttctgtttcgtatctctaggaaaagtggagggtgcttatgggcctctcaaggtgattgaaagaaccaaccaa

SEQ ID NO: 699626 - DNA, 1015 bp, Homo sapiens
  misc_feature (337)..(337): n is a, c, g, or t
  misc_feature (388)..(388): n is a, c, g, or t
  misc_feature (803)..(803): n is a, c, g, or t
agcgggttctctcgcgccgccgccgccaccatgttgggtttggagctgcagcggagccgccgccgccgccgcgggtgagggaggccagagagcgggagctccgcgcccagccgccggggtccctatgggatgcggggccgtgctcgagtagcctcgtgccctctccccgcgcagccgccggcccggtcccggcgttggtcgagggccatgcggaggcgcagacgagacagagtcgaaaggcaatgccaagacatccgggaacccgcggaccgacgcgcttctaggctagcgtggcccggacgtcgacgctcgcggccgacgcgctcgggaccacggnacatgcagtcctagcaggacgcaggcccatgggagaggctaggcgccgccntggcgggcaggcatgagccctatctcggtgaggcgcgtagttcaccattggttgggatttcgcgaggtcgagagtgtctaacagttatcctgaagttctccagtgtacttctattagtacgttctaatgcgtgagcttatgcaagggtccactttatagtgattggtaccttatgatagagaatgcacatggagtaaagggcaggaaaagaaccaggtcacaataggttgctatgcgttgggagttcttttctacattgggctaatcgatgcaagcgcaaagtaagttaggccagttcgctagataggctaaagtatcgaagcggtgcttagctcgcaaggggtctgctttggtgtcccctgggttcccaacattatgggcaggccgaattcgtggatacctgtccttcattttntttaaggctcacacctccgcttttccgtcctacgtggacaccttttctaggaacggcttcccatgtttttcgacaccgctgaacggtttgttcttgacacccaagactggacgcttgggtacacccaacggatcagacggttttctcctgcgtcggacaaccgacgcggcgaactttcagcgcctgtcctctctggccccttctccaccccg

SEQ ID NO: 699627 - DNA, 113 bp, Homo sapiens
gatcgagtgcgcgccaggatctgagcccacatctggcaccaactctaccaagggcctgttgggcccacacaagcttgcctgtgcctagtcaggctggtaccgtcgacctctga

SEQ ID NO: 699628 - DNA, 181 bp, Homo sapiens
gtcgctctagcaggatccccatcaggcgaagacgtgtggctagtaagcagctctaagggcttccatttgacctttcccaccatagtagctctcactctaccagtcagggagccgaggtgggggttctgccagctgctaagtatgtctatgctaattatgcattctggcactggggaaatga

SEQ ID NO: 699629 - DNA, 199 bp, Homo sapiens
tgcctctttcaactttacacggcctcgcctgacatgatgcccatgctggaatggcccgggcgtgtggtacacctgctcaatgaccagcacatgggtgtagtcacggccgccgtcagcctcatcacctgtctctgcactaagaacccagatgacttcgagacgtgcgtctctctggctgtgtcgcgccgtcgcctactca

SEQ ID NO: 699630 - DNA, 113 bp, Homo sapiens
ctgtgtctcagtgctgtggacagctcacctagtggctgtggctccaggctcgtggatgtcctgatcctggcttttggcctgctctgtcgtgccctggctgtcgtatggctggt

SEQ ID NO: 699631 - DNA, 667 bp, Homo sapiens
  misc_feature (174)..(174): n is a, c, g, or t
ggctgataggagcgctgctgtctcgtctctccgacatggtgtgtgctcgcccactgatatcggtgtactccgcaaataagggggattcatctgggcaaaaatgtgattttgcctggctgtattcatggctcctattcgagcagatattgtgacctgtgtgtgtgcactcgcagngttgcagcaaaaaccaacaggacaaggcgctgattgctggtgcagtgtgcaatatagtgagcgtcatgcaggactgagtggcgtgagtcttggtggtactgggcagacgctgtaggctcgaattcccaagatgtgtcgaggtcggtggagactcagcgctctggcacagaggtgcttttggcaacgatggtcgtctgtggatggccgacatgtatgtcacgcaagccaggaactctggacgaccgattaggtcgatcgatagatgtgaatcacaagactcataaacggatacgcctagtctgttctgccctggttgactcagtcctagcaggactggtcatgtctaacaggtcatcgtatcgaggaagtccctgaacttcctttggtagttgaatgataaagttgaaggctacatagaagaccgaggaagctgttatagctccttaatgaaacttaacgcctggaatgatagtcaagaaggtctatgcctcta

SEQ ID NO: 699632 - DNA, 191 bp, Homo sapiens
gatgaaagatcttggtgggcacaaaaggaatccctcatctggtgactcatgatgcccgcaccatccggtaccccggatcgcctcatcaagggtgaatgataccattcagattgactttggagacctgggcaagaccacctgactttcgatcaacgttcgaccactgggtaaccctggggtactgggggtac

SEQ ID NO: 699633 - DNA, 198 bp, Homo sapiens
cgtaggcgaaatttgaagcgacatgtgaatggtagacatggtcacagtcatggacatggccacgctcacagtcatccccgtgttcattcatgtacatggacgacaagcgcgttctaccaagtagaagcagagctcagaggaagaagcacaggaaccaagaggggttcagaagaggcgaggagggagcacagtacccaa

SEQ ID NO: 699634 - DNA, 438 bp, Homo sapiens
  misc_feature (13)..(13): n is a, c, g, or t
  misc_feature (36)..(36): n is a, c, g, or t
  misc_feature (59)..(59): n is a, c, g, or t
  misc_feature (82)..(82): n is a, c, g, or t
ggtcccaggcccngggtgtttgggggggggccaaanaaggggcgcccccccctatattnttttttgcagccccccctccccngggagggggccaaagccattctcccccccgtgcctcttcccaccagggttaaaaggatttagggtgggtgggagggtttcccggccccccgccccttcccccccaaatgggggatagggggggttttattgggccaaccctgcctcccccaaccaacccagcccttgggctgtttggggcagggggttccgggctttttttttttttttttttttcgggctaaaatagtttcccaagggcccgggtattggggaggggaaaaaggtgggggccagggggaaatgcccccccctccccttgggggccgggggggggatttttttccccccccattaaaaaggaaggggttttgtcca

SEQ ID NO: 699635 - DNA, 125 bp, Homo sapiens
atgattgtggtggcttgacatggatcgaacctgcgaccatgtttcggaaaccattactctatccaactgagctacaagcgcaagttatatggaagcgggggctggattcgaaccagcgacctctg

SEQ ID NO: 699636 - DNA, 944 bp, Homo sapiens
  misc_feature (1)..(1): n is a, c, g, or t
  misc_feature (306)..(306): n is a, c, g, or t
  misc_feature (320)..(320): n is a, c, g, or t
  misc_feature (324)..(325): n is a, c, g, or t
  misc_feature (348)..(348): n is a, c, g, or t
  misc_feature (402)..(404): n is a, c, g, or t
  misc_feature (453)..(455): n is a, c, g, or t
  misc_feature (463)..(463): n is a, c, g, or t
  misc_feature (475)..(475): n is a, c, g, or t
  misc_feature (502)..(503): n is a, c, g, or t
  misc_feature (506)..(507): n is a, c, g, or t
  misc_feature (531)..(531): n is a, c, g, or t
  misc_feature (534)..(534): n is a, c, g, or t
  misc_feature (566)..(566): n is a, c, g, or t
  misc_feature (653)..(653): n is a, c, g, or t
  misc_feature (670)..(670): n is a, c, g, or t
  misc_feature (684)..(684): n is a, c, g, or t
  misc_feature (752)..(752): n is a, c, g, or t
  misc_feature (764)..(764): n is a, c, g, or t
  misc_feature (828)..(828): n is a, c, g, or t
  misc_feature (881)..(881): n is a, c, g, or t
  misc_feature (890)..(890): n is a, c, g, or t
  misc_feature (909)..(909): n is a, c, g, or t
nccgtacggtttggggcctgacggctgagaagctccggtctgttgtcacacctgccagggtccagttcaagacatacccgggtgtcatgcacagctcctgtcctcaggagatggcagctgtgaaggaatttcttgagaagctgctgcctcctgtctaactagtcgctggccccagtgcagtaccccagctcatggggactcagcaagcaagcgtggcaccatcttggatctgagccggtcgagcccctgtccccaccctccatgacctgtccttttcccacaggcctctgggggcaggtggcaagncctggccgggcctncctnnctggccttagccacctggctctntctgcagcaggggcaggctgctttcttatccatttccctggaggcgggcccccnnncagcagtattggaggggctacaggcagctggagaaaggggaccagccgnnnacccaatnactcaggacctnactcactagccccgctttgggcccccnnctnngacctcagggtttgcccatggggnccncccaggcccctgccccaactgattctgcccanataatcgtgtctcctgcctccactcagctgcttctcagtcatgaatgtggccatggccccggggtccccttgctgctgtgggctccntgtccctgggcaggagngctggtgaggaggnggagccttttgaggggggccttccctcagctgtttccccacactggggggctgggccctgcctccacnttaccctccttncctgcaggcctggagcctgtagggctggactgaggttcaggtctccccccagctgtctcacccncactttgtccccactctagagcagggaggcagtgggggaggagttgtgtctcntcttctgtntccatgtggtttttgggtntttttctttttgtgtctctggattccgataaaatt

SEQ ID NO: 699637 - DNA, 448 bp, Homo sapiens
  misc_feature (61)..(61): n is a, c, g, or t
  misc_feature (154)..(154): n is a, c, g, or t
catgggagtgcagtgcatatcgatcgtaatgcgcagcaaaccgccggcagaacgttcaatntccaccaaatcaagcccaaaggcttgtaccgttgttgcaccagtgtttgtaaggtcacaaatatttgccgttttaaatttcaaaaagctcaancaaacaaaaaaaatggccggttatagccggcccatcgtgcttcttgtttggtcgagataggcgaattataagctattattgcgagcttatttacttaaaaggggcctcgtgcgcaaccgcaaagcggcactatttacaccatgcgcccctcaccacaaccagacaatcagccggccatcaggtcagattgacaaggagcaaacattcatgggttttctaaaaggcaaaaaactgttgattaccggcgtgttaatccaaccgctctatcgcttacggcattgccaaagcctgcca

SEQ ID NO: 699638 - DNA, 177 bp, Homo sapiens
catctcactagtccagggcagtggccataaaagtccaggaaaggcattaccactagtaatgccatcgtttagaacagattcggatttaacaggcgtagttataggtaagtatctcctgagaaaaatctctattgactcatgtgtctgagaggaacgttaaatcttatcatcacagtg

SEQ ID NO: 699639 - DNA, 400 bp, Homo sapiens
  misc_feature (277)..(277): n is a, c, g, or t
  misc_feature (287)..(287): n is a, c, g, or t
  misc_feature (358)..(358): n is a, c, g, or t
  misc_feature (387)..(387): n is a, c, g, or t
gggagttctctggggtgcttcaccagtgccacatcctggcctcagagatggtgcacttcatccaccagatgcagtactacatcacctttgaggttctcgagtgctcctgggatgagctgtggaacagagtgcagcaggcccaggacctggaccacattattgcagcacacgaggcgttcctgaacaccatcacctcccgctgtctcctggatagcaactccaagggtgcttttaaaccaactgaagagccgtgtttgaccaaatcattgaacttcangaatgcccanggacgttgattgtacaagagcagctctggaggagctgcaagaaggcgtctgcagttttgaaagagaaaaangaaacaggcgtgaaattgaagggccagtnggggaagtgactt

SEQ ID NO: 699640 - DNA, 198 bp, Homo sapiens
ggtctgagcttaaaatgaacatcatcaatcatggcatccacaaactaagccaccaggtctgagcttgatgcaaactattatcttggaatggataagcgatgagatcctgctgtatagcactgggaactgtatctagtcacttatgatggagcatgataatatgagaaaaaacaatgtatacataaacatcaaaactgg

SEQ ID NO: 699641 - DNA, 475 bp, Homo sapiens
  misc_feature (352)..(352): n is a, c, g, or t
aaaatacaaaaactagccaggcgtggtggcaggtgcctatagtcccagctactcaggaggctgaggtaggagaatcatttgaagctttggtgcactatgactcaacttgtgaatggccactgtgctccagcctgggcatcatagcgagactatctgttgagaaacaaatgtcttgtgaatgaatatattattgttttgttatgtttagttgtacaagaatttgcttttcttgccttttcgaacttctcatggttgtacgtagatctagttctttgcttctattgttgtgtgctgttttcaaatatacacacacacgtgtacacagcaaattgtatttgtccttttccttaantcatctgcatttggttgccattattttgctactaaaatagtaccttgctggactttagaacatatattccccacgcacatgtgccagaatttttctgggatgtcttggccttgccatatgcaa

SEQ ID NO: 699642 - DNA, 938 bp, Homo sapiens
gcggctggcggcggcggcggcgtgctcggtgtggctgcgctggtgatgtgctgtgcggtgagatgtgctcgcactgcctccatgccctggtcccctgtgccccccgtggaggtagagccgatgcagccccgtgctctgtgtgctacctgcggaaataacatgcctcatgtcctggtgtgccaccatgcactgctgccacttcttccatgccccatgccaaatggctgtggcttgtcagtggcttgggcccttgtatgttgcttggactctccctgtggccacgaatacgtggacatgggcatgggacagtggacaggcccatggtcacgacgtggtggtcatgcacgagtgtaccactgaagcctaccctttttggcgcacattggatttgcgtccggaatttggttttggcgttatttaacaattctgtgacaagcgccatacgactacgctaaatcgtgcttttaactcagcagagtgttttaactctaccctctgtcgtctttaaccagtgctgtctctggactgagcaagagggaggagggagcctgctcaccccactccatgggccttccccagcggtcaccaactgacctggggcgctgctccccacatgtccaaataagctgagaagtgcagctcgctgcaggcccagagcgagcttcccctcctccctgctctcccaggcccctgccacagcctctttccgttcctctcttctgatccaggcccctcagtccaagcttggaacaccttcacctcatcttaaaccgactcaaatatatcattttttaccagtaccagcttctctccattctctaggtggctcaatcattggcatcctgccccagcttggtggactgaggaatcaaagccacacttaggcccttctaacccaggagggagcccctctgcagtcctgtccctttacccacagc

SEQ ID NO: 699643 - DNA, 371 bp, Homo sapiens
  misc_feature (248)..(248): n is a, c, g, or t
gccagatactcgaagcgttttattttaaaatttttatgtctgggtgatgtgttgttgttgtttctatttgtggttttttacttgtttttgtttgttatgtttagttgtacaagaatttgcttttcttgccttttcgaacttctcatggttgtacgtagatctagttctttgcttctattgttgtgtgctgttttcaaatatacacacacacgtgtacacagcaaattgtatttgtccttttccttaantcatctgcatttggttgccattattttgctactaaaatagtaccttgctggactttagaacatatattccccacgcacatgtgccagaatttttctgggatgtcttggccttgccatatgcaa

SEQ ID NO: 699644 - DNA, 465 bp, Homo sapiens
tcccccgggctgcaggtattggcacttagatatatatatagtatatatatagagatatatcgagatatatatattttatatatagttattattttttatatgtgtttttactttttttatatttatttatatttttttatcattttttattttattttatttttttttttatttatatgttttaagttctcaattcttctctctttatcaccctctctctttttccccttcttttcattccccctcatccttcttatcatttcctcccttctctcctctatctctcccctcttctcctccccttcccatatctctcctttccttcctctcttctctattctcccctttcttccatttcactccattccattctcttttcctcttcctctttccctccatccttgccttacctctccctcttctttctcatctctctctctttcttcctcttcctctcttctttct

SEQ ID NO: 699645 - DNA, 238 bp, Homo sapiens
  misc_feature (28)..(28): n is a, c, g, or t
  misc_feature (31)..(31): n is a, c, g, or t
tgcccccctcctggtgcctgccttcttnttnggcttaccatgatgcttttgaaccccatccatgttgagatccacccatgttaacatgtgtatcaataataagtccctttttattgctgaatagtatcctagtatatagatataccacaatttgtttagctgttcacctattgatggacatttaggttgtttcaagttttgatctattatgaataaagctgctatatatataaatcac

SEQ ID NO: 699646 - DNA, 354 bp, Homo sapiens
ctccctccccagggccggtgggtggactttgaacaactcccttcagtaaaggggccagttttccctggcagtggctggtacttggctttcagcctggagtggcagctttgctaacagctgggttcactcccccttcatcctgggtgaaaacagtgctgtgctttgaaatgcagccaatgaatacccagtttgattacccagatttgggcagaccaacagtgctcgccaaagtggtttggcctgctatgggggatccagggggtgttacatgtccctttcatgttttgggggcttttagccccccaaaaccccttcagtagagccttgattaaaaggaaacctgcaggctttcca

SEQ ID NO: 699647 - DNA, 993 bp, Homo sapiens
ggtagtataaaaagaagcagtgggactgctcggaatgcctgtttgacacttcggacgaaattgaaggatcggtccttgtcctccacgcgagaggagccccctcacggcggtacccgagttcaatcaagaaactcgcaagctcaggcagttccagacgtgggatgcgtatacaaggggagcctgcctcgtgctctccgtagccttggacccacggacgtctggttggaaggctgaagaagtaaaagaaacattgcacgggtgctgtcagatgcctgcaaagacgaggctgcttatgttctccgaaggagtagacggcttccgctgaagagttacccggcagtctcccgggtgctccgaatcgactccttcaccaaagaatgcgacgagaagacggacatagtgctacgttgaaggcaccccgagatgaagacatgccgtgatccagaccaacccacgcaaagacgcagtgctgaggtatagcgaccatggctcagtcagggcaacactttccacgcagtcgggtagggtgaccgtataggaatgaaatgacccaattcaccaaagtaagagagcaaaacgggatgggcagtaactgcgttaagcaactactcgagatcgagagacgtcccacgcctggaccagtggcaacgaattgactcacagatttggccgttgtcctgtgttactggtttagggcctcttaaagaagaccaaggtacttggaaacgagaccttgtgccagggaagttcatacatgcaaagcttgaggatacctgggatattcctggcacgtacgacaaccgagccgacgtcctctcgagatttcagagaatctggtacggtacgatggtggaaccgagggtgtacacgcgtgcagaggtactacataatagtatgggagaccagaaatattcatacccacatgggggaaaaccccatcttggacttttgcagtcttagaaatgcttataaccggtgggcattcgcaggcgg

SEQ ID NO: 699648 - DNA, 338 bp, Homo sapiens
atcaaaccactgcactccagcctgggcaacagagcgaaactccatctccaaaaaaaaaaaaaaaggagggcctggtttgttgattggacgtccctctacaacctagaaagctgccctggttctggataaagaacatttatgggccggagttttggcggccctcttctttggagggtaaaatcttcaaaggccaacataaaaacaactggaagagcataaaacgggttttacacaccgtgggaaataagggcacaaggacgggtgtaaactatcccccattatgaaaagttggaatgtccaaaaggggaatttcttaaatggcaggctggcaatttttt

SEQ ID NO: 699649 - DNA, 568 bp, Homo sapiens
aggagatcatctgggaggaggcgaagcgaggtggatcatctgagcccaggagtttgagaccagcctaggcaacgtggcaagagctgtctctccaaaacctacaaaatttagccaagcttggtggtgtgagcctgtagtcccagctacttgggagactcacgcctggaagggatctctcgagcccaggaggcagaagatgaataaataaatggaagcaactgaatgggatgaggtctctcttgaaggagagagcaaaagagatttaaatagtaacaattataataaggctgggcgctgtggctcacgcctgtaatcccagaactttgggaggccaaggcaggcggatcggttgaggtcaggagttcaagaccagcatggccaacacggtgaaaccccgtctctattaaaaatacaaaattagccggacatggtagtgcgtgcctgtggtctcggctactcaggtggctgagacaggagaatcgcttgaacctggtaggcacaggttgtagtgagccgataaatataaaaagtattagagtactaacagaggaaagtttcacgatgatct

SEQ ID NO: 699650 - DNA, 447 bp, Homo sapiens
  misc_feature (18)..(18): n is a, c, g, or t
  misc_feature (59)..(59): n is a, c, g, or t
  misc_feature (125)..(125): n is a, c, g, or t
  misc_feature (210)..(210): n is a, c, g, or t
  misc_feature (432)..(432): n is a, c, g, or t
  misc_feature (436)..(436): n is a, c, g, or t
  misc_feature (439)..(439): n is a, c, g, or t
aaaactggaaaatcagtnaatagaaaatacatacccacccacccccggcctaattttanttttgtaagaagatggggtcctcgcctgcctcaggcccagtctggagctcccgggccttatgtgancctcttgccttggcatccccaaagtggtgggattataggcatgaaccactgcacccggcttaatttacgttttatagtgtgcaantcaatgttttgggtttttttttctttttaaagcatatttacagagttgtgcaaccgtcaccactatctaacttaagaatattttggccaggcatggtaggtggcacgtgcctgtggtccatgctgcttgggaggctgaggcagggggattgctcgagcccgggaggttggggctgcggtgagctatgatcacacccactgtacgtcagtctgcttgacaganaaangtncttgtttc

SEQ ID NO: 699651 - DNA, 341 bp, Homo sapiens
tccaagcacatctgtgacctacaccacaggtcacggcaatcgcagatccttaacccactgagcaaggccagggatcgaacccgcaagctcatggttcctaatcggatgtgttaaccactgtgccacaatgggaactcctacagaccttatcttaatgaatgaacaaaaaacagatggagtgagagcgtaatagtgggaaatagattaggatagtttgatgatgatgatgactgtggttataaagaggtcgagaaggagtatgccaaagaggaatcctagtggggtaagccaaggacgaggttgcaattagactaatatggggattgaacagcggaccctaa

SEQ ID NO: 699652 - DNA, 171 bp, Homo sapiens
cagtgagcaagggttcacatgcattcttttaactggtgcgcccctgttgtgcatcatttaaaacatgtggtatgtttcttattatctgtgaacacagtatgttcttgaatgatgttcatttgtcaggagaactgtgagcactgtactatgtggatacggtctgtttacatt

SEQ ID NO: 699653 - DNA, 216 bp, Homo sapiens
ggctcacaacttgcacagtgtcacattggactgaagatgtacaggaggctctgctccagatcatacaaaggcggcaggggctggtgtgctagccgttagcacggccggccagtatctgttttatctggcgggtgctgaccattcttggtgcaactccagggtctttctgggccttcagggggcggggtcataattacacacatacacatcatcatt

SEQ ID NO: 699654 - DNA, 348 bp, Homo sapiens
tacagccggtgggagaccctgggctctgcctctactccaccccaggcggcggtcctgcttgtggcttcgaggggctgctggggggcagaagacttgtccggagtctcgccagtggttgtgctccaaaactcaacgagggtccccagggtttgtggcaaaagccctgggccccagacattgactctccctgggaatttccccacaccggagaaaacagcaaaggttacgaagaagaaaatgccagagatcttggaacacgggaactggattgaagtgggctggggccatgaaatggcgagtttgaaacttgctgacgaggttgaccccctgggttgactgaaatgccgg

SEQ ID NO: 699655 - DNA, 325 bp, Homo sapiens
gctctcctagcacggtagtatgattaacagattcttgctgtatcacagtttgaattgctttatgttttgtctttattttgatagttgaaaacccgtgtttttgtttattttgtttggtttttgtttttggctatcttatgtacaaaggcatgttaggtatggcttttattattcttaattatttttactgggaaagtcttttccaagattttgaatagctaaatgtctacttttttcttaatattattttcatctcagcctagtgacgataattcaagttgtgatgaaaccagtaatcagcccagtcctgcctttatacgacgcc

SEQ ID NO: 699656 - DNA, 936 bp, Homo sapiens
ggccatttgcaagtctgagcaagctgaagtaagctgtagcctgtaatttccacacaagactggagctttgacggtgctgccctcatgctattggcaagctcacctaaccgtggaagagttgcatggctgcacaacaatcgaatcctgtgaggctggcttccctgcaatagtctctggcaggtgtcccgaaagtctgaggagaacttgatcctggaacgaagaaaccacactggatgaccctcccagtaagccatccatttacctgacggagatcgaggtcctggtatgtgcgggagaacccctatatcctggtcatgtccgaccatagcccgcagacctgtgctcgtctgtagtggttacaagcactcgacgttcttcgcttgctaggaacacagacttgctggcgtagcgggtgcctcgtcctgtctaccagtgggctgtcatgctgtcagcgtggggagtgtggcccgagaggaacccattagtggctccgcataggatgccgcactgcggcaggcgccaaggcattcagatccagagatgaccaggccaagcaggtgctgaagggcatgtcagatgttgcccaggagaacgaacaaaaagcaggaggagagcgcagatgcccgggcccccagcgggaaggtgcggcgttgggaccagggcctggagaagccccgccttgactactccgagttcttcacggaggactgtggcgccagctgcccggactgaccatctggcagatagagaacttcgtgcctgtgctggtggaggaagccttccacaggcaagttctacgaggctgactgtacattgtgctcaagaccttttctggatgacagcggtcccttcaatgggagatctactactggattggcgggaggccacatcgacaaagaaagctgtctgcaatcacgctgtcaatgcgcaatactg

SEQ ID NO: 699657 - DNA, 100 bp, Homo sapiens
taccctgagatccgagcgcacgagccgtcaatcattctcctaatgacgtctgtacgcgcgaccgcgtattactgtcaaagacgtgaaacagcatcctgtt

SEQ ID NO: 699658 - DNA, 388 bp, Homo sapiens
  misc_feature (45)..(45): n is a, c, g, or t
ggagctcagaaagtatctgagcatttcacccttctgtgccctttngccaagactatccttgagggaattttattcagtattcagggacccgctacaggatttcacactaatgagattcttggatcgatttgtataccgaaatccaaagctacacaaaggcaaagaaaatacggacagcgttgtgatgcagccaaaaaggaaacattttatagaggatgtccgtagccttgctgtgaatagtaaagagttccttgcaaaagaagaaagccagatcccagtggatgaagtgtttttctacaggtattataagaaagttgctgttgttaaagagaaacagaaacgcaacgaagatgaagatagcatagaagatgttgatgataaagaattt

SEQ ID NO: 699659 - DNA, 110 bp, Homo sapiens
aggtcccacaaaggagtgtgacacggggtccgagacactgagagtgtggaattgggacccacacacaaacagccacacgccgcgcaccgggccctcagaaacccacatac

SEQ ID NO: 699660 - DNA, 219 bp, Homo sapiens
cagtgtgtctggttcatttcagttccttagctgccaaatcggtgggcaggcactgcttcagtcactctgagttctttttgtcagtgatgatcagggtgtaaaggtatcttctgcatcgaactttaaacttcatgttgtccttattttttctgatcttgtcagattcggcatcccttttgttgtttttttgcaacccgtatagtagtagtaggcggccgc

SEQ ID NO: 699661 - DNA, 964 bp, Homo sapiens
gcattccaggtcagctggctgtggtcttagaggcaggagtgcctacccagtcctgcctcaggagcaggtgagtagctaaatacagacttaggctttttttttccccccttttaagatgctgggctcctctcccttttctttttaccaccctacctttatggttagtggttacaaagtgaccacatattatgtacttcgctgtaaataaagacagacaaaaagccaaaaaaaaaaaaaaaaaaagaaaaaaaaaaaatgtggggggggggtgggggcgagaaagaaagttttttaaaaacaatggggggggggggggggggcccagaggggataagggaaaaacggcgcaacagacagtgtccacaaaggaagaacctgatgggagagaacaatcgtcgtggggattctcccacccaaagaaaaaaaacggcgggggggagaccccaggaacgtctcttctagacacaccaccaaagtggagagctcgagggagcaacacggggaacatcacacaccggagagctaaggacggcggaagattcaaattaggcccgacgtgggaggacagagtagatataaagacaagaaaacaagagcaaaagcaagtatgtgtaacagaaacaacagaacaaggaaggagcgagagaggcagccgagagaggagcgaggcagagcgggcgagagcagagagagggaggggcagggggagagagcaacgaggcggcgaggggagcagggcgcagccagagcgcacaggagataggaggagggagagaagaagggaggaggagaggagcgagaagacgggagagaggtgagccaggtaggcgacgagacaaagagccagaagggggagcgacaagaggtcgaaagacgacacagaagagcaggcgaggcaggagcacgcgaacagggcagcagaagcgacgagagaggagcaagctaaggctggtagcacgaggag

SEQ ID NO: 699662 - DNA, 363 bp, Homo sapiens
gtgttgaagccctaacccccagtaactcagatagggccatttaaagaagcaattaagttaaaataagaccattagagttggccataattcaatctggtgtccttttaagaagaggaaatttggacataggaagggccatgtgaggacacagcaagaaggcagccatttgcaagccaaggaaaagggtgtcagaggaaaccaaacctgctgaccccttgatcctgcacttttagcctccaaaactatgaagaataaatttttgttgtttgagcccccctatttttggcattttatatggcagccctagcagactaacataccaaccagctggacatttggaaaaataaaactttttttaatcca

SEQ ID NO: 699663 - DNA, 321 bp, Homo sapiens
ctcacggatcaccgtataccagtcgtacctttaccatgccaggaaaatatattgacagagtagaaaaggcagagcgcggcatacgttgatcagtagttctttgatgtgaaaggggcagcacagtcctttaaacttgatccaatcctcttggcatcttacaaagttaaacagctaaaagaagtaaaataagaaggcaatgcttgtgagacatgtacagtgcatattaggaggaacacgcctcattacgattcgcctgcttgcttctcctgttcaatcgtttctttggaaggcagtggatttttctcttgcgtctctgtcttc

SEQ ID NO: 699664 - DNA, 681 bp, Homo sapiens
gacgggtccccgaaaaggcggcggcgatttctgtaccacaatggaggtgcatccactccaaatcgtagagggggtctcctccctcccctggggtccgcggactccaacccccgtgctctgtgccccaaatatgggctctcgacgtcaggagggggtcagttgcccacctgtcacctcgcgaggagacaggtgtgcgacaacctctaggttttggccgattgagactgagcagcccgatcgctggtccccccaaagtttctgggcccgtccacacgccccgggcgggaaggcagccccctcgggctgcgaagcacatcgcgaccaccagcacggggctcactcttgagcgacggtcccccggcgctcgactgaccgcatggtgtaaaaccgcagggacgacaccgacttggtgggggcctcagcggttgacctttgtcacatgttgtttcatgtcgccttgttgcatcacatggtgtattccctgcgttatcccctttatccgtgtataaccggtagtcgcccgcgattactgcgctgtcaatctcgacggactcagtagatctgtaatacagactcagctatagggcagctagcgtcgacctccagtgcgcagcgaccgagcccaagcgagtcaggagcgaggaccggccgcacaactcgatagcaacacgaacagaagtc

SEQ ID NO: 699665 - DNA, 157 bp, Homo sapiens
atcaacctaagataccacctgcctctcacactaagtagtactctctacttcttatgcctccatttactttcttagtttctctactccctataccgtattctctatgtttcctatccgcaacttcttttttttttttttagaaaaggtttctccttct

SEQ ID NO: 699666 - DNA, 410 bp, Homo sapiens
attggtggtatcggttcatgagtagtctttgtggggatttgtgagattttggtgcacccatcacccaagcagtgtacgctgaacccgatttgtagctttttatccctcacccctttcccaccctttccccctgagctccccaaagtccattgtatcattcttatgcctttacatcctcacagcttagctccacttatgagtgagaacatatgatgtttgcttttccattcctgagttacttcacttagaataatagtctccaatcttaaatcacttgaacctgggagacggaggttggagtgagccaagatcgtgccactgcactccagcctgggtgacagaggaagactccatctcaaaaacaaagcaaaaaaagagaatagtagtcttcaatctcatcgtggttgctg

SEQ ID NO: 699667 - DNA, 418 bp, Homo sapiens
ttataagatccccgagattggagaagtcctgggcaccaggctggcggaacgtggtttcgacaaggcctatgaagtccctggccaggttctggtgctaaagaaagacgaagacctcttccgggaatggctgaaggacacttgtggcgccaacgccaagcagtcccgggactgcttcggatgccttcgagagtggtgcgacgccttcttgtgatgctctctgggaagctctcaatccccagccctcatccagagtttgcagccgagtagggactcctcccctgtcctctacgaaggaaaggattgctattgtcgaactcacctccgacgtactccgggatcttttggcagttttctcccctaaccatttcaattttttttttggattctagctgttgcatgcctcccccgacctttttcc

SEQ ID NO: 699668 - DNA, 209 bp, Homo sapiens
ctaagatatgaaaggcttcttagagacaaagtcggtttctgagtaggctagtggtctatactctgtatgacatttatttgtggtgtctatctgcctctacgaataataatatcacactacatattagtagtattataccaattcatgcaagcattccctacttacttttatagcataacattgctctagaaacctcagcattaaatgat

SEQ ID NO: 699669 - DNA, 425 bp, Homo sapiens
  misc_feature (340)..(340): n is a, c, g, or t
  misc_feature (367)..(369): n is a, c, g, or t
  misc_feature (406)..(410): n is a, c, g, or t
tggtcctaagaatgggaggctgccttccttcccaatctccctgccagggcccacagcgtggccctagccctcccctccccgggatgtagaacggggaccctcgcagggttggggcgggggctgatactcctcggcccctccctaccctgccctgtgtgttggctttgtggccgtccaagtgccaattggcttttcgcccaaataagggctggtatttctcctctgtccttggaggtgatttccccctgaccccctcccccaggtgagtgaccacctgggtgccagttacaggtgtttccagagaccatataaagtgtttccgggagatggggttccaggngttactgtgggaaaagaagggtttggnnnagaggttattttatgacaggaaagtgaagtggtgagnnnnncaaaaaaacaaaaac

SEQ ID NO: 699670 - DNA, 148 bp, Homo sapiens
gatgaggtactggaggtaggggctttccaaaactggatactgggttgaggtggtatttagggttagggcaaagcccacttctgatggacactctaggatgacctattggtttctcagatggctggggacaagacagggactccatcac

SEQ ID NO: 699671 - DNA, 119 bp, Homo sapiens
gtgctggtaccacgtgctgggacacctctggtgctcgacacttcagtgtacatgcgtgcagcttggggttgccctggctggatcctgcagctccgccaggcacccatgatgcctgttgg

SEQ ID NO: 699672 - DNA, 1004 bp, Homo sapiens
  misc_feature (894)..(894): n is a, c, g, or t
  misc_feature (1004)..(1004): n is a, c, g, or t
taaaacccccagggggtggcgtttttggggggattggactttaaaaaaccccagaggaacccctcggtgttaaaagacacccccagtaaaaaaaaagtggtcttaagaagtctttcttcaaacaagccttggaggtctagaggctctccgtgggacagaacgagtccctttggatgctaccgagggaggaacaaatgtgttaacaagcggataacagcatataaagaggcccacttctctctctcagaggcggtgtgagtgtgggatcttgtccggctctctctttatttctcccccaaacatgtgcgggtggggcgtttttatagattgtgtgtgtggctttgtcctcttgtagtgtggagagagagttggccctttccacagtgggggaatttcccacaggtgtgtgtgagcctgtggggagacccgtttgtggagagaacaccgggtgtgttgtgtggtgggggcaaatcaccctctccgcaagaagagagaaacaacgaggggggtctctcctcaatagagaaggagaggacaaggttgttgtgtgtattgttgtgggtacttttgtgacaaaaagagcagttgttgtctccccgctgtgggcgtcacctggtgagaaaacaggagagaccccctccccgtagtgttgtgttgtattctcttgtagaaagggccgcccttcttagaacacagacaactgtggtgggtgtagtagacgtagtggagggcgccgctaatatccatctgctcatcagcggtgagtcgtcatcctgagtactatagtcaccccacctacaatgtgtcggcactgttgggagaacaacagctcctatttcttatgtagaggagtgttcgcccctccttatccgaagagggcggtggtagcggcancgacaaaaagatcctctgctgtgggaacaccacgatttgtttgtgagaagaaaaacctccctctcgcgaggggggaggcaaagccaacaagcgcatgtgaaaaagaagcn

SEQ ID NO: 699673 - DNA, 135 bp, Homo sapiens
cacgaggcccatcccaatcatataccatctctctccctcaataaacgttatccttctcctcactctctcaatcttatctatcatatcaagcagttgcggtgggttaaactactcacagttctgcacaatcttagt

SEQ ID NO: 699674 - DNA, 1012 bp, Homo sapiens
tgggtatccagtttcttagaagaaaatgtgtcacggacttggcgatctacagtcatgcaaaaccatgattattgagctacattctatcgaagctataaaaggagtaactatctgggtagtgagctcctcccattcgatctcctaagtctcccttgatattagctgaatccgagtgcatctaagggcaaggtaatggatagtaatgacaacgagttatacgctacagaaaactgtaagcctagtcaataagctagataggatacacagggggaaattctgtctgattcgcgtgttgctattgacgtcgatgggtgcttggatgacagctacttacatggatggtaagggaactgcatgtccaaaggatcatctcgagcaaaaggactaccggcagccccgtgtgtccgttcctagtcagagagggcacgtgacttttcagatttaccaatcgactgtgtgacttgacatccggtgggcccgtgtagttgcaaacccctggttccgccagggtagagttagcaggtgaactcacgagggggcgcatcattctcccgatcagaggattggttggcggatggctggctaaaggaaatctctggaagaaacctttgaaagtccgcggggaaattgcggcccatttaaatgccttaaataaattaacttttttcttaaacgggggctgaccccttggaatgcctcaattggcaagtgggcaagaattcgatacagtgcgactgcattatccatgcttgttgtgggcctgtcgcaaactgaagtgcgactatgggtttgcccaaatagacaacgcttgggccatagcacgctgaaacttttagtgcggacaacccccttggaaatgtgtcattttgcccgtgtgccacattttttacccgtgttgtgacccgcacagttgtggggcttgtaaaggtttatacccgtgaagtgtttttatccgaccttcccgggtgtggatcccatacccattttggcgcaagtatctataccggcaaat

SEQ ID NO: 699675 - DNA, 437 bp, Homo sapiens
taaaaacccctgctcctacgttgttttcccatttaaagcaaactcttcatccagggggcagtgggacctggccttcaaacaaaactccctgagtctaatgcgtgtctaggactagggcacaaaaatagagcttaaaatttggggaggataaggaggggatctactgcttcttttttccctttccccaatcctaccataccctgttgatatttttacactgcaggaaccacttctccacagggcaaaaatggaggagggggacctgtccatcatagcaacatgcgaacacaagcaaaacactgaataaagaattgtttggagattatgtgcagccctactgagcctcatttatatgggctcctagttgatccatggctcgggcttaaaatgagtaagatgatgagggtggcgtgccaagcacaaatcacttcatagaa

SEQ ID NO: 699676 - DNA, 149 bp, Homo sapiens
ttctagaggatcccggagaataaatgaaaactcagaggaaataggacaatctgctcgggagaaagaagctaaatctgcatagatttagtttggtagaatttaatttaaaatttaaattttaacaaagtgatgacactttgcatccagag

SEQ ID NO: 699677 - DNA, 855 bp, Homo sapiens
ctgggtgtgaaacaagtaatgtcggtgttaacaaaatggattccactgagaccaccctacagtcagaggagatatgaggaaattgttaacggaagtcagacacttcacattaagaaaattggctactaccccgagcacagtagcattctgtgccaaatttactggttggaatggtgacaacatgactggagccaagtgctaagcctatgccttggttcaaggggatggaacagtcacccgtaaggatggcaatgccatgtggaaccaacgctgcattgagagctctggtactgcatcctaccaccaactcgtgccaactgacaaggacccttgcgcctgcctctccaggatgtctacaaaattggtggtattggtactgttcctgttggccagattggagactggtgttctcaaaggccgcgtatggtggatcacctttgctccagatcacatcgttgacaatcgagaaatgttatagatctgtcgtagaattgtcaccatgaatgctttgagtgaagctcttcctggggaccaagtgtggtgcttcaatgtcaagaatgtgtctgtcaaggatgtccgtcgtggcaacgttgctgagtgactagcgaaaatgacccacacgaatggaacgcacgctggcttcactcgctcaggtgattatccgtgagaccatccaggccagagataaggcgccgggcttatgcccctgtattggattgccaatagcgggatcaccatttgcctgcaatttttgctcgatgttgcacggaacacgacttgatcggccggctctgggtagaacagcttggaagattgcccctaaactcctttgaacacctggtggactgctgccat

SEQ ID NO: 699678 - DNA, 401 bp, Homo sapiens
agccgcttaggataatcgcggcgaatgttgttgccatctgttgcctgacttcccgtccctcgcctccatccgggaacctccgggaccacgcccgtggccgtgaacctcagtcgcaggaccgtcggctcctaggaggctgctgtccgcgggtccccagaatgcaacctcagcatccagcgccttctgtgcagagcccccctgctgtcctcaaaactgtagtgtggcgtccaacctgggaagcccctccaggtgacctggccccccaggtgacacccctgggattgacctgctcccttgcactgtccaattgctgtgtgtggacgtctcccgagagctctgcaccccgtgttcttctgcagaacacggcctcctttggtgtcccagcatggcagtgagcaaga

SEQ ID NO: 699679 - DNA, 133 bp, Homo sapiens
cgtttccaaccgaaggaaaaagggaatcgtatcggtatgtccgcgtatccagaaaactccaactccttttcgaacccgtttgctgatgcaagttaggggtgattggacctggcttacctgtctggcactgagg

SEQ ID NO: 699680 - DNA, 217 bp, Homo sapiens
  misc_feature (61)..(61): n is a, c, g, or t
  misc_feature (63)..(63): n is a, c, g, or t
  misc_feature (144)..(144): n is a, c, g, or t
  misc_feature (195)..(196): n is a, c, g, or t
gacgagtcttctcaatgggggggcgggtgagctccaggcaccccgaaggcactttctttgnancaagtgcgattggtgccatcgagatctgtcacagagtggatgacgtgtacatacattaacttattacctcattttgttatntttcgaaacaaagccctgtggaagaaaatggaaaacttgaagaagcattanngtcattctgttaagctgcgta

SEQ ID NO: 699681 - DNA, 963 bp, Homo sapiens
tggtaaagcgctgatcctgttaaattgggaaggaaaacaaaacaatccagaagcccaggagggacaggtggatcttaatcctcctcctcgtggtttccagccccagccccacactgtggccctttcgtgggaatttcattcctcattcacgcggcccgggagacggaacacccccgatagggagaagcgcaaaagaagaagtcagatgtgctctctggaaactccaggcggacaattgaagagacgggatgtttcaccaccgtgcttgcggaccctagatataggcgctagggagagatacagacaggacaagcagtgagtgagaatggatcttgggaccaatgcaccaagtctatgaaagacctggggtcatgaaaggcgtcatactcctaaagaaaatcctactaatcatatccaaggccccagagatgtaatccaagactacactatcgtttgcccctacaattccaagggacacccacacaaagtgccagagaacaccagacacgccgccgcaaacaaaggggcgatattgaccctactgcgaaaacaaggaacgaccagagtgagggatccactttactacaataacaagaggcagtcgaacacaagcttccccagagggcaggacccttatgcggagaaattcatatgggcacagggggtataacattcattgggagccccctattaccagagaaacacgatcaacggagatttgtggttacaccaggagaagccaaccaaattacctcgagcacggtaatcagagagctttacacagctcatccttagggggagtaccgaacgacacgaagaatttttcctcacgagaaaaggggaggtccttcaccgagaggagaggatacaacaaataaaagagtttgtcggagagaacgacacgcctcaggatttccaggggagggaccacgatgaggacagatatagtacagggagcatcac

SEQ ID NO: 699682 - DNA, 385 bp, Homo sapiens
  misc_feature (67)..(67): n is a, c, g, or t
gattcccgaccgggaggacagggccggtcgtgccaagacgatgggcatgaccggccaaaggatgacnccgcagggctcagtgcaccacgcgacagaagctgaactcgccgccctcgacgttgaccgggatcacatcattcgggccgaagcgcccctgcaggatgagcttggacagcgggttctcgacgcgctgctggatggcgcgcttcagcgggcgagcgccgaagacggggtcgaagccgaccttggccagttcgtccagggccgcctcgctgacgtccagcttcatctccatcttgtccaggcgcgcctcgagctggcgcagctggatgcgggcgatggacttgatggggtcggcgcccagggcatggaagatgacggtctc

SEQ ID NO: 699683 - DNA, 772 bp, Homo sapiens
gtgtgtcactgcacatgtaagtagaaatattattttacttagttttaatatgtggacattggttaagggtcccaatccttctcatttcttctcttttattcttttgcatacttttagtgcaggttttaactcagttttcttattgttttactttcaaaatttgaacaagtatttaagttttttaaagcaactttattgttaactcatttaaaaaaatatattgctccttaaatcttcttaacatatttgttcctgccttctcctgtcttttaactcatctttgggaagacatttagaattttctgattgtttcagtttcgtgagcatttatactatcatttcttgtaccaaaatagatattttcaggtcttatttcaagttggctggtaagaaaaatagaaatttccattctatggaaaaatacagtgataaagagtaataattctggcatcggttacatttttttaaaaaagataaaattgaatagtcatctgtgaaaggaaagttcacctgactaagagtccataaaattattcaacaatataagccactgacatattcattgttcactaatggggatcaaattcagaagatcatcgtaaatgataaacccattgtatcattttcctacagtggaagtcatctctttgaattattcttatctttagtgagaaaatactgaaagaacatgcttatctatttgactaattatctgaacttcaagaggttctgataagaagtaggcctggcagcagataatttcatcttagaa

SEQ ID NO: 699684 - DNA, 443 bp, Homo sapiens
  misc_feature (17)..(17): n is a, c, g, or t
tatcagagcataccccntaggcatatttagtcatgtggtaggtgttatgaaagcaggtttgctttattttcttgaaatgattgtcaccttggcttgaattgtctgctggtgcgtcacaattagaattttaattaattggtggagaaacacaaaagccagcgagatagtctggaattcatttggagtaaaacgggacacaaaagaagctagcttcaagagcaggaaaatgcctgtgatgacaaagaagcctaaaagaatgatttgcataaaactgaaacacttgaaaagcttcaagataataaggttaaatacaaaaggagactcaacctcagagtggctgcttttgaaataagttttctagagggttttcaagaacaaatattttctacttaagttttgagggcccttcaagtttaggtcagtgatatctgggattctgggtt

SEQ ID NO: 699685 - DNA, 140 bp, Homo sapiens
attgacctaaccaggatgcactatggatgctatcaaagtatactgtgatttctctactggcgaaactgtatcgggccaacctgaaacatccagccaagacttggatagggctcaaggcaagaaacacggttgctaggaga

SEQ ID NO: 699686 - DNA, 377 bp, Homo sapiens
taggtgtctgaatgagtgaaggtatcagtgagtgagtgactccaggatcgatctggcaacacaccagggctcagacctcttgggctaagtgccagtctcagtcctcttggtctgtgtaacccaatagagatcaccccaggctgtggcttacgccaagggcacacccatgctcacaatcaaacacacacgcacgctctcgcactcgtgcacacgcgcatttgaggcaagcttgtggtccgcagacagagacaggactcagactcagactccactctgggtcagctctgcagcctccagagcacaggagtagcagggcactctgagtccgtggcctggtgacaggcctcgctctagatatctgacagccagctggtgcc

SEQ ID NO: 699687 - DNA, 267 bp, Homo sapiens
  misc_feature (14)..(14): n is a, c, g, or t
aaatttactcccgntcgaccctgccttagccccacaagtagtggtactataggcacacaccaccatgcccatctaagtttttgtattttatgtagagacaaggtttcaccatgttgcccaggctgatcttgacctcctgagctcaagtgatctgcccacctcggactcccaaaatgctgggattataggcgtaaaccaccatgcctggccttaaatcaaatttagagtcaacatctcttatcactggagcttctggagaagtcgacg

SEQ ID NO: 699688 - DNA, 338 bp, Homo sapiens
tatgttttactcgttccaccttccatacctcctactatgtcctcttaccctgtgttctcaaaaacttcaaacctcttcaactcacacctgacctaaaacctaaatgctttattttcttctacaatgcctgcttgcaccccaatacaaactcgacagtagttccaaatcaccagcaaacatggcactttcaatttttccatcctacaagatctaaataattcttgtcgtaaaatgggcaaatggtctgaggtgcctgacgtccaggcattcttttacacatcagtcccttcctactctctgtgcccagtgcaactcgtcccaaatcttccttctttccc

SEQ ID NO: 699689 - DNA, 919 bp, Homo sapiens
  misc_feature (806)..(806): n is a, c, g, or t
  misc_feature (821)..(821): n is a, c, g, or t
cttgtcgtggctggttttattcgttccgaggctcgctggcgcgtcctgttgcctgagcgtttagccaggtggctatgagcgtccggtcccacgccgccgggtccggcccgtcgcgtggtacggttgcgggggcttccaggtcagggtaggagagaccggtcctggtcactggccggtcgcttcttacaagcgtgactgtggaaactgcacaggatgctggagcggagggaaacgcatggtctcaggagcgagaccctgaccaaagtctgcgacctcatgtgtgcaggaggggtccgcgctgtcccccttcggccgtggcttgcgaggactgcagctgcagggacgagaaggtggcgccgctggctccttgacgcgctccctgggcctcagggtcctgccctccggaggagcagcctcgaggctggtggttttcagagcaggaggccgacgttttctccgcattggaagagcccgccgtctgcaggggcctggaggaatcactggggatggtggcacaggcactgaacaggctggggccttttgacggccttcttggtttcagccaaggggctgcgctagcagcccttgtgtgtgccctgggccaggcaggcgatccccgcttccccttgccacggtttatcctcttggtgtctggtttctgtccccggggcattgggttcaaggaatccatcctgcaaaggcccttgtcattgccttcgctccatgtttttggggacactgacaaagtcatcccctctcaggagagtgtgcaactggccagccaatttcccggagccataaccctnacccactctggtggncacttcattccagcagctgcaccccagcgtgggggctactcaggttcttggccagtttgcagttagaagtccggaatgttttggccttatccggtcta

SEQ ID NO: 699690 - DNA, 967 bp, Homo sapiens
  misc_feature (581)..(581): n is a, c, g, or t
  misc_feature (596)..(596): n is a, c, g, or t
  misc_feature (749)..(749): n is a, c, g, or t
  misc_feature (812)..(812): n is a, c, g, or t
  misc_feature (815)..(815): n is a, c, g, or t
  misc_feature (832)..(832): n is a, c, g, or t
  misc_feature (854)..(854): n is a, c, g, or t
  misc_feature (886)..(886): n is a, c, g, or t
  misc_feature (921)..(921): n is a, c, g, or t
  misc_feature (930)..(930): n is a, c, g, or t
  misc_feature (945)..(945): n is a, c, g, or t
tgcctggcgggcttcctggcagagcgagcggggcttccgtgagaagaccggggcgctgaggaatggcgctgcggggtcgcgccgagctcgtgtgcctcagcggcccgcacccggtccccgacccccctggtgcccctgatgggctgccagatcatgacttctgtgtgtcctgccctccggaggagcagcctcgaggctggtggttttcagagcaggaggccgacgttttctccgcattggaagagcccgccgtctgcaggggcctggaggaatcactggggatggtggcacaggcactgaacaggctggggccttttgacggccttcttggtttcagccaaggggctgcgctagcagcccttgtgtgtgccctgggccaggcaggcgatccccgcttccccttgccacggtttatcctcttggtgtctggtttctgtccccggggcattgggttcaaggaatccatcctgcaaaggcccttgtcattgccttcgctccatgtttttggggacactgacaaagtcatcccctctcaggagagtgtgcaactggccagccaatttcccggagccataaccctnacccactctggtggncacttcattccagcagctgcaccccagcgttggaccagtttgcagagtgaaagatcaagaaatgtctctgctcctacatccagctcctctaggggcagcctccgtcatccatgccctcccaggaccctccactcactgctgtgagtgcgcctnaccagaaccagttaagagacaactatcaattcttgagacccaaattataagggccctgccctntantgaaaaaaaggggagcncaaggccttaatggacattganttgtgaaaacgcaaacatgaatatggttgganagccctggattaggagggtgacatggggaaggcanaggctggcnccatggtgactgccncataataaagtggtgatttgga

SEQ ID NO: 699691 - DNA, 104 bp, Homo sapiens
ttcaaacatacaagtttctcttttttcccccccaatgacagttcaacaatagccataagcttggggcaatgacagtttcaacaatatccataagttgggggggt

SEQ ID NO: 699692 - DNA, 859 bp, Homo sapiens
  misc_feature (581)..(581): n is a, c, g, or t
  misc_feature (596)..(596): n is a, c, g, or t
  misc_feature (768)..(768): n is a, c, g, or t
tgcctggcgggcttcctggcagagcgagcggggcttccgtgagaagaccggggcgctgaggaatggcgctgcggggtcgcgccgagctcgtgtgcctcagcggcccgcacccggtccccgacccccctggtgcccctgatgggctgccagatcatgacttctgtgtgtcctgccctccggaggagcagcctcgaggctggtggttttcagagcaggaggccgacgttttctccgcattggaagagcccgccgtctgcaggggcctggaggaatcactggggatggtggcacaggcactgaacaggctggggccttttgacggccttcttggtttcagccaaggggctgcgctagcagcccttgtgtgtgccctgggccaggcaggcgatccccgcttccccttgccacggtttatcctcttggtgtctggtttctgtccccggggcattgggttcaaggaatccatcctgcaaaggcccttgtcattgccttcgctccatgtttttggggacactgacaaagtcatcccctctcaggagagtgtgcaactggccagccaatttcccggagccataaccctnacccactctggtggncacttcattccagcagctgcaccccagcggtaggcctaccttaaggttttggaccagtttgcagagtgaaagatcaagaaatgtctctgctcctacatccagctcctctaggggcagcctccgtcatccatgccctcccaggaccctccactcactgctgtgagtgcgcctnaccagaaccagttaagagacaacttttatattttggaacctttaagggccctttcctggccttgagggggcgcccaggctttttggctggt

SEQ ID NO: 699693 - DNA, 1016 bp, Homo sapiens
  misc_feature (581)..(581): n is a, c, g, or t
  misc_feature (596)..(596): n is a, c, g, or t
  misc_feature (645)..(645): n is a, c, g, or t
  misc_feature (650)..(650): n is a, c, g, or t
  misc_feature (653)..(654): n is a, c, g, or t
  misc_feature (659)..(659): n is a, c, g, or t
  misc_feature (798)..(798): n is a, c, g, or t
  misc_feature (861)..(861): n is a, c, g, or t
  misc_feature (864)..(864): n is a, c, g, or t
  misc_feature (881)..(881): n is a, c, g, or t
  misc_feature (903)..(903): n is a, c, g, or t
  misc_feature (935)..(935): n is a, c, g, or t
  misc_feature (970)..(970): n is a, c, g, or t
  misc_feature (979)..(979): n is a, c, g, or t
  misc_feature (994)..(994): n is a, c, g, or t
tgcctggcgggcttcctggcagagcgagcggggcttccgtgagaagaccggggcgctgaggaatggcgctgcggggtcgcgccgagctcgtgtgcctcagcggcccgcacccggtccccgacccccctggtgcccctgatgggctgccagatcatgacttctgtgtgtcctgccctccggaggagcagcctcgaggctggtggttttcagagcaggaggccgacgttttctccgcattggaagagcccgccgtctgcaggggcctggaggaatcactggggatggtggcacaggcactgaacaggctggggccttttgacggccttcttggtttcagccaaggggctgcgctagcagcccttgtgtgtgccctgggccaggcaggcgatccccgcttccccttgccacggtttatcctcttggtgtctggtttctgtccccggggcattgggttcaaggaatccatcctgcaaaggcccttgtcattgccttcgctccatgtttttggggacactgacaaagtcatcccctctcaggagagtgtgcaactggccagccaatttcccggagccataaccctnacccactctggtggncacttcattccagcagctgcaccccagcgccaaaagggggggggccccnctttnaannccccnccttccaaaagtttcttggaccagtttgcagagtgaaagatcaagaaatgtctctgctcctacatccagctcctctaggggcagcctccgtcatccatgccctcccaggaccctccactcactgctgtgagtgcgcctnaccagaaccagttaagagacaactatcaattcttgagacccaaattataagggccctgccctntantgaaaaaaaggggagcncaaggccttaatggacattganttgtgaaaacgcaaacatgaatatggttgganagccctggattaggagggtgacatggggaaggcanaggctggcnccatggtgactgccncataataaagtggtgatttgga

SEQ ID NO: 699694 - DNA, 353 bp, Homo sapiens
  misc_feature (85)..(85): n is a, c, g, or t
tttgtatttttagtagagaccaggtttcaccgtgttagccaggatggtctcaatctcctgacctcgtgatccgcccacctgggcntcccaaagtgctgggattacaagcataagccatcttgcccagccaataataataattattatagtatgattctatttatataaaagttcaaaaacagacaaaaaactcctggagttcttgtatgaggatgataaatttgtaataattgatcaagttgtatacataagattcatatatgtttctgtatataaactttatttttcaaaataaaacttaaaaatcttaactaaaagggagcgagatagaagagagggaggaaggagatttt

SEQ ID NO: 699695 - DNA, 127 bp, Homo sapiens
aaagcccgctttggccccgttttcccgcccttgaaccccggccccgggggggggggggggggtttcttgcgccccgggattcaattaaacccgcccggagaccacgccgggcccaggggttttgcca

SEQ ID NO: 699696 - DNA, 212 bp, Homo sapiens
tgtggctacagctactgtgactacccctgtcagcaagcccactgtcctgagcacatgaatgtctgctaccagtcagctactgctcctcagcaggaagcggatgctgaggtgaacactgggaacacttaaataagtactccccaggggagctccatcgaagcaacacaaaatacagccacccttcaagcacaaccgggaccaagcggcctccc

SEQ ID NO: 699697 - DNA, 135 bp, Homo sapiens
ccggaacacacagagtcttcaagaccaacacacagaccttaccgagagagccctgccggaaccctgcggcggccttacttacacccagaggcgagggccggggtctaaaattaattccagagggattgtattggc

SEQ ID NO: 699698 - DNA, 134 bp, Homo sapiens
  misc_feature (64)..(64): n is a, c, g, or t
gtcaggtctggtcttgatggtgaggcatctctgggcgctgcccaatcgtggctaaaaagtactnctggccggaagtggtgtcgaacgttgtaaggaataacatttctggcatttccaagaaaaggtgaaggacc

SEQ ID NO: 699699 - DNA, 429 bp, Homo sapiens
  misc_feature (7)..(7): n is a, c, g, or t
  misc_feature (11)..(11): n is a, c, g, or t
  misc_feature (17)..(17): n is a, c, g, or t
ccctggngccnaggttnctcacattgtcaccttaacctttaaaatcgactccttgcattttggtgtggtatgaaaaaagaacatctgtaattatctgaaaaggcgattaaaatcctctattctttcccatatacatatctacataaggctgaattttcttcacatacttcaaacaaaacaacatatagtgaccgactgaatgcaggaggaggcatgaaaccagctatcttctattacaccagacattcaagagccgtgcaaaactgtaaaacaatgccactcttcccactaattatttttgtttggaaagtataattatttttctaaaatacattatctatgtaatataatttctttccatgctaacatccttaaactcaatcactaaatatctaacaaaaaaaaaaccaacggcctgcgtggcctcac

SEQ ID NO: 699700 - DNA, 139 bp, Homo sapiens
ggaccttcaaactccataaccagttccctatattaattttttgggcccaggactataatgtatttagcgctcatatttctttagtatccttcatcctcgaacacttctgcagatcttttattgtgctcaggcagtcctg

SEQ ID NO: 699701 - DNA, 471 bp, Homo sapiens
  misc_feature (55)..(55): n is a, c, g, or t
taccctggatttgatttcctcaatttgaagtgttgggcaaaaagttttttttgtntcgtaattcagtgggaacctgtaacggggttggggtaggttcctccccccttgggccaagggcccctttcccttggtgttttgtccccatccacctcctttaaagtggttttgggcctcagctttgcccagggccaaccaggtttttctgggaaaggaagggaatggggagaagggaaaaacaaccagtgttttagcctcaggagcttcccctcccccttcctaattcccctcccctttgcttgaaccttgaaccttgactgggagctgaaaagagtttcaactgttggcattaaacctccttttccccgttttggggaggtggggaccaacaaataaatcccccccttcctttaactgtcgctgtacttttaagttcagccagctcaaattttataaaaattaattaaaatttca

SEQ ID NO: 699702 - DNA, 244 bp, Homo sapiens
  misc_feature (38)..(38): n is a, c, g, or t
  misc_feature (89)..(89): n is a, c, g, or t
  misc_feature (99)..(99): n is a, c, g, or t
  misc_feature (123)..(124): n is a, c, g, or t
  misc_feature (157)..(157): n is a, c, g, or t
  misc_feature (212)..(212): n is a, c, g, or t
agcctcccaagtagctgggaggacaggtgtgagctgcngcacccagcctgtttctctttttccacttttcttttttctcatctcttttntgggttgccngtcggctttctcatcaacatgttnngcaagcaccttatacatgtgtccttgggagccntgagacttctttctctccttgcctccacccacctccaaaggtgctgagctcacanccacacccctctgtcgttcttctcgcagccgt

SEQ ID NO: 699703 - DNA, 629 bp, Homo sapiens
  misc_feature (272)..(272): n is a, c, g, or t
  misc_feature (274)..(274): n is a, c, g, or t
gaccaccaaggaccaatcaaaaccagactggctattagtcagtcacatttaatgactgcacttggtcacacaagaccatcatttagcgaagaggactggatgtattttgctgagctatatgaagctttcaaaatcaaagaggagaaaaatcaaagtggaacaatgtttcgacctggcagaaagtactttagcataaaatatacttctttttgattggatctgttaggtttattggggggctgcaaggtcatgaaaaaagggtcatttccttnanacccaaataggggtgggttgcgcaccccggcaaatttttttttgaattgtaatccccataattcccccatgttaaaggagggactgtgggggtgaggggattggaccaaggggggggatttccccccccgcggttttcataattgggagttttcccaagacccctgttaatgaaataatattagccaaatggtggaactaatttatttctttgaggaaaagataataaagaatgtaattaaatttaaatttcttggaattcccagttgtatattcatcacctttgtagcatttgacaaattttatgcttagcagcttcttcactgttttgaaataaaatatcctattacctactg

SEQ ID NO: 699704 - DNA, 364 bp, Homo sapiens
  misc_feature (85)..(85): n is a, c, g, or t
aatattccaaagagtccataattccaaagccagaatccaagtaagtacctgttgccataccccctgaaagatggtcctgaaaggncccaatgtttgtaagataaaatgtacaagagtaggaaacctcactggatatggatgccatgagaaagaaataaagatgacagtttctggcttaagtaccctgggattgcactgctactattaaccatgacatccctggaataaaagcaggtttgaaaaaaggccatttggctgggtgcagtggctcacatctataatcccagcactttgggaggccgaggtgagcagattatttgagtctaggagttcaagaccaacgtgggcaacatggcgaaagcct

SEQ ID NO: 699705 - DNA, 711 bp, Homo sapiens
agcggggcgctcagccgggcacttgtgtgagtgcgggtctctgctgcaggacgccggggtgccggcgcggcgttggccgcccccgtgcctccgccgaggtgcagcgctgcccgagaggccattgtgcctgctgctcctgctccgtgcggccctgtgctgccccagggtgtgggcggtgtgagtgcctgcctgctgccagttcagccgcaactgcttacagccggcacggctgcacgtcggttctcgacgtcagccctggcttccgggcccaccgctggcgcgccgatttttgtttcgcgccgcgaacgcgccggcaggtagggggtgggaaaccccagagcggtgagacgcccgcgaggactttgcgggcccgcgcgccaatgcctgtcagtcgcccagctggcgggctggcaggtgggtagtgctccgaagcaacacagaagcctggacgcatgggacgggcgcaacagacatcctccagcaaaaccgggcgatccacgcggtccggatccttttggaacacaggggactcaccgtgacagcttcgcaggaccaggctccctgacaagcccaaatgttgatgatttcagaaaccacattatgaccagcatgtacacatgatcttcttaggaaagacaaagaactgtatcccaagcgggttgccctttaaaaaccccccgttgttggtcctccctggaaggtgtacgtgtg

SEQ ID NO: 699706 - DNA, 385 bp, Homo sapiens
  misc_feature (166)..(166): n is a, c, g, or t
ccagtttaatttgcgggacgatcgcggtcagcctgtaccgtattttattcgccatgcccgtgagatcgatccaggcctaatcgatcggcaaatagttcattacggtaattacgatccctttatggagtttgatatacagatcaaccagattgtcccttctaatggntatcgcacgctttatatcgaagcgaatcagcctggcaacgtaattgcggcaaaaagtgacgctgaagggatactggaaaatgctttctggcaaattgcgctcaatgaggatggttctctgcaactggtagataaagacagcggtgtgcgctatgaccgggtattgcaaattgaagaaagctctgatgatggtgatgaatatgactattcacccgcaaaa

SEQ ID NO: 699707 - DNA, 283 bp, Homo sapiens
agcggggacactcacttgacggtcaggatgttcaagacagtctaaccaacgcggtaaaatcccgactctactaaaaatgcaacaattagccgtggcgtggtggtgcatacctgtaatcccagctactcgggaggctgaggcagaagaatcgcttgaatccgggaggtggaagttgcactgagccgagatcgcgccattgcactccagccggggtaacagagcaagactccatctcaaaagaggaaaaaatggtaagtgatggttccccgctgggtacggagct

SEQ ID NO: 699708 - DNA, 373 bp, Homo sapiens
actggaaacaaaataatgaaaccctcctgaagaaaccagactttgggcttactataggcaagactttaaaccattgtgcttaactaaggccaaagagggtaaagggaaacctgggccaagaactaacgggagacacgatgacctatgaaccaaatgggaatttccatcacagaccccgacgttataaaaagggacccaagattaatcttggagctgaaaagtaccggaactgaaattaattccctaaaggagttccacaggtgatccggaccgggagcacgaatccaccaacttggaaaaactaaacgcaagggccactgcataatcaagtctgaggaacaaaagagaacacagcctaagaaacgggggagac

SEQ ID NO: 699709 - DNA, 398 bp, Homo sapiens
aacaacctagggtcagttttgcaggtggtaaagccatttaccaagatagttgtaggtaaagaagggcagatttattagagaaattgtgaaaatatgttgcagtgggcagctcagcagagaaggggctacctgcaaagaggcaagggctggaggaaagttttatagggtcctgctgaagggtgcctaccgtgtggaatgaggtcattgtgcccgcaggttgtttgtgattagctgtctcctaacaattgttcatacaataattgttcattattgttctcaaccttggggctctccccaaccctggggacccttccttattgttgcttacttatccaggtctccacataaaaggtgtggaaacttcattcattcatatcttcaacacaaattgtaggtag

SEQ ID NO: 699710 - DNA, 184 bp, Homo sapiens
tgcgacgtatgatgggaagcagaagagtagggaggttctgctgcagcaggtcgaagttcaccccattcaaacagagctggcctgttccctgatggagttccattcctgccaggacacggctgagtaacaacgaagccattcaagaaaggcgggtgtgaaatcactggcaccccatggagagacc

SEQ ID NO: 699711 - DNA, 145 bp, Homo sapiens
caatgatggtcctcagctcacttggatcttgcatgtgagctgagagaacaaagtataaaccataacgctttggccatgcgactatggtgtgctcacgcctgtggtcccagcacttttggaagctgagtgaccatcgttggcgtgc

SEQ ID NO: 699712 - DNA, 446 bp, Homo sapiens
  misc_feature (229)..(229): n is a, c, g, or t
ctagatcactgcaataaaacaagtatcgcaataaaacgagtcacataaatctttggtttcacagtgcatataaaaattatattcacggcatactgtagtctattaagtgtgcaatagattatgtctaatagatactttaattaaaaaatattttattgctgtaaaatgccaacaatcgtttgagccttcagtgatttgtaatcttttttctttgatgagacggagccgncttctgtcatccggtctataatgcaatggtgtgatcatggctcgctgcatttttgaattcctggggcttagggtgatcctcctgcctcagccttcctattgtcactgggtagaggggtcgtgactgcaagttgtccaggattcttgggcgttttgaaattaaagaattgggaccaaaacgcccagccaaagcaaaggaaaggatggaagccaaccaa

SEQ ID NO: 699713 - DNA, 561 bp, Homo sapiens
  misc_feature (163)..(163): n is a, c, g, or t
  misc_feature (409)..(409): n is a, c, g, or t
  misc_feature (556)..(556): n is a, c, g, or t
gccaaaggggtcctcagcccacggcaacctccccatcctggctcaagtggtctcgtgcctccagcctcccgagtagctgggaccaccaggagagcccccaccaggccctggctaatttgccatgttttgtagaggccagggtttcacccatgttgggccaggntggtctcagactcttgataaaataaaatgattaattgtggcatttgggttttcaaaatgagaattgtgtttaaaatgcaaaagagggaaagaaagttatatgtaatcttcctatatttagcttttattttacttcattggcagtctgggtaaaaaattcatagaagacagaagacttggtttctagtcttggcctgaaacttttagctgtcacaactgggggatgctgttggcatctagtgggtgnaggccagggatgctgcaaaacattccacagtacacaggacagcgcccttacaggttgaaggtttatacaaataatattaaagctctttttttatattaatgtggaaaaatgttattttggttcccatgagaaactgctactatttgnaattt

SEQ ID NO: 699714 - DNA, 991 bp, Homo sapiens
gtagagcttactcttggagtaccaaagctgtgcaagattgtaagcagtcataagatgtctcagtgtacaggctgtgctttgaaatcatagtagtatattcgctgtggctccattagttaaatgagatatatatttagtgcagaaaaaagacgattgaaaacagctattaagtgcacctagtgaagagtctgtacattttagatggctattaagaggcacatttatttacattggtatattatctttaaatcctcatagtcgaaataagattctccagagggacgttttaattagtcaagatttcgagactgtagactatgtatacatctgtttaggacatcaacttatattctgacaaagcgtgcctgtgttgtataacgagtcaatgtgtgctaaagcttcagtcaacttctagagctgcttgtttgcatcttcagctaccacagcatccacagcgtgccactcgtacacagtaacagctggacagacccagtaacatgtacagtacatcgtctacgtgaatgtcgtactcgacagtggctaaaactgaaccagccttctcttttgtaactcattaagagatttcctctctaagggaccgatcttcgagtagcacgttccagcctagtcgtaatcagttactaatcgtaacttccgggaatttcccgattctcctcttgtgcaccactagaaaaccagcgatacactattcacacaaccgggtagccctcaactaaaattaccaggcccgcgaaacacccctctggcgcctcgtaccggcgcacgccaggttctgccagacacaaaccttgaccagcactggcaacaccaacctcgggggacagcacaccgacagcccacccatacgggccccacactccgcagccacccccgtcctacacgccgagaaacccccggcaacccacacccacccctacgtgcaaaacccggacatacaataggcggcaacaccgacactcacaccccgcaa

SEQ ID NO: 699715 - DNA, 905 bp, Homo sapiens
cttccgccgcccctccccgatcgaggaatcatttccccctgcgctctggaggaggagatcttcccttgcccgccgcttcctccggaggaggagggaggacctgaggacccatagcgacccacacagccaggagacggtgagcagatgattggagatcgatctcgtgtctcagtgtggatgacatgattaagaatgatcattgaaagcgggtgtcatactggatatgtgccccacaccacgtggccaactccatatcaagaacaaagtccaagtaaccaagggcctgcagacagggggcaaagcaccccatgcttccaataggaaatacccattacgagcatcacagacaacctgcccaggtacggctccaggttcagaagacagacacacgtccagtagacaagccccagaccacagacaaagcctcaggtcaacaccatgacagacccagacacccagcctgtggtcaatggctaaacaccacgccccgagggccacgaagcgtacaactgctggctcgagaccatacggtgggctccagggccctacagtaactccatgtaggctaccaagagcaggcgatgagcccaggagactctggggccacaccgagtaggagggagggcgcagagaccagcaagtgacaaggtacccgtcactcagaatacaggcagccaaggagagacgagtggaacgtgtgccagaccggcggccagcagacagtggacctgaggccgcccgagtaaggaggacgcgaacaccggaagcgaataaccgaagagaggaggcgacgagcagcacacaagaagaagcacgaaagcacgaacaagcggcaacaaagaccggtgcacagccgccgacgcgaagggaacaacgagcggaaaggaaaggcaccggaacggccg

SEQ ID NO: 699716 - DNA, 101 bp, Homo sapiens
gcacataattacacacacacacacacaatttcgaaatgagacagaattggttttttaaatgagaccattattacaggagagccaacagacaataggagatc

SEQ ID NO: 699717 - DNA, 238 bp, Homo sapiens
agctataaaatactgagcatgccttggggtagcatgttttccatccaaaattatgattcatgaattctctttgttataaactaacctgcagaatgaggaaggaaagaagaaaaaggcaggagaaacatatttttggctttaattctgagacttgggttgtgaggcattccaagaactccactgaaatttgacttatcataatagcattttcaaaaatataaacaagaacacaacaaat

SEQ ID NO: 699718 - DNA, 310 bp, Homo sapiens
tgtagacaactagggtagttttgaggtggaagcatttaccaagatagttgtaggtaaagaagggcagatttattagagaaattgtgaaaatatgttgcagtgggcagctcagcagagaaggggctacctgcaaagaggcaagggctggaggaaagttttatagggtcctgctgaagggtgctacgtgtggaatgaggtcattgtgcccgcaggttgtttgtgattagctgtctctaacaattgttcatacaataattgttcattattgttctcaacttggggctctccccaacctggggacccttcctta

SEQ ID NO: 699719 - DNA, 143 bp, Homo sapiens
ctagctcagtacctctgaagtgaacgcagctgcaggaagagtggaggggggcctgtcattatgtttcccccccaccccccaactgaaaggaaaactaagactcccaacataaacagtggctttgaggggaaaagaccctgtgt

SEQ ID NO: 699720 - DNA, 304 bp, Homo sapiens
aaattgttgaacaggccataccttcagtgtcctgccctcacctgtggtacaagtgtgccaagggacaagaggccaatggcagggcctggttgggctcaggatgaaaatgggatggggactcccagagtggtggcaatgaaaaccagcagatgaatcaatgtgaggccaggggttgtcacatgccaccctatgagcatgagagcaggaaccgtggatatagcaccggtctttcctctccccaatccccgagggctgtgcttcccaagtttctccatcctttgggaagggggtaccggagcctcga

SEQ ID NO: 699721 - DNA, 513 bp, Homo sapiens
  misc_feature (38)..(38): n is a, c, g, or t
  misc_feature (75)..(75): n is a, c, g, or t
  misc_feature (361)..(361): n is a, c, g, or t
  misc_feature (454)..(454): n is a, c, g, or t
  misc_feature (463)..(463): n is a, c, g, or t
  misc_feature (512)..(512): n is a, c, g, or t
ctgtatttcatctggcaaccctacttcaaaaccccagntgtaaggtacatggatgtgctttggtcaaggaatagnccaaggcagagatcccatgccctgcatgacctcagtgggttttggtgcacaggcacacaccctcccacttgttatataacctgtttgtgtaagttcatacttggtctgagccactgttgtctgtaaaaggtaattgtcctgctaatgctgtacaggggctcttggggttcggctcagctcaacatggcttgacatggtgggcacactggcgcccagtaagagagagagagagccaaagctgtccgttttgcagatggacaggaaggagccaggacacagctcagcntttcacgcccagagagagaaaaagttaagctgctgaccctgaaggcaagggagagcaggctgcacagctgtgtgtggaaccaccgggctcaangcatccaanggcagggcggacagtgtgagagagctaagtgtaaagctgttgatgaganc

SEQ ID NO: 699722 - DNA, 358 bp, Homo sapiens
acgctctctctgtggggtgagcatccccatcacttgtgaagcacaggccccgggaagtctgggatttgtcgcttaggctttgggttccctgtatggtcatgtagggatggtgacatcctcacgtggggctgctcccatcctttggcccaggacctgatgctcatgtggtgctcagacatgtgtggctgtttacttaccacatcctccgggtccatctactctgatggatcagtgactccccggtggccctgacttctcctcccagcccttgagcatactctgcatttcttgagctatgagcaggctggtaaggccgggcacggggctcatagagaggctctgtggccagcaccatggc

SEQ ID NO: 699723 - DNA, 192 bp, Homo sapiens
caatgtacagcaaggaagtgaacgcgatgggaccaccgccccctgcgccgcggcctcaaccaccgccactacagccgttaccggggttcttctcccgcggggacgccgagagcgggggtgacagcgggtcggaggcgacgggggccaggtccgctgtgcccgaggcaccgaattgagtattgcgggcggccg

SEQ ID NO: 699724 - DNA, 284 bp, Homo sapiens
atccttccctctctcagcgtctctgctggtgtaactttccagatacgctgccactcatcactgctttcaccagccctcctgatcccaccccacacctactcatcaattcaggaaatgcgtctcctagtgctcacgagctccttgggctgagccactttcaccttcctacactcgctccacgccccgcgttgcgctctccaatggtatatggctctactcgatttctccctacagtgatacctttccacttttctagcttctccagatacatacgcgcatcatcc

SEQ ID NO: 699725 - DNA, 877 bp, Homo sapiens
tctgcagaagggggccgggacaggagggatgggcggattcggtctgaagaagtgcacagggaggacctaaaggagtgtgggttcgagagcagcttcaaggacaagtcagactgtgacttccccaagaacctggagccctgggaacggccccatgcagcgcgggaaaaggagaaaaaggatgccctggaaaaggaaaggaaggaaaagggcagggcagacaagtacaaagagaagtccagcgagagggagagaagtgacaagtccacccttgacaagtgtcagaaagacaaagaatttgaaaaatgctttaaagagaagaaagacggcaaggaaaagcataaagacatacacagcaaagacagaaaagcatcctttgaccaactgagagagaagaaggagaaggtgttctctagcatcatctcagaagacttctcagagagaaaggatgacaggaaggggaaggagaagagctggtacattgcagacattttcacagatgagagcgaggacgagaaggacgattgcgtggccggcagcttcaaggccacagaggccagcgacacccagcgagtggacggctcccagaaaaggaggaaggacgagaacaaccctcggacaggcaccggaagtcctcttctgacaggcagcacacagagaagccaagagacaaagagcccaagggaacgaagaagggcgagggacttcggaacgagggaaggccagaaggcaccatggccagatctttggaagcccaaggaaagaagacagggggttggcagggtgttaattccctgtccatctggtcacctttgggacattacaagggggcacctcttaagagggccccggggtaaacaggaatgggttcgcaggttcc

SEQ ID NO: 699726 - DNA, 217 bp, Homo sapiens
aactgcacatgcacacagtgcccaaatttttgaattgctcaacatatgtgttcccagctgaggctgaacaaggtgacacacaaacctcttgtatcagctctcatactgtaaacaagcgtccgtcttgtggtctacttagtgccaggttttttgtatttttcttggtgatttcacagtttacaagggcccccaagagcagtgttgcagtgtgcttccg

SEQ ID NO: 699727 - DNA, 660 bp, Homo sapiens
  misc_feature (26)..(26): n is a, c, g, or t
  misc_feature (31)..(31): n is a, c, g, or t
  misc_feature (599)..(599): n is a, c, g, or t
  misc_feature (606)..(606): n is a, c, g, or t
  misc_feature (609)..(609): n is a, c, g, or t
ctgaccttttgccgcagagtctggcntgccngggtagtccgacagcatatttccaccgatcaccaggggcagtttgtctttgtaggttcttacaatgcgggtaacgtgagcgtaacggtcctggaagatggcctgccagtgggcgtcgtcgatgtggtcgaggggctggacggttgccattccgccaatatctcaccggacaaccgtacgctgtgggttccggcattaaagcaggatcgcatttgcctgtttacggtcagcgatgatggtcatctcgtggccaggacctgcggaagtgaccaccgttgaaggggccggcccgcgtcatatggtattccatccaaacgaacaatatgcgtattgcgtcaatgagttaaacagctcagtggatgtctgggaactgaaagatccgcacggtaatatcgaatgtgtccagacgctggatatgatgccggaaaacttctccgacaccgtgggcggctgatatcatatcacccggatggtcgccatttatacgcctgcgaccgtaccgccagcctgattaccgttttcagcgtttcggaagatggcagcgtgttgagtaaagaagcttccagccnacggaanccnagcgcgcgcttcaatgttgatcacagcggcaagtatctgattgccgccggg

SEQ ID NO: 699728 - DNA, 135 bp, Homo sapiens
ggatgcttgcaggtgtcgtagaaacccagcgggcggtactggtctgcaagcgaattcacctatggtgatattgtgaaggtatcaatactggcgcttggatcaagtcaggtgaccctatcaaggacttcgttctag

SEQ ID NO: 699729 - DNA, 367 bp, Homo sapiens
  misc_feature (8)..(8): n is a, c, g, or t
tccccggngagtgctccaaagcaggccagcaagggcaggcccttcagcctttgcagccccctggcggtgagcaaagccgactacggggaacccaaagttttcgcctgggaagtccccccttgggggcttgggttgcccgtccccaagagctttaccaggggagggtgtttgagggggaagtgcccccccctggtcctcagtttcagcctggccccctcccctcctttggcctttggccctttttccccagggggcctcccccttttgggggcctccaggtcttttttcccctcccccccctcctcccccttgggttttattttggtaatgttgggggggaatgaattaataaagtgaatttttgcca

SEQ ID NO: 699730 - DNA, 188 bp, Homo sapiens
gcccgcattctggttacaaatcatgactatgaaccatgatgtttggattcgatccctggccttgctcaatgtggttaaggatcttggtggatgccatgagctgtggtgtacggttgtcagactcagactcaaatcctgtgttgttgtgactcttgcataggccagtggctacagctccaattagaccc

SEQ ID NO: 699731 - DNA, 163 bp, Homo sapiens
aggaaccccctccctgcacggcaccgggcatgaaggcgccctttccgtcgtacattaaggtttcaatctcaccacgtgcaaccaccaggtccgcagccggcggcttgagctcttccagaacaacactgaaaggacgccaggccagaccgtgttcgtcgcggat

SEQ ID NO: 699732 - DNA, 255 bp, Homo sapiens
tggaaatcattcaggagcgcctctcccgcgagttcaatctcaacctgatcgcgaccgcgcccagcgtcatctacaagatgcacctcaacacggcaccgagatcgagattcacaatccgatcgacatgccggacgtgacgcagatcaaggaaatcgaggagccgtggatcgaggccaccatcctcaccccggacgaatatctcggcagcgtgctcaagctctgtcaggaacgtcgcggcaaccagaaggaactcac

SEQ ID NO: 699733 - DNA, 316 bp, Homo sapiens
  misc_feature (155)..(155): n is a, c, g, or t
gttttttttttttgggaaccccccccccaaaaaaaaccatggggccaaaccgggggcccccaaagggtttttttaaacccccccctgggaaaattttccaggtttttaaaggggaggggccggggtttggtccccggtcccaaaggtaaaagttnccggtggttttttaaaacccccctggggggaaaggggggggggtcccaaaaaaacttccccaaaaaaggggggggggccaaattttcccccccccttttcccgccaaattttggccccaaccgaaagggggccccccataaaagggattttttttttttga

SEQ ID NO: 699734 - DNA, 102 bp, Homo sapiens
cgttgaagcagcagagctggaggtgctgtcaagagtctcagcagactcatatggccatgatgcacctgaactcaatgagtgcacttagatgatgagaaactg

SEQ ID NO: 699735 - DNA, 182 bp, Homo sapiens
gggtgactctacaggattttacacgtacgcttcggagcgaggataagacacttgaggcaggagtcgataccagcctaagcacatagcatatcccatctccacaaaaaaacaaaaattaaaaaattagctgggtgtggtggcaaacacctacagtcccagctacttgaatggcgttactgtgt

SEQ ID NO: 699736 - DNA, 103 bp, Homo sapiens
gcggccgcctactactactactgctcgaattcaagcttctaacgatgtacggggacatgcacccaatgggtgcacaataaataacaggtcaacaaagaaaaaa

SEQ ID NO: 699737 - DNA, 248 bp, Homo sapiens
gcgtagatcgagctggtaccagcgactgggtatcttcgatcactgcatgccgttcacgtgtcgcgtgcctatgacgaggccaccggcacgtccatccgcgcatctggaccgacaagcgcgacctggaaatgtgggcccagctggagggctgatcccgcgcggccggcgcgcctgccgctgttccacagatcgaaacggctgcacgcaatccgccaccgaagtcggccggcgacgcgtgcagccgcgca

SEQ ID NO: 699738 - DNA, 466 bp, Homo sapiens
gaaacctcactgtccttactaaaattcagcatcctttctttaaatggttcttgtatgttacaagccttatttaattttcagagttgtgagataagttgatttggatagtttttgccagtgttctttgttgcttttgaggaagatcagtttttcagaggtattgactccacaattgcagaagtcccacccaagataattacatttctttggtttgttttttggtttgggaattttttttttaattttttaaatttttattttttcacatgcctgctatgtcaaattttgggaggctgaggcatgagaatcgcttgaacccaggaggcagaggttgcagtaagctgatatctcaccactgcactccagcctgggtgacagaacaagattctgtcaaataaatacataaataaatgggagtatttgtcacctaaattaatctgtataataggatttctagtggcgtaac

SEQ ID NO: 699739 - DNA, 134 bp, Homo sapiens
aaaacgagaggatccatacggacgggcttacttgaagtgatgtcctccagcgagttcctgttgaggctcagagctcatgaacctgaccagtacctatgaggacacggggttcgacccttggcttgctcagtggg

SEQ ID NO: 699740 - DNA, 265 bp, Homo sapiens
agtacaactctctttcgatccatgatattgtctacagagttgtcttcaggttattgcaaaaggcttcttgtacagtctgacttgtctccagacgttgcgctcagtctgacagttgtccccccaggtcttagttccgaatttctacttcctgtagtttctgagtcctagattccctctatgcttgtacgttctctggcgattcatgcaagtttcttgtgttaacctttctatttcctcttccttcattttctgtgcccattccccg

SEQ ID NO: 699741 - DNA, 394 bp, Homo sapiens
ggtcagcctttcaatgtgacacaaggaaagtattctacagctcaagactgcagagcagatgacgacagcttacttgagcccatagcggtgggagctgccttggcaggagtactaatgctagtgacggtggcttattgtagtggtctcaagcaccatgatgctggatatgagcaattttagaatctgcaacctgatagattatatcgaaattcatgcatataacatgattttgttacctctcaggtgttgaaacacttggcttcttagaactgacatgctgagaactttaattcttttatcaatccgagcatgcagagatcaggctttattaatagaacctgtactctacaatcagctgtccagtgtcatatgtactggtgctggagccttgttc

SEQ ID NO: 699742 - DNA, 419 bp, Homo sapiens
ctaattcaactacatatatagcagccatgtgcccttctcacggaacttgcaaaggtctgcaagctatcctctgggatccttcactggtgctaatttggcatcatttgcagtagcggtatatccagtccagcttattgtagcgattcggtgcatcatgtaaggtttaaatgggccatctctcgtagccattagaatctatctacaggagacgccgtgtttgatgaaggccctgtggagtcagacgaatgtatagtggactcgacgttagacatttaaagttaaccttatcagttctatatttgatgggcatctacggcatatatcccagaactcgatcaccaaggacacaattgccctctcatactatagcatcttaaatctgacaaccctgtcccagtcccattcaaacttctcgtacc

SEQ ID NO: 699743 - DNA, 332 bp, Homo sapiens
gccgggcgcggtggcgcgtgcctgtagtcccaaagtgctgggattacaggcgtgagccgccacgtccggctaacaagtactttttgtttttattttatttttgggatggaggtctgggtgacagagcgggactccatctcaaaaaagaaaagtcaagcagaaacattttgtgtacaccctatcgggcgcgtatttgacccacagagaacaaacctaaggctatccaggttttgtggagggcttgaaacacccccaaaggatgtaaaggcgcccctagtgaaatgtgcacccttctttgtggacgggggtgagtggcccctgtgatgaggctg

SEQ ID NO: 699744 - DNA, 726 bp, Homo sapiens
cgttttcgtactccagggctgctcctggcggctctgcggcgtcaccatgccacagaatgagatatattgaattacaccgtaaacgctatggataccgttctggattcaccatgacgaaaaagagaaacgaacggaaagtcgagaggctcatgaacgttcaagagaaggcaaatgaaaatgattggtctgaaggctagagcgtttaccataaacagacgtcgatgctgagaaatatacaaatgaaaaagactatcaagatgcatgacacagagaaacaccgcaaagcaaaagaatgatgaaaagacaccacagggagcagtacctgcctatctgctggacggagagggacaatctcgagctaaagtactttccaactatgattaaacagaaaaggaaccgagtaaggcgggaaaatgggaagtccctctgagcgtaaagtacgatgcccagggagaaacagaagtatcaaaagttattcgaacaggaacgagaaagaagaaggcatggaagagaatggttactagagtgtgctttgttggagatggctttacaagaaaaccagctaaatatgaaagattcatcaggccaatgggtcttgcgtttcaagaggagcccatgtacgacatctgaactgaaagccacttttgctagcaatacttggtgttagaagaatccctcattcccatgtatacactttgggtgttattaccaaggtactggcttgaa

SEQ ID NO: 699745 - DNA, 537 bp, Homo sapiens
  misc_feature (17)..(17): n is a, c, g, or t
  misc_feature (33)..(33): n is a, c, g, or t
  misc_feature (96)..(96): n is a, c, g, or t
  misc_feature (514)..(515): n is a, c, g, or t
  misc_feature (531)..(531): n is a, c, g, or t
  misc_feature (534)..(534): n is a, c, g, or t
cggggccatagtccccnggggaaccccctaccnaaactaaaggctaagaaaaattaactctctttcacctattcccattactcccttatttccctnactctattactgaccaccctagctattaatgtaacccaagtcaattttgccctcaaactattacatttgatgcttgcccttgttatactctgtggagactggccaagtcaaagatagctctcccacttcagaaaattaccctctgtccttccccaggtgctcctcagactggacatggtgaattgggatcatttagtctaggaagatttcaatgaagaccccagtgtcaactgggagtctttccccccatccccaatccagagcttttatgccatagttggtccaacgttctgtggaccactaaagagcaaggatggactgccccaaccagtagttgtaatttcctaaaatcataaagtcattttactaaaggaacagcttcccctaactgtcagctaaaccagtgcaatccaatacnnggttattatcccaaantcntca

SEQ ID NO: 699746 - DNA, 191 bp, Homo sapiens
tcatatagaatcgagccggacctgcaggctctctctgactgaaggcgggtgagtcacaggctcctgtggaccaagaactatgagatcggagcggctctggacaccatccagtatgcaaagcatcccccgccgttgtgaccagtttaagcccagctcattctgcgtgcgccatcgttctgtctcataggttg

SEQ ID NO: 699747 - DNA, 931 bp, Homo sapiens
ggatgggctctgtgcttggagctgaagaggagtgcacggacactttgagcacggcttccgtgatgcatggaaagaacttgtcacctgatccaggtccaacaaggtgcgacacacggtgcagtggcgctgatgtgtgtcgatgatactactacgctgtggaagaagtcggagtcgctacgactacttacgtctccatgcagacgcggtctgggccggtaggaagtacgtcccgtccggaaccacaggaactgcagaccagtgacctggcatgagcatgcgactcgccgtagtagggccccgagcgcgtccgactgcccgagagacaatgacacacctgagtgggatgcgcacagatccactgagacagtggatggcacaggacggtggtctcgatgaggcccggagtggcctctgatggactcccgtccatcggagccagtggcctgtgtatccttccagacagctggatgagtcccccgctgtagccctgtcccatcggacccccagtccctggccgaaaccaggctcatagcagccagctgtcactgctccggagccagacgccagcccaaggctggccgtggacttcgccctgcccaaggagctgccccatcatctccagccatgtggacctcagcggggatcctggaggagactgtggcccagacaggtggctttgtcggtcacagagtttggactcatcggcattggggacgttgaaccccttcctggacgccaaacaccaaagtgacccgggaaacccgaggtataaaacatcggagacccaggtgaagacaatggtaacacgtgattgaccatgatggactccatggaccggagagagcggcgtaatgagagacaaggacaggaaataagaggcatgcagaatgaggaccagcatctggaaagcatacagaccacttcccaaaac

SEQ ID NO: 699748 - DNA, 399 bp, Homo sapiens
  misc_feature (202)..(202): n is a, c, g, or t
  misc_feature (225)..(225): n is a, c, g, or t
  misc_feature (228)..(228): n is a, c, g, or t
  misc_feature (256)..(256): n is a, c, g, or t
aggaattcgtgctgctactcaagggaatcatgctggtgctgcatggcagaagaaagaagggagcatgtagctaaaatgaagaagatggagatggagatggagcagctgtttgagatgaaggtcaaagaaaaagttcaaaaactgaaggactctgaagctgagctccagcggcgccatgagcaaatgaaaaagaattctggangcacagcacaaagaattggaggnaanacgtcgtcagttcgaggatgagaaagcnaactgggaagctcaacacgtattttagaaccacagaactcttcaagaaccttggaaaagtacaagaagaaagggaagatctttaaactctctattgaccaccagttaacgtattagtgccatcggccagcttggacatcagtg

SEQ ID NO: 699749 - DNA, 310 bp, Homo sapiens
  misc_feature (14)..(14): n is a, c, g, or t
  misc_feature (16)..(16): n is a, c, g, or t
  misc_feature (49)..(49): n is a, c, g, or t
  misc_feature (56)..(56): n is a, c, g, or t
  misc_feature (62)..(62): n is a, c, g, or t
  misc_feature (91)..(91): n is a, c, g, or t
  misc_feature (104)..(104): n is a, c, g, or t
  misc_feature (111)..(111): n is a, c, g, or t
  misc_feature (143)..(143): n is a, c, g, or t
  misc_feature (171)..(171): n is a, c, g, or t
  misc_feature (198)..(198): n is a, c, g, or t
  misc_feature (251)..(251): n is a, c, g, or t
  misc_feature (298)..(298): n is a, c, g, or t
tatagtcagttccntntaatttcattcaatggcattttcctcatgaggncactgtnaattcnattgcagctggacatccaatattgcaccnccatcacagcacnaaaaagnatggaaagctgggttttctcgtgtaccaagtnccaaaacatgtgctaaaaagttaacatncacagttgtaagagatcaacgtcgggntgcctcaagtttatagtagttgcttcacacggttttccaagacttgggtgccnccagtgttgccgtgtttgtgcaaatgccagctctgggcggcctgctnctccttttgcca

SEQ ID NO: 699750 - DNA, 225 bp, Homo sapiens
ccggaagactttaaaatcccgtatgagatgtaaaaccatcgagcggaatgaagagcggaccgcatccgcgggaggtgctgtacgaatatttgtgaatttctccagaccagccgtggtttcgagagaaatacgactattatatacgacttacggggcggttacacgaacacacacccctttttaaagggggttatttgaaactctctccggggcgggcactgtgag

SEQ ID NO: 699751 - DNA, 113 bp, Homo sapiens
gaagcaggagcttggtgatacctctgtcccttaccctgaagttgtcaccctatcctataccctacctcccgctgctgtacatactagtacccctctttctagaaatagccttt

SEQ ID NO: 699752 - DNA, 103 bp, Homo sapiens
cagtgtcacagatacagatctcagcttgctgcggtcctcctcctgctgctgcagcaactcgggaaccgcggcatggcgacgcgggactccggaagtatgtagt

SEQ ID NO: 699753 - DNA, 127 bp, Homo sapiens
gtctgactccagaggatcccggaggaggcaagagccacaggaggtggaggacctggtggaccaggtgggcctggaggagctaagggtggacgtggatggagtctgtccagctggaaaaggtgggggt

SEQ ID NO: 699754 - DNA, 222 bp, Homo sapiens
tcgtatatatgctgtctcatagtctcaggatatgtaggtgagctggcaagctggagaccaggagagctgacagtttagtttcagtctgagatccgaaggactaaacccaggaaggcagacagtgtcatgccagtctgaagactggcaggctcagacccaggagtagctgatgtctcagttcaactcctgagacaagcctatcagggctaccgacgctcgcaa

SEQ ID NO: 699755 - DNA, 259 bp, Homo sapiens
aatctcagccctttgggaggctgaggtgggagaattgcctgagcccaggagttcaagaccagcttgtgcaatatagggagactccggctctacaaaaaagagtttttcaaaattagccaggcgaagtggcacacatctgtggtcccaggtgctcaggaagctgaggtgggaggatcccttgagcccaattcaaagctgcagtgagctgtaattgcatccctgccctccaacctgggcaacaaagtaagcccttgtttta

SEQ ID NO: 699756 - DNA, 248 bp, Homo sapiens
cacaggatcttacttattccggtgtcttattaaatataatcgctgggtccgtggctcacacctatatctcaacactttgggaggcaaggcaagtggatcacgaggtcaacagatcgagaccatcctggctaacacggtgaaaccccgtctctaataaaaatacaaaaaattagccgggcatggtggcaggtgcctgtagtcttagctactcaggaggctgaggcaggagaatggcgtgaacccaggag

SEQ ID NO: 699757 - DNA, 268 bp, Homo sapiens
gagatggccgtgagcccgtccctgtccgatagacctgtaggcaaggcagtgtttgcaggcggtgtttgggcagctggagcagtgggtagtcctacgggcagagagctcccctttgagccctttgcggccagacgctgtgtggagcacttcccaggagttgttttgtagactcaccgagaccttgggggaggaaatgtgcttttggctggcttgcccagtcttagactctcttgttgtagccctctccttttgtgacgtcacccagcct

SEQ ID NO: 699758 - DNA, 693 bp, Homo sapiens
gttgtcattgacatccagtcatctctttctaagggaatcagaggcaatgagcccgtatatacttcaactcaagaagactgcattaattcttgctgttcaacaaaaaacatatcaggggacaaagcatgtaacttgatgatccccgactctactaaaactaaaaaaaaattagctgggcgtggtggcgggcgcctgtagtcccagctactcaggaggctgaggcaggagaaaagtgtgaacccaggaggcggagcttgcagtgagccgagatcacaccactgcactccatccagcctggtgacagggtgagactctgtctcaaaaaaaaacaaaacaggggggacccaggatttccggcaaaatttttttcccagggtttggggaaagaaaattggcctggtatccccaaggtcgggtaacctccaaggcaaaaaggtgttcccaatttgtccgagtatgagcttggccccccaaaaattcggaccattcccggaaatttactctccaggaattgggcaaaaatccaagagatacggaacagtccacaattctacccttattggttagaccttgaatgtgcgaccccttacttacctttcattgtaactcacccttagggaccctgaatggttgcataacgcctaaaatcgtgggatcgccaatttcccaaaattataaaaatcactaaccttg

SEQ ID NO: 699759 - DNA, 119 bp, Homo sapiens
atgctcacctgggggtgtgggtgctgttacatgctgtcagatgctcacctgtgggtgtgggtgctgttccaggctgtcagatgctcacctggggttgcgcgtgctgttccaggctgtca

SEQ ID NO: 699760 - DNA, 100 bp, Homo sapiens
ctgttattagtgaggagttgaacagctcgatggggacaataaatacgacgctggggaacatggcttacaggaagcacgagaaaggtgtgaaattcctaac

SEQ ID NO: 699761 - DNA, 702 bp, Homo sapiens
gggaagggagaggattgaaccccggtcgggtctcttacctggccgtgtggcggtacctctgatgaagccacgcatcatgcttgacctgtaggcacatcctatacctgcggacttgtggtttaagaaagaacgctgaccttatctatgcctcaaaggtcttcagccactggataccatatgatgtttcactagatggggaaaatgacaccacatcttaagcatctcaaggaatactactgtttaagacaggtgctgttcaatgaatggactcaggttgctgttagaggttcagacaattggtgtgacgcatactgaaatagaactgataacgtagcttgaatatgtgtctgaagtgaaacgtgcactagcacacgcactaatcattcgtagccgccgtcttcatatccacagcctatgcactcattccttaattattcgtgaagactgctgatgcgtttaagaagctcccaacagtatcttgcatagtcacaggagcgttttcaaacattatgtaatgaggttttttgctctcatgattaatacttgcatgatttaaatgcgtcgtttaacgttgaccacacctggattactaagataacgctctgatactttgtaggtctgacaaaacctgcgagagcccacgtccttaaagtattttaaagagtttaagttccaagcttatattccttttggattacgtct

SEQ ID NO: 699762 - DNA, 453 bp, Homo sapiens
gcaacatgaacgtgacagctcaacggcttccacgacgcgtcatcgaggagggcacatccttttcacctcagaagtcgcgtcggggaaggccgaccagcataatgatttgtgaccgaaatcagtgatgcgtgtccttgatgcccacttcagcaggatcctgatgccagaagtagcttgtgaaactgttgcttataactggaatgatccttcttgctcggggaacattacactccatgaggctgctgtagagctacctaggaaaagtggttcggtgaacgctgttaaatcagcattggatagtgatgattcttccaaaggttttgactagctgagacttgtaagcggtgcttggtagccttggagcaagcagtcaccagaatatttgctcacgggtgttcatcttgacagacacctgaacacgacattggtgctggagaccaggcattaatgttg

SEQ ID NO: 699763 - DNA, 138 bp, Homo sapiens
atttgtgactgacgactgttcaacggtgtggtatttggatatagcttgggagatctaataatagttcagttgagctcctattattacttgagctcccgaaatctgagtagtattttcaattctgagtgatagtacaga

SEQ ID NO: 699764 - DNA, 167 bp, Homo sapiens
tgtgtggggtacttagaggatccaatgcagcggactggcatatagtggcaggtctggaggagctggggtaccagctggcacaggagcaggtggcatggcacctctgttgtttatgcccatagcacctcccatagccatctgacccatccggaatctccgtgctctct

SEQ ID NO: 699765 - DNA, 238 bp, Homo sapiens
aatcagtttacacaacgtacttagcatgtcacacgcgtctgtatttcagtacacagtaacatgctgtgcaggtttgtagcctagcagcaataggctataccagatagcctaggtgtgtagtaggctagactgtataggtttgtgtaagtcactctatgatgtttgcacaacgacgaagtcacctgacgaaggatttctcggtctgtatccctgtcattattagttgtgtaaactgatt

SEQ ID NO: 699766 - DNA, 250 bp, Homo sapiens
agtagattttagcacctaggctataggaggcaggggtaaagtagaccaggctatagcttgtaggaagtaaatagggccaccagggtttaggggaaatacaccatacccgacggatagctagtgacctaccctatctacgagagatatgcaggcagtagccacggagaggagggaggctgacctagcgaaagctaaggaatacaagagggcactagtagatacctacgccgcatacgcttactactatata

SEQ ID NO: 699767 - DNA, 306 bp, Homo sapiens
ggcccccccccccccgggcgttttcctgggtttttattgtccccacccaggagagttgcattttcccgttgattggggcgtgggcccttgccccccccctgggttcctttggttctttgccagtgtgggggattttttccctttgatttccccgctccccgggcggcccaggggctcccttcctttgtattcccctcccccccggccctgttgtttgggccttttaaaccccacctttggcaaaacctttttttttttttttcccccattttttttttaaggggggttttaaaggaatttttttta

SEQ ID NO: 699768 - DNA, 499 bp, Homo sapiens
  misc_feature (98)..(98): n is a, c, g, or t
gggccattaggcgagtctgcgtatagacgcgtcagaattttttttaaccaaatatttaggaaatgacatcaatatggggtttgagatagtctcgcttngttgcccaggctggagtgcggtgacgcgatctcggtgatactggcaggaggcagctgaatgccaggcagatggggcgggttcccggtgaaacccacctccaagccaaagacagtttaaagcctgacagctgagctacaagttaaatcctcagactagatgaagaacttgccttcctgtttgccacactttcctctgattgatccccatccttcacctattttacacatacctaccctttcctaatttttatttttgaggtggggtctcgctctgtttgcccaggctggagtgcagtggtgtgacctcagttcactgcaatctctgcctcccgggttcaagcgattcttctgcttcagcctcccaagtcactgggactacaggcacgcagaacgcgcctaat

SEQ ID NO: 699769 - DNA, 260 bp, Homo sapiens
gagctgcctctcataactgcctcatactttagctcaataggtgtatcttgaaactagatttcctttattagcagtgcatagaagtatctcaatacatgtgtcattactttaagctataccttcccaaaaacaataaaaagtttaagactaaaaactgtcatttatttataaaatatcaaataaggcctctgactgaaaaaaagaaatctatattatgtttgggccattagcccttttctattcaatctgtcaatcataat

SEQ ID NO: 699770 - DNA, 477 bp, Homo sapiens
ggacccatcaaggaagaaattttgaaggcaaagctttggcccttatgccggtggagaccataactttccaaaccacgaaaccaagggtggctaagccggtcccagcaccagcagtagctatggcagtggcagaagattttaattaggaaacaaagcttagcaggagaggagagccagagaagtgacagggaagctacaggttacaccagatttgtgaactcagccaagcacagtggtggcagggcctagctgctacaaaaaagacatgttttagccaaatactcatgtgtatgggcaaaaaactcgaggactgtatttgtgactaattgtataccaggttattttagtttctgttctgtggaaagtgtaaagcattccaacaaagggttttaattagatttttttttttgccccccatgctgttgattgctaaatgtaccagtctgatcgtcacgctgaataaatgtctttttttta

SEQ ID NO: 699771 - DNA, 448 bp, Homo sapiens
gtagccccgtcctgctacctactccacgccgcgtcacggcgcgaccacgcttacccgagattcaaatgtgcaagcctttctctgaaacgcttgccataactcgagcttataggggaagaaaaagctatcgtttacaatgatatcaccattaaggcaactgctacaccctgctttgtattctgggctaagattcattaaaaactagctgctcttaacttactgggtaactctgtgtccatctcaataaccaaaggaaggtgggcatggtggctcacgcctgtaatcccagcactttgggaggccgaggcgggtggatcactcgaggtcaggagttccagaccagcctgcccggcgtggtgaagccctgtctgtcactagaaatccacaaattaggcaagcatggcggctggcacctgtaggcccagctacttgggaggctgaggcagga

SEQ ID NO: 699772 - DNA, 531 bp, Homo sapiens
  misc_feature (126)..(126): n is a, c, g, or t
  misc_feature (148)..(148): n is a, c, g, or t
atgcacatcctcagctcaactctgaacttgaacacagcagttcgcagtacatgccgctctgcagagaacagcaaccatcgacccaacccctacaccccttccctcaccactgcaaaaacttgagcncacgattggctggtacccatcntcaagggaggccgtttctaccaggtccctgtacacctaccccgacccgccgccgcttcctacccatgaagtggatgatcactcagtgccgggataacaaccaccagcgcacactgatgccggagcagctgtcccacaagctgccggaggctttccataaccagggccccgccacccagagcaagcctgacttgcacaagatggcagcaggccaaccgtgccctggcccactaccgctggtggtagactctccacgcggcgccccgggccctctgccgcacgaaacagtgtcagctactcccacgctgaaaactacctgtgggtcaaggatgtagttccttcgtcagcgtggcaggcctcgtacgaaagatgccgcagcatatt

SEQ ID NO: 699773 - DNA, 471 bp, Homo sapiens
tagctgaacgatctgtgagttagatgctaggtgatctgctgctctttcctctgtgtgttaccatagctgccagaaaacacaggctgaacctgatctctcgttgcagtgcatttcattcttaacagttagttgcatgaaggaaatggggtcatcaggctgtactgtcacattcctcttttcagattctttcttttgggataatttctcttcttctagtttagcagataacatgtgagaaagggactgtctgcattccttattgaaaatgtcattcattaaaggtgaacattcagacaagaccttgaggcacagggaaattcgatccacatcatcatcagtaattggcttcttaggaagagaggattttcccaaatgcaggatagtagccatgagcaacatagcctcagcaacaaaagaattttgctttttcttctcctgaaccaaagctacatagcgcaatgcaatcttggt

SEQ ID NO: 699774 - DNA, 554 bp, Homo sapiens
gaggatccgtgatacaccagcgaacaagcgtgtcttcgataccaagtgtcttcctgtgtgtggacagataatgaagataaaattactactgagaaaaggaaacttggagattattgagcccgtattttgagaccaattggaaacaccggccatccttcccagatgttcctggggaaattggttggattggtattggtctaaaagtcccccaaatcttaatcagagggatggatggttattatttggcaccaggaatggctctaagtctacagatagccccgtctggtatacgttctacttcactggaccggaacaccttggaaaatatgcttgtacggggttctatctagtaaacgatatttatgaatacaagacaattatgaactggatgaaggacacagactaagaaggaacgtttgctgaagccaatcgggataaaacagcattagatagtcatgctgctagatctttatcatgggaaacatttcaagttaactccttcagtaaagaggtaggtagcagagtacccacgctggagtatccgggaaccgagc

SEQ ID NO: 699775 - DNA, 101 bp, Homo sapiens
  misc_feature (47)..(47): n is a, c, g, or t
cttgagtatgtgcatcccctacaagatgatcgtcttgctcctggcangaccacgtatggatgacatctgaacagaaccttggggtgccagcattagcctgg

SEQ ID NO: 699776 - DNA, 358 bp, Homo sapiens
ccacaaaccttctcgacattgttttgctggagctggtggctggccttcctgaggggtacatgttcatatggaatggagaggtgtcacccaacctttttgatgaaatcgacaaggatggccacggagaaggcctcctggaagagttctcagagtacattcacgcccaggtggcatctggcaaagggaaactcgctcctgtcttcgatgctgagctgattgcgaagaatatgttcaccaaccaggaccggaatgcagatgggaagttcacagccgaggattataaactcaaagaccaggatgccaaacacgatgaactctaaacctggcatgaactagatggtgccaggggagtacgtga

SEQ ID NO: 699777 - DNA, 335 bp, Homo sapiens
ccgctcggccgggctacctagcctctctatcactgtgctggtgcaggacggctcccgtgcgattgacgcagcccaagaaaacttgggtaatataacttggaccctctcactaaagtctcacaccctgacgtgggacgctatttctcagagctttactggcactcactacatcccaaacgcacagtctggagatccggtatccagtaaaatctggcagtttgtctatgaaacggtgcagaatatttagcagtgcacagaaagagaacctagatgagtaaagtctagagaggacattgcacctttgctgctgctgctatcttccaagagaacgggac

SEQ ID NO: 699778 - DNA, 316 bp, Homo sapiens
gtgaatattccagagagcaaacagctgtcagcacagagtgacttgtctctacaatgaaacaaaattaaaaaattagccaggcatggtggtctgtgcctgtagttcccagctactcgggtggctgaggcgggaggattgcgtgagcctgggagtttgattgctacagtgagccatggtctcacccacagcacttcagcctgggacagagcacgactctgtctcaaaaacaaagaaaacaaacaaaaacccttagcatggaaaatactatttgtgtggcacacactcatctggtaaaactagctgacgcgttgggacc

SEQ ID NO: 699779 - DNA, 325 bp, Homo sapiens
gtctctcggccttagcgccatttttttgtgaaacctgctgcgccatgagagccaagtggcggaagaagcgagatgctgcaggctgaagcgcccaaagaagaaagatgaggcacaggtccagatgtaaaccgctagcttgtaggcaccgtggaggccaccaggagcagaacacgtggaatgccagacgctggggatgcttggtacaagtcgtgggacttgcatgctacgtgtctagagcttgtctcatgtggatctaggaacttcaatcggccctctgatccgccgatcaccgtctgagatccaccttgctcatagacaataggcc

SEQ ID NO: 699780 - DNA, 106 bp, Homo sapiens
gcgttattgatacctctcgctgcacccactctgtcagttacctggctggtgatctgtgactgctcttcttttgtctgactcttgatgcactgctggctgctgactt

SEQ ID NO: 699781 - DNA, 229 bp, Homo sapiens
ttttaaaaaaaatgttttttttttttgggttggtaaagcaggttctttgtcttaaacatttaaatgccccttgaaagcaaaaacaaatggtggggttccagagtaaactgctaattttttatctttgggggatgaaaaaaacaattattttgacttttttccttggacattgccccttgatttttttatgcccggcctttaaattgaaaataaacccaataaaaatcca

SEQ ID NO: 699782 - DNA, 411 bp, Homo sapiens
  misc_feature (11)..(11): n is a, c, g, or t
  misc_feature (19)..(19): n is a, c, g, or t
  misc_feature (38)..(38): n is a, c, g, or t
  misc_feature (45)..(45): n is a, c, g, or t
  misc_feature (403)..(403): n is a, c, g, or t
ccaaacctttnaacggggnaagggcctctgtacccagnggtactnagcttaaaaactagccctactttgagggcccttgaatgggttaactgcttttaccttcccactagcctagtgaattcccgaaactttttcatgatgaagtgccccatttattgggcccaggtgtgttggctcaagcctgtaatcccagcactttgggaggcaaaagtgggcagatcacctgatcccaggagttcaagaccagcctgggcaacgtggcaaaacgccgtctctacaaaaaatacaaaaattagctggtcatggtggtacatgcctgtagtccccgttactcaggagaccaaggtgagaggatcactttagcccaggagggtagaggttgcagtgagccaagatcggtacntactgcac

SEQ ID NO: 699783 - DNA, 1478 bp, Homo sapiens
ggccaggctggtctccatcatcctgacctcgctgattcacccgcctcggcctcccaaagtgctggcgcattacaggcgtgagtcacagcccccggacataatttagcactttacaaaaataatagccatgttgggccgggcgtggtggctcatgccatgtaatctgagcacatttgggagaccaaggcgggtggactcccttgtccccaggaggttcaacgaccagcgatgggacaacgatggccgaacaaccccacttctctacatacgtaagctcacaacaacaccttcacgctggagcgcagacgggagataaggcccgacgattcccagggctgatacccggaggcgccaatataagcaaggagaagcacagacgtccgatgtgcaaagaaatggaatctataacacgacgaactttgaagcgtcgcgccttatgtcaccctgtgtaacggcaatggagaacacattcacccgagccacgcacatgcaccacaccgcgccctagccactgacaccgaaaggaactcactcgacatcttcacaataaacatgtaacccctctccgccgttccacatccattcacccaagattggtagcaccccttagacgtggctcaaaccctacaacccagtccacaaattaaatcaactgcgttataagaacaaccgcaaccacaacttccgggacacacaacgcacaaacttacttgatcaacgcacattctggaggatcacaaacttcgaagcgacttgactggagcaaacctcgggcatattggtacactcactcgaagcaagccaacgtcaccctaggcgctactcaaccaacgcccaagaaccaataacccaatgccatcccgcctcccactgccacacacgtcttccccgcgtttaagtggcaaacatactaaaccccaagcagatcacatacagcgaaagccgaccctccatataaacgaaccaacggcaaacagagattacagacataaaactacacataggcccgttgatgcgcttctcaccgaaacacccaaaacacgtatcaggcacgaaccatatcatcgcgggctcaacatcctcggcacctccgcatctacaatctcatacggacggttaaccacctgtcttcttttacgcaccacacataattcttagtagccgatcaatcacgaatcccctgcactctaccatgcatgatggatactttcactatatgactaacacccccaagtgacattagaatgtaaaccactactgcaacaaatgcccccactagatatctaataacacactcattatgatgcaaacacgaaccaatgtacactaaaacactatattataggatctacagattaaccttatggtatacacaacatcacacatagctatcacacatatcccagcccaacaacttcatcacccacagaagcaaaagtgaatctgttaacaccattaaattatacaaaatcaaggaa

SEQ ID NO: 699784 - DNA, 358 bp, Homo sapiens
gaagttgcctctgcagcggtgcaggatgcccttgtgcggctacagccgccgattttcttgcgctacccctctcatgtggtcaacccaattcccgtcaatggcgccgccgtggagatcccgtggtacgcctggcgccaacccaccgacaagattatgttgatcatgcgttatgaggtgccgggcagccacgaccttatcatttacgatgactccttcacggtcggccaggtgcccgagggggtgccgatcagacgcctgattccgtatgacgggctgttgaaattcaatggcacgacgccggacctttactacgtttatgaatccgcaaacattctggccagcagcagggacccactcg

SEQ ID NO: 699785 - DNA, 370 bp, Homo sapiens
acccagctctttttcagcagcacaggcatgcaggcacaattcaagcagttggcaacacaacaccaattgcaaccaacatccaacacaccccagtggccatgcacagcacacagcaccaggcaccattccacaaccagcatcacactctcgcatcatatttctccacagcaacaccacaacagtctccagcagacctctcaatcatcagcacaccatggccagtgcaccacagccatgcatttcatcctcaacagctggcaaaccggcacacagcattcagtcgcaccaggccatcacaccagcagcgcagcacacgggcagcatttcaaacttctcaacatgcacccagcaatcatcatcttttcacact

SEQ ID NO: 699786 - DNA, 149 bp, Homo sapiens
ctcgtcgagaaggggcagatccgtccgacgatgacccgccatatcgagggtctgacaacccagcatgtgcgtgaggccaccgcagccgtcgagtccggcaccatgatcggaaaagtcgtcattacgctgtgatccttcgataacatact

SEQ ID NO: 699787 - DNA, 419 bp, Homo sapiens
ggtagaacattcattagattgtgttttccagttttgttttttggtggtgctgagtatcaaagccaaccaaggcctcatacatgctaggcaagtgttctgtttctgagctagatcccaaggctagctctgttcatcataggacatcttgatgtatattccccaacattgattgtcagttgttttattcagaaagtatttttgtacctgttatacagtgttggggacatattagtgaatgaagtctcttccttcatgaaataaactcttccttgagtagccagatcattaggtggtttgtaactaagaacaataggaataataataaagcatgcaggagatgaagactgaatgggggttggctggaaaagccactgtagacagtatagttaagattttatttttatttataaaaaaaaaaa

SEQ ID NO: 699788 - DNA, 669 bp, Homo sapiens
  misc_feature (106)..(106): n is a, c, g, or t
  misc_feature (109)..(109): n is a, c, g, or t
  misc_feature (111)..(112): n is a, c, g, or t
  misc_feature (115)..(115): n is a, c, g, or t
  misc_feature (121)..(121): n is a, c, g, or t
  misc_feature (139)..(139): n is a, c, g, or t
  misc_feature (142)..(142): n is a, c, g, or t
  misc_feature (147)..(147): n is a, c, g, or t
  misc_feature (306)..(306): n is a, c, g, or t
  misc_feature (437)..(437): n is a, c, g, or t
agcagaatctgttgagttgctgccacaaacaatacaattatttgaacccccctcccccccagcacaacccccccggaagaggaggaggagaaggggagtgagcggncgncnncanggcggngatccaggagctggcggncgncgatncgatggagaaggcagggcccgggccgtggggaggcgggggcgcgggggcgggggcgcgagcgtggagcggggaccggcggtgggggggcgggctgggggctggggggtcggctggggggggcgggggggggggggggggggggggggacgagagggggngcggacgatgggggagagtggagcggggcggggggtacgggagagcgggtggagcggggagggggcggggggtgacgggggggcgggagcacgcgggggggacgggggagcggctgcgtagggtggcgggngtggcagcggctgacggggggggggatggtgggaggaggcggagggagggggtgcacgggcgtgggggaaccggggggtggcgcgagtgggagggggaggggggggtaggcggagggggacggagggaggggggcgggtgggagggtaggggcggatgaccggggggggggtgggtggggggggtggaggggggcggcgagcgggggggcgggggggggggggggggggggg

SEQ ID NO: 699789 - DNA, 372 bp, Homo sapiens
  misc_feature (106)..(106): n is a, c, g, or t
  misc_feature (109)..(109): n is a, c, g, or t
  misc_feature (111)..(112): n is a, c, g, or t
  misc_feature (115)..(115): n is a, c, g, or t
  misc_feature (121)..(121): n is a, c, g, or t
  misc_feature (139)..(139): n is a, c, g, or t
  misc_feature (142)..(142): n is a, c, g, or t
  misc_feature (147)..(147): n is a, c, g, or t
agcagaatctgttgagttgctgccacaaacaatacaattatttgaacccccctcccccccagcacaacccccccggaagaggaggaggagaaggggagtgagcggncgncnncanggcggngatccaggagctggcggncgncgatncgatggagaaggtgggacccagaccagcaggtgacaggaccctcgaagctgacgcctcgatatggagcataagccggagtggcgcagcacgctgccgccttacccattacggagggaccagactggccactcgtagtaggagtgagactgtctgatagccccacccttcttgagactggagctggagcttgcataccacagactggggcgctggttgctccttgg

SEQ ID NO: 699790 - DNA, 652 bp, Homo sapiens
gagcgggctcgtctgcgcttccttctccctctctccagacgtcgtggtcgattcggatcctatgtcgcgccgggccctccggaggctgagcgtgggaacagcgctgccaggagtcccgtcgggtgccggcgcctttcatttcgatctccgtgagtgacgagtgacagcggaaaaagaagggcccaagcggtgagcttggtgtccggcgatccctgggggcgcagggaacggaggagcgtccgagtcaacaagcgcttcgagctgattaacacattgacgagtcttgagagatgagcccgtgatggttgaagcgggcgtcgacggtcttggcctgtgctgctcacaaggacgcttgtgtgcacccagggacacaacacgcgacaggggtcacgccgtggcaaaacacaggagagcaaagacggatggacgatgaccaccgagcacagtggccactccagcaggcaggtctcatgcaacgttgcgccacactccgggacagcaagaaccaaaaaacaacccgaaacccaccacagaacaacgccgcaccgggcagaacgcatcggcaacacggacctagaacgctatctggagcgcatcctagaccaggattgcggacaaggcactgggttgaaccgccccgggccccctcccc

SEQ ID NO: 699791 - DNA, 313 bp, Homo sapiens
  misc_feature (288)..(288): n is a, c, g, or t
tgtttatcgattgccacgacgagtactgagggcctgtggggtgtgccttgaagcctataggacgcgggcccgtcctggtgcctgccgcgaaggtgcaagcatcttgcgatgttacgtagacaaagtatctcaagatcgagtagatctttgatacggccgcaaggtggaccagaggcgttccaatgtcgaagccagcacgattgacacgtcggtgtcaagttcggtgtcactcgaggacgagtgggcggacgccgcctgattctctgatatggtgagcgaggactgcantgtgccataccgatttggcgccatt

SEQ ID NO: 699792 - DNA, 151 bp, Homo sapiens
acctccgctggttgcaagtaggagcaggctgcgcgaactccaacctgcttgatatgtgtgagttctcgccttctgacgcaggtcctgtccacggcagatgggcagctaggctcccagcagatggcagcttcacatcgtgatgagagctcga

SEQ ID NO: 699793 - DNA, 103 bp, Homo sapiens
cccgcagaagatgcgtttcggtcaagatggcatgacgacgctcgtttccgtaaccgactccttggttcactaatcatgtggccgaaaacggcatcttcatcgg

SEQ ID NO: 699794 - DNA, 883 bp, Homo sapiens
gcagctgcggggagccgcaatgaggcgcctggcggagctgacggtggacgagttcctacgcttctgggcctttgactacctgagtcctgaactcctgatgtcctgaaaattctccacaatgctggcagacatcggtgaatgcactgctgaggtctgcccgtgatgtcctgtgataatgcctgggctgtggagcccctcggccagcctggctgtaaatggccgtgcctctgagcacaaagaccagctctctcggctgaaggacagagaccccgagttctacaagttcctgcaggagaatgaccagagcctgctaaacttcagcgactcggacagctctgaggaggaagaggggccgttccactccctgccatgatgtgctggaggaagccagtgaggaggaggatggagcgcgaggacaggagaacatggggacagacgtccccagagcggcctgcccgggcgcaacgaagcacttctgcccctgtgcaccgctcgccatggcccgcacacgacggcaccaggcagccaaccgcaacgcctcactccaaagctgcacccatgcaactgcgcacaggccgtacccgagcagcctgtggccaaccacccgacggcggaccacgcaccgtgcctgatgccaacaaataccaggtcccggacagcgctgccatacaatgctctgcgtcaccttctgcatcagaacacctcattggcctgtctacacgaacccgccgctcggcccgcgcgcccacggcaaaccacccaggtcctcgaccccctgccaatcatgcctagctctaagacgaccaccctcgtccccatccctcgctcacctcggctctgccaatcaacctcggtgcttatgccccaacctctccccgcccag

SEQ ID NO: 699795 - DNA, 426 bp, Homo sapiens
tccgctagccaaaggattgtaaacgcaccaatcagcactctgtgtctagctgaaggtttgtaaacacaacaatcggcattctctcaaattggaccaatcagctctctgtaaaatggaccaatcagcaggatgtgggtggggccagataaaggaataaaagcaggccacctcagccagcaacagcaacttttcatgctgtggaagcttagttcctttgttcttcctgctaaatgttgctgctgttgactctttgggtccgtgccgcctttgagagctgtaacactcaccacgaaggtctgaagcttcactcctaaagccagcgagactaggaacccaccaggagggaggaacaactccagacgggaggaacgaacaactccggaggcgccacctttatgagctgtacctcaccgtagctgtacctca

SEQ ID NO: 699796 - DNA, 211 bp, Homo sapiens
atcacaccactgcacacctgtcctgggcaatcaaagcgcaaccctgtcaaaaaaaaaaaaaaaaaaaactacccatgaggaaaatttgtttttgcgattaccactataaatttctttagaaaatttttaataaaggcgtagggagattaaatttggcttcctcgggcatttttcaccccaatatggtccccccgtattgtgatggcgttcc

SEQ ID NO: 699797 - DNA, 135 bp, Homo sapiens
cacttagaaataccctatgcctttgtagctgtcatggtgcatttgtctttggaaaattcagattatggtatttagtgtatatgtgattttcaaatatgtcaactttaacttccactttgtataaatttttaagtg

SEQ ID NO: 699798 - DNA, 431 bp, Homo sapiens
cattgagcccctggagtgccacagtgttgcgtttggaagctcggagagtcctagtgtcacatgccagcgctggtgactgggcacagctgtgtgtgtatatgagaaaggagggttcagtctctggtgtcattgactgcccgctctctgctggattcctactttgcccgtaaaacctgtgagatatctcgaatgctagatgggctgctttccaattggaaacctggctagatcccaagatcagccagtctccaaaagacctgttcgtcccagcctgcctagaaatcaggagagtatgccaggctgcaggcatcgggggctggcacctggtgtgtggaccctgcatcaggagaagagttgccgcctggctcgagcagcagtgcccagtgcccaagcctctgcaatgtgctcaatagtggagtcctctccaggag

SEQ ID NO: 699799 - DNA, 270 bp, Homo sapiens
  misc_feature (5)..(5): n is a, c, g, or t
gagtncgtatcactccaatgcctgggtctgacaggacggcgggccaaagaggggggctgctaaggacggccccaggacccacagtgtggcctctggagctgtgtcttaactcttgcttgccgatcaatcccatgctctgaaatgcgcacactctggctccttagtagatgccataggtgggctcatgattgtccctgtaccggtccaggtaagcgcaggggttgccggtgttgaaagcgcttttatgtttggggtgataaggggggtggc

SEQ ID NO: 699800 - DNA, 414 bp, Homo sapiens
atgtcccccataaggggctcatggtctcaacagagtgtatatccagtaggttatttagttaaggtgtagtgatagtttaaaataaccccactctttccatagaaagttagcaagatctttcttttcatttgtgcttggttctacttattctgtagaaagttggggtcatgttgaactgccctggctaaaataccagtcctctttaaatgtctaattcctgagaaagctgggtaagatggcagaacagtaacaataggactcagggtcgggcttgtcttttctgccctgggattcttaccatttctggccatctttgaccaggaagtcaaagctccttttatttatttgtagtccaagctctttttcatggctgatttagtaatgatttttaaagatcatcagatccccattaga

SEQ ID NO: 699801 - DNA, 256 bp, Homo sapiens
tactttcacagggggagcacttacttctgtgaatttctatcccttcactttcctagaggttcatatactgcttgttcctcatagacttggtcatgttagcatcagtctgtatcactggctgcgatctttcatcttctactactggttcactgtgaatctggtattttccatggcttcagactagtcaatcttcttccagtaatccctgatgttactagatctatgttgcaaaccctgctcgtcttccacgttggtt

SEQ ID NO: 699802 - DNA, 339 bp, Homo sapiens
tgcatgagctgaatctcgcattgcactccagctggtgacagagcgagactccatctcaaaaaataccatactcaaagaaaagaaattgaccctaagaaggtgtcccagaactctctggagcattggtttgaggtagaattaccaaattcccagagtgccgaattgttctgccccgtggggctttagagccatgcacgctggaagtcccgccatttttgcaccttttgggccaccagcgtcaagggcccatcctcatttctctgcgtgggggggggtggctggttcctttgaggcccagaggtcatggtaagggtcacactcattcacttgcttcccgtc

SEQ ID NO: 699803 - DNA, 216 bp, Homo sapiens
  misc_feature (116)..(116): n is a, c, g, or t
tatgttatcccaacactgaggaagcactcctttaaggcagggtgaagggtgaagcctagtgtcatgtgccaggttagctgagcctcgtgtgaaatgtagagtcggtgccgacgtgnctcgacttgcgccctctgaccacatttgcagatggcgccttttcagggcagggtttggggcgataaaacacgtggttaccgagcctcgaaattcggtaaa

SEQ ID NO: 699804 - DNA, 778 bp, Homo sapiens
gagccgagagagcgcctggtcggtggccagcacagagcggctacacagaacattgtggtgctgtctgctgctagcgtgacgtgcgacattaccatctatgattgccaatggacgtgcgacgccactactgtacgctgctgcgcgtggaaccagcgatgaaactgcgattgaggccttgctggtcctgaggcgcttgatcatcaccatcgcgaaaggtgcgaactctggtcgtacgaactcctggatggtagccttggccgttgcgtcccatggggcaatacccggtaaagttgcataacaggatgagtcgaagaaccatgattccttcaatgctcttccagcagtcaagctggttgcccgttgtgcctgatgtgacgggcctgcctgtgctcgcgtagcgaacgatcatcgaaagctctagggggagacagtaattcgcgtcagatgaaaagacactcgtgcggcagcgactctaagatactagacatttcaaaccataggggaaaactgacctgcgaaccatgagatagagtgaagcgaagcgaagacacccttttcccatatccgtagaaccctcaataaaagaactatcggtggttgctcgacaaagaaaacaattagatcctttaagaaagtattcaaaaaaatcccagcaaagtagacctcgtaaaacacgcgaagtaaacgagggtggttaccgtgaatgatatcctggttgcctatcaatatgagcgctcaacaaatactccaccaaggcacaacctattgctgttactag

SEQ ID NO: 699805 - DNA, 92 bp, Homo sapiens
ggaaaattggcatgaccctgttaaatgtaagtggttaaagaaatggattaaaaagtgtgatgatgacagggaaacctccaattgggttggag

SEQ ID NO: 699806 - DNA, 374 bp, Homo sapiens
tctagaggatcccggtcatcttgctacaccaggcttgctgcttcaccttgcaactttttttttttaatagtatttattgatcattcttgggtgttctcggagagggggatttggcaggtcataggacaatagtggagggaaggtcagcagataaacatgtgaacaagggtctctggtttccctaggcagaggaccctgcggccttccgcagtgtttgtgtccctgggtacttgagattagggagtggtgatgactcttaacgagcatgctgccttcaagcatctgtttaacaaagcacatcttgcaccgccctttatccatttaaccctgagtggacacagcacatgtttcagagagcacgtgtagaacttgaa

SEQ ID NO: 699807 - DNA, 506 bp, Homo sapiens
  misc_feature (198)..(198): n is a, c, g, or t
  misc_feature (209)..(209): n is a, c, g, or t
  misc_feature (480)..(480): n is a, c, g, or t
  misc_feature (506)..(506): n is a, c, g, or t
aagggctaaaagccaaaggaggacacacatcaggaggtcattgtgttcatgtttagaggagaaacaaggactacttaagcaaaagaagtagggctgcagaggagcaggggaagacacatctttgggaaaagtagaaatttgtattcttacagaagatgagagtgttaagaccactgttccacgccgtcagaactcatntgagcattatntgaagcaactatgccgtcacttggggaagatgcctcataaccctaacagaggcctgactgaagtgcgaacgctgatctaaacaaagcagtcaggaacacgctggctaggattctcctgacctcttcttttgttgccatagttacctttatcaataaatgtccaaagatgtaaccgaggcattgttgtcatagttcattggatggcaacaaactgttattgaataaattagtgtcccaattaagagtctttcctatttttcagcacctttcnaatctgtaacaggtatttcctttcan

SEQ ID NO: 699808 - DNA, 467 bp, Homo sapiens
  misc_feature (30)..(30): n is a, c, g, or t
  misc_feature (175)..(175): n is a, c, g, or t
  misc_feature (185)..(185): n is a, c, g, or t
  misc_feature (243)..(243): n is a, c, g, or t
  misc_feature (316)..(316): n is a, c, g, or t
  misc_feature (414)..(414): n is a, c, g, or t
  misc_feature (451)..(451): n is a, c, g, or t
ttttgttccctcaaatacagttcttaaggnagattagttacaaatagttgtcagtactttcaaatgacagaaaaaattacattttagtaaaactggatgaatttttcatgtgtgaaataacaatcctttcaccaccaggtgggattactcccgttcatgccatagataactatgncatttttaanaactgccctaatttttctagttgcgatttcatgccttttgtaagtcaaaacatcgttntgttcccgcgctcccctccccctccctgggaagtggcgggggcacccctggtttctctgggacaccactgggnccctgcttagcgagcttttgtctcagtgctttcctcttgctgcgccggtcccccgggggtgttgggttcagggggagtggctctggttgcctatgggngaatactacaccaggggttacgcggggtgggggcccngggggtgggcgggggg

SEQ ID NO: 699809 - DNA, 377 bp, Homo sapiens
tgtttacagcgtcggggcgcgggttagggtacgtggtgtcaggcctggactgtgggctggggccggtcagtccctgtagccggggcgcccctagagactgaccccccgagagcacatggagagggtgtcctggatcctggcctgcctggcccagcgtgtggatggtgcacgtgtggctccaacctggcaaccgatcaggtcctaggtaaccccgagcaggctgtgggggatctgtgtagcctggttgccgttcaggtacctatgtaaccccgagcaggcttgtgtggaatcgtgggatcctgggggccgatcagatcctagttaaccccaagcaggctgttaaggagattgtagagagcctaggggcaagcacaggt

SEQ ID NO: 699810 - DNA, 224 bp, Homo sapiens
  misc_feature (138)..(138): n is a, c, g, or t
cccaaagcgcggccgggaagcctaacggttaacatttttgggggcccctaattatggcacctattgggaggcgcccccctaggaatatcacccattacccttcccttaacatttttttttttcccaattttaattttncgggctatcctagaaatgggggtggccttaatccaagccaaggttttcccatttttggtaggcctctcccggccggcccccccata

SEQ ID NO: 699811 - DNA, 581 bp, Homo sapiens
tggccctgccccgttaggagccgcgagtaagtgcgagtgtcaacgcctgagctggctgacagagcccgtgccgcggcctccgcgggcccagggtgcctccatggcccctgtgaccacctggaccgagcaccctgtgaacggccccagcttggcctcgggacagtcctgcgctgctcacctgactccctaggtgaactgcctgctttggcctgcacgccgccgcctgcaggacccactgaagaagcgggaaaccgggctgcaaggaccctggtcccccctggctgccggaatgtaggtaaggaaaaacaaagaactgattgaccaaggagaatttgttgtcgagcctgattgcaccggagttcccagcccgagggaaaacatttggacgaggaacgcggaggagattccaacaaggtttgggcttgattgcccaaggattattttattggagccgaacttggcctttgcgccattgttgaaccagctagttattgaacttgccacgaagcgaaagcggagttcccaagcttatttcccaaatccaaaaaattgcccaagggcaacctttcctttcccggacg

SEQ ID NO: 699812 - DNA, 1123 bp, Homo sapiens
acgttggggcgaccagtggggtcgctcgctgtgttcctcatgtgacctgcgcgctgctccctcgcggtggtatactcgccgcgtgtattcctttgcgccgggccctcgttgtcccattgcccccttttttgggcccacttatagccacggtttcgccctaaactccgggttgttcccgtgctggtgttttcccccgggattttggtcgtccacacgtgtttcgccccacagggttcctactgtacccggcgctttcttgtggggctcttggccgccgcgctgtgccctggccgggacccatgttgcgtcgttccggggacgacctgccctcgtccgcggcttccaggcacggagttttccccctaggaccatccacggagcaccatgggtgaacctgggaccaagtactcggggcttcgtggtgcatccgtcaccaacgtggcctccccgtgaggccagtccggaggttactcacctcagctcgtcgaacctgcacgtcccgatacgcctgaggtttggttttcggatcctggccttcccgtgtatacccgttcgggaaaccacggagccccggggagtttaccgatagagaattcacacagagtttcgcccccggggctacacacgttccaatttcgataatagtttcagcccaagattctcggcgttgaaccgcggggacgtacgccccacccccttgtgggaaattggattgaagattccaaacccacagggcacagggcacttcctctgggagaatagccctctcacaagttggagaactttccgcccaagtttccttcattcgacacagaacggctgcgtggtgaagcgctatcggagcccactggaaggagcccctggtgataagagaaggacctgccccacctatttctagctccacacacaagtgtgtggccccgcccgaggcccctgcccaccgcccttggaggccttccacccggcacctcactgacggcctgcctgcacaacctgctggtggggcacgacccggaaatccacgcgtgcacccccgcccggagggaaggtcccctggcctgctgggcttggctcggcgcccccaacccctggctaccttgtgggaataaacagaccaattaga

SEQ ID NO: 699813 - DNA, 715 bp, Homo sapiens
tattccttctaaacatatttttttttaaaaaataaccccccaatccggggtataaaaccaaagcaaaggccctgggggtgtggggggtggagggagtggcccccagaaggccaaaacgtgagagtggcccgggcacaccggtggttgccccaccaaaagtggagccgtagagactcccccaaacagcagggacaggaaggcgagaaagtgccaagaggcataagtgcgggcccagtacaccccgagtggtggcccccctcacccacaggtgtgtggcggccacaaagagttccctctcatctactctaaaaaggcacctcacgaggtgtgtggtagacacataggtcggcgacgaacgatgaggtagagaggagtgacggagagtgtgtgcgcacccccagcaaacgataccattatcaccaccaacaattactctcactcacaattaatcaatgaacagaagagagcccatacataccgtgagagcgcgagtaaacaacccctccaggcgtgtgaccacaaaccagagagaccgtgagggggggacaagaagaaagattacaccgcccacacagaggctaataaaaacacacgagagagaagggaggaatcaacacgaggggcacgagacaaaacaaagcacgcccccccaccaaaacacatacactgacccaagaaggtagcgaaaccaacggaggacaacacgacacaaacc

SEQ ID NO: 699814 - DNA, 363 bp, Homo sapiens
tggatcgggagatcgggagtcaagtccagcctggccgatgtggtgaaaacgtatctctactgaaaatacaaaaaattggccaggcgtggtggtgtgcgcctgtggtcccagctgcttgggaggctgaggcgggagaattgattgaaactgtgaggtgaagcttgcagtgagctgagatagcaccactgcattccagcctgggcaacggagtgagactccatcttaaaaaaaaaaaaaaagaggccagattgcaggggctgatgccggtaatcctagcatttatggagtcggatgcaggcgaatcacgggacattcctgacgtgggacgtccgagattagccggaccaactgtggagaagcccg

SEQ ID NO: 699815 - DNA, 132 bp, Homo sapiens
tcagctctaatttctttcgacttgcagtagctgagtcacagggagatggcactttaccagaaaaaacatggtattaaactctataaacctctcattctccctgtgactcaggcccgcaagtcaaaagaaatg

SEQ ID NO: 699816 - DNA, 856 bp, Homo sapiens
  misc_feature (18)..(19): n is a, c, g, or t
  misc_feature (44)..(46): n is a, c, g, or t
  misc_feature (91)..(91): n is a, c, g, or t
  misc_feature (96)..(96): n is a, c, g, or t
  misc_feature (99)..(99): n is a, c, g, or t
  misc_feature (111)..(111): n is a, c, g, or t
  misc_feature (119)..(119): n is a, c, g, or t
  misc_feature (128)..(128): n is a, c, g, or t
  misc_feature (131)..(131): n is a, c, g, or t
  misc_feature (139)..(139): n is a, c, g, or t
  misc_feature (143)..(144): n is a, c, g, or t
  misc_feature (146)..(146): n is a, c, g, or t
  misc_feature (155)..(155): n is a, c, g, or t
  misc_feature (159)..(159): n is a, c, g, or t
  misc_feature (162)..(162): n is a, c, g, or t
  misc_feature (171)..(173): n is a, c, g, or t
  misc_feature (176)..(176): n is a, c, g, or t
  misc_feature (182)..(182): n is a, c, g, or t
  misc_feature (184)..(184): n is a, c, g, or t
  misc_feature (187)..(188): n is a, c, g, or t
  misc_feature (190)..(194): n is a, c, g, or t
  misc_feature (197)..(199): n is a, c, g, or t
  misc_feature (202)..(202): n is a, c, g, or t
  misc_feature (207)..(207): n is a, c, g, or t
  misc_feature (214)..(214): n is a, c, g, or t
  misc_feature (221)..(221): n is a, c, g, or t
  misc_feature (226)..(226): n is a, c, g, or t
  misc_feature (229)..(229): n is a, c, g, or t
  misc_feature (234)..(234): n is a, c, g, or t
  misc_feature (236)..(236): n is a, c, g, or t
  misc_feature (239)..(240): n is a, c, g, or t
  misc_feature (244)..(244): n is a, c, g, or t
  misc_feature (247)..(247): n is a, c, g, or t
  misc_feature (249)..(249): n is a, c, g, or t
  misc_feature (251)..(251): n is a, c, g, or t
  misc_feature (253)..(253): n is a, c, g, or t
  misc_feature (262)..(262): n is a, c, g, or t
  misc_feature (269)..(269): n is a, c, g, or t
  misc_feature (271)..(273): n is a, c, g, or t
  misc_feature (277)..(277): n is a, c, g, or t
  misc_feature (279)..(279): n is a, c, g, or t
  misc_feature (281)..(281): n is a, c, g, or t
  misc_feature (285)..(286): n is a, c, g, or t
  misc_feature (289)..(290): n is a, c, g, or t
  misc_feature (300)..(300): n is a, c, g, or t
  misc_feature (306)..(306): n is a, c, g, or t
  misc_feature (332)..(333): n is a, c, g, or t
  misc_feature (340)..(340): n is a, c, g, or t
  misc_feature (342)..(343): n is a, c, g, or t
  misc_feature (346)..(346): n is a, c, g, or t
  misc_feature (363)..(363): n is a, c, g, or t
  misc_feature (367)..(367): n is a, c, g, or t
  misc_feature (371)..(371): n is a, c, g, or t
  misc_feature (376)..(376): n is a, c, g, or t
  misc_feature (379)..(379): n is a, c, g, or t
  misc_feature (403)..(403): n is a, c, g, or t
  misc_feature (409)..(412): n is a, c, g, or t
  misc_feature (420)..(420): n is a, c, g, or t
  misc_feature (422)..(422): n is a, c, g, or t
  misc_feature (433)..(433): n is a, c, g, or t
  misc_feature (444)..(444): n is a, c, g, or t
  misc_feature (454)..(454): n is a, c, g, or t
  misc_feature (458)..(458): n is a, c, g, or t
  misc_feature (461)..(461): n is a, c, g, or t
  misc_feature (470)..(470): n is a, c, g, or t
  misc_feature (477)..(477): n is a, c, g, or t
  misc_feature (480)..(481): n is a, c, g, or t
  misc_feature (483)..(483): n is a, c, g, or t
  misc_feature (485)..(488): n is a, c, g, or t
  misc_feature (490)..(491): n is a, c, g, or t
  misc_feature (494)..(494): n is a, c, g, or t
  misc_feature (498)..(498): n is a, c, g, or t
  misc_feature (500)..(500): n is a, c, g, or t
  misc_feature (502)..(502): n is a, c, g, or t
  misc_feature (505)..(507): n is a, c, g, or t
  misc_feature (509)..(511): n is a, c, g, or t
  misc_feature (514)..(516): n is a, c, g, or t
  misc_feature (518)..(521): n is a, c, g, or t
  misc_feature (523)..(523): n is a, c, g, or t
  misc_feature (529)..(529): n is a, c, g, or t
  misc_feature (532)..(533): n is a, c, g, or t
  misc_feature (535)..(536): n is a, c, g, or t
  misc_feature (538)..(538): n is a, c, g, or t
  misc_feature (541)..(541): n is a, c, g, or t
  misc_feature (544)..(544): n is a, c, g, or t
  misc_feature (546)..(546): n is a, c, g, or t
  misc_feature (552)..(552): n is a, c, g, or t
  misc_feature (554)..(554): n is a, c, g, or t
  misc_feature (558)..(559): n is a, c, g, or t
  misc_feature (561)..(562): n is a, c, g, or t
  misc_feature (564)..(568): n is a, c, g, or t
  misc_feature (573)..(573): n is a, c, g, or t
  misc_feature (575)..(576): n is a, c, g, or t
  misc_feature (578)..(578): n is a, c, g, or t
  misc_feature (580)..(581): n is a, c, g, or t
  misc_feature (586)..(587): n is a, c, g, or t
  misc_feature (589)..(590): n is a, c, g, or t
  misc_feature (592)..(592): n is a, c, g, or t
  misc_feature (594)..(595): n is a, c, g, or t
  misc_feature (607)..(607): n is a, c, g, or t
  misc_feature (611)..(615): n is a, c, g, or t
  misc_feature (618)..(618): n is a, c, g, or t
  misc_feature (622)..(623): n is a, c, g, or t
  misc_feature (626)..(626): n is a, c, g, or t
  misc_feature (631)..(631): n is a, c, g, or t
  misc_feature (633)..(633): n is a, c, g, or t
  misc_feature (638)..(638): n is a, c, g, or t
  misc_feature (642)..(642): n is a, c, g, or t
  misc_feature (644)..(645): n is a, c, g, or t
  misc_feature (649)..(652): n is a, c, g, or t
  misc_feature (660)..(661): n is a, c, g, or t
  misc_feature (666)..(667): n is a, c, g, or t
  misc_feature (670)..(671): n is a, c, g, or t
  misc_feature (701)..(701): n is a, c, g, or t
  misc_feature (709)..(709): n is a, c, g, or t
  misc_feature (712)..(712): n is a, c, g, or t
  misc_feature (714)..(714): n is a, c, g, or t
  misc_feature (717)..(718): n is a, c, g, or t
  misc_feature (723)..(725): n is a, c, g, or t
  misc_feature (728)..(732): n is a, c, g, or t
  misc_feature (735)..(736): n is a, c, g, or t
  misc_feature (772)..(772): n is a, c, g, or t
  misc_feature (836)..(836): n is a, c, g, or t
gtacagattctcctaaannacccagaaacggttagacatttaannnaccaacaaggaagatctccattaaatatttgtgaagaaaacaaanaaaanaantggtgtagaagntgcaaaantgttgaagnaancaattaanaaannanatgaaaaanggcnaanagacacaannnagnccgcananccnncnnnnnaannnaancatgnaaataanaccacantgcancanataangnaannaatnccncncncncaacaaacncaccaanannncacnanangganntgnncagaaaaccncagccntcaactcaaaccatatcataaacccnngcaacangnncgngactggccagaaatacntgcngaantgacnaanctggatcctcaaagggaaacaccncagctnnnnctaagaananatgtgagactncccttggaacntgaaaaacanattnaanacccactanctattcntanncncnnnnannaanccanananaannnannnaannncnnnnanacaccnccnnanncnaancgnanaacagntncaanncnncnnnnncaaananncnanncaaannannanannaaaaaacacaancaannnnnccnaaannaanaaaancnaaaanccancnnaccnnnnaccaaacnnaaaannaanncaccgcacgggacaaagcgcagacggcagnaagacaanaancncannacaannnaannnnncannaaagaaaggcagcaccggcagcgcaggggcggacanaaagggcggggaaaggccgacggagggagcagcagggggcacaggacagagagggacaaaggcnagcccagcaagcagaaaggc

SEQ ID NO: 699817 - DNA, 525 bp, Homo sapiens
tgcaacctggtagatcgctctcaggcagataaaaagaactaattacgacatgggcaccactgggatgaatccagagaatgtgctgagtgagcaaagccaatcataaaagttgcacactgtatgattccatttacataacattttgaaatgcaaaattataggaatggcgaatagataaggggttgccagggaggagtggggagaacaagagagttgggcataactataaaaggatagcacaagagatccttgtggtgatggacatattcagtatcttgaccaaatcaatgtgaaaatcctggttgggatattgtaactgtagttcagcaagatgtgccattggggaaaactgggtaaaaagaacacaggatctctgtattatttcttacaactgcatgtgaatctacagttatctacaactatctcagaatctacaattatctctgagtaaaaagcttaacataaaccagatttagggcttagcttaataaagcatttatactctctctcttactaagtccctaa

SEQ ID NO: 699818 - DNA, 329 bp, Homo sapiens
gcttagagatcatctaattcttattagaaaactggatagttctgcaggtgtgggaatgcggggacacacacacacacacacacacacacacacacactctctctctctctctctctctctctctctctctccttacataggaggttagctggaatatgccttagagattatataatttatattagaaaaagtgaagcttcgtgagggagagtgatgtgctcaagatccctcatatcggggagggtgaacagagcctgaagaacaggatcgtgacccgaggtatgtgccgtgtattatcccttttacaggctgcagaacagatacacggc

SEQ ID NO: 699819 - DNA, 225 bp, Homo sapiens; identical to SEQ ID NO: 658517

SEQ ID NO: 699820 - DNA, 208 bp, Homo sapiens
aaaatactgctttccccagttccccccctattttttttaagtgggcgggggggcctgttaaaatctaaaaaaaaaatggtggattgatattttcccgggttcggtgtggaaaacaaaacaaggacatgctttaaaaacaacaacaatgaaatcccttttaaatgtgggttaaaatcgtttaataaaaaaactagttttgaaaaaaaaa

SEQ ID NO: 699821 - DNA, 325 bp, Homo sapiens
cctgtaacgtggtgttatatctcctcgctgtcaggaaggctgaggaggggcggtgggaccatggccatcatggagcgggatgccaccgagttctcaaagaccttgtcgtgccctggcccttcctgtcctggcctcctagttgggcaccagtatctccacccagatgctgtgagcaccaccctccccaccaatccctcagcgagattctagcagaggggagagagccaggtgtcctgtgcggacccagtgtgttgagaaaggggggctggctatgatgatgcatgtggagtccaccctagggtcagggttcagggcctgcatttga

SEQ ID NO: 699822 - DNA, 207 bp, Homo sapiens
acctgtaaaatggagcaagcaattgcatcccaggttttcttccgaaatgtaaactctgaataattttatgtttgtaagggaagggggatgaaaggattcttctagtaatgacataccgatgtttcccgcgtgatggaagtagtagagggatcctgctagtagatcgagctgtcaggacatgcgaatgcttgtgaaactgcgccgctc

SEQ ID NO: 699823 - DNA, 296 bp, Homo sapiens
actcgtcgactccgtgaccaccgtcctgctgtctatctcatccaatcaccgttttctggaggtctgataagcgttggcatcgagcgccttaccccggagttcggtatcatcccgtagcgccaagtctcggttaccataagtggcccactaggctctcgcgttccatggcccgggtccacgccagggaaccgggcttcttacccatttaaatgttatcgaaaatccgttgagatcggtctcggacccgagcacctcatcatcaattcgctattaccgtgatggtagtgcttgacggg

SEQ ID NO: 699824 - DNA, 315 bp, Homo sapiens
cgcgtcgacgttcctttccactcttgctttcctttccattcaattccattccattccattcattccattccattccattccattacactgaggttgattttgttcaattccattccaatccattcaattccattccattctagttgattcctttgcattccaagccattccattccattgcattctattccaatgcattccattagggttgatttcattccattccatttcattccattccattgcattctactctgcttaattccattccattccatgtcgatgcggccgcgaatttagtagtagtagtcgacc

SEQ ID NO: 699825 - DNA, 867 bp, Homo sapiens
  misc_feature (56)..(56): n is a, c, g, or t
  misc_feature (58)..(58): n is a, c, g, or t
  misc_feature (65)..(66): n is a, c, g, or t
  misc_feature (70)..(70): n is a, c, g, or t
  misc_feature (73)..(73): n is a, c, g, or t
  misc_feature (93)..(93): n is a, c, g, or t
  misc_feature (96)..(96): n is a, c, g, or t
  misc_feature (100)..(100): n is a, c, g, or t
  misc_feature (104)..(104): n is a, c, g, or t
  misc_feature (127)..(127): n is a, c, g, or t
  misc_feature (137)..(137): n is a, c, g, or t
  misc_feature (142)..(143): n is a, c, g, or t
  misc_feature (157)..(157): n is a, c, g, or t
  misc_feature (163)..(163): n is a, c, g, or t
  misc_feature (165)..(165): n is a, c, g, or t
  misc_feature (169)..(169): n is a, c, g, or t
  misc_feature (172)..(172): n is a, c, g, or t
  misc_feature (174)..(174): n is a, c, g, or t
  misc_feature (176)..(176): n is a, c, g, or t
  misc_feature (181)..(181): n is a, c, g, or t
  misc_feature (192)..(193): n is a, c, g, or t
  misc_feature (197)..(197): n is a, c, g, or t
  misc_feature (199)..(199): n is a, c, g, or t
  misc_feature (201)..(201): n is a, c, g, or t
  misc_feature (205)..(206): n is a, c, g, or t
  misc_feature (224)..(225): n is a, c, g, or t
  misc_feature (228)..(228): n is a, c, g, or t
  misc_feature (266)..(266): n is a, c, g, or t
  misc_feature (270)..(271): n is a, c, g, or t
  misc_feature (494)..(494): n is a, c, g, or t
  misc_feature (519)..(519): n is a, c, g, or t
  misc_feature (546)..(546): n is a, c, g, or t
  misc_feature (858)..(858): n is a, c, g, or t
agaagattgtcatcacagatgtggcccgttcccctaatctgtgtccaggttgctgncntggtgcnnctgnaantgtccatgcacccaggtggncgngttngctntcagccaaagtgcctgaaacganactgtgcccnatccnntgtcactgtgtgcntgaggnangctnctngngnatgtnagccatcggcnnaggncnancaannttgcttcctaatacccannctncctcacgacctcatttctgggcatctttgtggacatgntgtnncccaccccttgtcaagcattgcctgtgattgcccagccagattcatctgtgccttggacatggtgatggtgatgggttgcatccaagtgaagtcttttccttgaccaagggggacagtcagttttgcaaaagactctaatacctgtttaatattgtcttcctaattgggataatttaattaacaagattgactagaagtgaaactgcaacactaacttccccntgctgtggtgtgacctgagttggtnacacaggcacagaccccagagcttggnttttgaaacacaactcagggcttttgtgaaggtcccccgctgagatctttcctcctggtaactgtgaagcctgttggtttgctgctgtcgtttttgaggagggcccatgggggtaggagcagttgaacctgggaacaaacctcacttgagctgtgcctagacaatgtgaattcctgtgttgctaacagaagtggcctgtaagctcctgtgctccggagggaagcatttcctggtaggctttgatttttctgtgtgttaaagaaattcaatctactcatgatgtgttatgcataaaacatttctggcacatgntttgtgttc

SEQ ID NO: 699826 - DNA, 117 bp, Homo sapiens
  misc_feature (2)..(2): n is a, c, g, or t
  misc_feature (8)..(8): n is a, c, g, or t
  misc_feature (19)..(19): n is a, c, g, or t
  misc_feature (25)..(27): n is a, c, g, or t
  misc_feature (73)..(73): n is a, c, g, or t
anattttncataaatgctntaattnnnctccaaatgactattgcatagatgatcttgatatttgcaacaagcnctagtggatttggtagggtcctgaatcatctctataaggcaaga

SEQ ID NO: 699827 - DNA, 329 bp, Homo sapiens
tgacactatctcaggctatactgttatttggggttgactatattttgacagtaagggtggataaagccatagtcattagaggaaggtctagattcctgctcttaataaattacattgaattgattttagaggtaatgaaaacttcctttctgagaagttagtgttaaggtcttggaatgtgaacacattgtttgtagtgctatccattcctctcctgagattttaacttactactggaaatccttcacccattataatagctttttttctttattttcaaaatgatttcctttgctttgattagacactatgtgcttttttttttaacc

SEQ ID NO: 699828 - DNA, 440 bp, Homo sapiens
tgtattggccactgatttctagtaaacaaggtctggcagggaaatttcccatcttggttattatttatttagagtgtctcaatctctcacaaggcagcggtgtgatggcatgatcacagctcactgcaacaaccgcctcccaagctcaagtgatcctcccacctcagcctcctgagtagctaggattgcaggcatttatcaccacgcttggctaatttttgtatctttagtagagacagggtttcaccatcttggccaggctggtctcaaactcctaacctagagtgatccacctgcctcggtctcccaaagtgctgggattacaggcgtgagccaccatgccagccctgccatcttttttttttttttgggaaaaagagcctcgttttgtcgccaacgcggaattgaaggggaacaattcttagctcagggaaacctca

SEQ ID NO: 699829 - DNA, 378 bp, Homo sapiens
  misc_feature (27)..(27): n is a, c, g, or t
  misc_feature (37)..(37): n is a, c, g, or t
gtcgactaacgggctgcgagaagacgnacaggagggnaaaatccctggggattactttttcctaggggatgtaatacatatatttacaaataaaatgccttcatgggcaaaaaaaaaaaaaaaaaaaaaaaaaaaaagttttcattacagaattgtaaagtaaaaccacaatgcaattccacaccatacacactaagatagctgtattcaaaaagagagacaatgccaagtgttgacaaggatttggaaaaactgggtccctcatgaatttctggcgggaatgttggtacggccaatttgggaaacagtttggcagttttctcaaagtcctaaccttgccataggatctagctttcattcctaggtcgcgcggccgcg

SEQ ID NO: 699830 - DNA, 669 bp, Homo sapiens
  misc_feature (456)..(457): n is a, c, g, or t
ggtcctttttcgatttgggggcctccccaaattctgtaaaattttagagccctagcaataaataaaccctggaggggagtgggaaaatcccgggtccttgttcaaggcccatggagaagctgtggccctttaaaaaacggatctcaattaattgtcccatgggtcaatatataattcccgtttaatcccccgcaattttttatccaccaaaggcctcaggagcatgggattctgacagcccattttccatcccgggtcaagaaaaggggtaatagttagcctttcacatggaagagggtgaccaacctgtttctaagatttgggacgccctcatttgaataagcacactatgttctaagcttaagccgcgccttcgggggctccacgcagtcagtatcaactgacggtggcattcataaactgtaattgccccctgctagggcacgtctaaagttnnctgccccttcaatttgggggacccatcacatccttatcccgggggcagtcaaggcgatcagatccatagttttctgaacaattggtggcaattcccagtcttcgatcgacaagtgccctgtggtgcattcccgtgttgcatagctccctaaggctcttggatccgttccttccataattggccccttcggtggaatacagtaaagaacggtt

SEQ ID NO: 699831 - DNA, 323 bp, Homo sapiens
  misc_feature (57)..(57): n is a, c, g, or t
  misc_feature (61)..(61): n is a, c, g, or t
  misc_feature (96)..(96): n is a, c, g, or t
  misc_feature (103)..(103): n is a, c, g, or t
  misc_feature (177)..(177): n is a, c, g, or t
ggaacagctgtgtagctcctttcctggcagtggtggtagtggtagcagcagcggcanagtnggcagcagcagcagagcagcaatggaggggagcanagcgganttggacccttcagtgcaacgtcattcaccaggtcacattaccttccttctctccctcggcggctcccacaggcncaactctgcaagtcaaggtttctcccacctcagttcccaccacacccagggcaactcctattcttcagccctgccccagcccagctcaacctcaaactcagctgcaacaacagacggtaatgatcacgccaacattcagaccactc

SEQ ID NO: 699832 - DNA, 757 bp, Homo sapiens
taccatagcttgcgagcatgcagtagctggtaccatcaccaaacggatcagttgtgcctacctgcctactgtgcttggcatagcattcgaccgatgcgctccgcgctggcacgtgtgagaaattggatgcgagagcgttctaccagtatgtaactgtgccagatccttagacaggttgatagtctttataacacgagctttacaccttattgacatgagtcgacccaacattcttagttttcagcgaggccaggttgctctacatgttgtgttgtatcttgaacatgagttgattcgttatactagtttatctgtactgaactgctacgaattagaaggctctttcctgtggtatggacagtagtactttgatttattatagtacctatattagtgtggagtacttatatgacaccatttttggatctgtgggtgagcgttagtttaacttggggccagggccttcacaataatgctcgtctatgtgtgcgtgccgaaggaggccctatgtccgcatgagacttcttcggccttctcaagcttccaggccccctttctgccctgggtgctcatgggattttccttgtcgtttggggaactccctcacttgtggagctgtggggtattgcagtttggaccccatattatttttttcttggccgatgtatttccccaatcaactggtggcataagagttctgacaaagcagcatctatttgggagacgctatctgttggtgaccccagatgaggatcca

SEQ ID NO: 699833 - DNA, 340 bp, Homo sapiens
tgagatacttcgattggagaatgcagttcaggaggagagtacccaaaaactagtgttcaggactgagctggcccgggataacggattctatgcctggtacatgttgtcacgaaagtcagcggtagctgaacagagtctgcggatctagccctgctttgtgcctccaggaagtgaagatagtgcgcagtttaccggcagggaggcaaacagtcgaattgcatagcagtatcatgatgaaatgctagaaggcccagccttggaaaaacggtggccagtatgagcaagtgcaaatgagggatgccaacgcacaagagggatgcaggaaggccgcttgtggggg

SEQ ID NO: 699834 - DNA, 408 bp, Homo sapiens
  misc_feature (316)..(316): n is a, c, g, or t
atttttagtggacatggggtttcacccatgttggtcagactggtctcaaactccctggcctcaggtgatccacccgcctcagcctctgaaaatgctgggattacacacatgaaccactgcgcccagccgctctactttattagatttaaaaagtttgctctcagctgggtgcagtgcttatgcctgtaatcccagcagtttgggaggccaaggcggggagggtcatgaggtcaagagatcaagaccatcctggccaacattgtgaagccccatctctactaaagatacaaaaaattagctgggtgtagtggtgcanacctctagtcctagctacttgggaggctgaggcaggaaaatcgcttgaacctgggaggcagaggttgcagtgaccaagatggaccactgcac

SEQ ID NO: 699835 - DNA, 868 bp, Homo sapiens
agtcccagcactgtgggaggctgaggcaggaggatcatctgagtgccaggagttcgggatcagcctgggcaacatagtgataccctatctcttaaaaaagaagaagtttttaaatttgaaataataataggtactggatttatgcaaaatggtccttttcctgcgtcttgtgagaatgagtatcaggttttttttttccctttatatcatctgatgatgaccttaccggttcccattggtttcaggggactactaagtccctctgtgatttctgaaccaagctattcctaggcctgagtttatttggtggacacagcaactaattcagaaggccaacgcgtggtggcatgtgccgtgtagtaccatagtggctgaggtaagaggatggctgtgagcccaggagtcacggctgcagcaagctttgatggcgccactgcactccagcctgggcgacagactaagacgctgttctcaaaaaaaaaacaaaacgacaacaaaaaacaacacgcggaacacactacacatagggccaggaagcgtcccggggcaatagtgcggggagcggccagcaccaccactggtgccccggcggaaagggaacacgtgcacgcaggactttgcacagcgccactaaacatgggacgcccaagctgggtggacccgacggcaggaagccaaaaccgccggacaaacacgagtacacgcggacagactacaagtccaagataagaccacgaagacaacacaaacgctgcggcgcggcccagaaaaagcacacacatgtgggggcgagcccagagacgcgaaggcaacaggtcaccgaagactgggctacacacggcgggctcacacaaaaaccgggacaggc

SEQ ID NO: 699836 - DNA, 1689 bp, Homo sapiens
  misc_feature (255)..(255): n is a, c, g, or t
tgggacaatctacaaacacttttattagccaaagaggagttaaggtgcagcttgtgggagaaaaggaggggcctcctcctttcccctcaagaggcgatcacgtgcccctttcccagaggggccaggtccagcgagggaaactaaggaggaaccccgaggggttgtgcaagagacagggctgtgagaagtctcagagaacacacaagggtgatctccgggtgtctccggggataccgcattgtgactctgtgccangacacatgtgtgagcgctctcgcctcatatattctcacttccagagagaggcggccgtgagaaccgtgggtgagcgagaggtggatagacacgccgaaggagagagaataacaaaaagagcggcgatggcgtcggggcgcctcaaagaagaaacgcgggagaaccacatttgcggggcccccccttagaaaggatccagcagttcaaccggagaccgggggggggcgcacaaaagttatttccacacatttcggtgggctgtggggctactctctggtgggaagtgtcctctaataagagctgtgtgtgctgtggcgcccactgtggtgttcgttcctccatagaagaaaggagagaagagtactccctctgtgtgggacaatttcgctcgcgaattattagccccgtgatagtggggctttatcattgtccacacaattttcatatcctttattgcatcacacaaacaccaaatatgttcacaaacacataattttctctacgaagaaaacgtggtgtgcgcaccaaggaagcacaaggtgtgggtgcacaaagaggtggggccgcccagagaggaaaatgaggcagcacccaagtagacgagggggtctctcgcgtggggccccacgaaacaagcataaactaaggggggtgggaaacaaattcccctatattaacctatcagggcgccccgaaagcgtccctttctcgtcaggcaccatcacatattactctcaccaagaagtgatatgattggcgctgatgccatatgagaggacatatgattaatggatccaacgctcccacaagcagagaaacttctctggggggcaccacccaaagtggggaggcttcgggagaatatcacattcacgacgggaggaacacaactgtggggcggttatcatcgatataaaagcagccaaccaagagtgggaagcgcctctccgaatgagctccccaagcagaagggggtctccaaccaaccgccgggggcgaagaacgggggggagacactagcaaccccgcacgatcgagctagccatcggcgaggttgagccaacacactaatgaagccgaaacaacgaggggtcacgtcggggacccacaaaacccgcggagagaggaccaatcagtgaccaccacgagtactgggagacacccagagaacctagtaaaataaatcacagagcaacacagagggagtggtctaaacaccacgggggagaagcaagcacatgtcgtcagacaggacgacaggccgagagagatgatactacggtgcacacacacgaagagtcatagacgacaaagaagtgatgtacgtacgctcaccccgccaaagaaacaaggaacgtgcgtggccatatcacacacacgagcaatacacagggcgatctacacatcgaagcgagacgacagtaaccacaccca

SEQ ID NO: 699837 - DNA, 421 bp, Homo sapiens
  misc_feature (118)..(118): n is a, c, g, or t
  misc_feature (122)..(122): n is a, c, g, or t
  misc_feature (134)..(134): n is a, c, g, or t
  misc_feature (138)..(138): n is a, c, g, or t
  misc_feature (149)..(149): n is a, c, g, or t
  misc_feature (158)..(158): n is a, c, g, or t
  misc_feature (165)..(166): n is a, c, g, or t
  misc_feature (169)..(169): n is a, c, g, or t
  misc_feature (173)..(173): n is a, c, g, or t
  misc_feature (179)..(180): n is a, c, g, or t
  misc_feature (189)..(189): n is a, c, g, or t
  misc_feature (194)..(194): n is a, c, g, or t
  misc_feature (206)..(206): n is a, c, g, or t
  misc_feature (208)..(208): n is a, c, g, or t
  misc_feature (372)..(372): n is a, c, g, or t
  misc_feature (374)..(374): n is a, c, g, or t
  misc_feature (384)..(384): n is a, c, g, or t
ggttcgaactactagaagtggaaagactacaagaaacccttcaacagcaagattagcatcattaaggggcaaggaggtacatttaaaaaaagataactcaactagatggcccactganggantcacatcacctnactncacttctagtntctagactncaaggannatnagtncacttnnctgactctnggttnctttaacagtanantgaaacgtacagactttcgttcattctaatgccctttcaaactctaaatgacctaaccttgacaggagccatgacagtaaaaaaagggcaaggtacgaaagtgtagagctagcccaggttaggaggttagccccatcatataagccacataaatcaagcttgantngcagatattnccatcatacagaagctgagagagggactcaaatcata

SEQ ID NO: 699838 - DNA, 1298 bp, Homo sapiens
  misc_feature (481)..(481): n is a, c, g, or t
gtgtatgtctatgaggtcgaggtcaagtgctgtgaggcagctgttataggataaacatttacagtcctactgcctgctggaggcagttcctggttccgacgggcttcggacttcgtcgtgcgtatgagcacaagtggtgggaatggtcgctagtactaggttattgtacccccagtcaatcactcgcaaatcttggattgccttgctgcgcaccatcatccgcatgattataccaatgcgagtaagtgtgtcgtccgagacattgtagactcgggccacttgacgatcgttattataggaatctcctgattgcttgtcattcggggcggcccatcgtccgcgagcgtaggtatgacttgaacttatgagtaatctctctacgtcagcaactcgcgtcatggtcatgggcgccttatcattgtgtccaatggagaactgtatagctccgttaacgctggtcttgcgcaactcattcagcaangcgaggacagataggcaacaagaagtggcgaagtttgcgctttgcgcctaaccaccccaagggtagtagctttcctcgtagggttgttggggtggcgtttgcatccccgtcctggagcgacatcctggtgactagtcttgaatttccctcgcgtactccatcaacacgaaatgatacatagccttctacagaggacctccactttgggagagttagcgccatggcgaataaggtggcttgccgaaaaacttagcgattgtcggtggcgagcgaatcgtaggtaagcccgagtttcaggaaggttgaggatagtccatgtgtgtgttccccgcatatcgcgttcgcccccaaaaggcaggtaaagcgagaacccccttatgttatcccgttcttcgccttgttcggcgttgcggaccagaaagctttgggtccgaaatgggttacttcggacaaccctttggggcttagacttgggcaatgcgttgaaaaggaagctaataaccaacaatttggggacatcgaaccaggggctaactcttgaaaccaacgggttggaacttggtatcggcttcacgagggactcgagagtcccccttcttgattgtctcttcttgggaagtggcaaagtggacttggtcccaggggccattggttcatgggggaatcttcagaagcgaaacggcaaataagaggctttgtaagaccgacgtagagtgtgtgtggggacaattctttccaaaggccccctggtgactttcagggcgcttaaagcagactacatttggggtttgatggtgcttgaccaccaggggcctcc

SEQ ID NO: 699839 - DNA, 374 bp, Homo sapiens
gcaggctgggtctcaaactcctgacctcaggcgatccacctgccttggctcccagagtgctgggattacaggcatgagcaccacacctggccaaaaaaagctagatttttaaagtctatttgtagcttagaattcatggaaaattcattttcaatgcggaggaaaacttggtaatgggctggtgattcaccatttgctgtgctagcctccttgtgtgtaactctctcaccttttactcacttaaaattcaatttgcagcacaacccaattcaatttaattttccatcagatcattttcttttggcagcttcagaggtggtcaactttaacataaaaacaatttccttccaattaagttgagcttcatcaggaag

SEQ ID NO: 699840 - DNA, 399 bp, Homo sapiens
  misc_feature (96)..(96): n is a, c, g, or t
  misc_feature (100)..(100): n is a, c, g, or t
  misc_feature (112)..(112): n is a, c, g, or t
  misc_feature (116)..(116): n is a, c, g, or t
  misc_feature (127)..(127): n is a, c, g, or t
  misc_feature (136)..(136): n is a, c, g, or t
  misc_feature (143)..(144): n is a, c, g, or t
  misc_feature (147)..(147): n is a, c, g, or t
  misc_feature (151)..(151): n is a, c, g, or t
  misc_feature (157)..(158): n is a, c, g, or t
  misc_feature (167)..(167): n is a, c, g, or t
  misc_feature (172)..(172): n is a, c, g, or t
  misc_feature (184)..(184): n is a, c, g, or t
  misc_feature (186)..(186): n is a, c, g, or t
  misc_feature (350)..(350): n is a, c, g, or t
  misc_feature (352)..(352): n is a, c, g, or t
  misc_feature (362)..(362): n is a, c, g, or t
cacaaaaccccttttatcagttttgataggagtacaaaccttgcgtgtgcatgttttacctccaccccccgatactcctctagatggcccactganggantcacatcacctnactncacttctagtntctagactncaaggannatnagtncacttnnctgactctnggttnctttaacagtanantgaaacgtacagactttcgttcattctaatgccctttcaaactctaaatgacctaaccttgacaggagccatgacagtaaaaaaagggcaaggtacgaaagtgtagagctagcccaggttaggaggttagccccatcatataagccacataaatcaagcttgantngcagatattnccatcatacagaagctgagagagggactcaaatcata

SEQ ID NO: 699841 - DNA, 407 bp, Homo sapiens
catatccgacatacactcattaggatggctaccaccaaaaaaaaatcacatcacatggtgatgatgtggagaaactggaactcctgtgcactgctgatgagaacgtaaaatggtacagccactgtggaaagcaatgtagtggctcctaaaatagttaaaagttgaaccacaggatccagcaggttgaaagcaggggctctaagagatatctgcccgctcgtgttcagagcagcattattcacagtagctacaatgtggaagcaacctaagtgtccatcaacaggtgactggataagaagaacggatcgtctatccatacaacagaatattactcagccttagaaagaaaggacattttggcacatgccacaacatggatgatccctgaggacattatgttaagtgaa

SEQ ID NO: 699842 - DNA, 317 bp, Homo sapiens
cttgtcaaagataccagaatgggttacacatttaacctggcaaacattgaaggactcttaatgttttctttttaataaggatgacggcccactttggggactaaaattgtgctattgccgagaagcagtctaaaatttattttttaaaaagagaaacttgcccattattttttgggttggtttaattttaatatataattttcgcggctttgggcattgtcaaatgttggaatctctctgggttctcagatataaatttaatcctaggtgtataaactctgtagccagtaaaatgtatgctacagatagggaatgta

SEQ ID NO: 699843 - DNA, 412 bp, Homo sapiens
tttcacgtcgttcaaggtgaggtacaccgagtagcccccgagctcggcctctttcggaatcacccactcggtttcgcccgtgccgctggagtcgaacttcaccggcaggatgatgcgcttgccgttgccgctcacgatcacgagggttttcggcatatcgccctgcttgtagcgaatgccgcgcaggaaaccttcgcgcaggaagtgcttcatgtgcaccgtttggcccgcgcgcagaagcgtgcggtcgaacacggtgtgggccatcgtttcctcctcgtcgccgcccgtgctcacgtggaagcgccagtcttcgatgccgctgtcccagcccgagtacacgaggctgaaatcatcgtccttctccgcaaccaccaccacgccgccggcgaagtcgttgtacttgcggccg

SEQ ID NO: 699844 - DNA, 110 bp, Homo sapiens
gtcgacctcgtgtctcagcctccagagtggtcccttttacaggcacgcactaccatgcctggctaatttttttgtatttgttttagtagaaacagggttttgccatgttg

SEQ ID NO: 699845 - DNA, 276 bp, Homo sapiens
aatgtgcacgcaggacacatgatgcgaaggttggtacattagtgggggacgacacaatatggaaacaaagtactatgaagactactagcaattattgggccatcaccgagtggttgtatatactactgaaatgaatggcaaatacacattctgggatgtggattgaagcatggtgcctcctgaatggcatcgttggtttcacagtatgagtgatgatcctccatcaacaaaaccacttactgctcgtacattcatttggacgacccataaattcta

SEQ ID NO: 699846 - DNA, 218 bp, Homo sapiens
aagatatgattcttaaaaacccattaatagaatcctgtggttataaaatatattgttgcccaaatgacacttctttgtagatgtcgtagaaagagccatggatattttataaggagacctactcagtttctagcagtggtagatcatcattaattggctgtgtgaccctgagcaagccacataacctctctgagctttggtttcctcaacagtaaaat

SEQ ID NO: 699847 - DNA, 203 bp, Homo sapiens
ttcccccggccgccccgcttctcgaggtgcctcgacaacatgagcactgagttagctagactccggccgccacagctttctctagtctgtggtactaccggtgcgcaccaccatgccctagactattttttagtgttttactaaatgatatggtttcactcacgtttgtcttaggacggtctccgatctcctcgagcgcctct

SEQ ID NO: 699848 - DNA, 273 bp, Homo sapiens
  misc_feature (236)..(236): n is a, c, g, or t
  misc_feature (256)..(256): n is a, c, g, or t
caaccccaactgaagctgagataatcagaccaggaagtgaaaatgacattcaaactaaattatttaaaacaaggcatacctctccccaactcagtctaaagacacaatttcattttgagaatgtttacagcccatttaattaatcagtgaactaaaagtcatagaaattggatttgtgcaaatgtagagaaatctaccatattggcttccaaaatttaaaaattttatgccacagnacatttcatccaaatccagntttggaccaaagggcac

SEQ ID NO: 699849 - DNA, 512 bp, Homo sapiens
  misc_feature (11)..(11): n is a, c, g, or t
  misc_feature (148)..(148): n is a, c, g, or t
  misc_feature (154)..(157): n is a, c, g, or t
  misc_feature (183)..(183): n is a, c, g, or t
  misc_feature (237)..(237): n is a, c, g, or t
  misc_feature (255)..(255): n is a, c, g, or t
  misc_feature (297)..(297): n is a, c, g, or t
  misc_feature (305)..(305): n is a, c, g, or t
  misc_feature (314)..(316): n is a, c, g, or t
  misc_feature (319)..(319): n is a, c, g, or t
  misc_feature (339)..(339): n is a, c, g, or t
  misc_feature (355)..(355): n is a, c, g, or t
  misc_feature (362)..(362): n is a, c, g, or t
  misc_feature (366)..(366): n is a, c, g, or t
  misc_feature (407)..(407): n is a, c, g, or t
  misc_feature (422)..(422): n is a, c, g, or t
  misc_feature (424)..(425): n is a, c, g, or t
  misc_feature (428)..(428): n is a, c, g, or t
  misc_feature (442)..(442): n is a, c, g, or t
  misc_feature (450)..(450): n is a, c, g, or t
  misc_feature (459)..(459): n is a, c, g, or t
  misc_feature (470)..(470): n is a, c, g, or t
  misc_feature (499)..(499): n is a, c, g, or t
  misc_feature (502)..(502): n is a, c, g, or t
tattgtctgantggaaatatactctgtttcacaactctaattataacaatttttacagataatacttcatttatatctctgtaattcaaaagtcattaaattacaacagaattcatatttaagataactttgctataaatatataatnattttnnnngtttttctttaatataacatcttganatcatgaacatttattttttctggtttacattacatagaatcatgactattttncctgatttgccttaactngctcaatttatcttgtgctatggatttgccctcgaccgttcngctttccnatgttttannngcngcattttagtcaacaattgngggtgctcatcacccnacatgcngtgnacaaagtcaaggtactttattcttatttcttatcctatatnctgtgttacgggggngnngcnaccatgggcggggnaccacccngccccagcngttgtgctccngcctgacaattggtctggtcttcacgttnggngggggggtcg

SEQ ID NO: 699850 - DNA, 410 bp, Homo sapiens
  misc_feature (395)..(395): n is a, c, g, or t
caagcttaaatcctatcttaaacttaaagaaggaagatttgaggtgcagtagtggaaagttaaccagcaaaggcacattaaacaggggtaaggttcattatccagagttaagtccatgcattcttaattgataagacttttcagggattaagttatccttctcttcttggggtcaaaagaggtagcttttaaagggggatttcctttataggggtaaattttccttacacaagtaactttaactctgttttaacaacttccttggttagcatttttttttttcaaaataattagctgggaataatttttaagccaaagggacatatttgggggttgcatattctggtttcctaccattatatttgggggtggcatagttgggccttatacactgngttctactggcaatg

SEQ ID NO: 699851 - DNA, 358 bp, Homo sapiens
gagcgtacatttgcagatcggcctgcggtggggatggtagtttatatcgggaacaaaagcggtgcaaacgttgttgcctcacaatcacgataaagaggtatccatttgcgaaccagattggcgttgatccgcagcaggcgcagcatgatttgctggccgagaaacagccgtcgctggagtttgtgacgccgccacagctgggtgagttggtgttgttcctgtgcagtgaagctggcgcccaagtgcgcggcgccgcgtggaatatcgatggcggctggctggcccagtaagtcaggcactgaagatcacatgtgggagctggcttgcctgcgatagcggtgggtcagtaaccaatgag

SEQ ID NO: 699852 - DNA, 127 bp, Homo sapiens
aatgttgatccctacttttttttttcactgctccatggaatttaaaagtttgggaacccctaagccaacatcctatttaaagttttgagacttattaaggtattaaagtaacagttttattttgaaa

SEQ ID NO: 699853 - DNA, 558 bp, Homo sapiens
  misc_feature (21)..(21): n is a, c, g, or t
  misc_feature (95)..(95): n is a, c, g, or t
  misc_feature (98)..(98): n is a, c, g, or t
  misc_feature (139)..(139): n is a, c, g, or t
  misc_feature (150)..(150): n is a, c, g, or t
  misc_feature (176)..(176): n is a, c, g, or t
  misc_feature (182)..(182): n is a, c, g, or t
  misc_feature (185)..(185): n is a, c, g, or t
  misc_feature (192)..(192): n is a, c, g, or t
  misc_feature (217)..(217): n is a, c, g, or t
  misc_feature (258)..(258): n is a, c, g, or t
  misc_feature (285)..(285): n is a, c, g, or t
  misc_feature (288)..(288): n is a, c, g, or t
  misc_feature (328)..(328): n is a, c, g, or t
  misc_feature (458)..(459): n is a, c, g, or t
  misc_feature (466)..(466): n is a, c, g, or t
  misc_feature (469)..(469): n is a, c, g, or t
  misc_feature (472)..(473): n is a, c, g, or t
  misc_feature (479)..(479): n is a, c, g, or t
  misc_feature (484)..(484): n is a, c, g, or t
  misc_feature (546)..(546): n is a, c, g, or t
atttaaagttggcttgtccanatatactataacttagtgtctgtatttaatattgacaaccaaaaatatatataaatatcttgcatctccccccncgngggcgggagctctccatgtcttcttgagccgtgagtttgcnggctcccacangccctcttctcatggtaatagtgtgnccctcngtnccaaggngactagaacccggccgcccagactngcccttcccctctcctccctgccctccagtgctcccaactngtctcaggtaaagaaagatttatttgngtngttgggtagggagagatgggaaggggcaaatcctaatggngcctgacccctagagtggggagatccaggccagccgaacgggtggccatagccacctcctgggatagaagctttgtagttcatagttcgattagtgtgtccttaggacataggtccagccctacagattnnctgggtnaanaanncaagtntctcnacagggcttagtctccaccctcaggcatggaaccattcagggtgaagcctgggatgtgggcncaggagactcag

SEQ ID NO: 699854 - DNA, 346 bp, Homo sapiens
tttttcccccgggtttttccaaaaaaaaaaaattgtggggccccccccccccaaaggggttttttgccccccgccgccccccctttttaaaagggttttttttggggcccccccttttttggttttccccccccttttttttttgggggttgtttttttggggccccccccttggccccccccccttggggggggccctttttttttttccggggggggggggtttttttttttttttttggggccccccccccgccccggttttaaattttttttggggggggggggggggggggggggttttcctttggccccccttttttttctcccgggtttccccggggga

SEQ ID NO: 699855 - DNA, 80 bp, Homo sapiens
ggaaaaaacatacaaatttacttaacgtgtatacacaggaagaatcacagcgtgattacccacccttctgtcgtcttctc

SEQ ID NO: 699856 - DNA, 127 bp, Homo sapiens
  misc_feature (33)..(33): n is a, c, g, or t
  misc_feature (35)..(35): n is a, c, g, or t
  misc_feature (40)..(40): n is a, c, g, or t
tcccggaacgctgcgtgttgtggaacgctgccnanactgntggtggaatttgcccgggctggcctcacggagcccgtgctcatccggcttgacgtggataccaagctcaacgagcagcgttccacaa

SEQ ID NO: 699857 - DNA, 1220 bp, Homo sapiens
ctctggtgtgcccccggtggttgtggatgcgagaaggggggctgacttcctagggccgcctgggtagtgttgtgtttcgccccccgcgcagtattagtgtgtccctcaacggtagcggggttcttgtgggcgccctccctccctccgagtgcggtgttgatggccccctttttgaaagagggatgtgggggcgacgcgcgtcccggtcgcgggggtcagcccgccgttggtgtaaattttctcccttgtttccccagggggagcccccctcgtgttgttgccccaagggaagtgcgcgccctgggggaaagcgcgtttgtgctcccaattccgaccctgaccgtgataaagttgtgtgctcccccattttcgcgaccccctttccacgggccccccaaaagttggggcccaaataaaccccctcgtgtgggcctctttggtgagaaatttttctctgggaagagaggtatctccccttccaagcgttgaaaggtgatcgcccaaggatcccgccagaacttcggaaagaagattttgtgttccatggaacacgtttcttttataacaccctctctttggggttctcttatccgatatcttttcgggggccccctaaaccccctcgtgggtccccagattgtctttcagaatgggatatttaccctcggacccacagcgcacctgtggaaagattatatcccactttgtagacctttctcactgtgggaattgtggttaaataataggcgccaacggagcttctcttatcccgagatatttttcttgtggtgcacatatgaggtgtgtaaaacccacaggtggcacaccctcgaaagagcccaccagatatgagaatataaataatactcctcgacgctctggctctttggggaaaatcactggaaaaatatataagttctattgtgttataagactgtctggcacagctcttcacaagcgtccactgtctcgtgtatagcgcactaagctcttggcacctctcacacaaaaagcgttataatgtataagtgacgcacacccacaccaccctcttccacgccactatgagagttttaaattatgccccacctatgaagcctatgtgtgtgtgctttcttaaatgtgtgtgcccacatggtggagtctttgctatctgaaatgtgtttgaacaatgttttgagattttttttaaataaattattatttgaccaccatcccca

SEQ ID NO: 699858 - DNA, 893 bp, Homo sapiens
  misc_feature (678)..(678): n is a, c, g, or t
tcaaacaatttgtgagcatctccagtacttgtgtaccttgtgcaaaacagtaataggcgatacattgatccatcaggatttgttaaagccttgggcctggacgactggacaacaggaggatgctcaagaatgttcaacagctctttatgtctctattggacagatacttgtgtctaagcaaaagaatccagatgtgcgcaatatgtctcaacagcagttctgtggcagaatatgcctatgtaactgttgtgcaaccagtgtggcagagagtctaagctttcgtcagaatttctatgagctggagttaaatatccaaggccacaaacagttaacagatggtatctcggaattttcgacggcagaacaagtttagatagggagacactcgctattttgtgcgagaactgtcaaagcaagaccagacatgcaacgaagaaagattcgacttctttagccttccttgcatttctgaactttgcagctaatgcgtttggtcttttgacaggcaaactggcacataatgaaaaaagctgatacctacatgggttctcacccaagtttgcctatggacgccttctgtggcccttacacggtgggtcctacgtgtatgaactcagggcagtcttcatacacagaggattgacgtgctatctggcattacatcgccacgtgaagatncacggctgtgaatgcaaagttatgtgaggcctgaacccatggggacacttcaactaggtgccgaacatggaactctagctcaacgtaaccattggaggacctgcccaagctttttgctagggcaccaaaaccattgttcccgtcaacggagacggtcaccacgcggttgcgcccacagagtagaacacagtctctctgtttaacttctcatataa

SEQ ID NO: 699859 - DNA, 641 bp, Homo sapiens
  misc_feature (189)..(189): n is a, c, g, or t
  misc_feature (238)..(238): n is a, c, g, or t
ccctggtaaatccaacttcgcccagattcgagcccgccccgaatatttcccaagacgattcgccccacttcccacgaattcgtatttattctcaccacgctgagccaccctttgtggctgaagcctaccacgcgagtgaaaagtttcaaccccgcgggaaagtggaccacgccctccactcccaagggngtatatagagaaaatgaggccccctatgtgtccacccccacacggagancctcccccacccctcccctctccaccagcagaggcgagataagtgagagatatctgggcttttctcccccaccactctttttttgagagagagaccccacacccccacgcgggtccccagcaccagccctattcccccgccccccagtatcacatgccgatgggtccccccacaccccggttcccctgaaccccctctcttggaattaaggaagacctgaagacttatgccccccttttctctgtgggaaattactttcccctccgtcccctgtgttaactggggctgtttggggaccatgcgtgatttttccgtgatttcctacagtgttgttccctccctcaaggctgggaggagataaacccccaccccgggattctccataatttttattacttaaccc

SEQ ID NO: 699860 - DNA, 132 bp, Homo sapiens
caaacataaaatgatgatggtctccgataacgtgcagagctccgactggaagagaggccagcgcgggactccaggtcccaggaactcgaggctcactgccgggactcccctcagatctcctttccattgagc

SEQ ID NO: 699861 - DNA, 248 bp, Homo sapiens
  misc_feature (147)..(147): n is a, c, g, or t
gactcggtcatcgtggtgctgatcggcggagactgactcaaattacacttcgggcagtaactgagaacatcaaggtcttgttccccacggagatccattctggggtcctggaggtcatcttcagcgtccccccaattctaacctganttctcccccctccgagagtcctttggggaccccaaggagagagtcaggtggaggaccaaacagaaactcgattacttgtgtctcatgatgtaagcgcaatc

SEQ ID NO: 699862 - DNA, 137 bp, Homo sapiens
accgtggaggggaatagactccatctatccatatgagctgctgcagaagaatattttgcctgctggaacctgctgtatctactcaagagtggaagttttcacagatgtagaactatgacagactttactttcaccat

SEQ ID NO: 699863 - DNA, 887 bp, Homo sapiens
  misc_feature (30)..(30): n is a, c, g, or t
  misc_feature (93)..(93): n is a, c, g, or t
  misc_feature (149)..(149): n is a, c, g, or t
  misc_feature (155)..(155): n is a, c, g, or t
  misc_feature (161)..(161): n is a, c, g, or t
  misc_feature (280)..(280): n is a, c, g, or t
  misc_feature (293)..(293): n is a, c, g, or t
  misc_feature (389)..(389): n is a, c, g, or t
  misc_feature (782)..(782): n is a, c, g, or t
  misc_feature (886)..(886): n is a, c, g, or t
ggtgcccggagtcttaagacaccgccagtntctgggccttcagtcatggtaggggactccagagggcacgcccgcctcttgaagccctaagtncggcttggaggcagcggaacctccggagaggtcagaggtagagcgaggacactgtnggaggnggtggngctggtctggagggtaccactaggggggggatttcagcccctggggggggcaggtcacccgatggggaccgggcctgggggttggcagggagtgggttccttgggggtggggggttggntggcccctgaganttagtgcctcgtgccagcagggccctctgcggaggtcctggccgtttagagggaccagattgggctgctctgtactggcaggtgggtcccttgagntgggagagttggtggtggagggggggacggtaccagtagctggcaccaagcatcaccaggaccaataagaccaggaggctgaggagcagccgctgtggtcagggagctggttgctttgagctgagtggtgcagtcagggggtgcccagccctcctcacagtagcagtgcctgttgctgtcacagaccccatgtccatggcatttgcttcgacattcctgtgcccccaggagatccacacgctggcatcgatggtctatacacaccaggccagggccacaggctgtgccaggcagagtcaggaggggctgggccacatcactgcccaggtccaggtgcaccagctgcagttcagctcagtcccattcacatctattgtctcccagagtagatcncggatggagcccagcagaggctgggtcctacctgtctggcactggagctgcccacaaatggcatctctaaggggtgcaggacacataactgccactgggggttnc

SEQ ID NO: 699864 - DNA, 576 bp, Homo sapiens
cgctgggaatctgccccctatactttgttttgccgccccttttaccgcagttgcctcccgtctgccgtatcccggagcaaatttcccccggaattctcgcccctttccagccctggtgcaaactcctcacacgccacctccctcattatttttctaacaaataaagtccaacccatgtaggctaattcctctacaattcttttcgcgtacaaaatagtttaaagcaaaatttgcgagacctcttcgtccgcggtaattttaaaaggcctctcttgttagagttttcttccccctcgctgtgagatttcttgcggggaagcggccgaggtcccctctcgctttaattccgcggagaatatcagacctttcgagcagaccctccgcgcggtcgtgtgcggagcacaccacacacgagctttttcaaagtgtgcccgcccgagctgtggcacagctttcttgtaatgcgcttttgaatccgacttattggacaccaatccccgtctgggcctcgggtgcgcgcacaatatcccccgcattttattccacaaaggaaacaaataacaaacaaaaaatcaa

SEQ ID NO: 699865 - DNA, 116 bp, Homo sapiens
  misc_feature (74)..(74): n is a, c, g, or t
cattaaacagtctgcaggaagctgcacagggcaagagacttctcctgttccgcgtatcttctggagctcttgtntactgagcatccagctggtcctgagctataggctctgctcac

SEQ ID NO: 699866 - DNA, 573 bp, Homo sapiens
cgagatggctcacgcctgtaatcccagcactttgggaggctgaggcgggtggatcacctgaagtcggaaattccagaccagcctgaccaacatggagaaacctcatctctactaaaaatacaaaactaggccaggcgtggtggctcatgcccgaaatcccagcactttgggaggccgaggtggacggatcacgaggtcaggagatcgagaccatcctggctaacacggtgaaaccctgtctctactaaaaatgcaaaaaaattagccgggcatgtatcaggctggtcttgaactcctgacctcaagcgatcggcccacctcggcctcccaaagtattgggattacaggcgtgaggtgccgcgcctggcctaacaaatgagtttcttgacacataaggaaccatcatccctagcatccacacgcacaggatacatgcccggacacggcacacacgaacacaccataacattggtcaaaactgtgcgggaactcctcaaatgaactcattcacacctactctattcctcattggcaatgcttgtcttgtgagtcccacaaatctctgccatatcc

SEQ ID NO: 699867 - DNA, 676 bp, Homo sapiens
gaagaggcgagaacgacccccgtgatccgaccaaagcccgcggcgccgctgcatcccgcgttccagcacctacgtcccgctgccgtcgccgacgcgcgaccggatgcccaagagaaaggctgaaggggatgctaagggagatacgagcacacggtgaacggacgagaccacaggatgaatgatccgcgacggttgtctgctaaacctgctcctccacaggccagagcccaagcctaacaaggcccctgcaagagtaagggagagaaggtacccaaagggacaacagggaaaagctgatgctggcaacggaggggaataaccctgcagaaaactggacgatgccataaacatgaccaggcacagaatagcttgaatggtgctggaagattgccataggtgaacgtgtgtgcattttgtgataacctgtgtacttctgtgtgactgtaccagtttgaaatactatttctgtactcaaacggttctctagtagaacaactgccagacatgtctggtactcaacgtgtatgaacgcgcgaccactgatcccaccacgcgccacactatcgcgcctaaacccaccgcgcacagccccttcccacaccgacgccttaagcgggccaacagggggccctaagtgcactctcaactacaaattggccgtccccaagccgggcat

SEQ ID NO: 699868 - DNA, 145 bp, Homo sapiens
cagaattatctatggggtgactaaaagttcaaggtgctggctttacaacatcagtttaacagactgttatactgtctaggatacttagcatctacacatcaacaaagagaaaacccaggaagatcactatgaagaaggataataa

SEQ ID NO: 699869 - DNA, 1060 bp, Homo sapiens
ggagagagagagagaactagtctcgaggtttttatttcttctatttttaatctgggaaaccggctccattctgggtctgagttaggaccttggggctgtagtggggagctaggagtcccattggaagggcgcctgcagcgacaggctgtggatgccggcacaggctggcccatgctggcccgtgcagctaggcgccactataagccagaattgtcagcggccgaaagcccgtgcactacaaccagcttcacggtaaaacgcaggggtcacaagggtgctcaaattgcggcgcggttgaaaggctgggggatgccaagaggtgtgcggaaggcagggttgaggctcgggccgttgagcccgacaggcggcttgtagaacacttgtcccagaaaagacgttcgtcgaagtggggaagaagtctcgactcgtggcgacacagggcgccatgccgagggcgagtgacagttgttggccccggaaatagcacaaagccacgcgagcggcccggtgtaaggccggataaagggcgggacaggcccgtaacagcggcccttcgaggagattgtatgtacttgtgcaataagccacgaagttagggagattgaggccagagcaattggcacaatttaacgtgtaagcacaggtaatgcaaagagtcttttagacgcacgggggtacccaagggggcgcccaggagaaactcccaggaaaattttcccccacggttttcagcagaaaagcagcaattcgtgaggttacgacctcttttacaaagcaccgaaagctcaacaatagtttcgggtggccaaaaaaaaggtcttgaagggcccccaaggtgcttaagaaaagcgtggggaactactccctttggtaagcgcgtatagaggcgtttaaacaacacaaaggggtggatctgctccgacacaggggcccccaagaagtacgagtgacatggttcccggtaatatcacggccaaaggggcttccatgcggagaccccggaagacaaatagggtatcgtcgaccaaagttaggtggttttcggtggccgctattctca

SEQ ID NO: 699870 - DNA, 111 bp, Homo sapiens
cgcatcttcttttgcgtcgccagccgagccacatcgctcagacaccatggggaaggtgaaggtcggagtcaacagaaatttagtcagtatgggacgcctggtcaccaggct

SEQ ID NO: 699871 - DNA, 344 bp, Homo sapiens
ccagcaaactacagcccagagcatgtctggccacggttgtttttgtaaataaagttttattggagccgggtgcggtggctcacaactgtaatccccacactttgggaagctgagccaggcgatcccttattagcctgaccgctgtggcaaaatcctttctctactaaaaatacaaaaactagccgggtgtcgtgctgcacgcttatagtccaagctactcaggaggctgaggcaggagaattgcttgaacccaggaggtggaggttgcagtgagccgagatttttccactgcactccagcctggacgacagagctagactgtctccaaaagaaaaagttgtact

SEQ ID NO: 699872 - DNA, 199 bp, Homo sapiens
gcaacctgaacttgaggctgggcagtctcctctgccacctgatgggcaccatgccaagccacccacacccagcctgcagctgcctggggcacgctcttagcagtggagccctgtggtctcagtgcctccaacttttggccttcagtgacacccgtgtaagaacatgagcacacgttgcttggacatgtgccatgttcca

SEQ ID NO: 699873 - DNA, 1310 bp, Homo sapiens
ggcaaggcctatgtggtcaggtccatcctggaccagcgtggcacgtggccagcgggctgaccctgtgtctgggcagggctgtgcagcgccacttagtggacacagtgcacttccactcaatggctgggccgcggctggatggagggtgcgcgaccgtgctcagagcgtcatcgggggccgtggccgctgcagttcaggggcgagctaccatagatccccttgatgatgacatggtagtccactcgctggccctgctgaatcacgacgtgacatgcttgaggacggcaaagggctactacagcctgtcctcgcacgatggtactacactcgctcaatggttgtcggcatggctctgggagaggcacccgtctgcccgtgagcggccttcactggcgtcagtggcagcactcgccgcgcacgcgcaggcgcggaccgagctcctggcagtccgtgagcgtcggaccgctcttttcgactcaggcccgcctacgtactacctgctgtttagactcgactggacacacactacatgcggcctgcggcctgtcgtccgtaggccgtgcccccgccgtcctagctgtcccacaggacgctcccgcgacgcccagcacagcaaacaggaggagcagctcccagagccaggcagggcccctgggcccgtcggctggcccccgttcccagcacacaccgcacacacatcgtccgctccactgtcctgggccgccctgggacagccggtgggccacagcccgacttgccctgtctggtcctgtggctttcccccgtccctgcggttcagaccgtgctgccgtgcctgctctgtcctctctcactcctgttcggtggcggctaacgcaccctgacccagagccacggcactctgccccgctgcctttggcacgaccccacccaaacctcgcgccccgcacctcccgctcatcctgcggctccgcttcaatcacccggcgaagctccactaccccggaccctatacaacggcccgacggactgaccaccaataccgtcacacacaggcccccacccccgcgccctccctctcgcacactgcccgccatcacggcacccccgcccacgcgtgcgccaccaaggccacccccccaaccgcaccacaccgacacgcgagcagtatgcgcccacgcctcggacacataccacgacacgcaccaccccaccaacaccacaccgcacgccagaccacaccgccactcgacaccgcaacaaaagagcaccaaccacgccaccccaccgaccacacccgccgcccacacaacggcgcccccgccccccat

SEQ ID NO: 699874 - DNA, 588 bp, Homo sapiens
  misc_feature (7)..(7): n is a, c, g, or t
  misc_feature (9)..(9): n is a, c, g, or t
  misc_feature (11)..(11): n is a, c, g, or t
ccaattngncnttggccggggaaacaagtgtactcaatttcatttcattcagttttaacaaacatttattaaatgtttgttaatgtgtcactcagtgtaattgctgccagttttccctaaataatgatttcatcactttttttgattagatagttgaactacactgtgatgaagattatagctattttttatatcttttttttggtttcagtactggttattttttaagctgaatttttattaagcagataatactgtatgcttttgagtacaaaattgtagtacaccagtatttccaaaagaaagcttaatctcattgctttagtattaacatagaagtgtggataatagcataattttatttttatatttgtatgctacaacgaatgaagtggaagttattcgggaagttattacaccttagagtttattttggactcttccattaatgacttaatggctctaaatgcgtcacataagtatttggatgttagtgatcatgatgaggatgatgaatgctatgttttaataaatagataattgttaagtaacttttctaccatagtagagtagaattgctttttactg

SEQ ID NO: 699875 - DNA, 338 bp, Homo sapiens
  misc_feature (215)..(215): n is a, c, g, or t
  misc_feature (317)..(317): n is a, c, g, or t
gggctgctcgtgaggatgggacagcattgacttactggggagactcccttgatgacagccttacacggttattcataaggaggcaggaagaggcgctaacagtaagcatgttctgggtggtcttcggggtgcacatgtgcagcagctgtacctgcttgcttgtatgttacatgtctcattaacatctgaaatctccacccgggagtgtgtttttnactattataatgagcaaaggttcagtctgaggacaggtaaaatcaaaaatgtgcaccctcttacgggggaaattccttactggagctagtttggcttgaagngaactggactacagtgtgaat

SEQ ID NO: 699876 - DNA, 137 bp, Homo sapiens
catatgcgcgccagcgcctgcaactgctggcgcacaccgcgccgagcagcagggcggtgtgccggttgaagtgcaattgcagcgtcctgattacgagtgcgtcgtgcagttgggcccgcaatggcgtgtccgtttgg

SEQ ID NO: 699877 - DNA, 903 bp, Homo sapiens
ggtaaaacccagcccatgacccctaacagagcgccctctcagccctcctaatgagctccggcctagccatgtgatttcagttccactccataacgctcctcatactagggcctactaaccaacgacactaaccatataccaatgatggcgcgatgtaacacgagaaagcacataccaaggccaccactagcgaccacctgtccagtagaaggccttcgtatacgggataatcctatttattacctcaataagtttgttgtctgtcgcgaggattgtggtctgagccgttttaccaactccagcctagcccctaccccccaattaggagggctagctggccccaacaggcaatcaaccccgcgtaaatcccctagaagtcccactcctaagacacagtccgtattactcgcatcaggagtagtcaatcacctgagctcaccatagtctaatagaagaagcaagcgaaagcaaataattcaagcactggcttatgacaattttactgggtctctattttaccctcctacaagcctcagagtacttcgagtctcccttcaccatttccgacggcatctacggctcaacatttttgtagccacaggcttgccacggacttcacgtcattatctggtcatatttcctcactatctgttcatgcggcaactaatatttgcactttacatccaaacatcactttggtttcgaaaggcaggcgcctgataatgggatttgggacatgtgggtgtgggaaaatcttggattggtccccctcttattggaggggggggttttaaacaaacaacaaaaacacccgctgggacagaacggaaaaaagggaacaacaacacacggcagggaagcagcaggaaatcgaaaaaaccgtggggcgaccatactccacaa

SEQ ID NO: 699878 - DNA, 713 bp, Homo sapiens
  misc_feature (411)..(411): n is a, c, g, or t
cctcataaacaggaaatgttttcccgaggacataagactttgggggttaacccttcaaagttaccgcatatcgccaaaaaaagggttcaaacatcggggtgaccaaaccaacccggtgttaaaaaccagggcctccctaaagtggcgggttcaaattttatgagaaccggggggcccgtcactaatttatcaggacccctccgactgcaattttacttgagaggtgttctgtgcttacccacattaaagcccgtcttgcagtttaaacccaaagtcttaacaaacctcttgggatcctatcactcacgttttgtcttcccatgagtcttgttttgttagatatgctcaccacttttcatggacagtctgtgcggccaattattcgtatagagtgtatatgaagcccccaanacctattggatacatgcttggtaattctccagttcctagcaggcacctatttcgaccgtttcaagtgatgaagtcacgataacttacattcgatactgtttctgataacgggccgacttaatacccatgttgcttttgacataagggatagtgttgacagataaattagtaggaatagatcggtttgtaaaagtctaaaaactggctgtatagatatgaaaatatggttcaccaatctggaactgtgagtttgtttttgacctttaaatgtgacaaataaaccttttgggagaaaaaaaaaa

SEQ ID NO: 699879 - DNA, 124 bp, Homo sapiens
taagttccttcttggtaaatatcctattggtggggtaagattttactatatctgtagtttaaaattctggctgtgtagactctgtgcagctgcctctagtggtgacgaaaccaagcttttttat

SEQ ID NO: 699880 - DNA, 604 bp, Homo sapiens
  misc_feature (325)..(325): n is a, c, g, or t
gcgtaaacccacaggtccacaaatgagcgttgaagattcacctcgtcacattcttaaaatctggcccacctatacaattataaaatacaatactctaacaaaagttatatggcgaattatacacaaaacaagctttatatcgcgcgaatcattataaaaaccaaaaaggggccggtttttattattggcggcgttgaaaaacaccttgatatattggcgggttaatattataaagaagggctgtatatgtagaacaaaaagggccacacggcgtggccacactgggtctatcaccgcccctcgtataattcccacgccacctctntttggggagaggtctcgagaggtttttgggaagagtttcacacggaacccacgccctcgggtgacacacacactgggtggaaactcgtggtgtcttctacttaaaatacccacaaattagccacggcattggtggcacacgtggcctcgtaattcccagctactcgggaggctgagccacggagaatcgcttgaacctcgggaggtggagccttcccatgggctgagatcacccccttgcactcccgcctgggcgacacgagtgagactctgtcttcca

SEQ ID NO: 699881 - DNA, 815 bp, Homo sapiens
  misc_feature (67)..(67): n is a, c, g, or t
  misc_feature (600)..(600): n is a, c, g, or t
aggaaacaatttttttgggataaggtagtttttccaagattttgggaactgaagacatgctttggancagaaaagtattcaacttcagacttgccagtgaatttataggaaatgagttagctataaaaaagttacatagttggttgaaagactggaaaagaagagctgaattggaagaaaggcagaatctgaagggaaaaagagatgagaaacatgaagatttctcgggtggcatagactttaaaggcagttcagatgatgaagaagagagtcgtctttgcaatactgtccttataacagggccaacaggagtgggaaaaactgctgcagtgtatgcttgtgcccaggagcttggatttaagatatttgaagtgaatgcctcttcccagcgcagtggtagacaaattctatctcagttgaaggaagctactcagtcccatcaagtagacaaacaaggtgtaaactcacaaaaaccctgtttttttaatagctactacataggcaagtcaccaagtaagtaaactattttccttaagccataatgttttgaaaaaaataaaatctaagaaagtaatgttaattatcagcattttgccattntattttttatcttctacacgtacacgtttcctgcccacccctgccagattattttaaaacaaatctgaagaccatcatatcatttcacccataccttcttcaatatttatctctatctgataaggacttttaaaaaagcataactataatatcgtaatcagacccaacagagttaacaaccagcctaagcagcatagcgagaccttgtctctaca

SEQ ID NO: 699882 - DNA, 536 bp, Homo sapiens
  misc_feature (321)..(321): n is a, c, g, or t
gaatgttaatgtaataattacccttggattaaaaggaaacataaaccattctcccttcgttttttcttatattcttctttaagatatttgaagtgaatgcctcttcccagcgcagtggtagacaaattctatctcagttgaaggaagctactcagtcccatcaagtagacaaacaaggtgtaaactcacaaaaaccctgtttttttaatagctactacataggcaagtcaccaagtaagtaaactattttccttaagccataatgttttgaaaaaaataaaatctaagaaagtaatgttaattatcagcattttgccattntattttttatcttctacacgtacacgtttcctgcccacccctgccagattattttaaaacaaatctgaagaccatcatatcatttcacccataccttcttcaatatttatctctatctgataaggacttttaaaaaagcataactataatatcgtaatcagacccaacagagttaacaaccagcctaagcagcatagcgagaccttgtctctaca

SEQ ID NO: 699883 - DNA, 1361 bp, Homo sapiens
  misc_feature (67)..(67): n is a, c, g, or t
  misc_feature (743)..(743): n is a, c, g, or t
  misc_feature (824)..(824): n is a, c, g, or t
aggaaacaatttttttgggataaggtagtttttccaagattttgggaactgaagacatgctttggancagaaaagtattcaacttcagacttgccagtgaatttataggaaatgagttagctataaaaaagttacatagttggttgaaagactggaaaagaagagctgaattggaagaaaggcagaatctgaagggaaaaagagatgagaaacatgaagatttctcgggtggcatagactttaaaggcagttcagatgatgaagaagagagtcgtctttgcaatactgtccttataacagggccaacaggagtgggaaaaactgctgcagtgtatgcttgtgcccaggagcttggatttaagatatttgaagtgaatgcctcttcccagcgcagtggtagacaaattctatctcagttgaaggaagctactcagtcccatcaagtagacaaacaaggtgtaaactcacaaaaaccctgtttttttaatagctactacataggcaagtcaccaaaaaaaataagctcccctaagaaagttgttacatcaccaagaaaagttcctccaccatcaccaaaaagtagtggaccaaagcgagcacttcctcccaaaaccttggcaaattattttaaagtatctcccaaacctaaaaataatgaagaaataggaatgcttctggaaaataataaaggaataaaaaattctttgaacagaaacaaattactcagactaaatctacaaatncaactaattcaaatgtcaaagacgtggagctgaagaacccagcagaaaaaatgcaacatctcttattcttttgaggaggtngatgtaattttgatgaagatgctgggttttgaatgcaatcaaaacattcatggcaacaactaaacgacctgtaatccttactacaagtgacccaacatttagtttaatgtttgatggctgtttgaagaaatcaagttcagtactccttccctgctaaatgtgcagtacctacaaatgattgttaatgagaatttagaacctgatgtaaagacttggtaacctgttaactggcaaatactgtgatatccgaaaagtatcctttacttacaattctggattagaagtggaggtgggtttagaagaacgaccattaacctttatcgtggaataggcgaatgtccactaggttggtctgacagtgtctgtacaaattacctaaatataaagaacgtgtgacctcccaatgtgcagggcgtggtggacaccgttgggctaaaattttcccccggaaattcttttagccaccacgggggagggtataccccccaacaccgggatttatggtttcaccccccaacaagtctcgtggccatatgc

SEQ ID NO: 699884 - DNA, 533 bp, Homo sapiens
acccgcaccccgtgacagcccccaccccatggcttccatctttgcatcaccaccactcctgaacccccatttctgattgtcagaatttttttttaacaaaactaacaacatgaaacacatgtgtctgtggtatctaaaatacaaaaaaaaaaaaaaaaaaaacacacaacaaaaaaagagagggggcgcggcacccaccaaatatacaccactaaaagagggaccaaagatattcacaagataacaccagagataaacaaggaacaacaagcaggggcacacatatagggcagactacaatatatataaaaaccaaagcgcacacgacggaaagagcaagtacaaacaaaacgcccaaacaaaagagaaacacaacgcgaccacaacacgaggaggaaccccaccgagaaaaagagacacaccacacacacaagggaagcgaccacaaacaacaacacacatgcgcgccaacaacacaaccaccaacacacccaaacaagacaacaacaacaaccccctacataacgcccacc

SEQ ID NO: 699885 - DNA, 1324 bp, Homo sapiens
tacttgaaagggagtttggctcttgttcgcccaggctggagtgcagagtggaggtgatcttcggcatcacgtgcaaccttctgtgccttccgcgggtttcaaaatgatttctcctgtgcctcagccttcccaagatagcgtgggattacggggtgtgtgcaccaccagtgtttgtggcctaatttggtagttttgaagcaatgaaaatgtgggttcccaccaagtgtgtgtggctcgagggcgtggctctctcgaaacctcctgtgaacacctcgaggggtccactcccaccccacctctcgagcctctgcgcaagaggtgcggtgagaaatatcacggcgctgtgaagacccaaaaggcggcccacagggctttaaacacataatattctcgtgtggccgcgtgatatattgagagattttctcttattgttctcctgtgtgccacaactgtgagcggataccagagatatctgttgtttaaccctcacgcggggccaccataaacatatacagaacaggggcatatagttctacaatagtggtgcaaagggtgttctcacaaagttttatacgggcgcattatacggcggaaaactcttcacacaatataagcgtggcaccattttttaccacttctaattagcgccggggcatagaatattttggggggagaccccagtgtgtgcccctcggggggataacacacgtgggggagaaacgtggcaccaaatagtttggtggcgctccccccaaattatatttttccgtggagcaattccacaccaacagctggtggggagttgtcacactatcataccgtgcaagatgttgtatccaccccccttgtattcaccaacagttgtttccaaaaaaccccctttctttactacacattttgaggcgggaacgtggctttaaccaccattcattaatatgtgggggctccaccccccttacagtctctcaataaggggataacaacccccttgtggttatgcgagacagagtgttgaaacataattgctgagggacgatgggagtgacaagcggacaaaaggcggaacatgcttgggtgtgtaacaaatctagggaaaccgcagatgatgcatatgcctggtgcgatggcaacaaaacagtgttgcttggtgttaagaacactactattgtgacgaatagctttggtagtaggactgatcacagtaccgcaagatgtattaatccaatcatcgaaagaagtagttgtcgctgtggatatctatagactggttggggaccaaaattaaaacaatatatattgatgacagtgaggaaaatactcatcg

SEQ ID NO: 699886 - DNA, 127 bp, Homo sapiens
  misc_feature (93)..(93): n is a, c, g, or t
  misc_feature (114)..(114): n is a, c, g, or t
ccatctgtccggcgggctgccgatgccaggtgacccttcgagacctgtttgaccgcgccgtcgcctgtccactacatccataaccctctcctnagtgttcaagcgaattcgatncggtataccctgg

SEQ ID NO: 699887 - DNA, 767 bp, Homo sapiens
taacgatctggcactctcacaggccgttctcggccccctagttgatgccctgtcctttaagcacctcacgtgctggcctgcaggctcaatcgtctcaccaggggtgttccaatgcgacagcctaagcaccaacatctatcactcttggggcggtcaacaatcaggcccatgaagtctgccgcacccctacccctgtgcaatgggacgaccccttctgtgaatgcactttgagccttccccgcagaccagtgacgcgccagtcaacgatgagcacccagacaaggacacaagccacatcctcaacaggacaggcagccgtggctcccaaagagtcagggtctactcaaccagggaccacagagcgtacctgcccggtaaacgcgacgctcgactgcgtattaaccatgggcgaggacgaggagctctgctgttctctccgccttgagcactccaccctcaacggccagggacgcttgaggggcactgactcccacgcgcgaccacgccctgcctcggtggacgcgccaatcgaggcccccgtcccacacatgaatatgaaggagccggagcagactttctgacaggcgagctcttcaccctgcctgaagacatctctcctgccactttgtcaggcgcacgtagcacgtgtctctctatcttcgtctgaggaaaccctatccttctactgatgcttacactgcctcgggatctttgtctgactagtgtttgtttgcctgcaaagtgcgaactcgagctcctccaaggag

SEQ ID NO: 699888 - DNA, 169 bp, Homo sapiens
catatgaactgagcaaacccagaatatcacttggatctccagtcagcatagaatatcgtcatctgacatagatacagatagacgactgctcaaaggctatgtactctacaagtagacacccatataacaatgaattgacaagtggtcaaggcaacacggtctctcaggc

SEQ ID NO: 699889 - DNA, 363 bp, Homo sapiens
  misc_feature (34)..(34): n is a, c, g, or t
  misc_feature (105)..(105): n is a, c, g, or t
  misc_feature (133)..(133): n is a, c, g, or t
  misc_feature (140)..(140): n is a, c, g, or t
  misc_feature (146)..(146): n is a, c, g, or t
  misc_feature (154)..(154): n is a, c, g, or t
  misc_feature (156)..(156): n is a, c, g, or t
  misc_feature (163)..(163): n is a, c, g, or t
  misc_feature (169)..(169): n is a, c, g, or t
  misc_feature (173)..(173): n is a, c, g, or t
  misc_feature (203)..(203): n is a, c, g, or t
  misc_feature (221)..(221): n is a, c, g, or t
  misc_feature (235)..(235): n is a, c, g, or t
  misc_feature (237)..(237): n is a, c, g, or t
  misc_feature (270)..(270): n is a, c, g, or t
  misc_feature (329)..(329): n is a, c, g, or t
ataaaagcacaaaaatggcgcaaccagaacagcnttggctatcagacaggcagagacacggaggcccctcaatagtgacctgtgactatccacaaagggcaaggncctggcactgactccggccagtggaganggctgtnccgcanacccggcnanaaaaaanacccanaggntgaaagcacagacggggccgcggggcagcngccccgggctctcgtganacacttcagaaggnanaaatcctaaggaacaagaatcctgaatggaganaacccaacttttttaaaaaagaaggaaagtgtaatgaagggaatctacgggggtgggtnttctttaagaggtgagaactatggaatcttgcaa

SEQ ID NO: 699890 - DNA, 85 bp, Homo sapiens
cggcacgaggcctcatgttcatacacctatcccccattctcctcctatccctcaaccccgacatcattaccgggttttcctctta

SEQ ID NO: 699891 - DNA, 110 bp, Homo sapiens
tcgatctactggtcaccttcgagtagagaggcccggcccggcccaccgtggggcaagttccacccgcagatgacacgcgttctcctaccactcccgttctctctaccact

SEQ ID NO: 699892 - DNA, 130 bp, Homo sapiens
cggcatcgtccagtcagcacattcagcacatggtgccgctgcatcacagtgtcagcagggcacaggttccatggttgcatgttgctcagggtggcgcttcccacattcaggtgccatgcagtcaggtggc

SEQ ID NO: 699893 - DNA, 156 bp, Homo sapiens
gagtaccaaacacacagagtgtttgtagaatgaatggccaccaggtttgtccgatgaaattaacagtctaaatgttttcgcaattgtgttatgtaggataactatgcctcacatatgaatataacttgttaatgcttgtggggagtcctttcttca

SEQ ID NO: 699894 - DNA, 138 bp, Homo sapiens
tgtgctgtgagtcctaggcacagctctactgcctcgcttattcgatgccgatgcttggccatgccattgaaccgtttctatggtcaccgcgcagcactctacaccggttactcgacacaggcccattgcattttgaaa

SEQ ID NO: 699895 - DNA, 104 bp, Homo sapiens
gactccccttacatcagctgcttagactagagctcttctccctacccctatctatttactcttaccaatcagagacctattaggacactgagtacatagtatca

SEQ ID NO: 699896 - DNA, 289 bp, Homo sapiens
  misc_feature (144)..(144): n is a, c, g, or t
  misc_feature (148)..(149): n is a, c, g, or t
  misc_feature (185)..(185): n is a, c, g, or t
  misc_feature (241)..(241): n is a, c, g, or t
gcctcactcatgtaacctatcaggaaaagaattgcatccaagccctgcgtgcttgtagatgtgttcaatattctacacatacgatgagaaaagttccatgaagtgcagtgaagtgtggacaaggccttcagcccggtgtctcangctnncttatagactcaccagcgaattcatatgtggagaanaagccgctatgacatgtacaggagtgtggacagagccttcactcaaatgtgcccangctctattagactatcagaaaactcattcgtggagaaaaaccctatga

SEQ ID NO: 699897 - DNA, 132 bp, Homo sapiens
atatcttggcctcactcttgacctcgctcaagccagtcctccacctccctaatagcaggggctacaggctacaggcatataccaccatcccaactaattttttttttagaatgtttactaccactagtctca

SEQ ID NO: 699898 - DNA, 162 bp, Homo sapiens
gtggccatacacaagctaagcgaaattgtttctggaggatgatagcaccccaggtcagcagagtaactgcctctccagagcgtctcagaagcagaggctctgcggtccatccggtcttgtaaggatgactgacatccattccctttctgaaccctgccctga

SEQ ID NO: 699899 - DNA, 417 bp, Homo sapiens
  misc_feature (149)..(149): n is a, c, g, or t
ctggaaagggatggtctggactctcctcatgcagtttggaggtgcctggtacaaagcattctgcttccagagaaatacattgctacaaaaactggccattattctgtgaaaaaagacatgagtttttagttgtgttctacagctacgtnccgacccaatgcttcacatatccacacgaaagtaaaaggcaggtaagacaaaaagggctgtagttttttctgaaataactcaagtcttcaaaatatagcttttatattctttgtaaagtgggattagcatattgcaactgaagggtgttctaacaaacaaaaattccagtctggataataattctatggtagacaaaagaattctcagcctcttgggtttcctggaattctttgcttcatgctctcctcttccactatgcagctaagg

SEQ ID NO: 699900 - DNA, 354 bp, Homo sapiens
  misc_feature (35)..(35): n is a, c, g, or t
gtgagctctgaatcgttccacactcggcagtcaantagcataaaaacccggcaacatgattgccattcgcaacttccagagtgaagtcaatttctcggagattgctttcagcagtaacttttgtacccgcttcggaaatgatccgggcgatttcattttctcgcccaagatcagaaaaagcagcaccctttgtatgatcggtattgagaacgataaacccagcatccttaccatcaaaaacagcatactttcccgccaccagcgcagcacaccacgcatctaaagacggcgactccttccatccggcaaaggccgcgctttgcgacggggaaccgccaaaagagttgacatcca

SEQ ID NO: 699901 - DNA, 151 bp, Homo sapiens
tcatgtggtcgatctagagcatccccttacaaccccacgatcacctggaagcactcattgatccatttgacctggacgttttcacgccacaccgtcaacagctaccttcatcgcctattttacacctaaccccgtgatcgtggggttgtaa

SEQ ID NO: 699902 - DNA, 157 bp, Homo sapiens
cccaacaggaggtactctgttcagagagatgctgtctgtgcttggatagtcagtccattatttgtgtatgaagacaatgtacaaatcaatgttttgcaaataatgatctcagactttctaagttaaattttaaaacatttttgattgtttgcccata

SEQ ID NO: 699903 - DNA, 1354 bp, Homo sapiens
cttcattttatgtagccatattcgttagctagtttattcaagatttcttgtaatttagtgaggtgaacgactatcagatttcattatatggattctcggctatttgaggtaaaatttcattcttgtatatatagtgctgactatttattaagtatgaaattaaacagattggtaacctacatatagtggcctcctgactttcaacggaaaacgtgtgcagccaattacacacagccctcaacgctgtcacagagacttgactcggcattgcctctcattcgcttaacacattaccaacctacaaaaagtaggatgctacattttgtctctgtaacttagcctctcagcactctcccactggtacctcttgaaccccaaacttagcacttacggcactttctcccgcgttgaacacagaccatggactttactctgagaaagcgactggctccctcccaaccacaacacctaatcctctacttcataaactggtaattacattggtgtccattctaaggttgctcaatatgcctagtaaaccagccgcgaccgtaaacgggactgcgcttacacacatggactccaccggatgcaacttaaactaaacactcggacacgaccttcgcttcggcctagaaaacccctgactatcctccccgcatatgtcatccactgttgtatccacgaattgacctctggtcacgctccagacaaaccatccaagagaaaaaacacagacttcatataaacaatgaccctcgacacaacaggcaagctaccaagagcacccccaactccagtgcacatactcaactaccatcccaccacttaccgatgagaccacacctttcgaccgaccgaacacataccatcctcgataccgcccctccgtccaacctcaaacaatgctctagttgtagccacactgacctcatgcgcccttgccagggcgacaagtacgggacaatattgccgctccacgcctacacctaccatcccgccctgtcatgggcatcttaatagtgaataaatccaaattaccggacacagcagcatccctgcctaagctctcaacgccaaagggacgcacctaacacatagagacccgcccacccacaggctgcggccatgctataatatctagagtaaccaccatctcatatttttcgctattcgcgtcaccttattcttttcaattcatcttatttatttcattattctataattcctataatcttactccatatctatcatcccatctcactactcacctatcatctatcacgtcctcataccaccccatttcacccccctacataccatctcaacattcaatattatcatttcccaatcc

SEQ ID NO: 699904 - DNA, 647 bp, Homo sapiens
gttgcaaggtaatttgagagaaatatgttcatatctcaaccatcgctttatggctgagatatgaacatatgttgaaaggtaatttgagagaaatatgaagaactgaggaggaaaaaaaaaaaaaagaaaagacccacaacctcaactgcctactccaaaatgtgggccatttatgtaagggaaaatttccagggattatggccagttggagttgtacaaagttattgtgtgggcagatttttcagcaaacttctttgtcccacgtggttaaaaggagtcaggggattaacttgccattcacttcactaatccagttaggatccaggatgatccttacaagttcagaaaacataatctcgtgacctctctccaatgatccaaacataagtgcctacagatctgtcgtggaaaagtttttacacccttactggcatattttcccggggtcccgggaaattattttggggctaatgctacgaataagcaaggcaccttcagtgtggccctttcccgtggtattgacaacaatttgacccctttgtccaacatagggtgtattaaccactcaagaacaaacatcgactttaagaggctacaagaaagcttccctgtaacgaaccaaaactgcgagtttatcccatgaccct

SEQ ID NO: 699905 - DNA, 444 bp, Homo sapiens
tcagatgcaactttaccctctccacccatagctagtgctggaaaaggaccatttttgtcttttgaccatgtggcttttgtaattactcttttaattataactattattttaaggactaactatgtgctaggcagcacgctttatagagattatcttaattcttgaaacagccttttgcttacggtaatattactatgcccattttacaggtgatgctaatgaggactcattatatatgcacatggagtgaataaatgaattaaggaatggatgggtgaaaacaacgaactgtgaatggtccagccatcaccaataagacacgtaacaacttttcccatctcgcttcacgctgccaggcaacgcaggctggcattgttgtagtgagttgcttctgttccacacaagccaggatttaataacagaataaaggaatgaactcgcaaa

SEQ ID NO: 699906 - DNA, 168 bp, Homo sapiens
cttgatgcagctgatatcccagaggcttagataaaagcccacttagaactatacttgtgtccccctagtctaccctatataccctatagatttccacatctgtcctgcccccgtccctcccttctaccccaaaccccacacacacatacatacacatatatatacata

SEQ ID NO: 699907 - DNA, 964 bp, Homo sapiens
cgaagcaaccatcgacatgatggctgatgtactgcgacgggacctgataggagtgcggagcattggtatctgacgaagatagtcgatctagattgatgagccatcaagacagcttgggatggtggttatggtacccagagggaaaggcacgctgggcagctaccaaaacgcgcggcgtactcgcactaaggggagagcgccgatggagtagcgggaaaagatcaaagcagagacatacgagacatcacagtaagcggcggcaaacacatagagaagaaagtgcggcgagaatacaacgcaaagggaggaggggagagaaaagacgagggctgagcaaccaggacactggcgagagcgcacagagagacgagccacacgacaccgacctgatgtgggaccacacggctcgagagagcgcgaaacacgcagacacatgcccgagcgccgtgccacacatccggagagcgagtgggaccacagacagctcccgcggagagagaggggagccagcaagggtgggaggaacacacatttgtgacggcgtagaaatgaccagaaccgacgcgaagggtcaagcagcgagggcaggagaacaaccgaccggggagagggaggagaacccaccgccgacactcagtgggtaggcgagccagagaagcagacgaggacagcaaatagacataaaacagatagccgagggacaaccgcacacacacgagaacgcagaaaacggcacaatgaagagcgggaagcgacgacaagaaaagcaaagcaaagaggggacaccaaagcagagccaaccatagcagcgagagaggggaacaacaagaaagacaaaacgagaagaaaccacgagacgagacatgtggccgacgcacaaggggagacgacgacagaaacgcgcgcgcagcagagggagcagagagggcggaacaaaaacacaccgcagggagaaaaaaacagg

SEQ ID NO: 699908 - DNA, 113 bp, Homo sapiens
aaaccgatatagactccgccaagatgcagaataataacacatcccaatcacaccgttaacaatcagtagtaaacccctcataaatagttatgctgataatagtcatatgctgt

SEQ ID NO: 699909 - DNA, 209 bp, Homo sapiens
tgagatccccatcaccctaaatttattatggcatttttagggttaagattgttcggtttgaaaataggaaaaagtttaaaaactgaatgtccaagttttcttggaacggcagcaggtagtaccatccacctccacaaaagacaatggcctatgatgacagcttctgcaactaagcatgtctgacataataaatttaggtgatcctctag

SEQ ID NO: 699910 - DNA, 787 bp, Homo sapiens
  misc_feature (746)..(746): n is a, c, g, or t
gctttctttgcggaatcaccatggctggctgggaccctgtacactgtatcctgaaaactggagggccttcaatggctctcatctgctgctcagtacatgcggggctcaggtccgctgtgctctcctgcaccaccccacttccattttggccaaaccaacctgcaccccttgaatttctccgcaaaatttcctgcctggcaaggtcccatgcattttgagggtgatgatgggattcttgtgtgttttgagagcaaacgccaatttgcctactcatgtgcagcaatgcaggagctgcgtgggaaagtcactccagaaggcaggcagcccagtgtggttgcagttggggtgcagctttgcttgattcctgatatcagtggcccccaagcccaggtaaccttgtggttgttccccaacctttggggcaatccatgcacccaagaactaaactagtgcccacctgcagcaatgcaacaggcagtgcaagttgagggcgaaattctgggggcttgcttggattgccttactttggcacggcacgaggcactttttctggttggggcgaaactgagttgaccatatgggcctgtacctattcaccaggttggttctgcaaacccttgttgtggtgggccttctcatacagccgaggtttcttacagacgccctatccttttctctggacacagtgccgctttctcgcccaaatttatgccaaaacgcggctgttgtgtttcccttctaaccgnttgcgcatttttactaccaacgccgcccatcgtgtttccag

SEQ ID NO: 699911 - DNA, 327 bp, Homo sapiens
gcatcatccctggcgggcgcgcgggcgccatccggtaccatgccgaccccatgaactacgaaatcctgctcggcctgcgctatgtgcgggcgaaacggcgcaacggcttcatttccttcatttccctgatctccaccttcgggctggcgctcggggtggcggcgctgatcaccgtgctgtcggtgatgaacggattccagaaggagttgcgcacccgcatcctcggcgtcgcctcgcacattcaggtgaccggctacgacaacgaactggccgactggcagcaggtggccgacgccgtgctgaagaaccccgaggtcaaggcggccg

SEQ ID NO: 699912 - DNA, 317 bp, Homo sapiens
ccaaaaggtttttgtttttttgtttcttttggggggaaagagaaccaggttccccccgggccccccggttgggggggggcctgttttttttttaaacatccctatttcccccaggggtcctcccccttcccatggggccaatttttacccccaaaagggactttggggttgtttgttttgttttgggtaaaaagggaatgttggggggatgccccccccctgggcgggggggttcctttcccttttccccgggtccggggtttttttggggggggggccggtaggggcccttttttttaaaaaaaaaaagcccttta

SEQ ID NO: 699913 - DNA, 662 bp, Homo sapiens
  misc_feature (662)..(662): n is a, c, g, or t
tgctcgccgccgccgctgtcgccgccacctcctctgatctacgaaatgtcaatgttacccaatcacctgggacggcttggcaaggactgctaccacgtcttttactcaccatggtgcaaagccgttggcactttggcaaaagcttacttgacaacattttgacaaagtgcactgccaaaactgcgcatggacgccaaactactctggctctacgtatgggcctttgacaacactggcaactctaggcacctcatatggacccccatctaagttcctccagaacagctgaccccagtcatcaagtaaggatggcccaaagctgacgaaacattcctctcacgttaacctcttgggccagttgtgccccactgggcaaccaccgcgcacacacacactctccttggacagcacttggcccctaccgacttctcggggtgctacctgacgcaaccacaccaccatcgggtggcccccccacattaactgggtccccccccacactactcatcttgcgctatacctattactggggccttccgtctgggcatccctttgctgctctcgccaacccgcgtaaccggcaccccctctgcgaaccaccgcccaacacatgggctcaaacactcgccacagctcttctctcacagcgaccgtactatttn

SEQ ID NO: 699914 - DNA, 330 bp, Homo sapiens
ttgtactgaagcctttgcctgcaggcagcctgtccaattcgaggattgtggattgtacctgacattctgggacccacgatgatctgcatcaccagtacctatgaatgcctcatatggccgttattaagtacagtcattcagcgtatacttgcctgctctgtctcgagaagatgttgaaagtgcaagagctccctccgggttctgctgaaaccccagattcctttgaaaagcatattagaacattttgcacgtagggttgccaatccagcattttgaaacttctgaaaaggacatagcccttctcctgaagaatgccttcaggtcttcaga

SEQ ID NO: 699915 - DNA, 282 bp, Homo sapiens
cacaagtgggagctacacatcgggtacacatggacacaaacatgggaaacacaaacatgcgactatgagagggggcagagagggggtggggtgattgttgaaaaaacctatttactatgttcactacctgggtgatgagaccaatcgttccccaaacctcagcgtcacacagtatacccatgtaacaaacttgcacatgtaccccccgaatgtaaaataaaagttgaaattatatactcaaaacaagtggccaggtgcagtggttcatgccttgaatcctag

SEQ ID NO: 699916 - DNA, 121 bp, Homo sapiens
gacggcttttggcatagacctttcatggctttttagatcgggggacggagcgcgcatgagacgaacaggggatatgaatttccccgcccccacccgcggggagaggaacattaggtgcaaa

SEQ ID NO: 699917 - DNA, 1655 bp, Homo sapiens
  misc_feature (610)..(610): n is a, c, g, or t
  misc_feature (907)..(907): n is a, c, g, or t
  misc_feature (911)..(911): n is a, c, g, or t
  misc_feature (937)..(937): n is a, c, g, or t
  misc_feature (960)..(960): n is a, c, g, or t
  misc_feature (1115)..(1115): n is a, c, g, or t
  misc_feature (1234)..(1234): n is a, c, g, or t
  misc_feature (1469)..(1469): n is a, c, g, or t
tggtctggttgtttgtcgggtttgtttttcctccttttgttctctctttgcgtcttgtgtttgcgtatttgtttgtttttgttgttctgtcttcttttgctgtcttgttgttgtgtatctcctcttgtttttgttttgcgtgttgtgtgttgggtctccggtgtttggtgtccgcgtgtgttgtgtgtgttggcttgctcctctgtgtgtgtttggtctctcctttgtgtttcctatatgttgtgtgttctctttccgcgtgggttgtgtactatcacttgtttggttcgcttgttttgtctgccgcgtcggaggtgttggtgggtgtcttggtgtgctgtgtatgctttgcttatggtgcgtcctcttgtttgtttgtgttgttgtgtttggtgttgcccgtacttcttctgttttctgctctctctggtaagtatgtgtgtttattcgtatgtgttgggtgttgtttgtgtgttgattcttgttttgtgtttgtgttgtgttggtggtggtgtgtggtgtgtgtggtgggtgtttgttgttgtgtggtgtgtgtgttgggtgccccccctgccctgtgtggtggtgtagttcgacgggcgttaccccnaaagtttgtgaagggacgcagtgcgaccccggcttgaatggggtattctccagaggaccacaccgcatgtacccggagtatttttaaggtggtgcacccaccgtatgttatggaagcctctcgaaaagggagtcctcccacacaagaggtgtttggtcgacccacaaaaataacagcccaaggcgctttgtttataaacacccgactcgcgcgcacacgttatatctctatttataccgggttctctctataagggttattagctcgagagcgccctctcgggttgtggcgcgaaanattncgcgcgcacccgagaggttctcgaanagatttatagatgggtcgccccncactctctcttgtgacgcgcagcccccccgcgtataatctatattccgcccactctatgagaaagtttttcacatgagtctcacaccctcgcaggtttataactttctcagcgagagggagaacacacacaatgggtccacttgaaatggtgccngtgtcacaccccggcgtgagaagggcgcaccacgcgtggctctataagacacacgagaaattttcgcggagaaaaaacgtatgcgcgcacacaaagtggtaccacacgagcccacaccncacccggcgagatggtacacattcttgtgttatatttggaagatttcacgagaactccacatcttttgtggtgggtggccacaagagacacacactgggctcttggccacatgagatgttatatgagatgttccctcggagatataatgccacacaagagaaaaagtgagaaccccaaacactagagacttgcacaagacacactggcctcgtaatgagaaagagaaaaagagcnctccacagagaaagcacacgagaaaggaaacccccagaaccacgaaatgaaagaaaatctccgggggaactgcccaaaggcccaatgttggtgctggccaaaagccgaaggagtaaaggtgctgccatgatgttagctgtggcccctgtggatttttcgcccagaacccttaattaacttaaaact

SEQ ID NO: 699918 - DNA, 862 bp, Homo sapiens
  misc_feature (29)..(29): n is a, c, g, or t
  misc_feature (143)..(143): n is a, c, g, or t
  misc_feature (234)..(234): n is a, c, g, or t
ggaagcggctcgaggctggaagaggatcntgggcgccgccaggttctgtggacaatcacaatgggaatccaaggagggtctgtcctgttcgggctgctgctcgtcctggctgtcttctgccattcaggtcatagcctgcagtngctacaactgttcctaacccaactgctgactgcaaaacaggccgtcaattgttcatctgattttgatgcgtgtctcattaccaaagctggngttacaagtgtataacaagtgttggaagtttgagcattgcaatttcaacgaacgtcacaacccgcttgagggaaaatgagctaacgtactactgctgcaagaaggacctgtgtaactttaacgaacagcttgaaaatggtgggacatccttatcagagaaaacagttcttcttgctaggtgaactcgcgattttctggcagctagcttgtgagccttcatccctaatgtcaagcaccgatggagagctttctcccaagactccccgttacctgctgtagtcctgttttctcttgctggtcacattctaaagggttgatatttaccaaatggatccgggttgggacatgaataaaattagcttgagcaacctggctagagatagaggggctctggtgagactttgaagacagtcctgttttgcagggaagccccacttgaaggaagaagtctacgagtgaagtagtgtgacttgaactagatgcatgcttgctccttatgctcttgggaagaccagctttgcagtgacagcttgaaatgggtgctctgggaggcctcagattattgaactctgggtcttggatgtagccgcgaccaattaggcccttggaggggggggggagttttacc

SEQ ID NO: 699919 - DNA, 548 bp, Homo sapiens
  misc_feature (29)..(29): n is a, c, g, or t
  misc_feature (143)..(143): n is a, c, g, or t
  misc_feature (234)..(234): n is a, c, g, or t
  misc_feature (454)..(454): n is a, c, g, or t
  misc_feature (508)..(508): n is a, c, g, or t
ggaagcggctcgaggctggaagaggatcntgggcgccgccaggttctgtggacaatcacaatgggaatccaaggagggtctgtcctgttcgggctgctgctcgtcctggctgtcttctgccattcaggtcatagcctgcagtngctacaactgttcctaacccaactgctgactgcaaaacaggccgtcaattgttcatctgattttgatgcgtgtctcattaccaaagctggngttacaagtgtataacaagtgttggaagtttgagcattgcaatttcaacgaacgtcacaacccgcttgagggaaaatgagctaacgtactactgctgcaagaaggacctgtgtaactttaacgaacagcttgaaaatggtgggacatccttatcagagaaaacagttcttctgcgtggtgaccccgattctgcgcacgcacgcgcgtggagcgcgttcantcgccctaagtcaacaccaagggacggagcttctccccaaactcccgcgttgcntggcgtagttccggcttttctctttgcttgccacaattct

SEQ ID NO: 699920 - DNA, 342 bp, Homo sapiens
atacgtactggtggtcaactagagagtttaacagatctaccctattcttcttgtcgttatccaaggttcttgaagagttctgttgttctaaaatatcgtgttgagcttcccagttagctttctcatcctcgaactgaggacgtttttcctccaattcttagtgctgtgttccgaattctttatcattggctcatggcgcacgttgagctcagcttcagagtccttcagtatttgaacttttactttgaccttcatctgaaacatgtgctccatctcgatctccatcttcttcattaaagctacattttcccttctttcttctgccatttggccaggggggga

SEQ ID NO: 699921 - DNA, 158 bp, Homo sapiens
ttttggttcttgcagaacagacacagaggatagggctgtgggaaggagagtgtcaggacgaagaggagttttccagacaactttgtactccaccagccccaatcaagaagctggtcccacggaaagtggtatctcgggaatcagctcctatttaggaa

SEQ ID NO: 699922 - DNA, 310 bp, Homo sapiens
gtggcctgtgcctgtgttcccaactacttgggaggctgaggtgggaggatcacttgagctggggaggtggagatagcaatgagctgagattgcaccactgcactccaacctgggttaaacagaccctgtctcaaaacaaaacaaaacaaacaaacaaaaaaaaaaacagcaaaaaccattgcagactgtaaagagtaagtaaataggtgagcaatacctacttttgtttaccttttttaaaatgaacaatttgtagatattcacagaatgcaaatacttgttaataaatgaaaagcttgggagacatgaa

SEQ ID NO: 699923 - DNA, 421 bp, Homo sapiens
  misc_feature (246)..(246): n is a, c, g, or t
ggccccccaggctgggaggaaacccttttgccttttggtgggggttttggaaattgctttcccccccccctcccttccttttaaaaggaggttcctggctggaaccaaaaaaagcatgtttgtccccttggtgggtgctggggggggccgggaacaagggccccttaccctgtgtgttggccggggcctgcccccagccccccagcctggttttttcccttaaggtttgtggccctggaagggganacattcccttttgtttggccctgggctggcccttaaatgaggaaatgggtttttaaaaaaaattccccttttttttggccaaaaatcccggttatatattaatgtggaaaaaaccccgtttgcccccccatttgttttctgaaaatgtgaaaaagtaaaaattaaaaaactggga

SEQ ID NO: 699924 - DNA, 321 bp, Homo sapiens
aacatatcttaggaattaacttcatttaatatactgagcgttattgcaatacttcgaagcagaacaggcaatgtgcagccctcatttatagataaccctcaggatactcccagggtgtatgcttggagaagctgtgagttgacgctgaagctggagtaacttcctccagagcaagagggcttaagacagaaggaagaactcttagctgtgtctgttattttcactccagtttaagatggatcttggcagagagacatgctagttcctctggattggaaagatgatttactctcgggaatcttcgccaagccccagctgcgg

SEQ ID NO: 699925 - DNA, 737 bp, Homo sapiens
gccccaactctccgcgcttactcctgttggacgcgctgtcctcgccccatcctttgcttccttccttccttccttcttccttcctcccctgtgctccctgccctccctctccagtgtctgccctcccggggcccgattgtctctgtgtgccccagctccctggccctgcagccctgcacaccagatctcatcaccttgcagcttccatagatatcatgccctagcctgccagccagtctgcagacatctgcctgctgtggatgccaccgatgccacagaaccgcaggacgccctgacatgccactagacccctggatccaagcatacacaagcacgccagcaaagcccagcaaggcagcaccagcacacagacgggagatagccccagagacaagcacacgggggagacacagagactcgcgaggatagaggcgtacagcaagcaggcgccacacagaaccaaataacacgcacagaaagaccagcacaaaggaacagtgacactctggtgttctcgggaggacagtgatgaagtgtcacccgagagacacagcagtggcacaccacgacaatggagctggcgcacaaaaagaccaagaaccaaaagtcgaatcgaacggacgcccgaggacgatccgtgagagacccagaacctatcgagagacaggagaagggacagaagacacatgtgaacccctggaattagaggatcgagcaggaccaaaacacaatcaaaa

SEQ ID NO: 699926 - DNA, 811 bp, Homo sapiens
  misc_feature (8)..(8): n is a, c, g, or t
  misc_feature (108)..(108): n is a, c, g, or t
  misc_feature (136)..(136): n is a, c, g, or t
  misc_feature (147)..(147): n is a, c, g, or t
  misc_feature (241)..(241): n is a, c, g, or t
  misc_feature (254)..(254): n is a, c, g, or t
  misc_feature (317)..(317): n is a, c, g, or t
  misc_feature (330)..(330): n is a, c, g, or t
  misc_feature (393)..(393): n is a, c, g, or t
  misc_feature (447)..(447): n is a, c, g, or t
  misc_feature (545)..(545): n is a, c, g, or t
  misc_feature (549)..(549): n is a, c, g, or t
  misc_feature (552)..(552): n is a, c, g, or t
  misc_feature (580)..(580): n is a, c, g, or t
  misc_feature (660)..(660): n is a, c, g, or t
  misc_feature (664)..(664): n is a, c, g, or t
  misc_feature (687)..(687): n is a, c, g, or t
  misc_feature (695)..(695): n is a, c, g, or t
  misc_feature (702)..(702): n is a, c, g, or t
  misc_feature (738)..(738): n is a, c, g, or t
  misc_feature (740)..(740): n is a, c, g, or t
  misc_feature (749)..(749): n is a, c, g, or t
  misc_feature (773)..(773): n is a, c, g, or t
aaagtaantggcattgtgtgctctgacaattcagaaaaacccttctaagttcagcctaagggccaagacgtggccaggtggtgagagaacaaaagaggtgtgacagantaagcctgttgggcagccgtgagcctantgatgggcctngcggaagttgttgggacattcgtgagccaccaaatgccaggcttgatttaaggcatccacgacagccggctccaggggcccttcctctgtggcngccaagtcctgcnccagccgccccaggctggacaggcccaggatgaccgcgtccccgtgggccccctgcagccgtnagtggtggtacanccaccggagggcagccgaggtcacactgggggcgctggcgccaaaagcggcctgcagggcttnctccaccaacgcaatggcctcgaagtggtgctcctcccagaagcgattcctgtnggtctcagcccagccatccccaaagaagcggcccacaggctgtttcccgtccttgtcctcatacttgtccttgccagtcagcaggcccccagccaganggtngtnggcatagaacctcagtccaaagtgcctnaggcaggggaagagctccgtttccacctgccgggtggtggcgttgtacatgccctggtacacagtgggcaggatccagcnattnctcttgcagagggtacagatctnggccactncccagcnagcatagttggagaggccaagctccacgaacttgcncncctggtgcngcgctggcaggcatgcagcgtctnttccaccggggtgccgtggtcaggtgtgtttgggtaga

SEQ ID NO: 699927 - DNA, 478 bp, Homo sapiens
tgtttcacacccagcggaaaccacttcaagggcattaacgatctctcaaaactgatcagtttagtgcgagtaaaccatgtagcgttttaaaaagacttgtgcacttgcccaggctcaaggatattaaaatctagcacataaagcccattactagaggtagaaatacaggcgatatactattacggcaacaaccatcaattacagttaagaatttttctgtaacaaccaaatggataatcaaatattgcaacaactcaagtattactgagcagaagtgcatttctacagtattcagtgttgctattcagtttgctaacttaaaacagcctatgataactggcagcaaagaaggtccttgcaatagactgcctctgcttgagaacttatgatgtaattattgcatgctgctaatatactatctaaacattaaagatactcctaaaatatttgatggtagactatgattaagacattacac

SEQ ID NO: 699928 - DNA, 903 bp, Homo sapiens
  misc_feature (235)..(235): n is a, c, g, or t
  misc_feature (513)..(513): n is a, c, g, or t
  misc_feature (558)..(558): n is a, c, g, or t
tgaccttctctcacagtggtattctgtgaaagctgtagggctgccaccctccaatcattaggtttaagtcagttgcttattttataagagacttggtccctacccacttcgtttagtcccttcagcttctttctcctcaccccatggagcctgcacccctcctcctactcccttccacaactccctttcaattttttttctttctaagaattagagccgattagccacgtcattnattcttcaatttgacggctgatatagcaggacctgaaacacattgctgaccccggagaatggagaccccattccttagcatattgacgatgagagaagttaattaaaattccacagagcagaggtgtcggctaacctataaacctgtcgctgttcaaaacaaatcattctagcaatcgtaggaaagagggaaggaaagaccagcagggagtggagaggctaagtgtgtgggagcggagagtggaaaatggagccattgagctttgtctcctcctcagnttcttcctaatgctgcccttttaaaagccagttagccagacctgngatccgtgggctgaatagaaggaaagtgctatggccagtgagaaatgacaagtgtgctggtgactttgccttaatgcgtgcttgtggacttctgctggctttgggagactggagtggaggtggtggtagagagaagctctcagggccggagatggtctgtgcgcttccttcatatggattgaagccaaagaacacaaacaggctcttccctgcatccctacccaacacttctctattccagcctcctcctccggaatgtgttaggctacctcttaacaaaatagggcacaacaactaatggcttaagaatccggtaaatgattttgggctctttggcccaaactt

SEQ ID NO: 699929 - DNA, 305 bp, Homo sapiens
  misc_feature (276)..(276): n is a, c, g, or t
ctttctaaaacataccgttggcagcgcgggcccagtatgctagagattaacaatgctcactagctcgttttcctcagagaggattcctgggtctatgaagctagatgcgtctaggaatttctacactcaacatgttatcattatacctcgtgaggcgcgaaacctgtaagcggctactcgaaatctacaaatcacacgtactggtaagttactcgagcgttacaatttacccttgcgacttctagtctaaactcgcgtaggttccacaggctgagnctgcgtagtactcgatggttgactccctg

SEQ ID NO: 699930 - DNA, 567 bp, Homo sapiens
aataaatataccctccaaagttaccgactgtcccaactgagaagagtaagcccaatcgagtactgtcactctttgatggaatctcaacagggctccttgtgctgaaagacttggggatacaggtggaccgctacattgcctcggaggtttgtgatgaacccatcagggtgggtcatggtgcggcaccaagggaagatcatgtacgtcggagacgtccgcagcgtcacacagaatcatatcctggaattgggcccattcgatctgctgattgagggccatcccttgtatgacctgtcaatcgtcaaccctgctcgcaagggcctctactagggcactggccgactcttccaagagttctaccgcctcctgcatgatgcgcggcccaaggagggagatgatcgccccttcttctggctctttgagaatgtggtggccatgggcgtaagtgacaagagggacatctcgcgatttctcgagtccaaccgtgtgatgattgatgcccaagatgtgtcagctgcacacagggcccgatacttctggggtaaccttcccggtttggacaggccg

SEQ ID NO: 699931 - DNA, 497 bp, Homo sapiens
cagatcgaatcgagctcggtaccatgagatattaggtctcaaatgttataattataacccacttacttaaagacaaaatatttacaaaacaaagcttgatctaaagccatagctccgtctaggattcaatcacagaagaattaatggtgttttttaggatacacggtcctttatgacctttatcatagttagaagatgaggaattgggcgcaggggctcacgcctgtaatcccagcactttgggatgctgaggcgggcagatgacgaggtcaggagttcgagaacagcctgaccaacatggtgaaaccctgtctctactaaaaatacaaaaagtagccagacgtggtggcacatgcctgtgcatgtgctgggattacccagctactcaggaggctgaggcaggaggattgcttgaacctgggaggcagaggttgcagtgagtcgagatcacgccactgtactccagcctgggtgacagagcgagactccgtctcaaa

SEQ ID NO: 699932 - DNA, 528 bp, Homo sapiens
  misc_feature (62)..(62): n is a, c, g, or t
  misc_feature (137)..(137): n is a, c, g, or t
  misc_feature (159)..(159): n is a, c, g, or t
  misc_feature (242)..(242): n is a, c, g, or t
  misc_feature (316)..(316): n is a, c, g, or t
agcaggcttgtgggccccgagatagatgtcatcctcaaattccgggacaagattgagaaaanggagaaagatgtgtatgcagttctgcagctagaggcggaggaaaaagagatgcagcagtcagaagcccagatcantacagcaaagcggctcctgganaaggggaaggaggcagtggtccaagagcccgagaggagctggttccagaccaaagaagagaggaagaaggagaaaattgccanagctctgcaggaatttgacttggccttaagaggaaagaagaaaaggaagaagtttatgaaggatgccaaaaaanagggggacgatgacagcagcaggaacaggtctcagtcttgaaactcctcaaggcgcacggatgctttcgctgacacggctacgcgaacgcagcgaatcgccagcagccaagcgggcccgagccaatgcccgaggcagcgaagccagtgagcaggtcctgccaagcaagccaaaacgcaggggaacgcaaatctggtatttgcactgacagaa

SEQ ID NO: 699933 - DNA, 207 bp, Homo sapiens
  misc_feature (1)..(1): n is a, c, g, or t
ntttccggccagcctcgactatttatttttacaataacaatatttgtttataaaaatgaataatgaaggcggggaggccctggatgtccggtgtctctgtttccccaaacatccccctctaggccccagcaggcaccacccccttcctgccttgtggtgtggtggggattgacaggcatgaaaatggtgtgattttgtgtgtgtgtg

SEQ ID NO: 699934 - DNA, 264 bp, Homo sapiens
ttttttttaaaagcccttctaaaagccccttcaggaaggggttggggcccccccccccccccccccctttttggaggccccccccccccttttttccccctttttcccccggcttttaacaaaaaaccccccttcccctttgccaggttcctccccccccccccccccaagatttgttttttttccctggcccccagcctttttttttttgggctttttaagggccctttttttttttttaaaaaatttccctttttttttcca

SEQ ID NO: 699935 - DNA, 1342 bp, Homo sapiens
  misc_feature (657)..(657): n is a, c, g, or t
ttctggcgtgagctcgcgttgttagctgtgtggtgtcatgactagcggatcactagcacaataagcgacacgtgagcaacaaaagaacgcaagagcaagagactaaagtacactgttcttgatctgtgacgtacgtgggagtgtaggtgtcgatcactagctcgcatgaatgtcgcgcttgcgtctatgtattgcgtcggtggagctactcgagctccgcgccgtggtatctacttatcggcctccctgcgggtgtatcatttccatagtgtgtgcgccgctattacgcgtgcgtgctctctttcttgagcgcctgatttgcattggtggtgcgccagtcaatacaactcctttcttcctttggcggcgcgcctcttgtgttatgtgatggcgcccccgcgggggtgtattatgacagcttgttcttttctcggcggccctccggtgaacatgtgtagaccaccgtcttttctgtggtacggaagcgctctttttttttgcggggggcgtcgcccagtaagatgggggccgacgcgggtgttataccagctgtgctgcaatttcggtcgccgcctctataggcgcagcggcccacaagttgggtggccggtggttagcgcccggctttttaatggcgcgcacactataattgggggncgcacctattcgacgtgctattagctccccacggccacgttggtttgggtctcctccggtgcttttgttgatcggcacggcctgtgtcgcccagtgtttaagcacacaggccaccctctcctgcctttggactcccccctcgtccgggtgtgccaaatagaaccctggcgccctcctcgctaacgacgcctattggttcctttgcctctcccgttcacaccgcaccaaactcgattatcttttccatcgtcttttctcaagaaatagaataatacaaaagctttcgttctatcttttcgaggatagcgaataaatctctcgatacgttttctcgtactctcctggagaccacttttggagctatgtacaagacacaggtgatgccgagtcctctatgccacacggtggagacaaacctcgacacaagcgtttgtgtaaatcgagtgtggctacacagcacccgccctacacggaagccctctcacgcggagtggtggtgcacacgccaagagcagagccacgcttctcacagcgaggggaaacagaccaccactcctccactcaacttacttcaccccctctcatatccattcccgtgataaaatctatttttcttcctcccttattcttccgaacaaaaatataatcttcctccccctctttatcagacccatcaataatcaca

SEQ ID NO: 699936 - DNA, 407 bp, Homo sapiens
aagcgcacgaaggcgcgtcctttcttcttgtcttccttttagtaaaggtgattttctctggtggtatgatttaatttctcgctttttacttttgtgtctatttgttgtatgtttgtgatttgggttaccatgagattttccagcactattttataagccattattttaagcttatcactgttatcataacctaatagtgcttgcataaacaagcaaaaagaaaactaataataactctatgccttaacttcatcccccacattttaactttttgttgtttctatttatatcttaatgtactatgcatcccttgaaaatttcttttagttattattttcaattggttgatcttttggtctatttagtataagactagtttacaaggctggacgcgccatcgtgcgctt

SEQ ID NO: 699937 - DNA, 708 bp, Homo sapiens
agtcgggcatcgggatccatgctcgaagtcacaatcatctaccagtactttgagatcttcgtagaggagcaaagcgaggttggcagcatggagggccctgctcttactagagacccgtctcccggacaggtatgaggaagctgctccagaagcgcctcggaaggggagctctcatcatggcgcgtgctgctgcggcatatggacttttaataatgtttattgaattatcgatattcttatcattccactgtgtaaagtgctagacatttaccaatttaaaattatagctttatatcctggcactggcaaacagaactgctgaaagtgaaattattattcagccgacatgccagagaagctgggaactggtactagcgattagtccccaagatgatccactgtaactttagattaataacctttgcaccttctcagctgctgtatgcggcaagacagccgacatcacctgtaaccccacaaagggaataaactcactctgagcttggcagcacaaacacttgaaatgtctacgtcacactttggcagccagggtgtgaagctgggagcagcatcatgtatttcccgcgagacgtggagaccttgcagccatgtctccttccaaccaggcgtggcacatatctgcttaggattgtactctctaagaaccatgtccctcttacacgcgaccccaggacagactcttccaca

SEQ ID NO: 699938 - DNA, 1055 bp, Homo sapiens
gcctgcacttggctgtattggcgcaagatgtcttcagcattgagggtagatcctggcactgcacctgatcctcgatactgccagagcctcttacacagacacagagtagacacagacacactacatcaatgacaaggcatgatgcaactaaagaatctaggatataggaaatgctattctgccagaggatgctgatagggctatccggagacttcgtgcggggctgtatcccaaacggtgtcgtaggcagctgcctgagaagaagaccacgactataggaccatgtagtgctgtgtcgcgcgttgctattgggtcggggggccttgccagtggccagggaacctgtgccgcaatggtgagtctcagcgctcagcctcgtgtgctacccgtcatcgttcgccgggaggacaggctcgcttcacgtagcgacggtgacgcatccctggagagcataggtcgcccacaaagaggccagaagagggaccacatcaacctgctgcgcgggagggagctgtccccacctctggtggaaagtatgacctacgcctgggctacaggcatagatgggccgtcctttatgtttcccttgttaaacggatgcctggtggcccttctgagcctaagtacctttcttccttccctggcccctcagtttcttcaaggaactgggtgctccttccgttcaaatatcaggaatggaaagaactgagcctggtcggctgaggcaggttctgtcctgtcagggtcgagattgcacgcgggtcatcattcccactcaaggtccgggtcctgggaggacctcgtcaattattggtctgcctaaagccgttactaggaaggtccatatctggcgcttcccaggactctgcagtccatggaatgttggggccctcacccagagagttactgggtggtcgtaccatttctaatctagatcaacaggcacaactacaaacggacacacagacactcttacctcacacaagacacatacaagcacacagcaaaaccacagaagttcacaatgacggaaaggacactctccgagacacaga

SEQ ID NO: 699939 - DNA, 838 bp, Homo sapiens
  misc_feature (26)..(26): n is a, c, g, or t
  misc_feature (28)..(28): n is a, c, g, or t
  misc_feature (100)..(100): n is a, c, g, or t
  misc_feature (166)..(166): n is a, c, g, or t
  misc_feature (168)..(168): n is a, c, g, or t
  misc_feature (227)..(227): n is a, c, g, or t
  misc_feature (231)..(231): n is a, c, g, or t
  misc_feature (256)..(256): n is a, c, g, or t
  misc_feature (261)..(261): n is a, c, g, or t
  misc_feature (263)..(263): n is a, c, g, or t
  misc_feature (353)..(353): n is a, c, g, or t
  misc_feature (369)..(369): n is a, c, g, or t
  misc_feature (371)..(371): n is a, c, g, or t
  misc_feature (373)..(373): n is a, c, g, or t
  misc_feature (377)..(377): n is a, c, g, or t
  misc_feature (389)..(389): n is a, c, g, or t
  misc_feature (391)..(391): n is a, c, g, or t
  misc_feature (393)..(393): n is a, c, g, or t
  misc_feature (420)..(420): n is a, c, g, or t
  misc_feature (425)..(425): n is a, c, g, or t
  misc_feature (440)..(440): n is a, c, g, or t
  misc_feature (449)..(449): n is a, c, g, or t
  misc_feature (461)..(461): n is a, c, g, or t
  misc_feature (487)..(487): n is a, c, g, or t
  misc_feature (492)..(492): n is a, c, g, or t
  misc_feature (503)..(503): n is a, c, g, or t
  misc_feature (521)..(521): n is a, c, g, or t
  misc_feature (548)..(548): n is a, c, g, or t
  misc_feature (550)..(550): n is a, c, g, or t
  misc_feature (580)..(580): n is a, c, g, or t
  misc_feature (591)..(591): n is a, c, g, or t
  misc_feature (608)..(608): n is a, c, g, or t
  misc_feature (616)..(616): n is a, c, g, or t
  misc_feature (620)..(620): n is a, c, g, or t
  misc_feature (630)..(630): n is a, c, g, or t
  misc_feature (665)..(665): n is a, c, g, or t
  misc_feature (670)..(670): n is a, c, g, or t
  misc_feature (686)..(686): n is a, c, g, or t
  misc_feature (722)..(722): n is a, c, g, or t
  misc_feature (724)..(724): n is a, c, g, or t
  misc_feature (730)..(730): n is a, c, g, or t
  misc_feature (741)..(741): n is a, c, g, or t
  misc_feature (749)..(749): n is a, c, g, or t
  misc_feature (756)..(756): n is a, c, g, or t
  misc_feature (760)..(760): n is a, c, g, or t
  misc_feature (765)..(765): n is a, c, g, or t
  misc_feature (835)..(835): n is a, c, g, or t
taagccatcaaaataacttttatttntnttttctacataaacacacagtggcaattcatggcatttggtaattcgtccagacgtgaaaggtttatgaaancagcaaatgccattttgaaaagagttttctgtcaaaaataatttaccaaagttcaagaaaggcctntncagcaaaatccaatatcattctctcagttctttataaatggaattttcttctacttgtntccntttcccggggcttatggacccattnatacncnccatatttagaatcaaaggttcctttctgaagagaccttaattttaaggtaaaacgtggtccaagtccctgaattccccctttcttttcnctcctgaatatgtttntntnaaanctgaagaatatntnancccgttgattgtggaatgtggcaaccngcctnccgataaattgaggnttatgaggnaagagagaggcnaacatacgtccaattgaattacccanccgtnttgtaaaattnttcagaattatttcaggnatgttttctgtggggtccttgcctctncncttaatttctttacgaagacgaacactgcncaatttaaaangagcagtggggccattnggcaagtnactnaaaaaaagtncatttggggttttacgatcttcattaataacaatnaggtnttttaaatctcttgcnaagcactttggaataatttttttcagaaccagtccncncctgtnaaaaacatgtnagtttggnataactntggngagcngttcacagagttgtactgttctcccatgagggctattttatgttgttatgagaattttgggagaagtttnttt

SEQ ID NO: 699940 - DNA, 253 bp, Homo sapiens
cccccccttggttttggggcccccttttttttgggcccccgcgggggggtccccccccgtgggagcctctagccccgcttttctcttgggggggggggggcccccccagaatttcttttccccccccctttttttgggggggggggccccccccccccccctttccccgggggttgggcgtttttttttgggggggggggccgggggcctttttttttttttgggggcctttttttttttcccccttttttta

SEQ ID NO: 699941 - DNA, 152 bp, Homo sapiens
  misc_feature (137)..(137): n is a, c, g, or t
tgggaagatgaagaagaggatgatgaggacgaggatgacgacgacgacgaagatgatgaagatgatgatgatgaagatgatgaggaggaggaagaagaggaggaggaaaaacctgtcaaagaagcacctgggaaacnccagaaagggaaggg

SEQ ID NO: 699942 - DNA, 350 bp, Homo sapiens
tcccatttgcagctcaatgtacatttctcagtctaagtatagtccttttgccaagttacaaaatataagcttttaactactctaaaacgttagaatgacgtcatattaaattccccccttgaggaattttgtagagtatagccgaatcagagcacacatttttctgaaagagcaagtttttagaaggataatgtttatgctaaagaaagtgattagctttcaagtgacgccgttatctatgggatttatatcgcatgtttccacattcaatcaatttgggtaaggtagtcacatagtctcgtaatcaccctctcgagctcgccctatatgactctagctttctgtctccg

SEQ ID NO: 699943 - DNA, 100 bp, Homo sapiens
cattcttcctactgactggaacatagcaaatgatggcatgggctaaggactttgaaagctaggcagactttgcgctgctgatgcctcgagtagcaacggg

SEQ ID NO: 699944 - DNA, 550 bp, Homo sapiens
  misc_feature (1)..(1): n is a, c, g, or t
  misc_feature (86)..(86): n is a, c, g, or t
  misc_feature (146)..(146): n is a, c, g, or t
  misc_feature (180)..(180): n is a, c, g, or t
  misc_feature (246)..(246): n is a, c, g, or t
  misc_feature (280)..(280): n is a, c, g, or t
  misc_feature (363)..(363): n is a, c, g, or t
  misc_feature (371)..(371): n is a, c, g, or t
  misc_feature (382)..(382): n is a, c, g, or t
  misc_feature (426)..(426): n is a, c, g, or t
  misc_feature (433)..(433): n is a, c, g, or t
  misc_feature (435)..(436): n is a, c, g, or t
  misc_feature (441)..(441): n is a, c, g, or t
  misc_feature (482)..(482): n is a, c, g, or t
  misc_feature (495)..(495): n is a, c, g, or t
ngggaggagaggggacacagcgagtgtgtggccccactttggccccccaccgcctcccaacaggaggtggacctggagctggaagnacaggaaatgcttattctcttagaggacagtttcaaagtgcagaaatttctcttataaanatcctcttccctccacgctctgccccttgctgangcccagccccctgcgcaggctgtccgtgaggctggggcaggacaaggtcaatgtgggaagggcgtnaggccaaagcactggaagggcccagaccacatgngcctaggcatagtggctgccgggcgtcagggggtggtcccctctgtggtcccgctggtcctgtaagcgggccaactccgcccnctcgttgngctcctgggantgtcggtcggttttatggctcaaccgtgggcggtggaaagtggnacggcgnannagatnaaagaaccaggccggaaggcaacccatagataggtcggtcngaggccgatggcnagccgcctgagccccggcggtgtatgccgcctggtgcctgaccgtttggcatgcc

SEQ ID NO: 699945 - DNA, 363 bp, Homo sapiens
caggctgatctaccaggatctttgaacacaaaagcggggaacacaaaagcggtgccggcctacgccacagccatagcaacatgggatctgagccatgtctgcgacctacaccacagctcacggcaacgccggatccttaatgcactgagcaagtccagggatcgaactcgcaatctcatggattctactcggattcattaacctctgggccacgatgggaactctgctaagggttcttaagaagtaatggtgacaccatcattcaatattttattctttctgccattcatgtacaaaggagtcttttcactcttcctcaggcctgatgataaaccaggttaaaccccagggtccgcttttgtg

SEQ ID NO: 699946 - DNA, 184 bp, Homo sapiens
gtcgacctggaatggggcagaaccaactacacccaattggaaactgtgagagcaccaagtttgcctacattctcttctagctgcatagcagcattagaaatgtacacccaaggagcctgctggccccaaaatgacacataactaaagacagcccacagcttataccaaacccaggcaaccccag

SEQ ID NO: 699947 - DNA, 337 bp, Homo sapiens
  misc_feature (9)..(9): n is a, c, g, or t
  misc_feature (187)..(187): n is a, c, g, or t
  misc_feature (195)..(195): n is a, c, g, or t
  misc_feature (220)..(220): n is a, c, g, or t
  misc_feature (224)..(224): n is a, c, g, or t
  misc_feature (289)..(289): n is a, c, g, or t
  misc_feature (337)..(337): n is a, c, g, or t
gaattcggnacgagtaagaactagtctcgagatttggggccagacagagaagaattaaaaatcatgggctgggtgcggtggctcacccctgtaatcccagtactttgggaggccaaggtgggtggatcacgaggtcagttcaagaccagcctggccaacatagtgaaaaccacgtctctactaaaantacaaaanttagctgggcatggtagcgcatgcntgangtcccagctacttgagaggctgaggcaggagaatcacttgaacccaggaggcggaggttgtggtnagccgagatcatgccactgcactcccggcttggcaacagagcaggctn

SEQ ID NO: 699948 - DNA, 368 bp, Homo sapiens
cctagttttagaagtttcaagtagcacctagtttttagaagctttcaagagcacattgttgactgggcaagacagacatgctacttgtatggtagtggcgactcataaacagaatgggatatgtgatcagtatctggtgggcgtcctccttacgaggtcatggctgtggatcagattacttctgcttggccttctgctgggttgctgctggagtgactattgaagggcagggctcaggcaccttggggtggcatggctctggaaccttgggctgtcagggctcaggcactttggcgtggcagggctcaggccccttggggtggcagggctccttggttttggggatgcatggttcctgaggtggaggc

SEQ ID NO: 699949 - DNA, 192 bp, Homo sapiens
ggggcccccaaaaaaaaattgggaccccgggggggggcccccccccggcccccccgggggggggggggaccccccccggcccccaaaggaaggaaaaaaggggttttttggggttggggccccccccaaaaaagaggggggggggggccccaaaaaaggggggccccccttttgggaaaaaaaaaaggggga

SEQ ID NO: 699950 - DNA, 178 bp, Homo sapiens
gactgtacttcctctctttcttcttcccactcagtcctaaccctactccgtaatcacataacctatgcccccgagcaagctcaattacgatatatacaccaacgaagaatgttcaactcagtaactactactaatcaacgcctattttacaccaacccctggttcggttgagcggaga

SEQ ID NO: 699951 - DNA, 169 bp, Homo sapiens
ctatatcggcgatcctgaatctcacgagtggagattattgacgtggacgcctaactatggatgcaaaatggatgctatcaaggtattctgtaactatggaccactggggaaacatgcataagtgccactcctttgaatgttccacgagaaacacgtggtggacagattc

SEQ ID NO: 699952 - DNA, 349 bp, Homo sapiens
ctagactcgagttttttttttttcaattactaatgcaaggttgggcttactaggcttcatattcagttgacagctaaatattacagggattatttctttcaccaatcagacatgacattctaggaaacttttccggtccaaggactttatgactactgcgaacagagcagttgactctgcagataacatgtatggttagagctacacgagtaactacgggacccctaggtgcaacagtaccttcgcacttaattcatatccggaccaagtccttccatggtcaccgagtcgacttcggctcccattcctggcgcactgctattgctcacacctactgtcggtttcttcg

SEQ ID NO: 699953 - DNA, 184 bp, Homo sapiens
attcgcggccgcgtcgacaaaaaaaaaaaaaggttggggggaggataggactggccaggcacggtggctcactcctgtaatctcagcactttgggaggcagaggtgggcggatcacttgatggcaggagtttgagaccagcctggccaacggggtgaaagcccgggtgtgctgaagggacataa

SEQ ID NO: 699954 - DNA, 561 bp, Homo sapiens
  misc_feature (74)..(74): n is a, c, g, or t
  misc_feature (115)..(115): n is a, c, g, or t
  misc_feature (154)..(154): n is a, c, g, or t
  misc_feature (163)..(164): n is a, c, g, or t
  misc_feature (166)..(166): n is a, c, g, or t
  misc_feature (170)..(173): n is a, c, g, or t
  misc_feature (175)..(176): n is a, c, g, or t
  misc_feature (181)..(181): n is a, c, g, or t
  misc_feature (254)..(254): n is a, c, g, or t
  misc_feature (264)..(264): n is a, c, g, or t
  misc_feature (277)..(277): n is a, c, g, or t
  misc_feature (288)..(288): n is a, c, g, or t
  misc_feature (298)..(298): n is a, c, g, or t
  misc_feature (302)..(302): n is a, c, g, or t
  misc_feature (305)..(305): n is a, c, g, or t
  misc_feature (307)..(307): n is a, c, g, or t
  misc_feature (310)..(310): n is a, c, g, or t
  misc_feature (318)..(318): n is a, c, g, or t
  misc_feature (324)..(324): n is a, c, g, or t
  misc_feature (327)..(327): n is a, c, g, or t
  misc_feature (338)..(340): n is a, c, g, or t
  misc_feature (356)..(356): n is a, c, g, or t
  misc_feature (359)..(359): n is a, c, g, or t
  misc_feature (369)..(369): n is a, c, g, or t
  misc_feature (379)..(379): n is a, c, g, or t
  misc_feature (384)..(384): n is a, c, g, or t
  misc_feature (386)..(387): n is a, c, g, or t
  misc_feature (398)..(398): n is a, c, g, or t
  misc_feature (414)..(414): n is a, c, g, or t
  misc_feature (426)..(426): n is a, c, g, or t
  misc_feature (428)..(428): n is a, c, g, or t
  misc_feature (432)..(432): n is a, c, g, or t
  misc_feature (435)..(435): n is a, c, g, or t
tgaggttatcaataagctcctagtccagacgccatgggtcatttcacagaggaggacaaggctactatcacaancctgtggggcaaggtgaatgtggaagatgctggaggagaanccctgggaaggctcctggttgtctacccatggacccagnggttctttnncngctnnnncnncctgncctctgcctctgccatcatgggcaaccccaaagtccaggcaaatggcgagaaggtgatgacttccttgggagntgccataaancacctggatgatntcaagggcacntttccccagntgantgnantgnactgtcanaagctncangtggatcctgnnnacttcaagctcctggnaantgtgctggtnaccgttttgncaatncnnttcggcaaagnattcacccctgaggtncaggcttcctgncngaanatngtgactggagtggccagtgccctgtcctccagataccactgagctcactgcccatgatgcagagctttcaaggataggccttattctgcaagcaatacaaataataaatctattctgccaagagac

SEQ ID NO: 699955 - DNA, 310 bp, Homo sapiens
aaaaaaggaatttgggcaaaggcaaaccgtttaatgtaattaaccaacgaaaaagctttccgggcttttaaatggaaactgtttttccccttcctgtctaggaaaaagctataaagctcaaattagttaggaatgacttaaacgttttgttttgaaaacctaaaaaaaactttttggatatttatattgccaaatttttacttgaaagctttgaaagaatacatccagttttgcccctaaaccctttgggggtggtttttaaccttcctggaatcccttttttaaaaaaaaaagacattttcagatttga

SEQ ID NO: 699956 - DNA, 670 bp, Homo sapiens
cgttattaatatattgcgtattggcttcatttatcactatcttgttatttaaatttttttctttgcttgaaagcaaaccccagttattatgctgtttcccccaagtatttcagtatgtatttctaaaaagtggatattttctcaccaaaccttacaacctgttactatacataacaaaactaacaataatttgataattctttatataattccaagtccataatcaaatttcctaaattgtcaaaccatgaaaaggtgtttttatattagatttgttttaatcagggtctaaacagggtccatgtggcatttgaatgccttttaaccctctcaatctagagcactctccccttttttgttctgtgctattgatttgttgttgacactggtgtaattgccctgtagcatgtcctaccttctagatttgtctgtttgcttacttgtgacattgtctttttaaagagactaagccagtttatcttgtagaatgtctgcttgttttcttctggtgtcatttgtttttctgtacctgtttcctaaacactgaaagtaatatgaatggcttgctatattttagctcttcaacaaaactacttctcaggtgatgtgaattcctattgcttctcatcagaggggttgaagttcggtgtgcttctactatagtgacgta

SEQ ID NO: 699957 - DNA, 438 bp, Homo sapiens
ttggaacatctctctcttcacttcgacaccaatagatactcctatctacctaagctcaccaactataatcgtctcttatactgttttcctgtgtcaaaccttatgtgcatcctatcgcttaccagattaaacatatctatcccgcgttttatgtcattcctgaattaaaaaaaaaaacgtttaatgtgctatattaacagtgcccaaaacttcatttcagcattcaccaatgtctataatctagttttccccaactaccattaaacccatccaggcaagtttcatttgtcctgcctagcacttgatttgtgctattacttattccttgaatactctccctacttcccctcaagtactaccaatcttcaaacatctactgaacttttcacctcctgtatgaaggtctccttgactattctagcccacatggaactcttc

SEQ ID NO: 699958 - DNA, 1394 bp, Homo sapiens
  misc_feature (567)..(567): n is a, c, g, or t
ggtgtgttgtgctgagccgcgctcttctttttgttgtcgagtgttgaccgcccctctccgttgttagttggctgccccctcgccgcggcggtcggggcgtgcgccgctcaatgattgcactagcccccggcggccttcactttatgcgctccgtccttgttgtgtgatgacggcgcgtcgctgctgtgtctaccgcgccgcgtcggtttggtgttccccccccgccgggcgtttttctggaagagtccctcgtctttgtcgggggccgcaggcagtggtataggcccttctcccttaccccgtgcgctggcgctgaggatgtgttgggtgtgtttgcgcccgccgcgccgcgttgtgcagcggtgtgagtgcgctcttggctcgacggcgtatgaggttgtgggggcgcggccctccttgttgtatggaggacacgcatctctcgcgccgcgtgtcgtgtcatccaacagagcagtgtgtggggtggttcactcatctgctcccccgtccccacgtcatgttggcgcctgttgtcgtttcgtggccccccctggcgtggtcttcatncggcagcggcagatcttttcgtaacagagagactcttcctcccgcgccgctcttctttttataagaggtgctctgtctctcatccgagagataggcacgcacagcataaatatgcaactcgctcatacgtctctctctctctcactcgacacactacttgggcgaccgcctctcctctccccacacacgtcgcgtggagagcaacactcgcgcgtgagcgcacttcttttgatgacactcctctcgctgcgctggagagacacaacactctcctcttcccacacaaagcggctggttctttcgtaccagagccgtggtgagtgggcgcggccgccccttcttgctcccccccgctgcgagtgagtggtcgaggcacaacacgtctggtctgttgtgtgacaggctccagcattcgttgagtagagggtcgctcgtttgccacacagcagtgacacacagcacgctctggcggttcgctcagcggcggcacgcgtcgcatattttctttcttgcgtgcgcactctctttttcccacgagagtgccaccaacacaacaacagctgttgtggtttattcatagccaccgccgccgtctcgccacgcgagtcttgttccccgcgcggggggttataaacctgcttgcaccacccgccgtggggtgatctgatggctagttaaacaatagtggattttttgcgggagccacccgcggggggataacatgtggggggaaatctcataaaaattccctttttttaagaggggggggaattttttttttttatttttataagaatgagggggaaaaaacgttaatatataataca

SEQ ID NO: 699959 - DNA, 1111 bp, Homo sapiens
gctctcgcatctctgttcttccgccgttccgcgcgtcgcgtatctcgtgtccggttcgcaatggtagagaacgagatcgccgcgctggtcattcgatcgaagtggctccagagcagtgatgcacatagcgtggttatcgcatggggacgagcggctcccctgagccgctgttctccgttccactcgtgcgggcgcttccagtacaacctaggtgcgtcatggttgaggcagtgcggccatacaggagctccataacgatagggcagagctagtgccaagaggcaaagcgatgggaatcactgaacccatgacagtacctccattgtgaggcatggcgagtcgtctaccaagctgggcacgacagatggacgacacgatactgtgcaccagcactcgttcttacgaatcggaggctagctgcagtggctccccgtgcaggaagcagccgctagctgtctgactgactctgagggtcaccctctgaaacacacgcaaagggcctaatcaacgagcagacagatgacgtcagtagttatgtattgaggaccgttcaaacacgcccggtcgcatgataacggatggccaatccaggtccagtgcttgttcctcgtctacgccatctggtgctgcattcgactgggacacttgtcattggacttcttggacgactggggtcacccacaacggtgacccagtctacagaagggctaccggcacctggcaccccaacgcgcagtcctgacgtcttggacccttggcttggcctgggaacctgaccagactaccctcatgaaggatcctcacttgatcgaggcctacaggcttcagcaccacggccgagcgggaacatcgtggcgcgacattcacaggagaaagctgtgctacgttgggcccctggaacttcgagcaggagaatggcccacccgccggaatccttcctcttcttctgcgagaagaagctacaaggctgtccgaatgggcaggtccatcaccattgggcaatgacgcggtaccaggtggtccaggaggccgcggttcaaagcattacataccatgggttatggacattttgcgggagtccacggagagccacgttcaagttccattattg

SEQ ID NO: 699960 - DNA, 179 bp, Homo sapiens
gggattttttccttcaaaaaaacaatgaagactttatttttggccataattggatcaagggggaaaaaaccccctgaattttgggcctgttcccttggagttggacccttttttaattcaggatgaaaacgaaatggttgggattgtgccggggccccataaagttcgagaaatttgta

SEQ ID NO: 699961 - DNA, 923 bp, Homo sapiens
cacgtactcaggtatcgtcaagtagtaatcctgtgtttaaacgatggtcaataaaaacaacatgaaaacaacgacgacgatgaatgcttggcgtggcacattcagtgggttccgtgtggcaaaacacagaagctgaaatcgaagcacatgggtactgctcgcgtcgtagatacatggagcgtcatatacgtgatgaaattgatcacgggggccaacaggcaccagcggaatccatttggaaaagcttccgtgaagacggatcccttagggcacacaacactcatggtcgagagaaaatgtatgatttactcagtgcgagaacacctccagaaataactcaattcacgccatgcagattgcagttgtataccgcagagacaaacaagaaggatgtgtcaaactggggcaacctctgccaacgctccaaattccggttcacacaagagtcattgcactggagagaaaacccataaatgccccgaatgtgggagagcctttttttatcagtcattccttatgagacatatgaaacttcacactggagagaaacccgtatgaatgtggcaaatgtgggcaagcctttagataattcctttacacccttaattaaccattacgaaaaggcctgtgtgccggaagaagccctacgaatgtgaagaagctgggacagtcattcggggagtcccccaaatataccattatagagccccactgggagaaaccccatatgttgccctttgccacagacctggcagccgccgacttaaaacccttagactccaaattaacccgtgataaaaagggacactctaatttgcggacccctgtgcgcaccttcggccacggccggaacacccccgtctaaaaaaacgggggaaacaccacttgagtccgcaacacaaacaccctgcaccccaccaaaa

SEQ ID NO: 699962 - DNA, 226 bp, Homo sapiens
ggaccgggattttggctgtctggatgctgcgtgctctgtgatgtttgctacatgatcaggcgcgtgcgtatgggcacatgagcagaccctgaaacgctatgagcattgccgtaagggccagaatgatgccatgatgcacagcatgtctgcgattggttggatggaaaccacattattcttcccgatggtttgggcacgcaattttggcctgaaacaggtagaaaat

SEQ ID NO: 699963 - DNA, 213 bp, Homo sapiens
atcacctcaaccccggaaggcatagtgggctttacttcctctcttgcttcttcccactcatcctaaccctactcctaatcacataacctattccaccgagcaatctcacttacaatatatacaccaacaaccaatgttcaaccagctcactactactcactcaaagcccataatcatacacagcccccgcgacaataggatacagtagggaga

SEQ ID NO: 699964 - DNA, 278 bp, Homo sapiens
gaagccctgcttcttcttttgaaccgagcaccagaaacaggtgcacacacatgagcacaccaggaaggccaggtgcggtggctcatgcctgtaatcccagcacttcgggaggctgagccgggtggatcacttgaggtcaggagtttgcgaccagcctggccaatgtggtgaaacgctgtctctactaaaaatacaaaaattagccgggcatggtggccggcgcctataatcccagctactcggagactgaggcacgagaatcacttgaacctgggagg

SEQ ID NO: 699965 - DNA, 83 bp, Homo sapiens
attttccttttctgacattcaatttcaatctcagttcaaatactaataaacaattagaaatcttactttaaaaataaaaaaaa

SEQ ID NO: 699966 - DNA, 178 bp, Homo sapiens
ataacatagaggatagacccctatactatactatgatagaacacaccctaccggaaacgggggctagtatggtacgcagctgtgctagtacatcacaggcatacatacatacctacaccagtgagcaagtagcaggcaagctagtcccgtgttatgcctggaatcatatgcaggtaga

SEQ ID NO: 699967 - DNA, 670 bp, Homo sapiens
ccgaccccgacggtattcaggcagatgcagacaacattccctcatgaccagctcacaacgctcaggagcgccgttctggtcggggcccaaacgctgtccacacccgctcaccttatgatgtcaacaatcaccctgacatctggactatgtgatggctgctgccaacctgtatgcccagacctacgggctgacaggcatctcaggaccgagctgatgtggccacataccggcagtctgtttggtccccgaattcacccccaagatctggcgatcaagatccatgtatctgaccaggagctgcagagcgccaatgcctctgatgatgacagtcgtctagaggagctcaaagccactctgacaccagaccacagacaagctccctggaattcaagatgtaccccatatgactttgagaaggatgatgacagcaactattcatatggattctcatcgtggctgcatccaaacctccgggcagaaaactatgacataccttcagcagaccggacacaagagcaagctgattgcagggaagatcatcccagccatatgccaacgaccacaagcagaccgtaggtggactttgtgtgtctggagctgtacacggttgtgcaggggcaccgacagcttgacatcctaccagaatggtttcctcaacttggccctgcca

SEQ ID NO: 699968 - DNA, 1021 bp, Homo sapiens
agcgaggagtcagacagtgacagagaggcactggcagccatgaatgcagctcaggtgaagcccttgtgggaaaatgcccccagtgtgaaacctgacctctaccatggcgcatggaggccacttgcgggaacaggcgcctggacctagtgccaccctgggaaggtggggccatgcaacccccgtcagcccaggctgcgggaagctgggacggaggactcagcagagcaggtagtgcaggacgtcctcagagcagcagctgatcggacgaggtgcccacatgctgctggcccccgagctcagcgaacaacgtccttgcgggaagcatcgctccatggccaagacccacgctccaagtcactgccaagcgggccaccctcagaacggcacgggccatgtagccggtccagcgtcacacggctgacaacagcccgatgcgacaagctcgcgacgacgcagccgagagagctcactcgcgacacgtgccgcgacagctgcaggacggccaccgagcgagccactgagctgcacgcctcacggcaagaaccaggctcgtgacaacacttcctcaggagccaaggccatgccccaaagcaagaaccaactaccactggcatctgcccaagggctcgcccgctgttgcgacgctgggcgaccgcgaagccgccccgagaaacgccacggacacctgcggaagcttcctcacagccagggcctccaatccccaaggcctgtgggccttggggggcaacccaggagaccacgccgcacggacttcgtccgaacggcacgcgagaggacatccggactagtgaagcgaacccagacaccacacggccctcgcgcgcacaacaggggcgaacaagcggcaaagccccacgccgggcaaaagggccccccccgcctcagaccccaggcgccccacgtcgcccgtctacagcaggcgcgccaaggcggccaaccagcaccagccccacagaacccccccgcgggcgcaaccgcgcggcccaaagcagcgcacaca

SEQ ID NO: 699969 - DNA, 125 bp, Homo sapiens
gcagccagcacctggccccacgtgtttaggcacctcccgccccccagtgccctgcagttgccaggcttttcagggcaggtcccaaaggtttcccccaaaaaacaaataaagactcccctggagga

SEQ ID NO: 699970 - DNA, 627 bp, Homo sapiens
agcggggaggccacaggacgggcgtcttcccggctagtggagcccggcgcggggcccgctgcggccgcaccgtgaggggaggaggccgaggaggacgcggcgccggctgccggcgtggaggaagctgctccacccagggcccccgacggtcactcgtttatcctcatccgcgcctctgctggaccacgcttgctggcgcctgtcaccggttccctccattttgaccagggaaactaggctctcccggaccattcccctgaccctatgagctggagccggaggaaccggtgctcatggcagttcaggcgccagtgggcagatcctgtcgcgcgccgtgcacgtagggcgaaagaggacgttgcgtctgcggctacagcgagcgggagcacgacgggagaggacggagcgctggtgggcccgaaggggcgacccccgtaggaaggcaggcattcagacagtgccgacgactcatggtcgctggcatgtttccagcgtcggatgtcctgaagagttaactctaggaagacgtcatgacagctcgggaccgcagatccggatcagactttcacggagatctgtgatcgcatcaatcggattggcatgacctggggccaacagcccggaatc

SEQ ID NO: 699971 - DNA, 175 bp, Homo sapiens
tggtcaccgtttcaccatcaagctttgatgttcccctgtctttccctcttttgctctcaagagcaaaggttaatttaagggcaaagatgaagtccctgtaaactaatctgtcattgtttttaccttccttttttttttcagtgcagaaattaaaagtaagtataaagccccgtga

SEQ ID NO: 699972 - DNA, 385 bp, Homo sapiens
tggacccccctgcgacagagtgtgcctcgcgaagacagcgcgccgacaagtctcttttactcggcgcggaggggagctctgggatcactcaaggcacctgccgcagcccagtcccggacctcttcgacgccgagagccgtctcgacacccccaaccagcgaagcgtctcgctacgcacataccagccccgggaacgctctagatctcggcctctccaccactcaccgcgatccaggccagacccccctgaaagccgacgaggccagatctcgactcaccagcagccgagacggcaaggccagactcagtgactcgacgaagacccgtcaagagctccccaggagcagaagcgaccagaccagacgccccagaacccgccgcgtca

SEQ ID NO: 699973 - DNA, 544 bp, Homo sapiens
  misc_feature (15)..(15): n is a, c, g, or t
  misc_feature (308)..(308): n is a, c, g, or t
aatacacactgattntagattccacagggaaatgggcagactgaccagtccacggtggtgaattttccaagaacatagtttaagttgattaaaaatgcttttagaacgcgggagcctacttctagctggattttttgtatgcttaaataaaaataaaaattcatacccaaagagaatccccccttagcttgttagtaatgctctggccaacccgaaatgccccttctcttagtgatggcggcgttagggtttgagaaaagggaatttggctcaccttcagttgagagggggcagtccagccagcttgnctgcttttaaatgaccaaaaatgacctgtggtaaccaacctgggctttttaggaagcagtccctggagaaggcatgttcccaaaaaggtctctggagggacaaccccccccagttaaccataatgtttcatgaagaaaactgtttttttatgccatgaaatgaaaattttaatgccttgttttaattactaatggtcgctgctgcgggcccttaataaagttgctttttttggcta

SEQ ID NO: 699974 - DNA, 950 bp, Homo sapiens
  misc_feature (452)..(452): n is a, c, g, or t
  misc_feature (469)..(469): n is a, c, g, or t
  misc_feature (658)..(658): n is a, c, g, or t
  misc_feature (699)..(699): n is a, c, g, or t
  misc_feature (707)..(707): n is a, c, g, or t
  misc_feature (709)..(709): n is a, c, g, or t
  misc_feature (711)..(711): n is a, c, g, or t
  misc_feature (713)..(713): n is a, c, g, or t
  misc_feature (716)..(716): n is a, c, g, or t
  misc_feature (721)..(721): n is a, c, g, or t
  misc_feature (728)..(728): n is a, c, g, or t
  misc_feature (732)..(732): n is a, c, g, or t
  misc_feature (735)..(735): n is a, c, g, or t
  misc_feature (742)..(742): n is a, c, g, or t
cttgtgaggggacacaaagaaaaattgaataaactgtatgatttaaaagattatcgggagagttacctcccgatataaaaggaaggatttacagaatgtgacctaaggtctggcgtaaatgtgcaccggaaccgagaaggcccggattgtcatggacgatgagatacaccggaatatcatggacatattctttaaagcgccctttatcttcaaatgcggcacggaaaccggaggctttgaagaactcaaggaagcgcggcacgataccgcccgcaataaacacgccgccaaatgtcccgagattgagcgccagattgccgccaaaacggcccataatgacgcaaaacagcgacaatgcgcggcggcaatcggtgcagctgtcagccagcgcgcgtcggtaatatcttttggcttgagattttctgggcaggcggttgtcagctttcacaatngcgcgatacaaattcancagcccagggccagaaagcacgcgctccgcccgaaacatgaccaatttccgcacgcaatatttcgaggataatggcctcttcttcactattcggcgcaaaatcaacgtgaccgcttcgcctggcaagcttacccaacgcttatcgacatggaccagatgcgcaacccaagcccgttccggcacgtaaancggaataggcttaccttcgaccggtctggggcacaaatggntagatgcncntntncancatcnggatcgncatnganacagggntaaacacgggaataattccagaatggtaaaacgagaatccttttcacttcgcgaatggaaacgcaggttggtgggctcgcaccaggcggaactgggaccacggaaaacgggcttaccgcttgtttcaaaaacgcacagcgtgcgggggaaacgcaatcacggcgtaccgggccaaaaggtggccccacacgtcttatgcggcaaatac

SEQ ID NO: 699975 - DNA, 354 bp, Homo sapiens
cgtctccaaaaaaaaaaaaaagaatttattaacctggttggttaataaattgtgtggtccctgccgggcgtggtggctcacgcctgtaatcccagcactttgggaggccgaggcgggcagatcacgaggtcaggagatcgagaccatcctggctaacacggtgaaaccccgtctctactaaaaatacaaaaaattagccaggcgtggtggcgggcacctgtagttccagctacttgggaggctgaggcaggagaatggcgtgaacccaggaggcggagcttgcagtgagccgagattgtgccactgcactccagcctgggccacggccacagagcgagactctgtctcaaaaaa

SEQ ID NO: 699976 - DNA, 1609 bp, Homo sapiens
  misc_feature (409)..(409): n is a, c, g, or t
ggtctcgtacgggccttctcgcgtgagcgtctctcatctctgtcgtttgctctcaggttcgtgttcgtcgccttctctccgcgtccttggcgtccagctggtgggcgtccttcatgctcagtgctgccttctatctctagctgttgttatcctcatgctttgctatctctctgctcactcatcggctctcatgctgtccgtctcgtctctactgctgtttcttctcttggtgctctaccgatcaacctgctgactctacggtggtctatgtcatgtattgttgcttacgatgtcgtttctgctctgacctcgtgtgtgttctgcgtactcagttactctggtctctatcatctccgcactcaatgcttcttgatgttatcgatgtaatattgttggctgagctgcgcgntgctgcaatgtgatgttactgtggcgtgttctgtggtcgcaggactgcgatactgtgttgtcgtgcgcgcgtctcgctcgctcaagtgctcttctgtggtgaggttcgttgtgtcgttgcgctggcaggccgggctagctgagctatccctttagcgtgttcgtctgctggtcttgcgtttggtggttggtggtgtgggtcggtgtctggtggtgtagtgccagcccccgttcgtgtcgggagggctctcttatattaattttttatatcgcatcggaggagcggcttttcgggctcttgttataggtgggtggaagctccgccgctgtgctgaccgagtgtgtcgcgcccccttcggtggtgatgatgtgcgcgcttatgcttttgttcacaccgcgctcgtgtgtttgttgtatggagcccctctcctcatcatcgtgtgtgagggtagcccacctcccggcgggggggcgccggatggtttcgccacggtgcccttctcgccgcggagatctttcgtttttatcccacatattgtggacccccctcgcgggtgttaccgcgggaatatatacaccgcagcgtggttgtttgacatcacacaacggggggagatactcacgcggcttattgtggtggaccccacatcttattgggcgcccctcatattctgtatagggtgtgacacacaacgtcgtattatggtggaacacaaaagcgtgtttggttggaccacaacaaagaaatgatcaagggatgctggtgttataccgcgttgctcgcgaagaattttccccgccgggaggttgtaactgtttgtgtcacatttctgtataagagcgctgtgtttttgtgtgtggggggaaccacagaaaaagagcgcgcgggtgtcgttcaccccatcctcgcgcaaagagttccgcttgttttgtgggtgtcaagagtcgcataacggcgccgcggctctgggagagaaagattgagcccttagtgtctacttgaacaccaccgcgtcaacaagtgtggcgcactggccccgttccagagccacatggagaggaggaaagaaaagcacttcacatggggccacctgtgaagaaaagagcccggattgtcaaaaggaaagaaaggaggcttaaatgcccgggaccagattttgcaattgggggggtttccaaaaaaagagttttttcccctgga

SEQ ID NO: 699977 - DNA, 1033 bp, Homo sapiens
gggctacaaaccctgaccatgaccccccacatggctgctgccacctgatgctgctgctgctagctctgctgctcgctgccagcccagtgaggcgccttgagcgcggtgcccaggctgcgtggcaaggggtgcaggcgggttgtccagggggctgcgtggaggaggaggcttggggggtcgccagccgagggcttgcagcggaagctgagggctgtctcagagagggaggggcaggagtgcggggtctacacccctaactgcagccccaggactgcaagtgccatccgcccaaggacgaccgaggcgacctttgctgaggcagctgctgctcggccgaggccgctgacttccggcccggagcgcctgctgttgcaagaggagaatcctaaggagagtaaaacccaagcaggacactgcccgaccacaggcatgttgaaccgaagagaccaacaagaggaatccaggcacctcataccaagccctcccagaccaattcttgcgggttgtccaagacacttgagatgggcccaatgacgtagaacatctgagactcagatgctgcagaaattccagaatgaggtctaccgaggaggttcaaaatctaagttgcccaattgtgaccatcgaaggttctaaccgggaagcggaagttgcgatcttcccaaggacaaagccagaatccctgatgatttagttgatcggatgggcaaagtccttacaagagtaacagatgggaatagaagtaatcatgaacaatggaatcaggaaagatggagaaaaaggaatgaaggaaataaaagcactggggttgcataaaaaaaaaaacgagggcttaaaaaattaggccgccaatggccacacgcgtgtgcaaaaattaagaaggcagggtaaaacatgagcggggcaaaaacaaacaagaaaaaaaacaaggagataaaaaagagaaagaccacataaacgagagagaaaaaacgagagaacgagaaaaaatgagagacgacaaaaacaagaaaaacggaataaaaaaagaaga

SEQ ID NO: 699978 - DNA, 1585 bp, Homo sapiens
aatctggattctgcatagatgtacggtatccttcattgtgactgcatgaaaacttgagcgtatactactcccaggcagtctgatcatgcgtatggcatttttggagtgaatatggggaactctaagtgttggtttgtcgtcgtgacgtcgtgcctcgagcaattgtgtgcatagtgcttgtgttcttctaccataggcatatttgacatccaagtagaattgcggaacatcgactaatgaatagtagataacacttggacaggatgtagcataagatggtaggttagacaaagtggccttatagaaggattcattccaatgcctcaaagccaggattattacctatacctgggcgagcttatggttggtatgtacatagtagtagcgttaagttgccttagtacagccatacgcaaatatgtgccgtacataaagtcatatattcccagggatttacgattccgcacggttgattcacatccatagtagaggtaactaggggggcgagacactcgctaaattgcggaccagtcttgagaagtataattcgtacatggttacctatcccacctggaagggcacatattccgcggattgataatttcgcataccaggaataggcgccccgtgggagaacagtgtaagaacgcaaggaagcgggatattaatacaacaacgccaagacaggggaccttgacacaaggaggaagtgggacatggaacgaagttatagacgttcctaaagtcaattacaacacagcacaaaagaaggatagtcaaagtcatttaccacacacttggatagagagtcactatttccctcaggcacactgggaacgccattaaattaggatggcaatccttgggttgggaaccgtcaagggttggcacgcgagcttccgtgtaggtggctttggctcagaaaacacagttcttcactaaattagaaggcattaccccatatgtgtggttaggaaattgtcaccatactattccgaacatgacccttataactaagcatgcattgacgagtacgccgaattggttcgcaacgtagtggaaattcacacagagttacatccgcggattggatgacatacctattacattatcccctaaataaattagttgggacgatattaggtgggacatacacaacacaaaagaaagaatgcagaagaatggctctaattaggcatattggagtgtgaacgagacatctaggcatgtggaagaagaactatccggggagacaattccacttgtgaagagcacaaaaagctgaaccgaagatataacagcgacagtgactgaacaacgtcgagatgatgaaaaaatagacacaaaacgaaaagagtacaaggagcggagagaggccgacgacgccaagaacgaacggagagcaccacagcagagaagacggaaggaacacaacgacgagcaactacacacgcaaagccaccacaggcaacaactaaagagagcaccgaacaaggagacagacaccaaaaacacagaaagaggaaagagaaaaacaaagaggaggaagcaacacgccacggacacgaccatacaagacacgaag

SEQ ID NO: 699979 - DNA, 228 bp, Homo sapiens
  misc_feature (174)..(174): n is a, c, g, or t
  misc_feature (210)..(210): n is a, c, g, or t
tgctacactgcagtcacacacactggcagactccatccccagcagccctgcctcttcacagttctctgtctgtagtgaggatcaggaagctattcaggcacagtttggaaggccatcatgcttgtatggagagctgcagctaatcataggtatgcctgtcttcctgcagcctgntacagatgacatagcacctggctaccacagcattgngcagaggcctatggtttg

SEQ ID NO: 699980 - DNA, 497 bp, Homo sapiens
  misc_feature (131)..(131): n is a, c, g, or t
  misc_feature (378)..(378): n is a, c, g, or t
  misc_feature (447)..(447): n is a, c, g, or t
aagccgtaccagtgcagtcagtgcagtaaaagctacagtcggcgttcatttcccagtgaacaccagaaaagcccacccaggggaacaacttcaccagtgcattgaaggtgggaaaagctttaataaacacngcaacctcattggccaacagaagatccacacagtggctgagatggtctagggcttggctatgagcaagttttccagatcaccacccaagttgtgtggggcaggttgagactagaaaatgcctctttcttcctttcaccatgaaatgtgtttgaaacaaatcctgacttaaggcccagggacttccttaaaggaaagttgggtgtttgaagccactgttttctcttttgatcgaataacctctttctnactcaaaccagctgtgtccctcttataaaaaaaaaaataaattttttgagagggcggctaaacccttcnaagaatataataaaaggcaccgccacagccaacaggcctgaaaaaaaaaa

SEQ ID NO: 699981 - DNA, 713 bp, Homo sapiens
  misc_feature (500)..(500): n is a, c, g, or t
  misc_feature (513)..(513): n is a, c, g, or t
  misc_feature (560)..(560): n is a, c, g, or t
  misc_feature (621)..(621): n is a, c, g, or t
  misc_feature (694)..(694): n is a, c, g, or t
  misc_feature (705)..(705): n is a, c, g, or t
aagattaatagtagaaaaacaatccagcaaacaattagggaaacatgttattttacatatgaagggataaaattttctcttaaaaaagaacagtaagaaaaaagtgatgtttaagagttaataggatctaacaacttaaataaattccctctgtcaaaaaaccagttactttcttaattagaagacatttcacatgacttgattaaaaagtgagttatgttctcttattaaattaatttacactttctggggattcaatgaagggagaagaaacaattataaaatgagtaaagtttagaatgtcttcagtaaacactgttaagtaatttttacattttgtctacagaaaaccagtctatccaagaccaggcacctatgttggaaggtgaattggttgtaaaatatacctttggaaatctttgaataattgaatacaattaatgaatggacattaacaataatgcatgtgaacttcaaagatgatgatatcccaaatctgntcaggatcatttnttttatttggcttcttaattgaatcagattttacaactgattgaatntacgtgattacacaagtagcttggttataaaggctgtctgttttatatagacataaagganaacaactatggccaaggactgtccttgagctacggggtaaggactaggaaagttgattggcggaggtttggantgatttaatcnattgtagg

SEQ ID NO: 699982 - DNA, 720 bp, Homo sapiens
cgcaggcgcggagcccagggaccactccccactgcacagatcatgagaccataggggagctgtctggtgtggcctcagggaataggctgctccccaagggtgtgaatgaggcaggatgacacatggacagagttagtagcaccttgactcagtagcgatgaaccggaattctactgccattggccgagtatggcatctcgagtcatcttcatcttcagaatcgatggtgctggttggtggactgtagagagtgtgtggggtgatgagaagatcttccttcatctgcagacacactccagccgtggctgcaagcagcgattggtctatgagccacattcgttcccgcattctcgccagtggtgcgtgactgttgtgtcgcctgcaggctcagtcactagtttccagcccagtctctcctcgtggtcatgcacgtggttcagcagcaacacattagagaagaaatctgctacggctttgagggccatggggaccccctacacctggaggaaggtgaagaggcacaagggtccatatctcagggacactgtggtggacctatgtcatcagcgtgctgtcccggctgtcggtcgaggccgtcttcatgtatgtcttttatctgatctaccctggcgtactgccatggtgcggctggtcaagtgcgacgtctagccctgacccaacagcatgtggactgcttcgtgtcccgagccaccgagacca

SEQ ID NO: 699983 - DNA, 372 bp, Homo sapiens
tgagcggataaaaacatcacaatatcagcggcattgattgggggctggatacgatgctcaacatcctaggaaatcctggccattaccacctaatcacattcaggaagtcaatgtcaggactggcagggagtgtggcaaatgccggaggggtccagctagaccacaggggagaaatctgtccaatgtcaggcttattacattctcagcctgaccccctgaagaatctcctcactttaaaaaaagaaagaaaaagatatccatacggtaatatgcccactgcagccaggttcagacttgggctgcagttccggtggatgtaagagaattggagatccgtgtccctggttagaagtagagcggtgggcaggcact

SEQ ID NO: 699984 - DNA, 381 bp, Homo sapiens
ttcatatctgatgatgaccgaaaaatggtgagatgtatgtttgggtctgcttcaaattttataaatcctgtgacctctctctctgggagttggtaaccccaactcaaatgtgaagtagttgaatgaggtctcaaatttaggcattgaacctaaattaatcatctaagtcagtacccactaccttcttcttcttacatatccctgccagatggtcatcaagactcagagctctctctacagagaggaaattctccactgtgcacacccaccttaggaaagctctgaccacttgaggcctgatctgcccatcgtgaagaagcctgtaacactcctctgcgtctatcctgtgtagcatactggctacaccatcaatcctgattc

SEQ ID NO: 699985 - DNA, 654 bp, Homo sapiens
tggggttaaaagagggtggtagcatttaaaagggaaaatttcctcctgggttggctagtatctggggtgtattctcgggtaagtgtagctcaaataggtcatcatgaagggttaaaaaagcgagggggccaggttatgcggggggttagggccgagggccctctccaaccactgtgtgccacgtgactggcgtggtgtgacccgtgggcaagtcacttaactataggggtgccctcagttttcccttcgtggttaaaagtggggataataatacgtgacctacctcaaggggcagtttggaggcatgtgactaagtgctttttaaaaagctttgggggactccttcagcacgggaatttctcaagaaccgtgagttatttttatataattaggaatgtgtccaccagtgaactggatacgtccggtggtgtcccagagtgcggtcataagctctatagtggtctctccaagaaacgtgaagtgaatctccagtgggagaagcgggtggataactagccagacaaaattggagaatacttaaacaacgcatggccagggaaacatacagaggaggcctttcgggatggggggggatttttcccctttttaggggggatatagaagttactgtggtgacaagaataattgggggaa

SEQ ID NO: 699986 - DNA, 352 bp, Homo sapiens
agcttcggttacccgaaatacagaggctatggctgggaggtgagaatgtacatgattacaatggtctacagaccattaagacacagaaacagactggaagagggtgtccagtcttctggtggttggctttcatcaagggctgtctgtgtcaccaaattacttctgcttggtcttctgctgagctgggcctgtagtgaccgttgaagtgacaaggctctggtacctgttgtgaaatcggtgtccaggtactttggtgtatccttgctcaggaactttgatggcacctggctcaggaaacttgatgaagccttggtcagggaccttgatgctgcctggctcagggaccttggtg

SEQ ID NO: 699987 - DNA, 114 bp, Homo sapiens
ttgactctagaggaccccgagagtgaacagcagaaagaggctttggaaacataaccaggaattgcgaaaagccttgcagcagctacaagaagaattgcagaataagagtcaact

SEQ ID NO: 699988 - DNA, 261 bp, Homo sapiens
ggcgggaggctgaatgcaggagactcaggccgaacctgggaggcaaaggttgcagcaagccgagatcgccccatagcactccagaccagggcaacaacgagcgacactccatctcgacaaaaaataataataataaagtacacaataaatgctatgtgcttgaaccatcacgaaaccatccttactccaggggaaaaattatcttccatgaaacaagtccctggtgccaaaaaggttgaggacagtacaacctgccggtgg

SEQ ID NO: 699989 - DNA, 888 bp, Homo sapiens
ggccttcagattataccagcttagctagcattactaaccaactgttggaagctctgaaaataaaagatcttgcaaccacataaaaaaaaaaaaaagagaaagaaacagaaacaaaaaaataataaaatacaaaaaaaacacaaagagaggggacggcggtacccagttttctttgtaaagagaggtgcgaccctatagtgagtcgaatttattaagctgtagagaaagggggccgcctcgtttgtgagaaccgttctgttatactgggaaaaacgtggctacgcctggggaatacaaaggtgaagggacagcgcttaccttctggtggccgtggagcataattgggaacaaggcatacctaacaggaggaggggagagagacatcataaggggtgaaaaataatcaaaaacttttagaaagaatttattaaagggctggtataagggtgtaaacttgcaataatgtcttgacatgggatagaaggagggttttggactaaacatggaggaaattaaattctacgtgcaaacccattaattaagtatctgcgaggggagccctgcgtgatataaaactttgaggaaccacacactttctttatatcaacagcggggagccattggaattcacaaaaacaccaacccctaccaaaaaccagacgctgcactaacaacacatagcacgacccggaggagagcgagacagaaacggagacgaaagtgatgcaagaataagaggagtgatgtcggaaagaccatgacgaagaccgagggagccggcgaaaaaatcagacaccgtcacatgagaggtgacgaacacaacgtcgcagatgatactagaaggaactaccgaacccaagacacagcgagaaccaacacgggagaacc

SEQ ID NO: 699990 - DNA, 835 bp, Homo sapiens
  misc_feature (137)..(137): n is a, c, g, or t
  misc_feature (139)..(139): n is a, c, g, or t
  misc_feature (141)..(141): n is a, c, g, or t
  misc_feature (214)..(214): n is a, c, g, or t
  misc_feature (218)..(218): n is a, c, g, or t
  misc_feature (224)..(224): n is a, c, g, or t
  misc_feature (244)..(244): n is a, c, g, or t
  misc_feature (248)..(248): n is a, c, g, or t
  misc_feature (251)..(251): n is a, c, g, or t
  misc_feature (253)..(253): n is a, c, g, or t
  misc_feature (257)..(258): n is a, c, g, or t
  misc_feature (262)..(262): n is a, c, g, or t
  misc_feature (269)..(269): n is a, c, g, or t
  misc_feature (273)..(273): n is a, c, g, or t
  misc_feature (275)..(275): n is a, c, g, or t
  misc_feature (286)..(286): n is a, c, g, or t
  misc_feature (292)..(292): n is a, c, g, or t
  misc_feature (294)..(294): n is a, c, g, or t
  misc_feature (300)..(300): n is a, c, g, or t
  misc_feature (320)..(320): n is a, c, g, or t
  misc_feature (324)..(324): n is a, c, g, or t
  misc_feature (326)..(326): n is a, c, g, or t
  misc_feature (335)..(335): n is a, c, g, or t
  misc_feature (342)..(342): n is a, c, g, or t
  misc_feature (346)..(346): n is a, c, g, or t
  misc_feature (348)..(348): n is a, c, g, or t
  misc_feature (354)..(354): n is a, c, g, or t
  misc_feature (360)..(360): n is a, c, g, or t
  misc_feature (362)..(362): n is a, c, g, or t
  misc_feature (370)..(370): n is a, c, g, or t
  misc_feature (383)..(383): n is a, c, g, or t
  misc_feature (385)..(386): n is a, c, g, or t
  misc_feature (391)..(391): n is a, c, g, or t
  misc_feature (410)..(411): n is a, c, g, or t
  misc_feature (444)..(444): n is a, c, g, or t
  misc_feature (512)..(512): n is a, c, g, or t
  misc_feature (530)..(530): n is a, c, g, or t
  misc_feature (654)..(654): n is a, c, g, or t
  misc_feature (832)..(832): n is a, c, g, or t
cccggccgctgcccccgcccgcgccggagctggagcccaggccgagccctgccctggtcgccggccgggccgaggccgcgccgccgcgcctccccgcctccgcgccgtgacgctgccgccgggcgcggggaccgcgnangncccaggcccccgccgccgggctctccgctcggccgaggggcgcccgagccgccgcggcggtcgcctggaaaantttncccgcnagggctccccaggggtcggnactnttnancctnncganccctgcncgtntnggccccatgcncccaananttagcnccgggacaaagggagtgagnaggnanctgggagcngaggccntgtnancaggcnaagganangggcgctncagggttccagcnanntgttncccccatggagctgaggcnntggttgctatgggtggtagcagcaacaggaacnttggtcctgttagcagctgatgctcagggacagaaggtctttactaacacgtgggctgtgcgcattcntggaggccagcggtggcnaacagtgtggcacggaagcatgggttcctcaacctgggccagatcttcggggactattaccacttctggcatcgaggagtgacgaagcggtccctgtcgcctcaccgcccgcggcacagccggntgcagagggagcctcaagtacagtggctggaacacagggtggcaaagcgacggactaaacgggacgtgtaccaggagcccacagaccccaagtttcctcagcagtggtacctgtctggtgtcactcagcgggacctgaatgtgaaggcggctgggcgcagggctacacagggcacggnatt

SEQ ID NO: 699991 - DNA, 157 bp, Homo sapiens
gatctctccttttcttcctgaagacaggagataaaaacgctcaggtgaaagatgccttccctgtagaggaatctttcttcgcccggtacagggaagcacgtcatagccaacagaattctgtacagacattaaagtaattaaagtaattcctgtcgtt

SEQ ID NO: 699992 - DNA, 184 bp, Homo sapiens
cttattgaggtcagggtggggacagccctccagtaattcggaggtccgtctgatcgcatcagtgtgctcaaagacactgctgataaagcattcttttgatgacagatatgcttccaagggagccatcaggcaagggataagccacctctaactgactctgtttcggtctagctgatttgaaaac

SEQ ID NO: 699993 - DNA, 223 bp, Homo sapiens
tcagctcggaccgaatgtttgagggactgtcagcatgtgaccttttttaatgatgataaaatacacgttacataaaatgggccattttaaccagttttaagtgtgcagttcattgagtgcgttcacattgttgcacaaccatcacccccatccatctccagaactttctcatcttctcaaactgaaactgtccccattaaatgttaactcctttcgtcccccg

SEQ ID NO: 699994 - DNA, 495 bp, Homo sapiens
acgtaaacacagcacacaccacaaaacaccacacatcccatacatacacaacacacatcatatatacacaccacacacaaacaccacacaccacaaaacaccacacacacaacacacaccatacacacacacacacacacacacatatatatatatgtatttattttagagataggctgtagcccaggctggagagcagtggctcgattgtagctcactgcaccctcaaactcctgggctcctgtctcaccctgtggagtagctaggactagaggcactcaccaccatgcccagctgatttataaattttttttttttttatatggaattgtggtagcaaacaggctggtgaaagtatgccccagggtggtcaaacttctggcctcaaatgatcctcctgatatccacctcccagagtatagggataacatacgtgaaccccgtgcatggccatacatgtaagtaaaataagtataatatttcccccaaataaag

SEQ ID NO: 699995 - DNA, 131 bp, Homo sapiens
gtagaactgaaggaaactctaatgatatttcaacattataatttgtctccatttcccaaattctttgttttataaataaaatgtttgaatgatttaagagggaagaacataccaagtaaagctttgtggca

SEQ ID NO: 699996 - DNA, 787 bp, Homo sapiens
  misc_feature (234)..(234): n is a, c, g, or t
ggtgtgtgttggatcgttcagatgtctctgtcgctaccgccgagccccctggtcagtgaagctttatcctggatagactcgtggttttaccttacactgcacggatctccgctcggtggatgagccaggcaaagattgaagccggagagccttgtgagaggtggatggctatcctttgcatcttgcgatcgctcacagatcatatatgagagactgaatgtgctctggatgaantgtgtcatgctgttagcgagatgccagaaacaaatggttcgagttcccaatcaacgagtagcggacagaatctctctcttggtgccatctcgaaggtggatgcgtatcgaagaggtgtattcactgcgcgctagcgaattacccagtgtagtgctcgtgtatcgtggctatcctcgagttggtccggcgcatgcgcagacatgcacaccacacaacgcaatcggtgcgtaagtaaaacgtcgacgtggtcacgttcaagtgattccccgagtggagaagacttgggtggagagtcttgggccgtcgattttcaatcccgatggagggagtgtacccttgccattttggtaggcccccaagggtgtcagcgaagtgccttggaactcgtgtccgcgatggtctattggggctacccttcagacacctgacaacttgtgttctccccgcaaggcttctggggtgtggccgcgagttctgggccccctcaaacctttgtcaggaaatgtgtcccttgggaggaggtgcccacacaaggggcaaccccagaggtcaa

SEQ ID NO: 699997 - DNA, 161 bp, Homo sapiens
tgatgagctggccccgtttcaccctgtggtgcacgccgtccctgtgacaagttctggcttctgtgagcactgtgctgagctccaaatacctgttaagctggagcctcgtgtggccatgcttcttgccccttgtggcctccccgccagggcctcctcccgct

SEQ ID NO: 699998 - DNA, 329 bp, Homo sapiens
  misc_feature (96)..(96): n is a, c, g, or t
  misc_feature (157)..(157): n is a, c, g, or t
cctcctcggtaatttttcagcagtggcagtggtcacacttgtaatcccagaacactttgggagggcgagacaggcggatcacctgaggtcgggagntctgagacagcttatcaacatgtagaaaacccatctctactaaaaatacaaaattacctgngcgtggtggtgcatgctgtaatcccatcatctactcaggaggctgaggcaggagaatagcttgaacccaggaggcggaggttgcagtgagccaggattgtgccattgcactccagcctgggcgacaagaacaaaactccatctcataaaataaaaatcccaatcccacgtcg

SEQ ID NO: 699999 - DNA, 384 bp, Homo sapiens
aggattcagcacgagattgctcgcaattgtgccaatcagagatcaactttccgaactgctcttgagccactggctgattgactgatcaacatcgtctgtgccatctcgacctatgcagatcttattgcagttgcagtgactgacatgatcattaagcgagatagtaatagtgatagctgctgaatcatatgtcatataccgtactctatcaacaccacgaacacttgccaagtatgataatcctagctatgccactgctaggttagcttcttcgacaggtccagtgagcaactatgctgacagcatcaatcttcagatactatgcgtggctacagttatcaccacagctgcgtcagctcatagatactatcatcatgggcgggc

SEQ ID NO: 700000 - DNA, 95 bp, Homo sapiens
accccccccaaagggaacaaaaaagggagcccccccccggggggggccgcccaaaaaaaaggggaccccccgggcggcaggaaaccggcccgaga

SEQ ID NO: 700001 - DNA, 197 bp, Homo sapiens
aacgtcaggctggacgatagagcgagcctccgtctcaaaacaaaacaaaaaccacgaaaacttcccaaggaccccttttcctataacattatgccctgtggagatgcacactaactgttacggggtttcgggcgatgactctttctggctacttcctgctgaaaaggggcgtgcaatgcgacacagcagctagggct

SEQ ID NO: 700002 - DNA, 126 bp, Homo sapiens
ccaagctgcacggccagcaagtgttcctgcgcaccgacacccattggaccccggacggcgctgaacgtggcggccaaagaattggccaagacaattgccaacaaaacgcccctgagcggcgagcct

SEQ ID NO: 700003 - DNA, 685 bp, Homo sapiens
cccgcccgtacactgtctcggcccgagagacctcctttttccaggctgtaggtatcacccctaaatctcccggggcacccttggaatcctgagtgatgtgcagctgatccagactggagaccaagtgggagcccgcgaagccacgctgctgacatgctcacatctcccccttctcctttgggctggtcatcccgccggtgttcgaccatggccagccatctaccaaccctgaagtgcttgatatcacagaggaaactctgcattctcgcttcctggagggtgtcccccaatgttgcccagtgtctgtctgccagattggctaccccactgttgcatccagtgacccccattctatcatccaccgggtaccaaacgagtcctggcccttgtcctgtggaggaccggagtttaccacgctgtctcccacttgcgtgaaaagggtcaaggcccttctttggctgatcccatctgccctttgtggcgtgctgccccctgtggcgtgctgcccacccaccagcatgctcctgctgctgtctgccagcccccagctaaggttgaagcccaggaagagtcggaggagtcggacgaggatatgggatttggtctctttgactaatcacccaaaagccacccacttagcccgttttatttgccaaaaccaggaaataaaggcttacttccttta

SEQ ID NO: 700004 - DNA, 630 bp, Homo sapiens
gtatagctatctagaggttccgcaagcgcatagtcacttagcagtatattttcaaggagtctttttctgagcagtacgtctcaacagagggcttaagagattcagtaatccaggctataaatagatatactatcatcccggctctgttgttccatttatagaacataggcagagaagatttagcatcattcttaaggaccctaaaattttctgaatatcaaatgatcattggcttcaactgaaagtcaccatctgcattaacaagacaatcagcctgtcctttgaagctttgaaggcaggtgttgacatctcctctctagctacagaagtcctagatggcatcttcttcccaagagaaggctagtcatctacatggaaaatctgtagtttacgtagccaccttcacggaagatctgagcttgatcttctggataacttgcagcttctccatcagcatatgctgcttcaccatgcacttttatgttatggagatgacttctttccttaaacctcatgaacaactgctagcttcagacctttcttctgtagcttcctcacctctctcaggcttaacagaactgaaaagcggtatggacttccttcggattaggcttaagacaatgttgtagc

SEQ ID NO: 700005 - DNA, 359 bp, Homo sapiens
tgaactacacagaagatgaatacttaggagaacataattcaaaatttgaaattcagccaaagtaaacatctgaagaagctccgagaaaaggtggacaaagatgtttgttaagtggagcagctgtagtcaatgcattctactcttcaggaagaaatcagatagtcttcccagccggcattctgcagccccccttatttagtgcccagcagtccaactcattgaactatggaggcatcggcatgggcataggacacgaaatcacccatggcttcgatgacaatggcagaaactttaacaaagatggagacctcgatgactggcggactcaacagtctgcacgtaactttaaggagcaatcc

SEQ ID NO: 700006 - DNA, 349 bp, Homo sapiens
ccggacaagcgcgcgcggcggttgatccgcgcacacggcaatatcgacgctttgtaagctgcagggcgccagaccgggtccggcgccccccatggctcagcgcgtaccgcccagcaggctaccgccgatattcagcagatcgcccacaccgaactgaccgtcaccgtcatggtccagcacgctgccaagcaggccgccggcgataccgccatgctgctgcacctgctgcttttcctgcccgagcgcctggctgagcgagccggcatcggcctggccgccaccgaggcgctgggcaaggaaggccatcacgatcggggcgaggatatgcagcagatggctggtgcggccg

SEQ ID NO: 700007 - DNA, 109 bp, Homo sapiens
acttccaagctggctacgaagaaataaagagaatctggaccactacccgggcaccagtgaccacagtcactggtttggaccgttactctgcacatagttcagcgtctga

SEQ ID NO: 700008 - DNA, 197 bp, Homo sapiens
ggggcccccaaaaaaagggggtttttttggccaaaagctttttggggttttttccccccccaaaaaaagccccggggggcctttttttaaaatttttttttgcttttagggcccccctttaacccccccttttgccctttgggtttttttttttaagggggggggaacggtttttggaaaaaccccccccggggcca

SEQ ID NO: 700009 - DNA, 1125 bp, Homo sapiens
ggctcagacgccgcgcggggcggtggattggtctgtgtgtcctctctcgtgctcctcgctggctcgctgggtgtgcctgacggttcctggtgacacctgcttgcttgggccctgtcctggcggctacagtggcttctctgctgctgctccctgtgttctgctggactgggaagaagtgggctgtgtgccgtccctgtcccgtccccatctggaaccccaagtcgcgcctgctgaccctgtctgcagttgcgagatgagctgcggacgcagctgtgcctgggtgcgccccgtgcccctggctctgctgcctggagaacgggtcctgaacggctactgtgcttccacctgcaccggtggactgaagtggcaacgtttgggccagtacatcctggcttggttggacgccctggcctctgccgtgcctgatgaatgtgctgtgggcttgcttggactgtggtggaacctgggctgcgatgcggacggttggagccggggcgaagaaccggtgccacgaacgggcagagctgagccagagggcgcagggcggagacgaggcacggcaagatcccaggacagccgagaacatcaacgcacgcgccgaaggcggccactggcatggagatgagacgagccacctgaagaccggaccggaagccagggggtggcagcagcggcctccggggggggtcgcgaggggggtccggaaggaaggggacgccatgggctggacaggacggcacacagggggaagaagccagccctgggccgggcgagagacctgaaggagccgagccgcgggagcggtacgccgcacagaaggggctgcaaggggcgcggcccgggcgagacagcggcaacgcaacgagtccggccgcgatcagcacgcagcgggaaccgacaggcgagcgggaaggggcccagcacgtggggcgaggccaagggccgcagggagggagtagcggagccgcttcgcagggggactccagtgaacaacacgaggcggaagaagcgaacgtgggagcccccaggagcgagggactaaactgggcgctaccagagagccaggcgaagcaggcgaggaaacaaacgagatcaccaagcgcccagaaggtcgcggcgcccacc

SEQ ID NO: 700010 - DNA, 207 bp, Homo sapiens
acccatcagccccctgccccggccggcccaaataggtttgcctttgccttccagctcccacagcctggtccctgaaaatgggttttgtcctgcaaacccctttttcaaaaacgcccaagcccagcccctaggagggggtggggcatccctggtcaaccctcaaacattccggactcccctcataacaataaacacatgtgcccagca

SEQ ID NO: 700011 - DNA, 612 bp, Homo sapiens
accatattgctgttcttcagggatggatcatgtgctgcaagtatattatagtccacggcgattctttacttccttataatactctatatagtcgttcccggtaatgtaacttccataagtccatagcttattgtcatttctcttagacacatcaaaaaggtaatggcgcttctgaaccagtgcctgttgtgacttctccgtatcaattgcattctggatgtgttagatggaagcctgcttcgcctcttctagttgggcaagtttttgctcattgagtttatcagcaaagtctgcaacaaagggaccatattttttaattccatagaccattacacctagtactgatagggcagtgaaggtctctgcgctaatcacatatatttctttggataaagcgtacaagataagcccagttccgagtacatagggtcctgttacaccagttttaggataaagaaactgggagaattcctcagggatcagtccataacgaacttttcctccgtattcaggaagaggtggtacaggcacaaggtgtggctgccctgtatgaagggtccttgttgcctgcaatacccctggacctaggaaggctgcattctacagagaggg

SEQ ID NO: 700012 - DNA, 175 bp, Homo sapiens
attcgcggacatgtcgacaaacattaacggacaatgatcatgttttttcttacataaaaattaaaaactatgcattcacacacacacaaacacactcgcacacacacactattcaagaatatgactaatcaggcatggtggctcatgcctgtattcccatctatttaagaagctg

SEQ ID NO: 700013 - DNA, 191 bp, Homo sapiens
cccgcgtaaatttggtaaaaaagctattttttaaccaaaggggcgaatggggaaacccttttaaaaaaaaaaaaacccggatggggtggggtggggtccttttgggaaaggagccccttttaagaaggggcgtccacccacaaggggaaaaactcttttgggggagggcccccccgaaccctagttggggg

SEQ ID NO: 700014 - DNA, 129 bp, Homo sapiens
atctgtctcgtgatactgctctttcttgtagctggatacaggcacgcgcacatgcccagctaattattgtatttttagtagagacggggtatcaccatgttggccaggatggtctcgatctcctgacct

SEQ ID NO: 700015 - DNA, 1391 bp, Homo sapiens
gaccgcgagagggaggaaacagggcgtgctgcgcacatgggtcctgagagatcgttatggaagttggcaaattgtcaacacgggagcgactgcgctgcttcgttaggacctagaggagggcagcagattctgttgtcggcttcagtatagagcaggtaggtaggtctggtgatatgggattgaactttcccggcgaccacatctagtctagaggacgtgcattctcctgtctagttgaccacctcggcacgtagttctcttggcgtagcaaattgcgagtaagtgacggagcatgtgatcttctcgggagatactcgtagatctatattgattacccctgcaatgaatgtcggtcgagacgctatgcaacttacacacatgctagagtgcgtgcagtttaggtgggaaaagtgttgtctcggaacgcatgtgacacgacaggtctgaggaggataggaaaaatgcacttctcccgcaactggtttggctccatcactcttgtgcggtacattgcacagaagcactaagacactccgcgccagttgtgctgggatggtcttggtgtcattgccgtagcggtcaaggcaagtccgttgccagttttttcgttgttgcagaatccgaggaaattgggtggagaggttggcgcactgtactggaagtgttcacctaacaatcatgtgggcgaagagtgaacgtgtgaatacgcgatgggagcgagtccggtatgggcaggaggctccaggattgccattgtgtttggcaattaaagcttaagttttttcacccttggaggcaattgcgtgtggaacattttccccatggagtggtcgtgggacaatcgaccttatcgaaacggagcgctgagatgcatcctttccctttgcttgagaaccctcttgcttttgcccaggtacatgcttaaggcgtgcgccaattggttagacacgtgggccccttgatcaacggttccacccaatggggggggttccacattgacaagatgtggatgaaggtagaaaccctttcgacaagaggttgacacctagggcccgcgggcagacacttggttggcgtccaattggtttccccaggaattcgttttgggccgctgtagacacaatcgagaggggacgtgccgtatgggtgtgttcccgaaattgtgccacaaaccagagagattgttcaacaagttcctggggcccttgggtgccttcaggcaagatcggtggggggacatcattcgtaccgcgaaatctttggggagcacagaggacacaccagccccaattgaaagcacaccatacatttggcgcgcgcttaatattccgtgaggataaatgcacgtgagatgaatatagcggcccgtgaggggtacacgcgcgctgaac

SEQ ID NO: 700016 - DNA, 316 bp, Homo sapiens
  misc_feature (47)..(47): n is a, c, g, or t
  misc_feature (224)..(224): n is a, c, g, or t
  misc_feature (293)..(293): n is a, c, g, or t
aaaactttattaattcacttggtgatttgttctgcttccttactgancatctcctgtacactaggcattttgcttgatgcttcatgattaaggtagtattcctatactgtgtaatttacagctgctggaggaaaggaagaagtaacaagaagacattttaaaaattattaaataaacttgagcattaattttattagtttcccctctataattaacaagtttancaaaaatactgtttaatgcttagttatatcttttctaggtgattaaatagggtctttgtagtaattttntttttaagggctttaatcaggaa

SEQ ID NO: 700017 - DNA, 260 bp, Homo sapiens
cgtaggatccagcaggggatgcgagcaactcaggacactgagcttgtggtgacagaccagcaggagatagaaccttccagaagtgggcagctgtggtggtgcttctggagaagagcagagatacacatgccatgtacagcatgaggggctggccgaagcccctcaacctgagatgggagccgtcttcccagtccaccgtccccatcgcgggcattgttgctggccttgctgtcctagcagttgtggtcatcggagctgtg

SEQ ID NO: 700018 - DNA, 136 bp, Homo sapiens
tgtcatctgtattgctgctttgggccgcctacctgtcaacctgccaggtgggccaggtgttcctttatttccagtgcctcactaccactacgagcaccagtgcctgcccacgcccgccgcctggttcgcacaccac

SEQ ID NO: 700019 - DNA, 122 bp, Homo sapiens
caggtcgaggactgtggagttgtactaattgcttagatagcccaagtttggtggtcgcaagtatacacgaagcagtgctgcgagatgagacaatgtcagtaatctacaaatggatgccttcc

SEQ ID NO: 700020 - DNA, 294 bp, Homo sapiens
agggggaaaaccattttttttaaatttttaaatggagggtgagatgaaatgggggggttttaaaagggtaaaattttagaccccctgtggaaccctgggccggtataggcccccttttaggggaggttttgaaaactttttcccccttgccatttggggctttggccccctaatcctttaaatttaaggcccccggaccttgaaagaaaaatgtttttgatccctttttaaaaaggggggtttagccttatttgggaagggactgggccggtttctatgcccggttttctttga

SEQ ID NO: 700021 - DNA, 190 bp, Homo sapiens
cttccagaactgtgtttgagaggaaacttcgagtcaaatccagctttgttgcccctctggagaagtcctatgggaccaggccccggatcctcacgggcaaccctcgagtagaccttcaggagattaacaactgggtgcagtaacagaggcaaggagctccttgtaggtgctgtggatgtcagggcgctga

SEQ ID NO: 700022 - DNA, 445 bp, Homo sapiens
  misc_feature (23)..(23): n is a, c, g, or t
ccggtccaaatatatattgaacngtttttccaatttgaaatactctccttagattgcggcatggcaggagggcatactgttcctagtagtcctctccaaactcctttaaaccatgacttcaatttgtgatatacattaagggcaattactcctgttagagattgcagactaggttaggctgccttaacacatacctgtttggctctggcattagcaaggacgtcttccttaagctaccaccgggcccccaggtccccctccgcccccctcgcacctcccccgttcccccccgatcctgccctccccccctctacccccccaccccttccaccacacccacgtccctccgccgcccttcccccctcccactactccccgtccggctccctctcccccctccccccacccctcctcccccccccctccccccgcccccctgcccccc

SEQ ID NO: 700023 - DNA, 771 bp, Homo sapiens
ctccaacattggagattacatgttaacatgagatttgggtggggacaaatacccaaactatatcactgtgtgattagtaatctctctcacttttagctgttcctctcttggaactatatcttaccccttgataccaaagccactgtattctttagggagatgacattgtcacaaaaggtataggacaaagatggtggattctggatcctgacattgctagacttaaatcccacttctgatagtaatcagccatgtctccccaccattatgatcctcagatttctcattcctaaggcagtgtagtaacatatactgttaaagattgttctgaaaattaaagataatatatattatgtgtataaacatatgtatatgtgtattcagtctttccaaagcttatctaatatcattgtaacttatgattccttttaattttaatcatgattctttttgggtttctaatttcatattttctcttttgctacttattttgataccacctggttttgtatatacttgaatcctttttgtatttatttagtgataaccattgtcttagtactattgagatatcatgtgaaatttttattcacttttgtcaaaaaatcactagcctaaaagtgtaaatcccaatcatgatgtgggatagtgtagcagtttctttcttaatattgttattatatcttgcctaagttctgaattatgtggactgtataaggtgtagcattctatattatgagctgtgtttctcttctggtaatacaaatcaga

SEQ ID NO: 700024 - DNA, 197 bp, Homo sapiens
gcacataattgtcaccgctctggctattttgtattctttgtagagacggggtttgccatgctggccagactggtctcgaactcctgatctcaagtgatctgcccgcctcatcctcccaaagtgctgggatctacattgggccttcttttggtttttgcttttatcttgagacagagtctcactctgtcgcccaggtt

SEQ ID NO: 700025 - DNA, 488 bp, Homo sapiens
tctgaactaagcatgtacagactttcccccttttcattattgcctatacaatacagtgtaataaccatttacatagcattcaccttgtattagatattataaataacctagagatgatttaaagtacacaggaggatgtgcataggttgtatacaagtatgatgcaattttatgccagagacttgagcatctgcagattttggtatctgagggaggtcctggaaccaatcccgcacagataccaagagacaactgtttatgttttattcaggattgaattaccacggataaaattatgtcagtaatttcagggtattaatattgtttacttggacatattggtagaatgtgagaatatatatagtatgagggagcccggatagttcagttggtagagcatcagacttaatcagagggtccagggttcaagtccctgtttgggtgtgttcttcggcttttagcacctaattctgattccacctttgaaa

SEQ ID NO: 700026 - DNA, 491 bp, Homo sapiens
  misc_feature (51)..(51): n is a, c, g, or t
tgcactccaacctgggcaacagagcaagaccttttctctaaataataatanaatgctgtaagtgttcaaaagaagaataactaggggtgacttcactaagtcctgaggagggaggaatagatattaccaaagataggagatactgatgtatacaaggtaattgcagttgacaaagagtaggtgtggctaattggagcagattatgtccatggtgtagtggattttatgcgttttttaacagaagaaaccacctcaatttttttttttgaggttaaacttcagtatatgaaagagggggcaacccagcagttgttttgattgaagcagagttctaggtctccaggaatagtttaaaaactgtaactaggctgggcacgatggctcatgcctgtaatccccaacactttgggaggctgaggtcgaaacatctcttgaactcaggagtttgagaccagcctgggcaacatagtgagaccctgtctctaccaaaa

SEQ ID NO: 700027 - DNA, 124 bp, Homo sapiens
ccggtcattttctacacagcatacaatttcttccagttaagagttcttgacttgcagccgagtcacagcagtggttgaacgggtactggaccagtcttgtaagtttttcaaaatgctgtcgtag

SEQ ID NO: 700028 - DNA, 1602 bp, Homo sapiens
  misc_feature (599)..(599): n is a, c, g, or t
gtgtacgtgaaaactacccctagaagccaataagtgggaactacggaaacatgacgtcagtagtcaacattgtgcgtcattggacacgtagattcgggcaagctccaccactactggccatctgcatctataaatgctggtgtgacatcgatcaacaagcaacgcattcgatagaacactttgagcaagggagcgtcgtgctggagcattggtgacaagggtctcctgtcagagtagtggcctggggtcttggcataacacttgagatagtctggactcgctggaagccgttggtatcgtaccatttggatagtctccctctgtagtcacaaatactcgagtagccacgacgaagtcacatattgtagactaaatcgatctcgattgcccccgagggaacacgagtacgaactctatattccacagagaaacagtgtaatataccaagggaaaccactcatacatggcgtggaacgtgatggacgtgctcccctgaacttgcaatgtgacgtggcgtgggaatggctcatcgagggtgcacacatgtgtggacactgccctggcggcgtaaatgcgattccacatgcgaaactgcgagncgacagtaagccctccgggagtgaacggctcacgttggcaccccgtttttacgttgggcgcctgtatgaaaccaggctaaacctggaggaggatggttggaacatagtgaataggccttaaaacattcttgcatcacgggggtggctcttaaagctagcacaatacgtcggcgcacgtctccgctaggcgttggagagacacaaacccccgattatgaagggtggccaacggaaaatgcaaagggcagctaacacttgccacgggccatagagcacttggggcgcaccgaccgcggccacaagagcgtccacaagaccgaaccctgttaaggcaaaagttcctcagaaggcaacacatgacacctgtggcggcagttaaatcgagaaagcgcaccgccggaaacccacccgaggcagtaaaagccaaagtctgctggagtgggccccaaagactatgcccccttgggcgtaagcgcgcgacacaactgtgcgtgttcggcaaaccaccaacgccgcagatttgggcccattgggcgtaggcccccacaatacgtattcgttgtaaaccacctgttgtccgcgtgtgtggagatatcacaacggggcgggacaatggggcgaacaaagggtaacaccacccccgctgcatacggcggcacttagtggcccacacactggtgcccacgcgacgtcggaatgccgccctgaaccgccctggtgccgtctttcgcagcgggcgcttcctcgcggtcgcgcccgttcgacgtatgtccgtatttaggcccacagcacgacaggcatctatggctgctctctatcatgtgggtctgctcaacgtgctgcgcctcattgtgttgacgcaccccgtgtgacccctccttctactcccagggaagctgtgttctcccaacgaccccacctcgtgcggcgcgcgcgccatctctgccgccacactgggttgtgccccatgcgttcggtctccctatcgactcgtgtcacctgg

SEQ ID NO: 700029 - DNA, 324 bp, Homo sapiens
  misc_feature (114)..(114): n is a, c, g, or t
  misc_feature (264)..(264): n is a, c, g, or t
  misc_feature (266)..(266): n is a, c, g, or t
ctcacgcctgcaatcccaacactttgggagggcgaggcgggcagattacgaggtcaagatcaagaccatcctggccaacacggtgtaacctggtctctaccaaaaacacaaaanttagctgggcgtggtggcaggcgcctgtagtcccagctacttgggaggctgaggcaggagaatcacttgaacccaggatgcagaggttgcagtgaaccgagattgcgccactgcactccagcccggcacaagcgatccctccaccttcantntcccaaacagctgggacttacaggcgtgggccaccacacatttttgagccggaccatt

SEQ ID NO: 700030 - DNA, 226 bp, Homo sapiens
gctcgctacccggccactctagtcaagagatgagagataacctctcgatccaccccttgatatacgcacccttcagacctgaccctgcatcctggcaccaatctagtgaccatctctacagttctgtcattttgaaaatattacataaatagaatcagtatagtatatagactattgtccactcagcatatgactatggagaactgtccaagctgtactagagcgg

SEQ ID NO: 700031 - DNA, 736 bp, Homo sapiens
taggtatcgttcgaccagcgttcgccacgcgtcaggcgagaagatgacccagatcagtgtgtgagaacttcaacaccccagccatgtacggttgctatccaggactgtgctatccctgtacgcctctgggcgtaccactggcatcgtgaatggactccggtgacggggtcacccacaactgtgcccatctacgaggggtatgccctcccgcatgccatcctgcgtctggacctgactggccgggagcctgactgactacctcatgaagatcctcaccgagcgcggctacaggttcaccaccacggccgagacgggaaatgccgtgcgtgtaacatataaggagaagcctgtgctacgtgcgtccctggtagcgtttcgagaccagagatgatggccacggctgcatatcgcagctccgtcctctgcgagaagagactacgaggctgtactgcacggccagggtacatcatccattggcaagtggagtcggttccgttgccctgaggcactcttcgcagtccttccttcctgggcatggagtcctgtgggatccactgaaagctagcttcaactccgtcatgaagctgtgacgtggacatccgtcaacagacctagtacgcgcacacacaagatggcttgtgctggcggacgaccgatgcatgtacccgtgggcattgccgagggggcatgcagcaaggagatcacgtgtccctgtgcacaccatgtctcaatgtag

SEQ ID NO: 700032 - DNA, 342 bp, Homo sapiens
atcctctacacggatccccccctcgaaacccagtctcgtcatctatctgataatcaggataggatatccatagatcctctgctaatgttgccatttccggatttgccctacccaatatgtagatggaattcttaaaatagttttgatgtgttttaattatttccagttgttgttcttatcatgtggaacctattgctaacagtgtcaactttaatggaatccgctactgggttttacgaggtgctcctcgcaaaccccatgttctgatagctcacattatatataatatttaactaaaaatatattattaactgcgaaccattgaatgaacatgtactcagt

SEQ ID NO: 700033 - DNA, 343 bp, Homo sapiens
  misc_feature (113)..(113): n is a, c, g, or t
  misc_feature (166)..(166): n is a, c, g, or t
gctcgaccgggccggccttgagcacaatcgacgacagggtcagtgaggacggggaatcaggtgaacggcgagacgtgggaccccagcgacgtgcgaacgcatgattgcgtgantggacaagctgacaccccgggaaggctacaaccttacggtgttgccgcagtgncgtttcctgcgttccaatcggccgctgagcctgaccccggtgttttaccagcccggtatcgtcattgtctgccagggcagcaagcgcgggcttcttcggcgatcaggtctacctctacgatgaacagcactacctggccgtttcagtgccggtgccgttcaccatgcaaacccaggc

SEQ ID NO: 700034 - DNA, 1208 bp, Homo sapiens
  misc_feature (807)..(807): n is a, c, g, or t
ggtgtctgccgatcacacagacgatcggcagttcattcgatgcgccttcatgcatgacaagtcgccgcggcgctaagtcgcatgcaggcctgtgaccgggccaattgcgtgcagtacctaatgtcgccccttgcacaggcttgcaccagagtcagcataacactatcgtgcgataaatgcgagatcacgtaagaagcctcacgacgagtaacttgttcattgccacttatgccaattcttcgtggtcgtcaccgcacctctgctccgtgcgaacgagatgccgactatacgaatagaatacgcctcgtcctacgaatggcatcttcacgatcaaagtcttaccttcacgcaagttaacttaacctaaaggttggactcagccatgcagaggtgcggagagcacatcagctgttatctgctcgcgccttaagaaccaccggcaacgtttattttgaaccgcattacttggggcgaagaaaagctgcgtactagatgggccccccagtaaatcgcaacgagtactacacattgaattccagaacattaaatgccgacatgctaacgacgtaacatatacagccatgtggaccgtccgacagctaatggaaccgaagcttccgaacaaagacacccctttgtatatacgtaccgcagcattacagtacgggagttaaattggtgaactccggagcagagacgccaaccacaagaatagggtagcgaaacactcagacacttcccgaagcgtcggcgtgagcgccaaagcaagattgtgaagaggcgtacagacccattaaggagagaaancaccaccatcccggagttgtgaccaaccgaagcggtcaagacaaagaagagcgcagacgcgcacgatgccgaaatgcctaccccagcttagacgataaacacgttaaattccgcgccccgcgaaggtgtatcgtatcccattacaccttaagttcggcacattactgataagacacacacaagaaaacaatttacaaatttttacacccccggggtagaacttgatactacacgcccgataccttctttaaaacaaatagccggcacacagaactacatctaaccatcagcacacagaacacgaagacaatcattaaccacacacaaaacaagcaaagcacacatcacacaacgatctaacataccattcacagactaaatgatcaacagcacacgaaaca

SEQ ID NO: 700035 - DNA, 443 bp, Homo sapiens
  misc_feature (4)..(4): n is a, c, g, or t
  misc_feature (125)..(125): n is a, c, g, or t
  misc_feature (146)..(146): n is a, c, g, or t
  misc_feature (177)..(177): n is a, c, g, or t
  misc_feature (227)..(227): n is a, c, g, or t
  misc_feature (242)..(242): n is a, c, g, or t
  misc_feature (248)..(248): n is a, c, g, or t
  misc_feature (304)..(304): n is a, c, g, or t
  misc_feature (353)..(353): n is a, c, g, or t
  misc_feature (380)..(380): n is a, c, g, or t
aggnagcggtgatggggcgacgacgccacacagccagcgccgtcctctcccagaccctggggggagcccctgtggctgggggtggggagtgggggacccaccccaggccctccctctccctgccncagacagcctcctttcgggcncaacccattccttccggcaggagactaaggnacaaagagaggaggaagcgggagaggaggacgagggaggggcagggtggnagcgcaaatgaaggnagaggngagaggggtgggcaaggccactccacccccacacccaccccagaaaggggcgaggnagcgacaacagcacgcagcaggggggggggacaagggggggttaaaggntgaggggcccggggcagggggggcctngggcctgagtgaaagccgtgccagtggctgtgccctgagtggtatgccagcacggcgcccaca

SEQ ID NO: 700036 - DNA, 1207 bp, Homo sapiens
  misc_feature (636)..(636): n is a, c, g, or t
  misc_feature (1207)..(1207): n is a, c, g, or t
cttaaaaacaaaaccaaaccacacaacaacttggaatgtggaaagaagttcattatgtgtttccattttatgatgaactatttctttaatttttactctttttagttacgtgtttcttttgtttttttggggagggaatatggctcggtcgcccaggccgggagctggcagtgagccgagctggcagggagccgagattggcgaccattgggattccagcatggagcggagagagtggagatccgggctcaaagtaaataaatacttaagtaaataataaatataaaataaaactaatggataactggatggagctaaaataaataaataagaggtccgggtataattttggggatatctgggcaaccacagataagccaaaaagtcctcttattcaaagggtgggacatggctggtttcagtaacttcattacgggcttggtggaacattatctcaggtgaatcctaaaacaaaacaaaacagaacaaaatggactttcccggtgctcgatttcctggagggatcttggtaaacatcagctattacagggtggctctttggggtagatttcaggtgtatgtgactctggtaagcattcaggttaccagtggtttatggagtgatacattatgtgncagatacagtctggacacaggtgtggataaaaaaagacccatggccctcaaggcggcaaataatacgggagaggggggaaggaaggacacctgtacaaccaagcagtggacatattaccgaaatttgcaataaaggtcagggaagaccccaaaatataggcagggaaacatgggaaacgacaacatggggtggagaaactgggaggaggacaaaccccgttgaaagcgcaacgacgtagacagacaccgagagtaacaccggagacacaagcagtgcgaacaataggaggaaacaggaccataggagtgggcgagaacaaggaggccacaccacagacgactaccaaatgagccaacagcgcacagcagagcacgaggaagcaaacaatacaggacagcaggaagaaaacaaaaaaagaaggaagacggcagcagacacatcagaatgaacgagacggcgaaaagaaaaaggacaaagcaggaaaaaacagagcagagcgcaagagaagaacagacagaaaaagcagacaacagacgatcgaaccctcgccgcaccacccctcgtgctgan

SEQ ID NO: 700037 - DNA, 750 bp, Homo sapiens
  misc_feature (183)..(183): n is a, c, g, or t
  misc_feature (225)..(225): n is a, c, g, or t
  misc_feature (326)..(326): n is a, c, g, or t
  misc_feature (331)..(331): n is a, c, g, or t
  misc_feature (333)..(333): n is a, c, g, or t
  misc_feature (349)..(349): n is a, c, g, or t
  misc_feature (363)..(363): n is a, c, g, or t
  misc_feature (416)..(416): n is a, c, g, or t
  misc_feature (425)..(425): n is a, c, g, or t
  misc_feature (457)..(457): n is a, c, g, or t
  misc_feature (608)..(608): n is a, c, g, or t
  misc_feature (610)..(610): n is a, c, g, or t
  misc_feature (613)..(614): n is a, c, g, or t
aatttgctaactgggtaaatatttgctaactggttaaacattaatatttaccaaagtaggatttgagggtgggggtgctctctctgagggggtgggggtgccgctgtctctgaggggtgggggtgccgctgtctctgaggggtgggggtgccgtctctctgagggggtgggggtgccgcttanctctgagggggtgggggtgccgctctctctgagggggtgggnttgctgctctctccgaggggtggaatgccgctgtctctgaggggtgggggtgccgctctaaattggatccatatcatttgacgctccggggttctggtgtnctggntntcttcattctttactngcactcagattaangccttacaaagggaaagcctctggccgtcacacgtaggacgcatgaaggtcanctcgtggtngaggtgacatgctcggcacaattacaacagtnagagagggagaaatcctaagacagaggagctccagagatgagtgtctggagcgctgtcagttcagctcttaaaggccaggagggccaagcgtggttggcggctcgttccagtggcggcacgtccttgggcgtctctaatgtctgaggtcangngcnngcactttgcccccctatttcaccctggcgtgtcctcggactccccccccccgccagcgtgatcccggggcctctggtcgacattcggcggtgccccttgtcctggcgccgtgtccccgtgccccgcgtgcgctccc

SEQ ID NO: 700038 - DNA, 503 bp, Homo sapiens
gcctaggtaacagagtgagaccctgtctcaaaaaaaaaaaaaaaggaaaaaaggaaaaaaaaaggacttaagaattttataaagggaggaggtaatctcgggccaggatttcaaaggttctgggaggtggtaaaagcgctccggaggttcctttttttatttacagggttacccaaccttttcgtggttctgggagaaccccttcaagagaagaacattttaagaaggggtgcatgacgtgggcaaaggaaacactttgggactttttccttccgagaaagtttcccaatcttcgtggagaaagagcccagagggactctatagatttgtggggggagggggttactaccctggggtgggcgcggtgtggtgaaactgtgggggaacaccatctgagacacatgttgggggggaggcctccgcggggagttgggaggaaaaataaaaggttaactcttttttggaaagggcgtgagtgggggaacttttagaagaagaagacc

SEQ ID NO: 700039 - DNA, 286 bp, Homo sapiens
attcaatatctcatcaccccttccaaattcatttctccttccaacatctcatggctccttccaacatctcatagctccttccaacatctccttccaacatctcatctcgccttcaaacatctcattgcgccatgagatgtccttccaacatctcatacccccttccaactctcctggctcttctccttagcctccttcattcgcctgggccccaaaagagctagcagaatccgcaaacttttcaatctctctaaagaagatgatgtctgccatgagatgttggaag

SEQ ID NO: 700040 - DNA, 1129 bp, Homo sapiens
agcggggcgccggccaagacagtcacagagagattgactctattggggtgtttcgcagagtgtgagagggaaggcgccgcggactgtatgtgctagaccgtgcccttcgtgctggcttcgatggccgccgttgtgcccccgtgggcccctgtgcgcctgacaacgttcggatacatttgcgcgtgtgctccatgtgtctacgagccctgatggcatggatctgccatgacgtggctgtcccaattgtgcgctggactccgactggaaacgctcttccacttgcgctgggcacagcgggatgcctgcttgcgtggcagtcacgcctgccgggtcgaccgtggggcaccttgaattcgcaatgggtgtaaaggggaacccaaatagggaaaaacgtggaaggtggaaccaggctggggcgtccaaccggggttggatccagtgtcaactccagaaagcattggcgagggaagcacgaatgcattagcgtctcgtgactgatctgggccgtgtgcattccaaaggaactgggcgcggcctggtgggaaggactccagtcggcgccaaacttgaattccgacggggcaaaacgcgacaattcaagccgccgggttccctaattttcaggccatttccaactttccccgtgcaaaagggcgggaaaaccagggtcgtcgactttggaggcggaagtcgccccggcgcgaaagggaaagccccacagccactccagctcatttcgcgaagatcgcgcccaggcaagagaaaaccggacgtgagagtgccattgtgtggcaacaggtctccaaaagggccgggcacgtatccagatcagtagggcacatgacgaggcggaatggggaacagttggaaccccacggtgtcactgatggaaccaggcccagagggcaacgtatttgccaaacgtattgccttctgggccccggctttacgataggggttgggcctccggaaacaacacgctcaacagacgcttaaaacagccctaattaaccgatttgtccacagaggtttggcaaatcacttcggggacaaggtgcctggggggaccacaaaagccaaaggaggtcaaccgccttttgatggactctccctttgtgatacggtcacc

SEQ ID NO: 700041 - DNA, 81 bp, Homo sapiens
  misc_feature (14)..(14): n is a, c, g, or t
  misc_feature (66)..(66): n is a, c, g, or t
ttttccttgttccntcccatgcctagctggattgcagagttcagtttctcattcttacataaaaantaaataacaattaaa

SEQ ID NO: 700042 - DNA, 134 bp, Homo sapiens
gtccttatttctaagagggtaatgatgctactatgtgcctcccaagacttaggggagttcaattcatatacgtgtaaaatttacaagtgcccaacacacagtaagcactcaataaatgttaactttggtggtta

SEQ ID NO: 700043 - DNA, 169 bp, Homo sapiens
caaccccacacatcacacaccacacacacataacacacataacacacacctgcacatatcacacccacacatgcatcacacctgagcctcagcttcctcagctgagagagaccacatgctccctgaccacctgtcgggtttgttaatagaatcaaatgtcgcgcggccg

SEQ ID NO: 700044 - DNA, 523 bp, Homo sapiens
  misc_feature (355)..(355): n is a, c, g, or t
gaacgggtgatgcggttgctatgagcacgatgcggactgcactgcagctgggtgacagagcgagactccatctccaaaaaaaaaaaaaagagagagagaaaataggggaaaacaaagcaggagggcggtgtctcccttccccacatggtttcccaaccaaacagctcctttctatttaatatgtggggctagtatgaaaaacatttctgctaggaaaaaaaaatttttttgagaagtttagaaggcttagtgtgatttggaccaaagttccttcatttcacagtgggggaacctagggccttagagagaggcaggtgatatgggctccagggcagggcggggaggagatcgggcntaccggggctcgtgctttgggctcttgggggttggatgatttctaagccaaaagagtaaaattctgggggcttggggccgtcagttggtcgcccaagtttattcagtgacctctggcaagtctgggccctctcggggtctcagttcctccatctggacccagggttcc

SEQ ID NO: 700045 - DNA, 391 bp, Homo sapiens
taacagctcactacagcctaggcatcttggtccaatagttatcctcctgccccagcctcctgagtagcataaacgacagatgtgtgctaccacctctggctgatttttaaatatattgtagagaccagggtctccctatgtagcccagattggtcttaaactcctaggctcaagcagtcctcctgcctcagcttccccaagggataacaggtataaacgatcgcacccagccctatcttctttaccaacatcattacaaattcaattattgtcactctataagacaccacatctatcaagacaaatcttccctcctgtatacttgtctccattacaccttcaaacttttatagaaaccaggtttctctcatgttccccaggttgttcgcac

SEQ ID NO: 700046 - DNA, 440 bp, Homo sapiens
  misc_feature (295)..(295): n is a, c, g, or t
  misc_feature (396)..(396): n is a, c, g, or t
  misc_feature (418)..(418): n is a, c, g, or t
cgatctggctgggtcactacgtcggccagcagtattataatagcagtaagtataatatagtgctattataatagcactatgattaaaatagtggaaacaaattttatttgattgaatggatcaacaaaatgcgatctatccatacaatggcaatattattcatggctatagaaaaggaattcagtacagcatggttgaagcttgtaaagtatgctaagtgcatcataagctcaacataaagagcttcatatcatatgaattccactttacttgtaaatgtccagatattggcaanctccatatgagacagaaacgtggattagtggctgcctaggaactgggaaggaggcaggacatgggaacgtgactacatgctagatagacggtttcttttgnggggtgataacaaatgttctgngaattaggcggtgatggttgca

SEQ ID NO: 700047 - DNA, 467 bp, Homo sapiens
tagtacatagaaggctctatgcttgaaatatccttccagctggcaatcaccatcaaactgcaatgatagattcttgtcaaaagtcttttacattcaggtagaagagagaggtaagatatatcttatgatatatctggtgaacctagccctactttgataaagagtgttctagttatctattgctcatattcaaattatttttaaactcagtgacttaaaaagtaaccatttcaagatatctctattgtgtgcataaacattttaagatggatctaagcattcattcctttatccttttcaccttaactgcagtggacacagatgctctactgtgtgcctctagaatttaggcagagcatggctgctttcttcttgtgttccacggcaccatcaagcaaggtaactcggtggtactcagctagcatacaagaggtactcagctggcaggtgggctgatctgagggttc

SEQ ID NO: 700048 - DNA, 1155 bp, Homo sapiens
ccacgcgtacgatccggatgccgcccggatagccggtgccagagatcccactgtcgccccgtgtgcccccgatcatgtccttcctgcaaagtggtccgggcatgagtcaaattccggcatgtgttcgggcatccggatcaagaactaacccattgctatgcaggacaatctcagcgtgtcccgttgattcagctgtgtgacatcacctttctgcagcctgtctcaccccaaagtttccttgagtcgcgtgattcgtgcgcaggctcaacctgcgaggcgggtgcggcgttctctcgatgcatccctccttaatcgacatcacttggctcagcaaattgacgaaggacgcgtacccactgaatcgagctgtgttcgagtgcactacctgagcggaccactagattccctttggaacaactactgagctgggttagatcccttcacctagacctgtagcgaaaagttactattacggacaccaaggccgcgtcattcagtgaagcggcatcattggctacccgtgctccagttgggattggtgccacaaagaattccccctatgcatggaaagcggtgggccttagaaccgctacactctcaggcatagaactatgaacgtcacctgcgctgtgctaagtgtcacctttgagcaagtgtggggcgaacaaaccaaacacgtcagactgtcgagaggcagatctattcagcaccgttagtgtgcattcacctccaacggggacccagaaagaatccgtagctagtttacacaagttgaaaagtgttttgcaggcactatatccagatatgtctaactagtctatatctattcggtaaagcatggttttgtggagcgacacaacgcacggagaacgagaaagggctggttaccccaggcccttgcgtaagctaggcctccgtggaccacccccccttgccgagccttaactacttcataaaccaaaacgtgcctcccaatgaacgtggagaaataccccactaacaactcgagagatcacagctgccttgcgtataaattggcactccccatgatccacttaggccccgttgtgcacactcaacagaacagagccgttttgaacgacaaattcacttccatgaaagacccctctgatatgtggtggcctaacccccttg

SEQ ID NO: 700049 - DNA, 416 bp, Homo sapiens
  misc_feature (243)..(243): n is a, c, g, or t
cgacggctcacggaacttttaagcttagtgaggaagcatgtgaaagccaagaaaggcaaaagcgagcgctctcctgccaaacagttggccaagttatgaacacaaagaaaagttcctggaaggaatttaaacatgcaattccaggaaacacatgaatgataagcaagtgaaacagcctcatattgctgatatggagaaagttttagtgggctgtctaaagtgatcttctaagatcaaaccagncacaacattccctaaagccaaaacctaattcagagcaaggccctaactcaactctatctgggttgagagaggtgagaaagctgcagaagaaaagtttgaagctagcagaggttggttcatgaggtttagggaaagaagccatctctgcaacattaaagttccgttgaagccgt

SEQ ID NO: 700050 - DNA, 181 bp, Homo sapiens
actgtctctaagattatgtcacattattcaggttatgtagagttactcaccagtatgaattttctatatgtctagtaaggtgtgaggacgggttaaaagcttagccacattcttcaaatttgtagaatttctctccagcatgagctctcatatattcattcagatttcgtggattgtataa

SEQ ID NO: 700051 - DNA, 223 bp, Homo sapiens
cacctcctcgactctattcaaatgtcacagagaaatgacacagcaagctacaaatgtgagacccagaacccagtgagtgccaggcgcagtgattcactcatcctgaatgtctctctatggcccggatgcccccatcattttccccgtcataaacacatcttacaagatcgatggagaaaatctgaaccctctcctgcccacgtctccctcttaacccacacta

SEQ ID NO: 700052 - DNA, 101 bp, Homo sapiens
tataagatccccgtccattactaggagttgtataccagatacccttctgttgagaaatttcagggtgtctcaaattgctactcttcattatgaagtatcga

SEQ ID NO: 700053 - DNA, 152 bp, Homo sapiens
  misc_feature (51)..(51): n is a, c, g, or t
  misc_feature (114)..(114): n is a, c, g, or t
  misc_feature (137)..(137): n is a, c, g, or t
gactgcgataggaatcatgtctggtcgcggcaaaggcggggcttggggaanggtggtgctaagcgccatcgtaaggtgctcccggggattaacatccagggcattacccccggntttccgccgtttggcctccggcngccgttggccttccc

SEQ ID NO: 700054 - DNA, 219 bp, Homo sapiens
tccaaccttagacggtcctgacttggaaaacccctgcgagcatcgccaccccaccgacgtcacaaaccgcttgaggcaaaatgagctaacgtactactgctgcaagaaggacctgctgttcactttaacgaacccgcttgaacaatggtgggacatccttatcacagaaaacagttcttctgctggcgactccatttctggcaacagcctggagccttc

SEQ ID NO: 700055 - DNA, 1064 bp, Homo sapiens
gagccgcgggaagacatgagaggctgctacgaaggacttcccgcggccagcgccatcatcctgcccactgcctgcacgggacgtgttctgtccatgctccaactgcccacaccaactgtgcctgctgtgtcaaatctcctgctggtcccaacatgaaacctgcatggtgtgccctgtcttggaggacgacgaatgcggacggccagactggccctaaagcgacacgcgaactgcctggcgcagcggccaaaccgctgtgacgctggccccaacatcatcgacgcccagccacacgactgccacttctactggcttccaccgactaacaccttaccttctgctgcgggctcctacgcaaaccccactgccttggttaagcccacgaaccgtatctctaaactctgtctccccacacgcgccagcacacagggttggcgacaaggggttcccagttggcctggccttcccataaatctctggccagggcaacccaatcccacggacttctggacacaccaacgcggttggcccccacatatggtgttccgtattcgcccgttggcccgggtgtggctcccacacacacgcggcctttcccactggggcctgtgcaagctccggaattgccaccaatgccaacttcccttgagccccaggacacgcccacggccctttctctctgggcacaccccctttaacctgggttagcttaccttctgctacgcaatgttccacacgtggttacgaaagcgcctcccaataggaaccacccatgaaaacacgcgtggtcccccattgcggcccctttggcctattgggccctccgatcaatcgtcaccaagtgcccgtttattatgggcctcggaaccgaaaacaacttccgctctatcacatgggccacctcacatcgcaagtgattctcccacctggaccccttgggccacggttatacgtttccctaaagggcaactatctctggggctcgtcatactattccactgcgcaagttctcacacgtttaacctcttgggccccgtgtgttctactacaccgcctcatactaa

SEQ ID NO: 700056 - DNA, 694 bp, Homo sapiens
atcccaaggagggggtcacacgtttggcaaaagtcctcaggggattctggaactaagtctgatgaaatgattccaggtgaagccctggttctgagacacgagtcatgactgctagggtgatggtccatgggtattcgcccagggcaggtggtctgtggctgataccttcaagggtctgcagggtatgcaggtggtctgggctgctcggcagatagtttgctgattcccagctgaggggagcatggtggcgattgtcagccattttctgacagacacacagagctgccatttatctcccccaaggtataccgtaccctcctgtgagacagtgtgtgcagggaccaccaccttaatcctgctgttgcctgacatgctgattctcatttattatgctggcatcaacacattagaggtacaggagcgggtcagatcatgaaaaaacgaaggtcttttggcccatttctttatttcagagatgtgggctttcagtgggaatttgctgactcctactttataggctgagtcaatgagggaacgatgactggcgtttcctctgtctaaatgggaggttgccagagcgctggctgggactaggatgtgtaactaagatttcacgtttgacatcttagatttcagttcacggcgataaagaagtagtgctggcccccaatatgttacagcacttgtcgcaacc

SEQ ID NO: 700057 - DNA, 625 bp, Homo sapiens
atcatgtggtctagtcatttgcacaaatttagaggatcagtagtaataggtggaaacacaaggattattgatccagttgaagtgctctcatgagtagaaggctcctttggaacaggtgccatggatgtcccagcaaaacgggtagaggagggagatcggtcatgcttactgggttgctttagaaaaagggaagttttactagcgcttatggctgagacagcaaaggaagagaaagagatattttgccatatacatattgcacatttcagagacataaaggtttgggagaagacagggagacagggctgactggggagaacaaaatttttcaaattaaaaaaatcaatcttgaagtcccagtgaacatctaaaaatttccatttaacttcctgcaaggccagcctccaagatgactcccagtgatgtccccagtgattacatctttatgtatttaggtaggtctatgtgactaatataatatagcaggagtgatggttactcctgaggtttacttcttgaggtagggtcagaaaacaaaagtgtggtttctgctctctctcagatcattcacctatggagaatctagtttccatgctgtgagcaggcctattgagaggcccccttg

SEQ ID NO: 700058 - DNA, 305 bp, Homo sapiens
ggttcaaaaccccgcccatggaatccttaatttcctccttgggttgtttctagaggtcaaaccaccccccattcaattggttttttcctccggggcaacctccgggggtcaaaaccccccctttttaattctttttttcccccgggccctcctcccggggtcaaaacccccccttttcaatttttttttttcccgggggcaatcccccggggtcaaaaccttttctttttcttttgttttttccccaggggaaacccccctgggtcaaaattccttttttttttgtggggttttctccgcggaac

SEQ ID NO: 700059 - DNA, 777 bp, Homo sapiens
cagccctgcggccttggccgcctacaaactggtgctgatccggacacggtagacgagcgcatggaaccatggagaccccgcttcagcggatggtacgacgccgacctgagacccggcgggccacgaggaggcgaagcgcggagggcaggcgctacgagatgctggctatgagatttgacatctgcattcaccatcaagtgcagacagagagcgatccggaccctctggacagatgactagatgccatatgatcagatgtggcatgccagtctatggatgaggactttggcagccatcaactgagcaggcacatatgggggtctaacacggatactcacataaagcagaaacatgcatgcaaaatggcatgtgtgaggaccagtgtgcaagatcatggtacggcagcgtccatatgaatgtaccacgcacactccgaatggagacccggaacaatccattctcataacaagcaacacaatcaagctcaaggatcagcaggttcatgcaggacacatcaccagacacgacttcaagcataaccctcactgatgagacgtctctggcaaacgtgcactactatcatggccaagaggctacatgccacgtacctagggcacattgcaacggaccattcagtatcacccaaagcaatcaaacgggacttggtgccaaccgttgcttactgatctcggcagacccaatagagcaaaccaggcctccctggtggcattatggacacggccatcttgcgcacgtgtcatctctgccaagagagca

SEQ ID NO: 700060 - DNA, 321 bp, Homo sapiens
ggaacaaaaagcatcaaggtacataaattttgggggtctaatttaaaatatgagcatgagttttaaaagctggaaaacttgactatgaattccagctctaccacaaactggtcacttgtcttctcacctctttgcaactcacgttcccatctgtaaggtgaagatactcacatctgctctagcagtttcacaggttgctatgaggtgctaatgagatcatttaaaaatccaactatcattggtatctcagtaagaatctggcattgggagctcaaaacactgcaagattcatgcggggatcataattcttggctaaaaatt

SEQ ID NO: 700061 - DNA, 903 bp, Homo sapiens
ggagctacagtaccagaagttatcgtatgcacggcactggggggggtgcgagtctttggcttctcactcatcactaacaaggtcatcatggattatgaacagcctggcagaaggccaaccatgacagaagtctctacgcagctggcaaacaagctgcacagaaacttggaacagctttgtctcccattcttatggcggggggttccactccctgacaaagccagcttgacctgccttggagtcgtctggcatctcccacacaagacccaagctagctgctaccttcttctggcacccttgctggagtcatgctgcctctgtccttaggttgtagccagaacggaaaagaccccctgtccttcacctttcccacttctcttctaccagacccttctggtgccagatcctcttctcaaagctgggatcacaggtgtgagcactagtgagaccctctggcgccaccaaacactacacgctgctcctcattcctgttctctcccttacacaacgagctggacgcccggtgcccctaccacacatctgctgcgacgaatgccccagcgattcgacctcgggcccccagcaacttttgccatagcacgcctgctactaggctctctggcagataataccattccgcaggcggctccagtcgtgcccttcatctaacatcacccagagaaccaagaacaagggcctaactccaaagtaccctcctgggactccaccccacacgctgccaccggccgcccgcacataaagcagcaaagactgaaccccacaacacgccaccacaccacccaacgaaaagacagcgccgccccgccccacacccccccccgcggcccacccacgccggccccacccgcacacacacccgcgcccccacccgcggcgccaacc

SEQ ID NO: 700062 - DNA, 101 bp, Homo sapiens
tgggcccacgctaccgggagctggtcaagaactgtggtacgacggcctacacttggggcgctgtgggcccgtggggctggtgtgggccaccgattggcggc

SEQ ID NO: 700063 - DNA, 282 bp, Homo sapiens
gcagttctgacgcttgcgctcattagtggcggcgacgggctcgatctacccgggctaaggtgtaggccgagtatccgccctgataagcctcgatggtggtgatcgtcaacgtggccctccgcgtccaccagtacggcccgtacttggaatacgagcggaaggttttggtcctgcatgaacggacctacgaggtgcccgaatgattcggaccatcaatttcgaccataacgagaagcgcgccgtcatccgggagatgttcgacctattcaacgagcgcgtcca

SEQ ID NO: 700064 - DNA, 182 bp, Homo sapiens
ataccgtcatttatggctaataccccgtctttttacagccatagagaacaataccgacagcatttgaaggggaaatttaataaatactgccggttaaatgatcccaaggggcccctttgtagtggctggttgacaacggctggagccaattaaataaatcaaatagctctgtctttcattga

SEQ ID NO: 700065 - DNA, 311 bp, Homo sapiens
gtagctgtccttgagttaaaacgtgactgagaaggaaattgagtagtgcatatgtaaaatgggtattatccttcactcttcaaacaggcagacctgttatcctaaactaggagagtcagcttttggtacatgtgaggattttcagtgtaaccaatgatgtaacgattctgccaaatgaaatataatgatatcacgtgaaaaccggtccattttgattctgaggctactctactaacaagcatcacacatctcgatttagccctgattaatatgttggcttcgcttacagggtttttaatgaccacaacaag

SEQ ID NO: 700066 - DNA, 1693 bp, Homo sapiens
gcgctggattcggcgcgggtgctggcgccattggaggcctgagcgggggtccctagcgccgggctgcggagcgtagcagctgcgggccagacgccggaggagggcgcgcaggccttgtgtcgagttcgttggggcatgctgcggaccgtgcggcgtgcgcgcgtgtcgggggtccccagaaatcgtgactaggaggccggccttccttgccacaagctcggagctacagcatgtttatcagaacggacttgtgggaaggtgttctgggatcatgcaagtggagagaggtagacagagtgagatggtacgatggtcaaacctcggtgggaggttgatggaaggctgagcatagcccaaagaccggtatcggaaactgtagactgataggcgttacccaaagagccaatcagccgtatgcgaagaggaagtatccaggggaacgatagcgtatgactgctgcacactcatacaattggagtcattcctttcaaattcgtagaaaaccggccatttggaattgtgtgtggcgtggatgaaatgagcgacgcacaggcagaactgaagagcagaagaatgacaggagtgaagaggttgtccaccagaggtatgagttgaggattggaaatccgcagttcagatggaacttgaaaccaagttgtgaatgggggatgaatcagttatggtaacgggaggtggataggaatgttgtgtgacaacaaaggttgaccaagtaagagtctttgtatgtgtcccacaatgggtgtggggtagagaataagtatggaggtgaatgtgacacaggcttttgggccgccatatgtcagccatacaaaggcgaaagtccatggaggcactcaccgcgaaggtaacaacgagtactttcgcgtgggtgattgacacatggcaatgccactattggatgtacctcaggacaaagctaactaccgatttgtggcgacaacagccatccagtcgtagacatgcaagcacaaagcccaatcacacaagaagcaaactatggataggcatagccacagcagaattatactatcatgagacagcaaggacacaaccagtatgaaccccattaggcaccacagtaacagcccaaggaacaaagtagggtgggatcgacaaccccacagtcgtagattagcacgatcaagtatgcagtccgaacacatagcaggaagtacacaacgggagagaagtacaaagtcgaggaagagacaagccgcaccgaggatgagcactgtacaaacaatagagacacagaagaagccacaactcacagagagcgcactgagcaagtgaggagagacccagagtacaacagagacagttgagacgaggcacaaatgtgcaacagtggctcgaagacaacaaggcacaagcacagcgacaaaagcagagaaacagacggtgcagacacatggagcgacagaacgctatataactccacggtcaggagatgacgcaaagcatccgtgagcaaaaacttgtgagtacaggcaagggacacctcagcagcgcagcgacgatgaggagcagagcggtgacgaatagagcgaaagacgtaggcaccatcgtggaagacgacccaacaacagatggacgactccacacgagccacacccacagcgcaagcagacacagcacgtagaccaacacgagagcgagcggctgaaagcac

SEQ ID NO: 700067 - DNA, 165 bp, Homo sapiens
cggtgctggccaaatctgtaaaataccagaaaataccacacacatggtatcaacagagctcttgaacacaaagtcaccttggggcactgataagatgattaaacgacaggactgcacaaaattttggttctgggtatgctaccattgtgactcgaaactagccca

SEQ ID NO: 700068 - DNA, 457 bp, Homo sapiens
tcatatgaatcagccgacaaggtcgcagaggggacggaggtgcttctacagtgtccacaactcgtgccccagacatctttgcgggctacagctggtacacgaggtgaaacgagtggatggcaaccgtcaaattatcggatatgtactaggaactcaacaagctaccccagggcccgcatacagtggtcgagagataatataccccaatgcatccctgctgatccagaacatcatccagaatgacacaggattctacaccctacacgtcataacgtcagatcttgtgaatgaagaagcaactggccagttccgggtatacccggagctgcccaagccctccatctccagcaacaactccaaacccgtggaggacaaggatgctgtggccttcacctgtgaacctgagactcaggacgcaacctaactgtggtgggtcaacaatcagagcctcccggtc

SEQ ID NO: 700069 - DNA, 893 bp, Homo sapiens
  misc_feature (5)..(5): n is a, c, g, or t
  misc_feature (119)..(119): n is a, c, g, or t
  misc_feature (122)..(122): n is a, c, g, or t
  misc_feature (172)..(172): n is a, c, g, or t
  misc_feature (266)..(266): n is a, c, g, or t
  misc_feature (272)..(272): n is a, c, g, or t
  misc_feature (287)..(287): n is a, c, g, or t
  misc_feature (308)..(308): n is a, c, g, or t
  misc_feature (311)..(311): n is a, c, g, or t
  misc_feature (340)..(340): n is a, c, g, or t
  misc_feature (370)..(370): n is a, c, g, or t
  misc_feature (405)..(405): n is a, c, g, or t
  misc_feature (474)..(474): n is a, c, g, or t
  misc_feature (477)..(477): n is a, c, g, or t
  misc_feature (668)..(668): n is a, c, g, or t
  misc_feature (670)..(670): n is a, c, g, or t
  misc_feature (677)..(677): n is a, c, g, or t
  misc_feature (689)..(689): n is a, c, g, or t
  misc_feature (692)..(692): n is a, c, g, or t
  misc_feature (717)..(717): n is a, c, g, or t
  misc_feature (719)..(719): n is a, c, g, or t
  misc_feature (762)..(762): n is a, c, g, or t
  misc_feature (766)..(766): n is a, c, g, or t
  misc_feature (776)..(776): n is a, c, g, or t
  misc_feature (784)..(784): n is a, c, g, or t
  misc_feature (786)..(786): n is a, c, g, or t
  misc_feature (853)..(853): n is a, c, g, or t
gttgntgttcatgttttgttaggtacttgcttgtctttctgggtactccttgtttacccgcaagtctgtatctctggcggtgtcggtgtagctcttgtaacctggtatgtgtagcttgngtnagtatagctgtttatgggatcgtagtattctcttgtctcgttgcctgttntattgggagggctagtatgccaattctttcggacgttgtgttgattgtctcctcttaagtacaaacagcgcttattgagtgtcgcctgccagcnggagcnaatcacttccagcgngaaagggaggaggaaacaccngcntaccaagggcctgggaaccctgagtagtngagcccaaagagagaagcacccagaaagcngaagacaaaggactgggggacaaaagaaaaccgtnaaggacgccacaaccagcaaaaccacaaggaagaaacagagaacaaaggggaagacccccaacacggcnacnaccaaacagccttcgaccgggatgaagaaacagccaaggcctccaagcagcatcgtcctaaacgccaccacagccagacccatggcaaagggtccaagtgcgaccttaatgggaggccccgggaggccgaggttcggttcctctgttacgagggtgcaggtatctctggggactacatcgatcgcgtggantntcccttntcctgctcttangtnctgaccattcgcactcctcggctcngnccccaccctctcctccggcccccacccagtgctgcaccgcagnccancctctgttanccttcccnanagcctgaggagtacatggcctacgttcagaggcaagccgtagactcaaagcagtatggagataaaancatagaggagctgcaagatctaggcccccaagtgtggagt

SEQ ID NO: 700070 - DNA, 278 bp, Homo sapiens
gcggcgctgagggctttgtgcggcttcccgggcgtcgcggcccaaggtgcttgcggccttgggcttggagtccgatttccggattccaagccaagcaaggtgttcggccaattgccagccagaattgtggaatgggccacagacagtttggggggagcctgtttatgtacccaaggcaaggaaacacccccactggaaggcctcccaccttgggaatgatgtggcccctccaaaggcacaaaattgttgaggaccaatcccctgacttttgggcccag

SEQ ID NO: 700071 - DNA, 2669 bp, Homo sapiens
gctcctccaacctcccaccctaaaacatgcaacctttccttacccctatctgtagttaaccccgctgttagggatatttccacaccctcagttgcaaaacaccacacccctgtccacattacccttaaagaccccacactattgaagccaatctgctcctcccaggcaccacctcccaaaaagctgaactcatcaccctcactcgagctctcactctagcagccggacaacagttctctaatttaggaggatttaaaaccctggtagggacagtaatcttcatcactttttctcccctgtgttatcccactaataataaaagccactaaaactcttattgaaactacagttagccaccagacaattcagactatgctcctgctacaacgacacgatggataccaacacatctctcaagaataccctaaaaattaagtttttctttttccaaggagcccacaccacccctaagtcacgcctgaagtagttattgagaaagtcaccccttttccctttttactataaccaaatagacaggaatgaaagattctccccggggtctgaaagcttgaagagatgagtaactcctcccttctcaggcccagtcccaaggtgcaaggccagttgcgccagcagtgtgcatcagcaagacagcagaagcaggaagacagccggccagaagacacctaccctggctggaagacacgtaccccttgaagacagagagaggggccgtctgggtactgtgcagaagttacatcagactgagacacttcttgtttacaggaaactataaaacccctgcctcgtcctcacttggtgctgacgccattttaggcctcagcccacctgcacccaggcgctcgttaaaacagcacgttgccccacaccgcctcatgttgtctgttggcaggctctcggggttcgaaccaatacaagaacctttcataaactttaccttaaacattacagtctaaaggccataccattcctcaggcccaaagctgaatcttcccagcattgtttctccctcctcacttctcattgcatctaatcagtctagagactgtcccattccctagtcctctgtcctacagattctatctctccgaagtctccctacctgtccccacctcatcactctctcaggcccaaaataaggcctcatccctttgaccctggatcagcctcccggtttcctatccggcctcgccgcccccactgtctttttcccttggagtttgcttcccaccacactcccagaactttgccattgcagcagttgccttcgggtttgtcaacagaatcacctgggggaacttggtaaaaacatcccagactacttaatctgaacgttttacaaaactccccaggcgattatgaggcatagccaggtttgcaaactgctactctaaatccttgctacacatagggaaatgatcagcaagctcctgggaatctgttagaaacacagaatgtcaagtcccacccctgacctatggaatcataatttgcatttgaacaagatccccacaggattctcaactttgagaagctctgctctacagtgttgtcagaccatgcactccacaaatatttactggattttctctgtatcaggctaggaattgggagggtcaaggaccaaggtctttgactttgagaagttcacagaaccatcagtcagtcccctgctgtgccttcagaccaagtccagacttctgtactggacagctgggactattttccagccttgtcaccagctttcctgactagcacttgacataagagccaagctggaccactggccacttctcatggtgagtccatgcctgcctgcccacacagttgtcacagcccaggccacactctacccttctctgcctcaaaaaccccaggagggatcctttgaggtccatcacatcaccctttcttaaaattatcccagatttccctgctcagatgaaagacaggaattcccataactttgttcctaccgccttcatgtcattgatctcattccacttactcttttaaagtcaaagcgcatctcccttagctacccagtaaagaaggcatcatggtaagcagcttatctctccagtagcaataagctaacaactgtcacatcaccaaatcttaaaatagtattactaataattgaaatatgttaaataaaacatggataaatgcaatcagtgaaaacctcatcaatcatccccatctcccacttcaaatttatttagctatgaatttaagcaaagtacaaatgggttgcctctcttaagccaaagagaaataatttctaaattagataacacttacagctttccatacacctataataatgaaagactgaatatgctgaagatgaattatgtcgaaaaccaactacttttctgtagttgaccatttaacttcacataatacactacaaatttgaaaacacttcagatttgtattacaatcaattaaggaggggttgagaaaggagagagacgaagagaaagacaggaagtagaccaaaatatagaaaagggacacggatctataccaaatatctggctgctctaaaagtaaaaatataattagattcgttttttaagaagattaaacactggcaagaatgcctgtcttaatcctatccaaacgctggaagttctgttctc

SEQ ID NO: 700072 - DNA, 276 bp, Homo sapiens
agcggagggggagccgggccgccgtcgctgccaccgctgtccccgcgccctgcgcccggtggccgccactccgagacggaactgacggcggggctgcataggtgaatggacgcgcagcgtcggggcgaggctttgagagcgagccgtgagaacagaggcagcgagtgcgcggcggcctgtctgtcttcggctcgctcgaatgacgacatgagcgctgaaagaacgatcatgaccgtcgactactgatatcgctggctcgtagggctcagtctggtg

SEQ ID NO: 700073 - DNA, 535 bp, Homo sapiens
gatctggactgctctgaaaagccatcctttgacattgttcctcatccgacctccttgacccgccgacagatcgacctccgacgagcgcctcctccgccgccgcggactccggcagctttatcgccagagatccctgaactctcgacttatctttattaatcccctgcatcggatcaccggcgatgccccaccatgtcagacgcagaccgtagacaccagactccgaaatcaccaccaaggacttaaaggagaagaaggaagttgtggcaagaggcagaaaatggaagagacgcccctgctaacgggcaatgctcaatggaggaaacagggagaagcaggcaggctcgaccaatgcagagtcagacgaaagcaagcaggcaaacgcacgggtgcgcggaggcaagcaaggcagcgaggcacagaagcacaggccgcacgcgctgagcccacgagcgaaagggacgcatcgaagcatgcaggacgactagactcagcatccgaggcaagcggcgcagccgcaagcataagagatacg

SEQ ID NO: 700074 - DNA, 506 bp, Homo sapiens
  misc_feature (125)..(125): n is a, c, g, or t
cgaccggcagagcgcccaagttggatacactctggaaagctaactaagtgactgtctatggccccaattctatgaaatgctcaggacaggcaatctacagagaaggaagattagtggtagccagnggttgggggagatggaagttggggctgacagctaaagggtaccaggtgtctttttggggtataaaaaatgttctggccaggggttgtggcttatgcctgtaattccagcactttgggaggccaaggcaggaggattgcttaagcccaggagttcgagaccagcctgggcaacatggcaaaagcttgtctctacaaaaactacaaataaagtagccgtgctcattaggtggctcatgcctgtaatcccagcatcctgggaggcccaggtgggtatactgcttgagttcaggagttcaagacctgcctgggcaatgtggcaagaccccatctctactaaaaatacaaaaaacaaaacaaaacaaaacaacaacaacaacaagg

SEQ ID NO: 700075 - DNA, 207 bp, Homo sapiens
  misc_feature (98)..(98): n is a, c, g, or t
aactataattgtgtgtggggtgtgggataactagctaataagtgtgtgtgtgtatgtgtggcatgtggggtgacttttataaatgtgtggggtgactnaccatgtgtgtgtgtggtgtgtggggtaacaaagggtgtgcatgtgtgtgtggtgtgtgggtggctaaaaattgtgtgagtggtgtgtggggtgacggtgtacgcgtgt

SEQ ID NO: 700076 - DNA, 393 bp, Homo sapiens
  misc_feature (24)..(24): n is a, c, g, or t
  misc_feature (37)..(37): n is a, c, g, or t
  misc_feature (65)..(65): n is a, c, g, or t
  misc_feature (204)..(204): n is a, c, g, or t
  misc_feature (215)..(215): n is a, c, g, or t
  misc_feature (312)..(312): n is a, c, g, or t
  misc_feature (320)..(320): n is a, c, g, or t
  misc_feature (340)..(340): n is a, c, g, or t
  misc_feature (378)..(378): n is a, c, g, or t
gcacccggaaccaagagctggaancgagagccgcatngccagcacaccatccaggccctgcagancgagctggacagcctgcgcgctgacaacatcaaactctttgagaagatcaagttcctgcagagttaccctggcagaggtatcggcagtgacgacacggagctgcgatactcctcccaatacgaggaacgcctggacccntttctcctccnttcagcaagagggagcggcagaggaagtacctgggcctgagcccttgggacaaggccacacttggcattgggcgtctgattctcttccaacaagatnggccccgnaccatcagcttcttttacancttgttcctgcactgccttggtctttctggtgctgtanaagctggcatggagt

SEQ ID NO: 700077 - DNA, 755 bp, Homo sapiens
gggagagccatgcacgaggaatgaaaggaagcgccggctagaagtttcagtgagcgggagctggcagaggttgcagatgaatacattgttttccctagaagagaataagaagtccagagggacgcctgtcagcctttaagcaagttcccccggccatcacccacttgtgctgcaggagtgtgtcagtgatgatgagacatctgaacagcatgacccctgaggaagaggctgagggagacatgaggcctgggccataagtcctctgagccaactgtggcaagaaccgatctcgcaaacatttgaggctgagaaggaattcacatgagtaccatggtccaacaggcccctcactgcgctgtctgtatgatcttccagacttatcatcaggttgaatttggaggctttaatcagaaactgtggaaagtgcttcagatttaggcccccagaagcagaggaccaagccattgattccagaaagtgtgcgttcacttcgactggctgcaggagcggacatcaagctttcatactccttatcgttgagcgaggatggcaccaagacatacttcgtttctctgcaagaatgtgcagcagtccgggtccatgccagtcgctatggggtccccctgcgaaggattctgaagactggaatgtgttctcggtgttcagcacaatgcctagaggaggactgctgttaatgctcattacgaggaggggccctgcaacagcaatgatgactggtgggtcacgttcaagtg

SEQ ID NO: 700078 - DNA, 110 bp, Homo sapiens
agtcgaggcgtaccctcagaaagttgtttgtgatgtgtgcctctactgacagagttgaacctttccttgcaaagagcatgctttgacacactctttttgtagaatctgca

SEQ ID NO: 700079 - DNA, 147 bp, Homo sapiens
gggggggccaggtgtggtagctcacactttttttcccagctacttgggaagccaaagcaggaaggtggcttgtgtccacgagtttgaggatgcaccgccacatgattaggccactgtactctgttctgggtgacagagcaagaccct

SEQ ID NO: 700080 - DNA, 255 bp, Homo sapiens
cctgaggcaatgcctgtgcttgcagtggggacatcctggctccatccgaaaggctgagtgtgtcccacggctgaggtggccacaaacaattgctgcctgtccaggccatgctggggacggcggccccactccaacacacaaagggtgctgtgtagagcgctggcttgtccaccccggccagtggacacactcatcacagcccaacccggagccggggcagctgccaggtctcctcaaacagccttcctccccaca

SEQ ID NO: 700081 - DNA, 143 bp, Homo sapiens
cacagcataactcccttaggtctgatcctaggttaaataagaaaaaaaacaaacacctactcagcacggcaatcacttactatcgagaaaacagccaagacatgtgagagataaagtcagaggggagaggaacagcgtagtaa

SEQ ID NO: 700082 - DNA, 320 bp, Homo sapiens
  misc_feature (14)..(14): n is a, c, g, or t
  misc_feature (137)..(137): n is a, c, g, or t
aaaaggggttgggnccccccccccccagggttgggggaagaccccctccagggcaggggggccccctccgccctgtggttccccccctttttgttttttaaaggcatgtcccttttttgttcctccctaactccctncccctaaaaaccctggggcctgggggcggttttgcccccctttcccttttttgggtcgctccccggcccttggcccttgggggggcccgggtgtgtgtgtccttggggcctgggggggtgttgttcctccgctccctccctcggccctgcccttttgggccctttaaattgccctttttttta

SEQ ID NO: 700083 - DNA, 1022 bp, Homo sapiens
gcatctagcctgatctttatatattactgtgtacaacgatttttttacacaaagaaacttcatgctgtcttaataaattcagtgtgtagcttcaatgggatagttccaaaagtgaagatactgtgaggaataagtgcaaattatatatattcgcaaaaattcttagcaactcttaagtcttgtgtctgcaatgcaaattgtactccttgacagttgatagattatatattctatccatccctcaaacttgcattccaaatatatttattatttcaggccaacagatgagctgtatatgtcttgaaatctgagacactatgtacaataggatgtatctgtacaaataattcccacgtgacgtggaagatccttcgttggatgtcacaacacctacactttaaggatggtacggatgccttggaggtccatggtttacaatttaacaacataatacagattctgaaatgtcaataggagatctcaactgaaagagttcacccaaatgagtgacatgacctcccatcccctgatggagaagttgtacagttggagaacagacccaaggagtgctgaaagaatccagatgggaccagagtatctgacctgctttaccatcatgaagtcgtagggatagcgaagcagaatgtccataatacatagtcaatatagcaatctactctgacaaaactggaccaacagagcgtagcgaatcaataccgtattatcccacacgaagataaccaagttcagagctagaatccacgaacgagaccaaatacaatagggatggaacaagcatcacagctagcacaaaaggaaccaaataccatcgatacatcaaagagaggaggagaaaaacatcaaccgaggagaaacgaacacgaacgagagaacgacgagcgcctgatcacacaaacacataaacggacaggcaaacggaacaaaagagagaaaacaggacatagcaaagaacaaagacagagaaaacgaaaccagcgcgacatgtacagctcttctaatac

SEQ ID NO: 700084 - DNA, 888 bp, Homo sapiens
  misc_feature (2)..(2): n is a, c, g, or t
  misc_feature (290)..(290): n is a, c, g, or t
  misc_feature (294)..(294): n is a, c, g, or t
  misc_feature (298)..(298): n is a, c, g, or t
  misc_feature (312)..(312): n is a, c, g, or t
  misc_feature (319)..(319): n is a, c, g, or t
  misc_feature (327)..(327): n is a, c, g, or t
  misc_feature (334)..(334): n is a, c, g, or t
  misc_feature (418)..(418): n is a, c, g, or t
  misc_feature (494)..(495): n is a, c, g, or t
  misc_feature (504)..(504): n is a, c, g, or t
  misc_feature (534)..(534): n is a, c, g, or t
  misc_feature (552)..(552): n is a, c, g, or t
  misc_feature (570)..(570): n is a, c, g, or t
  misc_feature (608)..(608): n is a, c, g, or t
tncagctccctttgaaggcggatccatacaaacaggctgaccatcagggctggtcccaggccaccaggctgggtgcaatgcagaaatggagatctgccccggggaaggcaggtttctgcccaaacggagccacgtgaggacgtctttggggatgtgtctccaagaaaagtgtgggctgccttcctcaccctggatgcctgtgggctgccttcctcaccctggatgcctgtgggctgccttcctcaccctggatgcctgtgggcagcttcctcaccctggatgctgtgggntgcnttcntcaccctggatgcntgtgggntgccttcntcacccnggatgcctgtgggcagccttcctcaccctggatgcctgtgggctgccttcctcaccctggatgcctgtgggcagccttcctcancctggatgcctgtgggctgccttcctcaccctggatgcctgtgggcagcttcctcaccctggatgcctgtgggcanncttcctcancctggatgcctgtgacttggtttccatggnggcttcctaagctcaggnaccccaagcctccatcanatctaatgacccgacctgtctctgaacacacctgtgtngtccccgagcccctcacaagcccactctggaacccggccacgcatttcccatcctgaaaggtccagctcataggccggccatgtgttcccttaccctggttggtccctaactggtggggagctgtcccttcttggccctagtgtggcacttcacacgacaaatgtgtcctgtggggtggtaatctgggctcaccctgaatgaaggggatgaccaagtgcaaagtcactgggcggaatgggtccggggcaaaaaaagaaaatggccgcaaagagagtgaag

SEQ ID NO: 700085 - DNA, 1201 bp, Homo sapiens
ttttttttaggttggagcgataaaaatatgcagcatgcaatatatgcttatatttcattttaatttctgatatataagtgaactttttggggagaggtactgaattcttggatgttttttggtcatgtggttctcaagtgtgcaatataacaagtgttaaccaaactttagaataatttcaaagtgtgtcattaattatagataagccttatattattaaacaaattatttggctattatattttgtgtggttagcgaggaagagagtgtgattaaggtggagggttaaattaccccctattaaagtggctcccattcgtgcattgggtattttcgagggtgggaaaagtgaatttatctcttttaccaagtgttgtgtgcaaaaccacttgtgtgaaatatcctataagagggataacttgtggaaggcgtggtgttaggtattattcaacatttaatttttgggtgtaacactttatattacactatatagaaaagagtgaaccaattattcttttgggtggtgtgcaaccccaacatattgggggggtggcaggcaaccaggaaaaatgtgcaaatctggtgtctacaaaatatttgggggaattttggggtaacaacttggatttctggagtgttagtgagaaaacactggggtcaccaggggtgtctggcgttggaattctacaaacctatggtgacacttggtgcgaactggtgccaaataaaaactattaaagctttttggggtaaaaaaaaaaaaaccaacaggggggggcggggcacgtcctccagagaaagtatatccccctgcgaagaggggggcccccaacgtcttaaaggcgcgtaaaccccaaagacttctacttgggtgcaccaaacgggggggcgcccgctatacaagggaggaggtgcgcaaaatatcaaacaaacgccaaaggacctgcgggcccggtctctgtttttacacccaacccgctccgtcggcaccgcggcgacaacacccgccgctaaggcgtgggacaccttgggcgccgacgggaccctctacctcccgtggggggtgtagaacaaacgtgggcgcacaacaaacttccctcacagagaaacttaacagcccccacagcggaccacactataacacagtttaacgccgtcatactcagctgctgtctcacacacgccgcccacataatctcgg

SEQ ID NO: 700086 - DNA, 855 bp, Homo sapiens
  misc_feature (2)..(2): n is a, c, g, or t
  misc_feature (181)..(181): n is a, c, g, or t
  misc_feature (190)..(190): n is a, c, g, or t
  misc_feature (195)..(195): n is a, c, g, or t
  misc_feature (209)..(209): n is a, c, g, or t
  misc_feature (213)..(214): n is a, c, g, or t
  misc_feature (226)..(228): n is a, c, g, or t
  misc_feature (230)..(230): n is a, c, g, or t
  misc_feature (235)..(236): n is a, c, g, or t
  misc_feature (244)..(245): n is a, c, g, or t
  misc_feature (269)..(269): n is a, c, g, or t
tncagctccctttgaaggcggatccatacaaacaggctgaccatcagggctggtcccaggccaccaggctgggtgcaatgcagaaatggagatctgccccggggaaggcaggtgagtgtaggaaggagggagggctgcgagaagctgggggcagcctccatccccctgtggcctgggtggngctgtgcgncccangcgcccgacgcagnttcnncacactgggagnnncngttcnntccctccnngtgcccttcctctgcgtggtgtgngctcctccttgagggagagagctgaggaggtggcattacttgcttcccatgactcacccaaaggaagatttcacaagccccattggcaaatgggcttgccaggacaaaggctcaaccatgatacaccacccatagtcccacggggaccaagacatagaaacgggatatacactttgagacttggggtagacgggaagttaatagccataggggaaaagatcaaaacacaagagcaccacccatgggaggagattggagaacagacctggcatcacaaaatggagttccacacaggggaggaattagcgaaccggacgggacgacataaccacaggttataagctacaacatacgggaattgaggaaacttcccaagcgtgaagaggaaagaaaccagggaacgaaaacgagagcgacacacgtttgatagcgattacacccacggttccggctgccgaacaagttgggccgcgacgagaggcgggagaccagaagcaaaagtatcggacgtcggctcgaccaagaagcgcatgcacagaccacgccaccagccggccagagacatggaaaagggcagaaatccgaa

SEQ ID NO: 700087 - DNA, 1466 bp, Homo sapiens
ggctgagtgtttcatataagatgtgtgccttttgtcctggacctgaactatctggctgattgagaacgttctgtgacctggtgacttggtggacggaatgcactgcacacggacaacgtctactcactgagggcctgaactggctagcaattgtagtctcataggagcgttttctgggagtagacaagtcggaatctcgctctacatctgggtaggaattcatacattagccttggaagtataggctggtgtggacgtgccgatcaatcttccggcactacaagtagaagccattggcattctaggcacaactacacgaatggctgatgcaagagatgtgaccgcaaagttgagctcgtgggtgcatgaggatgcccgcatctgtcccgggaggaagcatgtggcagattgcagcagctgcatggaggtttcacttgtggagggctgtgtttagggaggagactggacgatcagtcacttacgatttggagtgggttggatagaccaggttctgagctggcggtatcttgacagacatggtgggggaaaggaaacgaactaacaattcctaattcgttccaggcacgaggagtaggtggttaatacctgtcgatggttacttgcgtgacaccagcgaccgattgcgaattccactggttgtggggaacggcgccattggtgtgccctcgcaatccatatggaatgtgaaccgcgtccttgctttggaagttcgccaacgaggggaacgcttttgatccccttgcgtttgggacccggaagcggtgcttaagaactagattcatatccggttagttagggcctgcttgctgtgccccatggggtccggcgcaccttcgagtagcaacagcagttctaacgcgaaacggggccccattggacatcatttgttggcaagccatcgagacacagtcacaaatcagacggaacttgatgtcaaggtagcgcgtgcggcaaaggggcgttaggaggaaattccaccgaacctcgagttttgggattgccattggtgtgccaagttggaagtctatctcacctaggaaacgattcgcttcgtggtaagggcggccacttttgggaggttggtgacgacaaaggacccccccgttgaagcagttccaggtcacacaacacacccgagctgcggcgttgaacatcgaagcgtctctctcggggaccgagtgccaagggatggtcccccacatccggagtgtcacacacagcggcggggggggacccagtgatgctctagtggcggggaaaccaggcgcgagccgtgccgacgcgaaatatcacgcatccgccaggacaacagcgggggcaacacacgatacaccacgcgaccccacagggaactgcaacatggcgctgcacaagcacgaagtcgcgcatacggccaaaagcacctcgatgggaaaccacagtgcaccatgatcaaaacagggccg

SEQ ID NO: 700088 - DNA, 1412 bp, Homo sapiens
gggcgaaacggcagcttggtttcagctggattgtactgtcctatgtgcatggctcgagtgcctccgtgctgatctgcttcatccccagctgagctgctgcctggtgaacgaggaagccatggtctgctccgagattaacatggaagcatcgaaaaattaatgctgatcagtacaggcgaagattcaatggatggtagtgcgcgaatgcgcgttccatagggcgccctgctggaagcctctgaagcctcggtagtgaagtgcccataatacagcatctttggggcgacagtctgggtgaatcataacggtccagtcgaactacatcgtgcaaggtctccaaaactggctctcattggacagaaacggcatagggcacaaaacctctcaggcgtcactgaactcatagtcattagacttagaaatactaccaatagatcgtcttgcaaagagagagtaccctatgcctgtgtgaccgatggtgcgcacttggtaccttgagtcgcatgtgtgcccagtaagcccagtagaacctaagagctcgatgataccctgggacgtcctttgtgttgacaatgcacacgcaataagacagcttttacagctttggtagacctatttgtacggtgtgtgataactaggggcttctccgagagtcgccaaaatgggaaaaaaccatcttgtgagtgtcgtcgcccttggcacggcatacgcaatagaacccctgctgtccaagggctctctctcctgcactgttagattgcgtttgccaaatccatacattgcagtgttgcgaattgcgaacgcaaaggcaattgcgaagccatgcattcgcaaagagggccttctcaggttcgagttgcaagtaatgcttgaaaaggcattataagactaggcttttcagtgctggcagcaaacgatatgctttttgaaccggcagaggaattgccccaacagaggcatggttcttaggcaaccaaagaacactttactgctacacatggaacagattccgacggcaaagagtcgtaggccttgagaaaccacctattcgtaacgaaagttccaactcaacttagactcagaaatcgtggagcgtaagtatacaggcggaatatcaaacagctcgcaatatggtccaaggcgatttgtgtatacgtaccagatagaacccagtgttaccaattttgaacgtttgacactcccccccttaaatgttgaaattcacggcattctacattgctgtaaaaataataaagtcagctatggatgcccacaagacatatgaaattgtctgtgtgcagacataggaaatatggcgcttagatacaggagtgcaccaaaagtgatatataactatgtggcaatagggctatcataatttgtacacgaacattctggtgatcacgcgttca

SEQ ID NO: 700089 - DNA, 462 bp, Homo sapiens
agatgggattgggattgttcataaataaaacataacgacatggcggtcttcttcatggaataatatctatatttttattaaataaagattaccagaaatagcactggacttccattctcagttcatgctgcactctagttcacccaagacaacctcacattgattgagcatcagtattgtatgccaggttactatgtgacatggtacacaaacacaatgtgagatgtgtttgtgagatggacaaacaaaaatgtgagacactaaaatgtgagatggacacaaacacaattcagaagtattgttgccattagaccacaggctctttgagggcaggggatttgttcttatttgccattgttttcccagaacccattcctgcctggcacatagtacgtgctcagtacataaggtacaactgatgaaatgaccagctcaagcagttcgtggtctcctgctagctga

SEQ ID NO: 700090 - DNA, 184 bp, Homo sapiens
ttttaaaaggggggcctgggggggttttccccctggggggggcccccccttgggggttggggccccccgggggggccggttttcccggttttttcccggggggccttaaggggtgtttgggttccccttttttttttttgccccccccccccccccctttgggggctggttgggcccctgggga

SEQ ID NO: 700091 - DNA, 148 bp, Homo sapiens
cgcgccgaagccagccgtcatcggttcccagacagctgaagttgatctcttagaagatgatggaagttccaatatttcaatatttaatgaacactagtacgaacatagaacaggctgttctaggacaatgttggatcagaacacatga

SEQ ID NO: 700092 - DNA, 346 bp, Homo sapiens
aagatattaaatattaatgtgtgtatttacttggattttacaagttctcatctatgaagattgaccaaattttaaaaaggctttctatttaaacaatcgataaatggtacagtaagataggcggtaccatgtacatgtgaatatcttgcattaattacaacatcaattctatatttcacaagtgacctaaatgtgcattgatatgcattaaaatatggacttaagagagctattcactcatggatttttgtctcatgcaaaactacatctaaatcatgggtctgatgcatgtgaaaaatggaaataatcacctaaaacctatctatttaagggaaacttgtgtgga

SEQ ID NO: 700093 - DNA, 116 bp, Homo sapiens
  misc_feature (8)..(8): n is a, c, g, or t
  misc_feature (10)..(10): n is a, c, g, or t
  misc_feature (83)..(83): n is a, c, g, or t
gcagtgcntnagaaattccttgtgtaaagcttgcaaaaaagacctaaagggaattgtaatttggttataattcaggatttggnaattctaataaaggattcaaacataaaaaaaaa

SEQ ID NO: 700094 - DNA, 117 bp, Homo sapiens
atgtaccttttgtgattgtgtattctgatacttccaatacatggtatgaggcgcaatcccaaatcacagaaaacctgcagctcagctatacctacaactgccctcacaaggacgggc

SEQ ID NO: 700095 - DNA, 438 bp, Homo sapiens
aatcttgatcataggtctgtcctgtgtagaaaaggatgtggtagattcactaagacaatccagggagaatgctgatgatcatcatgaagaagacatggatatgagtgactgaatatagcctctgagggagtccacactcgtaaaccatgcactcagtcgtcatatccttctgtagtgattatctataatgctgtatttgttcatctcaaacctagatgtaatacagctctgacttatatatggttataaagctccagatactcatattagttattcacatcaaagaagctttcagaaaatggtacgaggtaaccaattcttgtcatggtgaaatctgattgagtaaccaagcagtattactattctggtgctgcttcatcacaaacatgaagagctgcatgcatctacagcaggcatggattgtttatgtcgtatgat

SEQ ID NO: 700096 - DNA, 799 bp, Homo sapiens
gtactttgcttatctctaaccttcctcttccccataatttaacaggtgcgcaccaccatgccctgttaattttgtatttttagtagagtcggggtttcaccatgtggccaggatggtctcgatctcctgacctcgtgatccacccactttgggaggctgaggcaggcggatcagctgaggtcaggagttcaagaccaccctggtcaacatggtgaaaccccatctctactaaaaatacaaaaattatccagacatggtggcacatgcctctactcccagctacttgggaggctgaggcaggagaatcgcttgcaactctgccttcagggctcaagcgaacctcccacctcagcctcctgagtagctgggagtacaggcatgagtcaccacacccagctaattttcgtattcttcttcagagatggggtctcactatgttgctcaggctggtctcaaatcctgggctcaaacagtccagctgccttgacctcccaaagtgctaggattacacggcatccaccatggcaacccagacaacatatatacccttatttattaattgaattgagtgcagttatatatagactaatctgagacagagttcaccgtgtacccaggctgacgacagtggcgtgattctccagttcatgtgacctcggtctcatgagttcaagcgattctcggccaagcgcggaatactgggataccggcccgtcacacctcggctacttccgatcacaaagacagggtatctacgtggcagctgttaagggacacggtcaccgaagctcaatgcgct

SEQ ID NO: 700097 - DNA, 1091 bp, Homo sapiens
  misc_feature (347)..(347): n is a, c, g, or t
gtcgctcctagcgtctctgctctccctagcgcagcgccgccgtccggcccctccagcttcccggaccatggccaagcctggatgcgcaccgattcgatcgccaatcaaagcctggactggcagtgcatgctgcggtcctggatggagcgatgattcatcaaggcgcttcgatgcaggaacgggattccgcctcgttggcctagtgatagttcctccgtggccatcttgatatgagacacctttgaatccagcactacattgaccatgaacggaccggacccatatcttacctcctgtgagacatggttgacaggtacaagttgacacttctagtgggccggttgtgncatggtctgggaggggctgaacgtggtgaagacaggccgagtgatgcttggggagaccaatccagcagattcaaagtccagggcaccattcgtggggacgtatcatgcattcaggttggcaggaagcatcattcatggcatgtgcattcagtaaaaagtgctgacgccgaaatcagtctatggtttaagcctgaagaactggttgactacaagtcttgtgctcatgactagggtctatgaataagaggtggacacaacagcagtctccttcagcataggcgtggtgtagtcactggacacagctcttcattccattgacttagaggcaacaggattgatcattcttttcatacgacgcattaattggcacaactaacagcgtattggacagccgggaacaagacttaacacaaggggcgagccccttcaaaagatatcactatgagaggacaccccaacattatagggtaccacagagtctcgtgttaccagatgtgccataatagtacgccctattctaaagcgccacgaccatggccccggcgttaccacccagtttcggacttggtaacacagcgcatgcatgggaaaaactttgagtcaggaaccctaatctcttcggggcgcactatatgtgcacaaacgactccaaggaacatcaagcactataagaacacatacccttagacgcaggttatacgggttacacactcaccaccaacatctcgatcataacatcggact

SEQ ID NO: 700098 - DNA, 811 bp, Homo sapiens
  misc_feature (67)..(67): n is a, c, g, or t
gtgctgggtcttgtctggtgtggtctttgctgggctggtgaagtacatgaactcaggccggttgtgncatggtctgggaggggctgaacgtggtgaagacaggccgagtgatgcttggggagaccaatccagcagattcaaagtccagggcaccattcgtggggacgtatcatgcattcaggttggcaggaagcatcattcatggcatgtgcattcagtaaaaagtgctgacgccgaaatcagtctatggtttaagcctgaagaactggttgactacaagtcttgtgctcatgactagggtctatgaataagaggtggacacaacagcagtctccttcagcataggcgtggtgtagtcactggacacagctcttcattccattgacttagaggcaacaggattgatcattcttttcatacgacgcattaattggcacaactaacagcgtattggacagccgggaacaagacttaacacaaggggcgagccccttcaaaagatatcactatgagaggacaccccaacattatagggtaccacagagtctcgtgttaccagatgtgccataatagtacgccctattctaaagcgccacgaccatggccccggcgttaccacccagtttcggacttggtaacacagcgcatgcatgggaaaaactttgagtcaggaaccctaatctcttcggggcgcactatatgtgcacaaacgactccaaggaacatcaagcactataagaacacatacccttagacgcaggttatacgggttacacactcaccaccaacatctcgatcataacatcggact

SEQ ID NO: 700099 - DNA, 226 bp, Homo sapiens
gcttagttattatctaaagatctggaataaacagaaaggagtatctgggttcaatataaggggttgtggagcccaaggttcttactatgcagataaacctccaggtagcaggcttcagggagaatagatggtaaactgatttttaatcagaacttaaaaagtgtgtccacgactctcttcgcgacgagataatttctagtgccctattatcaaggagtacctgagc

SEQ ID NO: 700100 - DNA, 571 bp, Homo sapiens
atcaatagtagccaatcaaatttgtatttaaatgagccttagttccgaaaatgttataattctgttggcacctcgattgtgcctatataaacaatcctcatttttccccaccctgggagcgctaatcaccattctttggtgtagctcgcttacactctgtacttaaatgaattcttttaactgaatcaggagccttttgattattttaggtgacagcatctcaattacttcaaatatttccctaggaataagacaagcatctatcattacaaaaataaattcgattaaaaaaattaggccagacgtgatgctcacgcctgtaattccagcactttgggaggccgaggtaggcagaccacttgaggtcaggagttcaagaccagcctggccaacatggtgaaacccgatctctactaaaattactgattcagccaggcatggtggcgcttgaggtcaggagttcaagatcaggctgaccaacatggtgaatcctgtctctactaaaaatacgaaaaattagccggacgtggtaccgggcgcctgtaaaccaggtactcgggaggctgaggaa

SEQ ID NO: 700101 - DNA, 252 bp, Homo sapiens
tggtagtatacctggtccttatctgctgtatctcaagccactctcctcccgttactctctatattagcttctctactctggaaaactttctactgcccccaggccttcagaaacacccttttctgtatagatagataggcattttctcgcacgggcacggtggctcaagactgtaatccaagcacttaggaaggccgagattgtgccactacactccagcctgggtgacgaaagtgaaagaaactccgtctc

SEQ ID NO: 700102 - DNA, 329 bp, Homo sapiens
cacatagtctgtcccacaggactctgccggtgcctaagattccgtgaagcaggacaatgtcgaggtttgctcctgaacggtaataggtgaatgaagggaaaattctggggaggtctgaaccatagaggacatttaggatgactggttaactgcggatcgcaccatatcgggcccgtatttcacattgatagggtcctgttacatttctcgtgacactgggtagaatgagtatcctgtatacaagtgtcgtctgttttacccctgtgaattgacgggaaggctctgaccgtgtagccaccaaatgtaggtgatagtcccactcttatggt

SEQ ID NO: 700103 - DNA, 481 bp, Homo sapiens
  misc_feature (71)..(71): n is a, c, g, or t
ataacacacaggcaaggggcaagccccccactctttactaattcaactatatgcttaatcaactaataggngaagcacattgattccaaaactcccaccaatcagcctagcttccagggtcatcctattttctctatactcctgagtcttcaccggctccattctgttcatttatagaatcacattatccaaggctaatgagtcctcattgagcttagcacatcctgattcatttctaaactcaccagaatcattggttgggagactgggtgcagagacagagggctggggcacgggagaggggatcacccaggcgggggcaggggcgagccactaaggctaaaaaggcacctgggaatggagttcaggccgtttggtggggggcagaggtctatgagttttttaaaataactgggttaattcaggggaaggagttggtctttttcccgacccaaaaagagcgtaagaggtattatatgag

SEQ ID NO: 700104 - DNA, 218 bp, Homo sapiens
  misc_feature (28)..(29): n is a, c, g, or t
  misc_feature (36)..(37): n is a, c, g, or t
  misc_feature (40)..(41): n is a, c, g, or t
  misc_feature (44)..(44): n is a, c, g, or t
  misc_feature (52)..(52): n is a, c, g, or t
  misc_feature (59)..(59): n is a, c, g, or t
  misc_feature (64)..(64): n is a, c, g, or t
  misc_feature (82)..(82): n is a, c, g, or t
  misc_feature (87)..(87): n is a, c, g, or t
  misc_feature (93)..(93): n is a, c, g, or t
  misc_feature (100)..(100): n is a, c, g, or t
  misc_feature (104)..(104): n is a, c, g, or t
  misc_feature (116)..(116): n is a, c, g, or t
  misc_feature (146)..(146): n is a, c, g, or t
  misc_feature (171)..(171): n is a, c, g, or t
  misc_feature (173)..(173): n is a, c, g, or t
tatccagacttcagtatataatctgttnntgtgggnncgnntgntgaagggntgagaancgatncaaagtactagtagctgngcgancagctnctgatgntgcntctgagggcttngtcctgagcctccgctgctgcccttgcccnagctcagtcgccctccaggtgcagngntggttgtaagaatcgatggagccaggcttggtgatcttggtgagt

SEQ ID NO: 700105 - DNA, 653 bp, Homo sapiens
  misc_feature (44)..(44): n is a, c, g, or t
  misc_feature (76)..(76): n is a, c, g, or t
  misc_feature (93)..(93): n is a, c, g, or t
  misc_feature (169)..(169): n is a, c, g, or t
  misc_feature (237)..(238): n is a, c, g, or t
  misc_feature (246)..(246): n is a, c, g, or t
  misc_feature (256)..(256): n is a, c, g, or t
  misc_feature (262)..(262): n is a, c, g, or t
  misc_feature (264)..(265): n is a, c, g, or t
  misc_feature (275)..(275): n is a, c, g, or t
  misc_feature (289)..(289): n is a, c, g, or t
  misc_feature (292)..(292): n is a, c, g, or t
  misc_feature (302)..(302): n is a, c, g, or t
  misc_feature (307)..(307): n is a, c, g, or t
  misc_feature (310)..(310): n is a, c, g, or t
  misc_feature (336)..(337): n is a, c, g, or t
  misc_feature (361)..(361): n is a, c, g, or t
  misc_feature (421)..(421): n is a, c, g, or t
  misc_feature (444)..(444): n is a, c, g, or t
  misc_feature (551)..(551): n is a, c, g, or t
  misc_feature (554)..(554): n is a, c, g, or t
  misc_feature (571)..(571): n is a, c, g, or t
  misc_feature (581)..(581): n is a, c, g, or t
  misc_feature (651)..(651): n is a, c, g, or t
taattttctaaaacaactcagagggacccatatttacagtaggnagaatatttatgagaaagatcgggcatcaggnatatttatatatatgtntgtgtgtgtatacgtatgtgtgtgtatatatatgtgtgtgtgtgtgtgtgtatcccgagattatatgaactaaganacaagttgtgtatcttaacagcagtactagagcgcagagtttcagacttggatttataaatgctttcnncgtgtggngtttgggaanggggangnnatcatctgantttcaaaacctgangtntttctcaggnctgangtnaaaatcctacctgccacacccgggannggggagcttttccccttaattgtncatctgcgtcagagagtccagtatccctgagataggaaccactgtaattagaagattggnatgaacaggtttctcccaaaggnagattgtttgttgctgaattatgcctactgccctgatcatcagggataaactttgcatcttccaacctaatgcttgggagcaccaagacgtttcagtaatggttcancanaaacccagcattctccntccttcaagnaataaccttgtctcccactgaatttccttctccttcctttctcgggcttctgcactttgtctttcttcangc

SEQ ID NO: 700106 - DNA, 200 bp, Homo sapiens
cccccccccgggaaacccaggccctttttcaaggcctggaaaaacttctttcaaaaaagggggtcccttcagggaaatgggggccccctccaccctttttttttcccaaggaggcctttttaacggggttggcagttttttttcccttaaaacaggcaaaacttttttttcccctaatttgaaccttaagtttcaaggga

SEQ ID NO: 700107 - DNA, 387 bp, Homo sapiens
cagcgttccaccccatcccatgggttactctttggctgccattttcatcaaagactgatgtcacttggcatggtggtaggtttttttctggaggcttttatttttttaattttagagatgaggtctcactatgttgcccagcctagtctcaaattcctaagctcaagggatccacctgcctctatctcccaaagtgctggggttacaggcatgcaccaccacgcctggaccacattgcatgcattttatttaaatttttttttttttttttagacggagtctcattctgtcacccaggctgaagggcaggaaacaggactggccaccgtgccggattctttgaccgtggttttacctgtgggcaacggttatacccatgttccggga

SEQ ID NO: 700108 - DNA, 1207 bp, Homo sapiens
cgaccacgcgtccggcctgacgacctcggagcaccgccacatatatactgtgcgagacaggggtggcgcaatcttctggcatgcacttaatccctcctacgtatttcgatctctggggccgtggctccctggtcagtgtcccttcagtcatccccgagcagacccaagggtcttcccgctgagccgtctgcagcaccgcagccagatgggaacgtggtacatcgccgtgccatgggtccaggggcttcttacccccaggagccacatcagatgtgacctggagcgaaagcggacagggcgtgaccgccagaaacttcccacccagccaggatgcctccggggacctgtacagcaacgagcagccagctgaccctgccgggcacacagtgcctagaccggcaagtccgtgacatgcacaggtgaagcacatacacgaatcccagaccaggatgtgactgtagccctgaccagtaccctcaactaccaactaaacccatctccctacaagtccaggctaacaccatctccctcatgctgagcaccacccggactgtcactgcacacgaaccggccctcagaggacctgcgtcattaggatacagacagcgaaaactacaagtgacacaactgacacggcactgagagatgcctcaggaagtcacactaacacctggaacgacacctacaagtggggaagagacgacaggaacaagagaaacaacgctgcaccgttgcaacctcaggagaggctggctacaaggagcaagacaaaggaccatgccagcggctgagccgaagcacatgggacacaagggaacgacacaaacactagcaagagatgacatagaccagaaacaaagaccccgtaaacggacacacacttcaaacaccgggaaaaacacatacggcaccgaagaatcacccagtcagaccgcagacacgaagaagaacatggccacgacagacgtcaaaagcgacactgacaaaaaagatgacaagagaccagggaagatgaggacaaagatagagaacaacagaggcaccccgaaacaaccaatggagagcgaaaacccagaaacacaacaacaaaaaaagcgcacgacgaaagaagcaaaacagacacagcacgcacaacacgatcggaaccaccacaaacaaacaaacagaaccacccacaaagaccgaagaacacaagcaagcaagacac

SEQ ID NO: 700109 - DNA, 288 bp, Homo sapiens
tcctgcggagaggatgtggaggtaagtggagctggggcagcagaggcacgacagcaggactgcgctccagtgactcaagacacggatgaggagctgaggcgagctggcatggcaaacagtcttagctacgctgacaaggacgtccccaaggggaattcctcgccatgcggggcgagaaggtgctcaatgggcaacaaggagtgggtggtgcaggcggacctcccgctgaacgcaggcatccggcagagtcaacagactctctaccattcaaaccccattctccctgca

SEQ ID NO: 700110 - DNA, 139 bp, Homo sapiens
ctgcaaggctaatttccagtatctatgataggtcatatacgtatcatatgattgtagaacttgtgatattgcacaacttgaaaaaaacacactaggccaggttctatctgaaaaagcagacccaaagctcaaactgaga

SEQ ID NO: 700111 - DNA, 307 bp, Homo sapiens
cattgagccccttgatgcttccctaaatcttatatgctacaggtctgtattttgtaatgtcttttatatcgtctcatttatgctttcatctctgtcctttttcccctatatattatttagtgttagaaactgtacaatttattctatataattttcaacagtttattgcattctcatggtatagtataatatgttcctcttttctctgtattcttttgtaaattgtgtttctttgtaaatctaagagtggacaatcattatacaggttcttaatttttaacaaaatttgtgttaaaggctgttttgt

SEQ ID NO: 700112 - DNA, 405 bp, Homo sapiens
tttttttttttaatttgggttatttgggaataaaattaatttaatggcttaggatctatgacccctgccttgaaagggaaaatgggataggggagtagaagggaacctggcggtggatggggcaacagaaaagatgcgcaggcggggccctctcttcatatacacttgggagggcgccacctatgtgtgcccgaggcctgtgtgcacccgagaactctctctctcacacctgtgtggcctcccagagtgccaaggcatattgggatgcggtgtgtgtggacgccccaatcacggcgtctaagagattctctcacgagcccaactgtgtgtggccacccccccactttgtgggtggagggccccacgagctcgagacactctctcacaaaaaatatctccagagta

SEQ ID NO: 700113 - DNA, 190 bp, Homo sapiens
aactcactggacttggtctgacggggtctgacacgtctcctacgccactcagaactggctgtgagacaccctagcacggccactctcagggccactgtgcaggccttcctgagttcgatttgtagttgcatatttagctctgcacatttgaaataaaccacggttgccgcccccacacccaaacacaaac

SEQ ID NO: 700114 - DNA, 854 bp, Homo sapiens
ggcaatctactgagaactcataagacgaagctaaaatccctcttcggatccacgagtcaagcgccctgaacacatcctgcaaaaagcccagagaaaggatgtgctcatggattactacagaaaatatgcagctatcttactggtcacattgtcggcgggtgtctgcatgttcgtccgattccgctcctgatgtgcaggatggcccgagaatgcacgctacgaggaaaaccgcattcttctcccagaccgggtgacccaatacttcagtgctatgggcatgcatgcttgctcgtagagcatattccattctcacttgaaggtcctaatgaagaggatgtagtgtgccataatagatacgttacctcatgagtccaatagttgtgtagtctaaatcatataacagggtcacatgtcaatgtgggggtttgaaagtggatgaagcactatggcgtgccagtgcagtacttgaaattatcagaaatcttaaatgtttgtagcaagtgctgtcttgagtgagtgtgatttatcggctaaatggaaaatcaacgttgtcctagaagttgaatggctttgtcgagatgaaaactcgtccttttcctgtgaccataccactttttgtacatcgctctcaagggatatacgtgcatgctgttacatgccttccattcgttattctacagtacaatcagcagggcttagttcttttcacttcggaatgacatacccgcagttgtagctttgttccactgcaaataaaggccttttaaggtcctcgggaaaactggtaaaaaaactaaaaaacaaacacaacaaacaaaaaaatttgggcgcaaccccaaccaaaattaacaccg

SEQ ID NO: 700115 - DNA, 218 bp, Homo sapiens
tcattccctcagctggaaaaacacaaaaagttaccccgatgtttactgtctttttttttggcagcatatgaggcacggtggatgggcacatacaatatatataccattggaggcatcatctttggatggaaaatccagaagggatatgggtgtatgtgagaagtaccataaataagggtaggtcaatgaaggtgcaacttatacataatggctacagg

SEQ ID NO: 700116 - DNA, 967 bp, Homo sapiens
gctgagatcaataagaaatgttcaggagagaggaaagaacaaaaaatatatgctccacaactttatatttagagagagaacacttagtcttgcctgtcaaaaaagtccaacatttgcataggtagtaggggccactatattacattcagttgctatatggtccagcaagctgaacctgcctattacctggagcaaggaaatgatccctttgctctagcgaaagcttgagcccaatattgattttcttctttttccccctgtagagactgactgttggctaattttgtcaagcacagctgtggtgggaagagttagggccagtgtcttgaaaactcaactcaagtactgcacatgtgatctcttttgcacgagctcatacgactagcaaaacagctggaacaactacaggcgaaaaatacatagctgcttattcgcggcgcatacattggacaaagctaggagtgtgcatctgttgaaagtgcttcaagacttaatcattagccttattgaaatcactgtaacatgcccccatgcggttcctcattcttcccaggtgtgccaagggaatgaatcttggttcacctacaagttaaccattcactccttgcacaatcatgtcattgacacgtgccgtttaacgacaagaaactggtcactgactgggaatcctcttcagaaaccctgacgattaaaacaagactattgcggactaacttatacggaaagcctagaaactcccagctaacagtcggggacaccactgaacgtacttcacctgtaacatatagcatcggaacactacgttcaaatataagcagggtgaatcaagtcatttgaactataggtaagaaaatggctctagactcaccgagtcgctgagttacacaaaatcgacaactgtaagcatagaattagcgaaccgaacactcactgaacctgaacaatcgaacacaccacaaacacaacg

SEQ ID NO: 700117 - DNA, 336 bp, Homo sapiens
  misc_feature (136)..(136): n is a, c, g, or t
gggcccccccggggggtttgggaacaaaaaggggctcctctccccagggttttgtgtgtccccccaaaaggggagcccccggcttgggggggaaaaaggggtttccttttctttttttttttcgggggggggcccntaaataaccccccccccccgttgggctccccccaatttggaatccgggggggggggaaccccccccttttttttttttgggggtttaatttttttttttcccccggggggaggggggtcccccccccgggcccggggaaaaggtttttttttttttacttttttttaaaaaaaaaaaaaaaaaagggggggggttcttta

SEQ ID NO: 700118 - DNA, 252 bp, Homo sapiens
ggctatcacattatcgaggattaggggaagagtagcgtaggcaggggcccatgtgagcaaggtgctgggaactgcatggaagtggtgggagggagaatagcattgatttcgacagtaaagtaggggaaggccagaaaagaaacccagagggcgagaggcatgatcacagagggccttatgtccacactcaagcctttgtttggctttatccctgagaacagccagggaacagttgggaggatcatgtgatag

SEQ ID NO: 700119 - DNA, 298 bp, Homo sapiens
  misc_feature (3)..(3): n is a, c, g, or t
  misc_feature (73)..(73): n is a, c, g, or t
  misc_feature (141)..(141): n is a, c, g, or t
  misc_feature (150)..(150): n is a, c, g, or t
  misc_feature (204)..(204): n is a, c, g, or t
  misc_feature (218)..(218): n is a, c, g, or t
  misc_feature (227)..(227): n is a, c, g, or t
  misc_feature (229)..(229): n is a, c, g, or t
  misc_feature (256)..(256): n is a, c, g, or t
  misc_feature (264)..(264): n is a, c, g, or t
  misc_feature (272)..(272): n is a, c, g, or t
  misc_feature (297)..(297): n is a, c, g, or t
ganactaccctctctgctgagagctgaaggggtgacaggatgatctgcctgcagagaggagctaccctctctnctgagaactgaagagacgtttggatgacctgcctgcagagaggaactaccctctctgctgagagctgnacattcttngggacagcctgccaagcagagaggagctatcctctctgctgagaactgaacacntgttgggacacccnggctacagngnggagctagagttgggaggacatcacgncttatgtnctctggtnagtgaaggatttccaggagaggttnt

SEQ ID NO: 700120 - DNA, 269 bp, Homo sapiens
  misc_feature (239)..(239): n is a, c, g, or t
gtgattacagacccttcgtatatgtacaactgcacattctgtacatgtatccatttttggacgaataaaaaagtgaataataaatttaaaaaagaaggtctagggcacctcctggatgcgtcctcccaaggctcctaggcctgagcctctgccaggagtgggccatggggtcaagagtggggacctggagcagccctgcctaggacttgactccgtgctctgccttatggtagctgtgntacgcttgggcgagttccttaatcactctg

SEQ ID NO: 700121 - DNA, 158 bp, Homo sapiens
  misc_feature (117)..(117): n is a, c, g, or t
actagaaggtatagctgggctcaatgtacttagaattattaatgagccaactgctgctgctattgcttacggcttagacaaaaagcacccagggcagtattgagatacgattctctnctatgaaaggaatcgaattctatacctcattaccgtgcccg

SEQ ID NO: 700122 - DNA, 134 bp, Homo sapiens
gtggcgcgtgcttttagtccgagtagctaagattacaggtttgaagactgctcattctgctctagtaccaaccggtttcttctgttcttgttgatcaatgtgattcacaaggacctccttaggtaacaaacgga

SEQ ID NO: 700123 - DNA, 357 bp, Homo sapiens
  misc_feature (17)..(17): n is a, c, g, or t
  misc_feature (20)..(21): n is a, c, g, or t
  misc_feature (118)..(118): n is a, c, g, or t
  misc_feature (120)..(120): n is a, c, g, or t
  misc_feature (127)..(127): n is a, c, g, or t
  misc_feature (266)..(266): n is a, c, g, or t
  misc_feature (338)..(338): n is a, c, g, or t
gattacatattcctttnagnntttttaaaggttacatgttcaagagtgaaaataagatgttctgtctgaaggctaccatgccggatctgtaaatgaacctgttaaatgctgtatttgntncaacggnttactatagaatgttacttaatacaatatcatacttattacaatttttactataggagtgtaataggtaaaattaatctctattttagtgggcccatgtttagtctttcaccatcctttaaactgctgtgccccaaaantgtcatgacttggaaaggcaagggtaggggaaacactttaggggatatgtgggggttttttttacccttccnggggcttgtggggcataat

SEQ ID NO: 700124 - DNA, 141 bp, Homo sapiens
gctctgcgcgaattgcattgttctgtcacccccatcaccaattttgcagggcagcagtctcaggacacagtggaatctttggcctggctcacaaacctggaagagctgcaggtggccgattgggagctctgagcctctgaa

SEQ ID NO: 700125 - DNA, 719 bp, Homo sapiens
attaatcccctggcccaacccgtcatctactctaccatcttggcaggcacactcatcacagcgctaagctcgcactgattttctatatcctgagtaggcctagaaataaacatgctatgcttttattccagttctaaccaaaaaaataaaccctctgttccacagaaggctgccatcaagtatttcctcacgcaagcaaccgcatccagtaatccttctaagtagctatcctcttcaactaatatactctccggagcaattgaaccataaccaatactaccaatcaatactcatcattaataatcataatggctataggcgaataaaagccgtaggaatagccccctttcactgtctgagtcccagaggttacgccataggtcacggccctcgtgagcatccggcctgcttcttcgtgcacgatgactaataatactagcccccatctcagtgcatgataccaaatctctccctcagtaaatcgtaagccttctcctcactctctcaatcttatccatcatagcaggcagttgaggtggattaaaccaaaccatctacgcagaaatcttagcatactcctcaattacccacataggatgagatacatagcagttctaccgtacaaccctaagataaccattcttagtttaactatttatattatcctaactactaccagattcctactactcaacttaaactccagcaccacgacccta

SEQ ID NO: 700126 - DNA, 813 bp, Homo sapiens
ttgtatctgttactagaggaaggctttgagggtgccacagatataattgtggtttttttgagacctctgcatccctcagattctgtattgatgatgcttttcatggcttactgagggaaattcgcaagaaggagtccatgccatccttgatggaaaagaaactgaagagaaaggacagcctgtggaagaagctaaaaggttctttgaagaagaagagagaaaacatttcttgttatccttgcttatgagctcctcacgctctctgaattctattacgaggacacttgcatatgcaggattctgctcgcataatatctgtctatgcacctctgcatctttcagtcagtgcgtagaggcataagccagctctgactacctcaccctttcgacaatacccccgctccgagctttcacacccagtacggcatgttcacctacctccgataaccctccttattctaaccacactttctctctcccgcccccgcgcgcgttcattttaaacaaaagaacactgcgcgtggttactaaacaacacagattaaatacacatctcgtcgcttgatcgtctgattagagtcagaggttagagtcgaaacactagaatttcatcgtctatttgttttcttcccaccacgctcacgcaccctcatacggtcgacccgtcgcctaggcggctcaagaacgcgggtcctccatcgttgctatactctatgtagttttggagtcaacgtcagagataatgcctcataagaatcgccggcaaccctccatcacgctatatcctgtcaagtcaataatagacacactcag

SEQ ID NO: 700127 - DNA, 769 bp, Homo sapiens
  misc_feature (576)..(576): n is a, c, g, or t
  misc_feature (614)..(614): n is a, c, g, or t
  misc_feature (651)..(651): n is a, c, g, or t
  misc_feature (657)..(658): n is a, c, g, or t
  misc_feature (769)..(769): n is a, c, g, or t
agcgggctcctggcgcctccctcctcgctgaacgccaacagtgctcttcctcagatgctcgatttgactggtgtgaggtacaaaacagtcacgaaagtgaaatcatgagactattaccgatgtaaatggcagattcacctcaagaaggagatacttaagaaggtctcagagacagattatgccacttctggatctactgaagtctgagtcacacctgagaaacacagatgcaggagaaatctcctaatatattcagaattgatgtgtaatcccccataaaatacatcgtttccattgtaaaaatcagcagtgatgcaaacccacttcacgcgcagcaccacctgcaccgtaccacacaacgctgtgacaacactaacacgaagctgatgctgattgctcaacagtgagggatccctgcccaggagcagccagcaccgtggagctggtggagtctcgctctgtcatccaggctggagtacgtggaatacagtggtgcgatctcagctcactgcaacatccgccttccagattcaagtgattctcccaggtagctggaactacaggcacctgccacangcctggctagtttagtagagacaagttttcgccatgtnggccaggctggtctcaaactcctgaccataagtgatncgcccnnctcggctcccaaattgctgagatcacaggttgtgaagccatggacctggacccaaaatgaacatcttcatagtaaacataaaagaaataggctaggcaataactaatatan

SEQ ID NO: 700128 - DNA, 644 bp, Homo sapiens
  misc_feature (590)..(590): n is a, c, g, or t
gattcgagctcctaccctgatttggtggtattcgtgtggtcttcccatctgccttcagcccaaatgtttctgtggcactcttgggagttcaagacaaataattcctaagggaatctgaggaaatgtcttccatatacttaattctaagtgccaagatgtgcaaacagggaaagagggcaggataagagtgtttgaggctgagctactctgaaggcagggccgatccttgtattctcaatgcagcatgggcctcttctgggtcataaattaaggaattagggatcagaagaaactactaacagctgcatagtttccatacagtctgcattttgcccagtgttgcatcactggttgtgtttggcagagatggttccctgtggctctgggtggcttgcagaatacattcccagatcattcctctccccatttttaaaaatgtagttatctttgaataggtaatacatttgtatggttgaaaatttaaaatatacataagaggccagccactacgcctggcccttccgaagatattctatacatatatgagcaagtgtgtgtggtagtaatgtgtaccaaagcttttttttttnttgactctatatcccacgcaagtacgcgataccacctaattcaggaccgagctt

SEQ ID NO: 700129 - DNA, 781 bp, Homo sapiens
agcgggctcctggcgcctccctcctcgctgaacgccaacagtgctcttcctcagatgctcgatttgactggtgtgaggtacaaaacagtcacgaaagtgaaatcatgagactattaccgatgtaaatggcagattcacctcaagaaggagatacttaagaaggtctcagagacagattatgccacttctggatctactgaagtctgagtcacacctgagaaacacagatgcaggagaaatctcctaatatattcagaattgatgtgtaatcccccataaaatacatcgtttccattgtaaaaatcagcagtgatgcaaacccacttcacgcgcagcaccacctgcaccgtaccacacaacgctgtgacaacactaacacgaagctgatgctgattgctcaacagtgagggatccctgcccaggagcagccagcaccgtggagctggtaggttaactcatcaacttctaagcatggtaaaatctcaggcccttcagagttcttgacaataaccacacctcagggagctgtagaactgtgtagatagaacctggaccacctaagcttatttttctggtgagtaaaatatagtcaagatagtgaacatgttagtcatggcaactccaaggaacactgaaattctgtttgccaatgtgtgtagtcagagacgaaaacaaaatggagtgaccaatttagaggacttccagttgtgtcctggtcattactgatgctttctagtcctgattgctttttaagctgtagattattgttggaactaaagct

SEQ ID NO: 700130 - DNA, 339 bp, Homo sapiens
gcccctttactggatttctttggggcaaaatggccttttggttggactgcccccgctaacccttcatcaggtgccgtgtaaatgggggctggctctagccccgactaatgtgatctaaagtgccgccgggtggctgatgctgccagttttgtctaaggctagggactatcaggtgtctttaattgttgcccctgggggaagccaatgtaaaactgggtaaggaaatttttttggcagttcagccctttccctttttccccctaaattttttcttaaattacccctgtaacccttttaactctcccgggcactttgcccttaaagtctcttccccttgga

SEQ ID NO: 700131 - DNA, 233 bp, Homo sapiens
gtacccttcatttaggcgcgaagtttaagttgaactaagattctgatcttggtacagccatggcgtatcaacagagctcggtagagtttgtcgtcctctacctatgaatcttcccactatcttgcgacttatacaggtgtgcgcttttagctgttctgaagacgctcgtctggtttcgggggtcttaactatggctctcctagcaaagttatatctagttcattcattatgca

SEQ ID NO: 700132 - DNA, 754 bp, Homo sapiens
ggcagttactgagaactcataaagacgaggctaaaatccctcgttcgtgatccacagtcaaccgccctgatacacatcctgcaataaagcccagagaaaggagcgccatggattactacagaaaatatgcagctatctttctggtcactattgtctggtgtaatctgcgatgtgctccattccgctgcctgatgatgcaggattgcccagaatgcgacgctacaggaaaacccattcttctcccagccgggtgccccaatacttcagtgcatgggctgctgctgtctctagagcaatattcccacttccactaacggtccaagagagatcgactgttgtgtccataaaggaacgtcacctcagagtccacttgctgttgtagctataatcatatagacagggtcacaggtaatggaggggttgcaaagtaggagaaccaaacggcgtgccactgcatgtaccttgtgaatacatcacgacatctttactgttttactctaagtgctgttctatgatgactgctgcattggctgggaatggaatacattgaagttgcaagaggggtttccatggcttctgtgcacattaaatagttccttcacttattgcctttacacaatgacccaacgttttgaacgacggcatatacaaggggcactaataaccttgaccaggccctttggtaccatggcccatttccccatccctataattccccaaacaagttaaccaactacaaggcagtgcctaagtt

SEQ ID NO: 700133 - DNA, 417 bp, Homo sapiens
  misc_feature (22)..(22): n is a, c, g, or t
ttttttttggatcttaatattnaatacagtcaggagtggtgagaaacctatttagcctctgaagaggagaaattaggaattaggatacctgctcatcttctttttcactctgagatgtgaactaaaggaccataggctcaataagagcctgttcctctaggacactttatgtctgataacagtactctccctttgttttacaggttcgttggggtgataaaggatctactgaggaaggtgcaaggctagagaaagccaaaaatgctgtggtgaagattcctgaagaaacagaggaacccatcaggcctagaccacctcgacccaaacccacacaccagcctcctcagacaaaatggtacaccccaattaaggtatgtgtccagattttgtgtaatttaactcaaaacttctggtcga

SEQ ID NO: 700134 - DNA, 110 bp, Homo sapiens
cgactctgaggatcccgttaaagctaccgcctggctgtatctgacttacaggcgtcagacataagggtactgtgctcggacttacgtaatcgatggtctctatgcggtac

SEQ ID NO: 700135 - DNA, 518 bp, Homo sapiens
  misc_feature (90)..(90): n is a, c, g, or t
gcaaagtggttattaaggatcctccaccaccacgcgtccctgcaccaaaagaggaggaagaagaacctttgcctactaaaaagtggccanctgtggatgcttcctattatggtggtcgaggggttggaggaattaaaagaatggaggttcgttggggtgataaaggatctactgaggaaggtgcaaggctagagaaagccaaaaatgctgtggtgaagattcctgaagaaacagaggaacccatcaggcctagaccacctcgacccaaacccacacaccagcctcctcagacaaaatggtacaccccaattaagggtcgtcttgatgctctctgggctttgttgaggcggcagtatgaccgggtttctttgatgcgacctcaggaaggagatgaggtttgtatatgggaatgtattgagaaagagctaactgcttgagtcagtataatggaggcagggaaatagtaataaaaaatgattttaaagccctattgcacttgaggaaggaaaaaaaaaaaa

SEQ ID NO: 700136 - DNA, 256 bp, Homo sapiens
  misc_feature (33)..(33): n is a, c, g, or t
tgctgctccctcttcagccacttgatctaaatngcccctctgaggtcaaggaacacaagatggttttggaaatgtgaaaccgaatattaataacatcaccagcatcgtgcctgaagccaagcctgctgccaccatgccagtcctgctcctcactggcctttttctcttggtgtggaattatgagggcacatcctcaataccaggtcctggctactgcatgggaattggacccctcatctcccacggcagattcctg

SEQ ID NO: 700137 - DNA, 882 bp, Homo sapiens
tggggaataaaaaatttttgggacccggccccccttggggggcacaaaaccacccttggtgcccaaaagggggggggttggcgcctgggggggaaagggccccgaagaggggggagcagatctgttccctccccgggggaggagaagaggaggcggattccatataatcggctttccgcacggtctatagggggggtcgcccccccaccgatggtggggcgggggagagacacgagagacaccaacacaggaaacggggggggcccaccaacaaaactacatcgagtagctatggggggtaaacaccgtagaagagtggccagcattaagtagccaacacaccgtggggctctttagaaaactactttaagaaactataaaaacagaaattgtgaggtgtctattaaaaaaacatctaggggggtcctaaaaaaaatataatacatatatttttcatagacatgttgtggaggtttttgtggagtcttaataaaccagcgtggtgctcattaaagaaaggggggcgaatagtggtttgaaaaaaagaagccttgtaggggggtgtgctcgaccacattgtaaagaattattataacaacagtgtggggtgtgctgtatagttgtgccgcacacgaagtggggtggtgggggagcgcttttataaaacaagctaaaagaacgtttagaggcacggcggaagtggtggtggcccgagggagatatttagacgggggttttgtaaaaaggacaaaaggagcggtgaaaaaattttattaacatcctttaaaaattgtggggagaagttgagttgcaagaaactttgtagtcccgcacagatactaaggtattcgaggtaagttttaaaaaatcagatttttgaag

SEQ ID NO: 700138 - DNA, 3650 bp, Homo sapiens
  misc_feature (90)..(90): n is a, c, g, or t
  misc_feature (3118)..(3119): n is a, c, g, or t
  misc_feature (3165)..(3165): n is a, c, g, or t
  misc_feature (3192)..(3192): n is a, c, g, or t
  misc_feature (3231)..(3231): n is a, c, g, or t
  misc_feature (3238)..(3238): n is a, c, g, or t
  misc_feature (3245)..(3245): n is a, c, g, or t
  misc_feature (3288)..(3288): n is a, c, g, or t
  misc_feature (3645)..(3645): n is a, c, g, or t
gcaaagtggttattaaggatcctccaccaccacgcgtccctgcaccaaaagaggaggaagaagaacctttgcctactaaaaagtggccanctgtggatgcttcctattatggtggtcgaggggttggaggaattaaaagaatggaggttcgttggggtgataaaggatctactgaggaaggtgcaaggctagagaaagccaaaaatgctgtggtgaagattcctgaagaaacagaggaacccatcaggcctagaccacctcgacccaaacccacacaccagcctcctcagacaaaatggtacaccccaattaagggtcgtcttgatgctctctgggctttgttgaggcggcagtatgaccgggtttctttgatgcgacctcaggaaggagatgagggccggtgcataaacttctcccgagttccatctcagtaaaagggaagcaggaagaccaagaaggtacgaagatggcacattttcacatagctgattttcaaccaaatgaaaaaaatcaagtgcatttcagaagcttttggaagagcagcttaattcctctcagtcgggaaatgttttctctgccttctgctttgcttgcaccaaacatttctaaacacttgttctgccatctacatgggaggtgatgaaactcagtggtaactcatgatttatgacattgaaaataaagaggaacattgacctgcagactatggtttgtacaagaaagtttgtttgaatgtgtagaagaggaaaaagcaacaacagcaacaacacgaagatgataccaaaacaaggaccacaaaacaactagccatgatgggagacaggagttttttacatggaaacatggcacttgtgtttttatgtggcaagatctttatccataggcagagtatgaaatttcccaccaggctaagcaaataaagaagtccattgccttatagctatgtcagatcacagaatccttccaagtgctctatcacagtgtgccttatgggaagtttctgactggaaaatcttgtcattctaacactgaaaagtgcacacgcatgacaaaatgtagacaagatgcctcaaggtattggtagcaagcaagattttgccctttagttttcgaagacacctttctttcattatgcactcgggacaagaaaattaatagagcgttattccacagaaggcctctagccagagatcttgagtgtagtgcaagggactcatgctttgcgaacttgtccctgtgactagtagattcccccttttcctgtgtttaggatttagtagtgcataaagcattaatatccataaacatacctagaagtttgttttgcttttaatttaaaggaagcagtaaccacaaagcttccgctcagggttttttctttcttcaagtctccaagggctcttcagcgtcacaagccagcaactctctttgcattaaaatttcaaagtttaattaatataattaaaagcaacagcaagcagcagcctgtgaagattttgctcatcttttttatgccttttgacattgaatgacctattactgtatgcgcattacttggattttgaggggcactctaccttggttatgattcagtagaggaaaaagaccacctttcttcaatttacaaattaaatcttctggagggtcgctatcacaaaacattgacgatgtatgtattataattttttagaaaaaccaccatcgtgtcacgtcgacgatgccaaattatgttagcgtgagcaggaaacaccgtgggggaggaaggcagcagctgaagaaaaaagctcaaatgatctagtcactttcgatactgtacttcagatgcgaaatggatattcgagtggaaacctgacaaagtgcgcctgctttgatgtgaactggtatagacaatgaccagtggctgggtcagtgggatgtctctctgtgagcacaaaggcttatcaaatgacactaaagataagttcaacaaccatcacattggaagggagaaggcgaacatttcatgtttggcgggcatgtgagtgcacaagatggaaagagcgattggagcatcctggtataattacccccattgtgctcttaatggaaatttcaaaggacgggagtattctgttggttggtgtccaggtttgtggcactgttccaagaggccttacacacacacacaaatatataattttctatacatatatatcctctagcttgaaacttttgctcaagtttatttatgtcactggctggctggatccaaagtcatgtgtccacacattcataaataaaaattttacctatgcctgtgctaccatttctttaagcccacataaagctaatgccttcttgggttgaatatgcagttgttatgcttagtttcagggatggaattctattcagttccaaaatgtccctcatgttcacagatgatactattggcagtagctgcatatgcaagtgtaacttggaagcctgatatagtatacccaaccctttctgcaatgagttattgtatccctttgttctgcatttgcatctggaacaagacctaatgtggcttccttaaatgggcacttcatttctgatgagtgcacaccaattattgctattttaatatcattgagaatactacagaagctaaggctatgtttctttggtaactacttcaaatttctctagaattatgtagcatacttacattttgctgcatgaacaatgaaaattaacctctgcctttaaatggaaaaataactttctgtagattgttatacagctactatgaagagctcttaatgaagaggaagtggcagtggtctatatgtagactgaaaaaatatcattaataaagttcaaagactgatggaatttcattgcccttaaagatatgaaccagatctgttttatgcttttctccaattatactaactagcagttgaaaagaatttgttttgaagagtgttattttcttaccaaaagaccagatcaaaaatccctatacttttccaccaaaaaaagattaaatgaagccatttctattaattaatggcactttatattttatatagagaaatagcttctgtttgattttctggacaccatgtcagtcaagatctactttctgtgtaannatgaataagtcttgcacataatccattcgtgttgcataaggttgcnaaaacaattaagtgggaaatgactccnaacttatgtgtctactctgcctagaaagacagtcttganggcatcnatatatntctcataacaatgtctgttctttatggatttgatccataaatntttatctatctgacaactttgatacttggcatgttttccttagagcatttggtgctccaagaaaaaacatttggtgctaagagttgcagcactgatgcctttccctaagttaattctattttaaaaatttatatttccttcccaatgagatgcagagtaaaatttgagaccctccattgactagggagcagcatctgtcatctatggttaattactattttgacaaaaatatagaaggtttaaacccccatgtatttcagattgttagagaaagaagtagtttgcttatatttcccttgaactttattctaaccatttaaataataaattattcaatatttgttatattaatccttnctaga

SEQ ID NO: 700139 - DNA, 173 bp, Homo sapiens
caaaaggaaatctgtaatctgtgcgcagcggtcgccgcacacctgtgacggaaactcctgtactgacacactgtgcacgctcaactcccagtgagcaaagccagagtggcttaagattgcgtccatcgacatgaatagacacaaggaacaacatttcataacaattaaaacca

SEQ ID NO: 700140 - DNA, 3486 bp, Homo sapiens
  misc_feature (2954)..(2955): n is a, c, g, or t
  misc_feature (3001)..(3001): n is a, c, g, or t
  misc_feature (3028)..(3028): n is a, c, g, or t
  misc_feature (3067)..(3067): n is a, c, g, or t
  misc_feature (3074)..(3074): n is a, c, g, or t
  misc_feature (3081)..(3081): n is a, c, g, or t
  misc_feature (3124)..(3124): n is a, c, g, or t
  misc_feature (3481)..(3481): n is a, c, g, or t
agcgggattgcggcgggaagtcctccgagtcatgaatgtttcagcgcggcgcgcgaggtgagggccgcgcgtccaggtgtaagctagcaggttgtcgctgacatctgtttgcagcggcggcagcggcctccccagcccgcagctagcggccggattgtcagcggaggtagttgagagcggcaaaaccgtttgggtctcactctcgctgcctggaggcctgaaacaccaaagggccggtgcataaacttctcccgagttccatctcagtaaaagggaagcaggaagaccaagaaggtacgaagatggcacattttcacatagctgattttcaaccaaatgaaaaaaatcaagtgcatttcagaagcttttggaagagcagcttaattcctctcagtcgggaaatgttttctctgccttctgctttgcttgcaccaaacatttctaaacacttgttctgccatctacatgggaggtgatgaaactcagtggtaactcatgatttatgacattgaaaataaagaggaacattgacctgcagactatggtttgtacaagaaagtttgtttgaatgtgtagaagaggaaaaagcaacaacagcaacaacacgaagatgataccaaaacaaggaccacaaaacaactagccatgatgggagacaggagttttttacatggaaacatggcacttgtgtttttatgtggcaagatctttatccataggcagagtatgaaatttcccaccaggctaagcaaataaagaagtccattgccttatagctatgtcagatcacagaatccttccaagtgctctatcacagtgtgccttatgggaagtttctgactggaaaatcttgtcattctaacactgaaaagtgcacacgcatgacaaaatgtagacaagatgcctcaaggtattggtagcaagcaagattttgccctttagttttcgaagacacctttctttcattatgcactcgggacaagaaaattaatagagcgttattccacagaaggcctctagccagagatcttgagtgtagtgcaagggactcatgctttgcgaacttgtccctgtgactagtagattcccccttttcctgtgtttaggatttagtagtgcataaagcattaatatccataaacatacctagaagtttgttttgcttttaatttaaaggaagcagtaaccacaaagcttccgctcagggttttttctttcttcaagtctccaagggctcttcagcgtcacaagccagcaactctctttgcattaaaatttcaaagtttaattaatataattaaaagcaacagcaagcagcagcctgtgaagattttgctcatcttttttatgccttttgacattgaatgacctattactgtatgcgcattacttggattttgaggggcactctaccttggttatgattcagtagaggaaaaagaccacctttcttcaatttacaaattaaatcttctggagggtcgctatcacaaaacattgacgatgtatgtattataattttttagaaaaaccaccatcgtgtcacgtcgacgatgccaaattatgttagcgtgagcaggaaacaccgtgggggaggaaggcagcagctgaagaaaaaagctcaaatgatctagtcactttcgatactgtacttcagatgcgaaatggatattcgagtggaaacctgacaaagtgcgcctgctttgatgtgaactggtatagacaatgaccagtggctgggtcagtgggatgtctctctgtgagcacaaaggcttatcaaatgacactaaagataagttcaacaaccatcacattggaagggagaaggcgaacatttcatgtttggcgggcatgtgagtgcacaagatggaaagagcgattggagcatcctggtataattacccccattgtgctcttaatggaaatttcaaaggacgggagtattctgttggttggtgtccaggtttgtggcactgttccaagaggccttacacacacacacaaatatataattttctatacatatatatcctctagcttgaaacttttgctcaagtttatttatgtcactggctggctggatccaaagtcatgtgtccacacattcataaataaaaattttacctatgcctgtgctaccatttctttaagcccacataaagctaatgccttcttgggttgaatatgcagttgttatgcttagtttcagggatggaattctattcagttccaaaatgtccctcatgttcacagatgatactattggcagtagctgcatatgcaagtgtaacttggaagcctgatatagtatacccaaccctttctgcaatgagttattgtatccctttgttctgcatttgcatctggaacaagacctaatgtggcttccttaaatgggcacttcatttctgatgagtgcacaccaattattgctattttaatatcattgagaatactacagaagctaaggctatgtttctttggtaactacttcaaatttctctagaattatgtagcatacttacattttgctgcatgaacaatgaaaattaacctctgcctttaaatggaaaaataactttctgtagattgttatacagctactatgaagagctcttaatgaagaggaagtggcagtggtctatatgtagactgaaaaaatatcattaataaagttcaaagactgatggaatttcattgcccttaaagatatgaaccagatctgttttatgcttttctccaattatactaactagcagttgaaaagaatttgttttgaagagtgttattttcttaccaaaagaccagatcaaaaatccctatacttttccaccaaaaaaagattaaatgaagccatttctattaattaatggcactttatattttatatagagaaatagcttctgtttgattttctggacaccatgtcagtcaagatctactttctgtgtaannatgaataagtcttgcacataatccattcgtgttgcataaggttgcnaaaacaattaagtgggaaatgactccnaacttatgtgtctactctgcctagaaagacagtcttganggcatcnatatatntctcataacaatgtctgttctttatggatttgatccataaatntttatctatctgacaactttgatacttggcatgttttccttagagcatttggtgctccaagaaaaaacatttggtgctaagagttgcagcactgatgcctttccctaagttaattctattttaaaaatttatatttccttcccaatgagatgcagagtaaaatttgagaccctccattgactagggagcagcatctgtcatctatggttaattactattttgacaaaaatatagaaggtttaaacccccatgtatttcagattgttagagaaagaagtagtttgcttatatttcccttgaactttattctaaccatttaaataataaattattcaatatttgttatattaatccttnctaga

SEQ ID NO: 700141 - DNA, 3599 bp, Homo sapiens
  misc_feature (90)..(90): n is a, c, g, or t
  misc_feature (3067)..(3068): n is a, c, g, or t
  misc_feature (3114)..(3114): n is a, c, g, or t
  misc_feature (3141)..(3141): n is a, c, g, or t
  misc_feature (3180)..(3180): n is a, c, g, or t
  misc_feature (3187)..(3187): n is a, c, g, or t
  misc_feature (3194)..(3194): n is a, c, g, or t
  misc_feature (3237)..(3237): n is a, c, g, or t
  misc_feature (3594)..(3594): n is a, c, g, or t
gcaaagtggttattaaggatcctccaccaccacgcgtccctgcaccaaaagaggaggaagaagaacctttgcctactaaaaagtggccanctgtggatgcttcctattatggtggtcgaggggttggaggaattaaaagaatggaggttcgttggggtgataaaggatctactgaggaaggtgcaaggctagagaaagccaaaaatgctgtggtgaagattcctgaagaaacagaggaacccatcaggcctagaccacctcgacccaaacccacacaccagcctcctcagacaaaatggtacaccccaattaagggtcgtcttgatgctctctgggctttgttgaggcggcagtatgaccgggtttctttgatgcgacctcaggaaggagatgagggccggtgcataaacttctcccgagttccatctcagtaaatgattttcaaccaaatgaaaaaaatcaagtgcatttcagaagcttttggaagagcagcttaattcctctcagtcgggaaatgttttctctgccttctgctttgcttgcaccaaacatttctaaacacttgttctgccatctacatgggaggtgatgaaactcagtggtaactcatgatttatgacattgaaaataaagaggaacattgacctgcagactatggtttgtacaagaaagtttgtttgaatgtgtagaagaggaaaaagcaacaacagcaacaacacgaagatgataccaaaacaaggaccacaaaacaactagccatgatgggagacaggagttttttacatggaaacatggcacttgtgtttttatgtggcaagatctttatccataggcagagtatgaaatttcccaccaggctaagcaaataaagaagtccattgccttatagctatgtcagatcacagaatccttccaagtgctctatcacagtgtgccttatgggaagtttctgactggaaaatcttgtcattctaacactgaaaagtgcacacgcatgacaaaatgtagacaagatgcctcaaggtattggtagcaagcaagattttgccctttagttttcgaagacacctttctttcattatgcactcgggacaagaaaattaatagagcgttattccacagaaggcctctagccagagatcttgagtgtagtgcaagggactcatgctttgcgaacttgtccctgtgactagtagattcccccttttcctgtgtttaggatttagtagtgcataaagcattaatatccataaacatacctagaagtttgttttgcttttaatttaaaggaagcagtaaccacaaagcttccgctcagggttttttctttcttcaagtctccaagggctcttcagcgtcacaagccagcaactctctttgcattaaaatttcaaagtttaattaatataattaaaagcaacagcaagcagcagcctgtgaagattttgctcatcttttttatgccttttgacattgaatgacctattactgtatgcgcattacttggattttgaggggcactctaccttggttatgattcagtagaggaaaaagaccacctttcttcaatttacaaattaaatcttctggagggtcgctatcacaaaacattgacgatgtatgtattataattttttagaaaaaccaccatcgtgtcacgtcgacgatgccaaattatgttagcgtgagcaggaaacaccgtgggggaggaaggcagcagctgaagaaaaaagctcaaatgatctagtcactttcgatactgtacttcagatgcgaaatggatattcgagtggaaacctgacaaagtgcgcctgctttgatgtgaactggtatagacaatgaccagtggctgggtcagtgggatgtctctctgtgagcacaaaggcttatcaaatgacactaaagataagttcaacaaccatcacattggaagggagaaggcgaacatttcatgtttggcgggcatgtgagtgcacaagatggaaagagcgattggagcatcctggtataattacccccattgtgctcttaatggaaatttcaaaggacgggagtattctgttggttggtgtccaggtttgtggcactgttccaagaggccttacacacacacacaaatatataattttctatacatatatatcctctagcttgaaacttttgctcaagtttatttatgtcactggctggctggatccaaagtcatgtgtccacacattcataaataaaaattttacctatgcctgtgctaccatttctttaagcccacataaagctaatgccttcttgggttgaatatgcagttgttatgcttagtttcagggatggaattctattcagttccaaaatgtccctcatgttcacagatgatactattggcagtagctgcatatgcaagtgtaacttggaagcctgatatagtatacccaaccctttctgcaatgagttattgtatccctttgttctgcatttgcatctggaacaagacctaatgtggcttccttaaatgggcacttcatttctgatgagtgcacaccaattattgctattttaatatcattgagaatactacagaagctaaggctatgtttctttggtaactacttcaaatttctctagaattatgtagcatacttacattttgctgcatgaacaatgaaaattaacctctgcctttaaatggaaaaataactttctgtagattgttatacagctactatgaagagctcttaatgaagaggaagtggcagtggtctatatgtagactgaaaaaatatcattaataaagttcaaagactgatggaatttcattgcccttaaagatatgaaccagatctgttttatgcttttctccaattatactaactagcagttgaaaagaatttgttttgaagagtgttattttcttaccaaaagaccagatcaaaaatccctatacttttccaccaaaaaaagattaaatgaagccatttctattaattaatggcactttatattttatatagagaaatagcttctgtttgattttctggacaccatgtcagtcaagatctactttctgtgtaannatgaataagtcttgcacataatccattcgtgttgcataaggttgcnaaaacaattaagtgggaaatgactccnaacttatgtgtctactctgcctagaaagacagtcttganggcatcnatatatntctcataacaatgtctgttctttatggatttgatccataaatntttatctatctgacaactttgatacttggcatgttttccttagagcatttggtgctccaagaaaaaacatttggtgctaagagttgcagcactgatgcctttccctaagttaattctattttaaaaatttatatttccttcccaatgagatgcagagtaaaatttgagaccctccattgactagggagcagcatctgtcatctatggttaattactattttgacaaaaatatagaaggtttaaacccccatgtatttcagattgttagagaaagaagtagtttgcttatatttcccttgaactttattctaaccatttaaataataaattattcaatatttgttatattaatccttnctaga

SEQ ID NO: 700142 - DNA, 622 bp, Homo sapiens
ggaccgcgtgggtcgatcattgagaactttcaagcatcataacttgaagaagtatatctcagttgcagtatatcgaaatacttggctactacttctacccacttgattgcttaagatagtgtgtccatctgaaatgatcgactaggggaagaattgatcaatcaatctattgtacatgaagctgctgatcgatgcccctggttgattccaatgttgtaccaccatattggacctgccattgaattaccccatcgagagaaatagaggaggaactatgggatcacatcatacgaattccagacattcgtatccagaattaggaacctcatcagagatctactggaggattaatggatgatataacctaagacggaatcctgtgccagcgttctttacgagggtctcgttcgattcatttggatatgactaacaagagaatcctaaatgcatcgaattgatcctgcaagggatgcttaccatagtagggtatgatacgacgacggatgagacgagctaacgtcatgcttccaagcattgcaagtaccactggacgaaaccacgcgcctagatctgtcgcgagctcgggtcgcaatagcctggttcgtttgaccaaaatcactcc

SEQ ID NO: 700143 - DNA, 3601 bp, Homo sapiens
  misc_feature (90)..(90): n is a, c, g, or t
  misc_feature (3069)..(3070): n is a, c, g, or t
  misc_feature (3116)..(3116): n is a, c, g, or t
  misc_feature (3143)..(3143): n is a, c, g, or t
  misc_feature (3182)..(3182): n is a, c, g, or t
  misc_feature (3189)..(3189): n is a, c, g, or t
  misc_feature (3196)..(3196): n is a, c, g, or t
  misc_feature (3239)..(3239): n is a, c, g, or t
  misc_feature (3596)..(3596): n is a, c, g, or t
gcaaagtggttattaaggatcctccaccaccacgcgtccctgcaccaaaagaggaggaagaagaacctttgcctactaaaaagtggccanctgtggatgcttcctattatggtggtcgaggggttggaggaattaaaagaatggaggttcgttggggtgataaaggatctactgaggaaggtgcaaggctagagaaagccaaaaatgctgtggtgaagattcctgaagaaacagaggaacccatcaggcctagaccacctcgacccaaacccacacaccagcctcctcagacaaaatggtacaccccaattaagggtcgtcttgatgctctctgggctttgttgaggcggcagtatgaccgggtttctttgatgcgacctcaggaaggagatgagggccggtgcataaacttctcccgagttccatctcagtaaaagggaagcaggaagaccaagaaggtacgaagatggcacattttcacatagctgattttcaaccaaatgaaaaaaatcaagtgcatttcagaagcttttggaagagcagcttaattcctctcagtcgggaaatgttttctctgccttctgctttgcttgcaccaaacatttctaaacacttgttctgccatctacatgggaggtgatgaaactcagtggtaactcatgatttatgacattgaaaataaagaggaacattgacctgcagactatggtttgtacaagaaagtttgtttgaatgtgtagaagaggaaaaagcaacaacagcaacaacacgaagatgataccaaaacaaggaccacaaaacaactagccatgatgggagacaggagttttttacatggaaacatggcacttgtgtttttatgtggcaataaagaagtccattgccttatagctatgtcagatcacagaatccttccaagtgctctatcacagtgtgccttatgggaagtttctgactggaaaatcttgtcattctaacactgaaaagtgcacacgcatgacaaaatgtagacaagatgcctcaaggtattggtagcaagcaagattttgccctttagttttcgaagacacctttctttcattatgcactcgggacaagaaaattaatagagcgttattccacagaaggcctctagccagagatcttgagtgtagtgcaagggactcatgctttgcgaacttgtccctgtgactagtagattcccccttttcctgtgtttaggatttagtagtgcataaagcattaatatccataaacatacctagaagtttgttttgcttttaatttaaaggaagcagtaaccacaaagcttccgctcagggttttttctttcttcaagtctccaagggctcttcagcgtcacaagccagcaactctctttgcattaaaatttcaaagtttaattaatataattaaaagcaacagcaagcagcagcctgtgaagattttgctcatcttttttatgccttttgacattgaatgacctattactgtatgcgcattacttggattttgaggggcactctaccttggttatgattcagtagaggaaaaagaccacctttcttcaatttacaaattaaatcttctggagggtcgctatcacaaaacattgacgatgtatgtattataattttttagaaaaaccaccatcgtgtcacgtcgacgatgccaaattatgttagcgtgagcaggaaacaccgtgggggaggaaggcagcagctgaagaaaaaagctcaaatgatctagtcactttcgatactgtacttcagatgcgaaatggatattcgagtggaaacctgacaaagtgcgcctgctttgatgtgaactggtatagacaatgaccagtggctgggtcagtgggatgtctctctgtgagcacaaaggcttatcaaatgacactaaagataagttcaacaaccatcacattggaagggagaaggcgaacatttcatgtttggcgggcatgtgagtgcacaagatggaaagagcgattggagcatcctggtataattacccccattgtgctcttaatggaaatttcaaaggacgggagtattctgttggttggtgtccaggtttgtggcactgttccaagaggccttacacacacacacaaatatataattttctatacatatatatcctctagcttgaaacttttgctcaagtttatttatgtcactggctggctggatccaaagtcatgtgtccacacattcataaataaaaattttacctatgcctgtgctaccatttctttaagcccacataaagctaatgccttcttgggttgaatatgcagttgttatgcttagtttcagggatggaattctattcagttccaaaatgtccctcatgttcacagatgatactattggcagtagctgcatatgcaagtgtaacttggaagcctgatatagtatacccaaccctttctgcaatgagttattgtatccctttgttctgcatttgcatctggaacaagacctaatgtggcttccttaaatgggcacttcatttctgatgagtgcacaccaattattgctattttaatatcattgagaatactacagaagctaaggctatgtttctttggtaactacttcaaatttctctagaattatgtagcatacttacattttgctgcatgaacaatgaaaattaacctctgcctttaaatggaaaaataactttctgtagattgttatacagctactatgaagagctcttaatgaagaggaagtggcagtggtctatatgtagactgaaaaaatatcattaataaagttcaaagactgatggaatttcattgcccttaaagatatgaaccagatctgttttatgcttttctccaattatactaactagcagttgaaaagaatttgttttgaagagtgttattttcttaccaaaagaccagatcaaaaatccctatacttttccaccaaaaaaagattaaatgaagccatttctattaattaatggcactttatattttatatagagaaatagcttctgtttgattttctggacaccatgtcagtcaagatctactttctgtgtaannatgaataagtcttgcacataatccattcgtgttgcataaggttgcnaaaacaattaagtgggaaatgactccnaacttatgtgtctactctgcctagaaagacagtcttganggcatcnatatatntctcataacaatgtctgttctttatggatttgatccataaatntttatctatctgacaactttgatacttggcatgttttccttagagcatttggtgctccaagaaaaaacatttggtgctaagagttgcagcactgatgcctttccctaagttaattctattttaaaaatttatatttccttcccaatgagatgcagagtaaaatttgagaccctccattgactagggagcagcatctgtcatctatggttaattactattttgacaaaaatatagaaggtttaaacccccatgtatttcagattgttagagaaagaagtagtttgcttatatttcccttgaactttattctaaccatttaaataataaattattcaatatttgttatattaatccttnctaga

SEQ ID NO: 700144 - DNA, 2822 bp, Homo sapiens
  misc_feature (90)..(90): n is a, c, g, or t
  misc_feature (2290)..(2291): n is a, c, g, or t
  misc_feature (2337)..(2337): n is a, c, g, or t
  misc_feature (2364)..(2364): n is a, c, g, or t
  misc_feature (2403)..(2403): n is a, c, g, or t
  misc_feature (2410)..(2410): n is a, c, g, or t
  misc_feature (2417)..(2417): n is a, c, g, or t
  misc_feature (2460)..(2460): n is a, c, g, or t
  misc_feature (2817)..(2817): n is a, c, g, or t
gcaaagtggttattaaggatcctccaccaccacgcgtccctgcaccaaaagaggaggaagaagaacctttgcctactaaaaagtggccanctgtggatgcttcctattatggtggtcgaggggttggaggaattaaaagaatggaggttcgttggggtgataaaggatctactgaggaaggtgcaaggctagagaaagccaaaaatgctgtggtgaagattcctgaagaaacagaggaacccatcaggcctagaccacctcgacccaaacccacacaccagcctcctcagacaaaatggtacaccccaattaagggtcgtcttgatgctctctgggctttgttgaggcggcagtatgaccgggtttctttgatgcgacctcaggaaggagatgagggccggtgcataaacttctcccgagttccatctcagtaaaagggaagcaggaagaccaagaaggtacgaagatggcacattttcacatagctgattttcaaccaaatgaaaaaaatcaagtgcatttcagaagcttttggaagagcagcttaattcctctcagtcgggaaatgttttctctgccttctgctttgcttgcaccaaacatttctaaacacttgttctgccatctacatgggaggtgatgaaactcagtggtaactctctttgcatttttcgtttaattaatataattttgacattgaatgacctattactgtatgcgcattacttggattttgaggggcactctaccttggttatgattcagtagaggaaaaagaccacctttcttcaatttacaaattaaatcttctggagggtcgctatcacaaaacattgacgatgtatgtattataattttttagaaaaaccaccatcgtgtcacgtcgacgatgccaaattatgttagcgtgagcaggaaacaccgtgggggaggaaggcagcagctgaagaaaaaagctcaaatgatctagtcactttcgatactgtacttcagatgcgaaatggatattcgagtggaaacctgacaaagtgcgcctgctttgatgtgaactggtatagacaatgaccagtggctgggtcagtgggatgtctctctgtgagcacaaaggcttatcaaatgacactaaagataagttcaacaaccatcacattggaagggagaaggcgaacatttcatgtttggcgggcatgtgagtgcacaagatggaaagagcgattggagcatcctggtataattacccccattgtgctcttaatggaaatttcaaaggacgggagtattctgttggttggtgtccaggtttgtggcactgttccaagaggccttacacacacacacaaatatataattttctatacatatatatcctctagcttgaaacttttgctcaagtttatttatgtcactggctggctggatccaaagtcatgtgtccacacattcataaataaaaattttacctatgcctgtgctaccatttctttaagcccacataaagctaatgccttcttgggttgaatatgcagttgttatgcttagtttcagggatggaattctattcagttccaaaatgtccctcatgttcacagatgatactattggcagtagctgcatatgcaagtgtaacttggaagcctgatatagtatacccaaccctttctgcaatgagttattgtatccctttgttctgcatttgcatctggaacaagacctaatgtggcttccttaaatgggcacttcatttctgatgagtgcacaccaattattgctattttaatatcattgagaatactacagaagctaaggctatgtttctttggtaactacttcaaatttctctagaattatgtagcatacttacattttgctgcatgaacaatgaaaattaacctctgcctttaaatggaaaaataactttctgtagattgttatacagctactatgaagagctcttaatgaagaggaagtggcagtggtctatatgtagactgaaaaaatatcattaataaagttcaaagactgatggaatttcattgcccttaaagatatgaaccagatctgttttatgcttttctccaattatactaactagcagttgaaaagaatttgttttgaagagtgttattttcttaccaaaagaccagatcaaaaatccctatacttttccaccaaaaaaagattaaatgaagccatttctattaattaatggcactttatattttatatagagaaatagcttctgtttgattttctggacaccatgtcagtcaagatctactttctgtgtaannatgaataagtcttgcacataatccattcgtgttgcataaggttgcnaaaacaattaagtgggaaatgactccnaacttatgtgtctactctgcctagaaagacagtcttganggcatcnatatatntctcataacaatgtctgttctttatggatttgatccataaatntttatctatctgacaactttgatacttggcatgttttccttagagcatttggtgctccaagaaaaaacatttggtgctaagagttgcagcactgatgcctttccctaagttaattctattttaaaaatttatatttccttcccaatgagatgcagagtaaaatttgagaccctccattgactagggagcagcatctgtcatctatggttaattactattttgacaaaaatatagaaggtttaaacccccatgtatttcagattgttagagaaagaagtagtttgcttatatttcccttgaactttattctaaccatttaaataataaattattcaatatttgttatattaatccttnctaga

SEQ ID NO: 700145 - DNA, 701 bp, Homo sapiens
  misc_feature (90)..(90): n is a, c, g, or t
gcaaagtggttattaaggatcctccaccaccacgcgtccctgcaccaaaagaggaggaagaagaacctttgcctactaaaaagtggccanctgtggatgcttcctattatggtggtcgaggggttggaggaattaaaagaatggaggttcgttggggtgataaaggatctactgaggaaggtgcaaggctagagaaagccaaaaatgctgtggtgaagattcctgaagaaacagaggaacccatcaggcctagaccacctcgacccaaacccacacaccagcctcctcagacaaaatggtacaccccaattaagggtcgtcttgatgctctctgggctttgttgaggcggcagtatgaccgggtttctttgatgcgacctcaggaaggagatgagggccggtgcataaacttctcccgagttccatctcagtaaaagggaagcaggaagaccaagaaggtacgaagatggcacattttcacatagctgattttcaaccaaatgaaaaaaatcaagtgcatttcagaagcttttggaagagcagcttaattcctctcagtcgggaaatgttttctctgccttctgctttgcttgcaccaaacatttctaaacacttgttctgccatctacatgggaggtgatgaaactcagtggtaactcatgatttatgacattgaaaataaagaggaacattgacctgca

SEQ ID NO: 700146 - DNA, 321 bp, Homo sapiens
aggtttttccctaaaacccatccattttttaaggcttttggttcattcccccccttttaaaattggttggttttaaattgggaaaaaattttttcttttttattaattttattgggtggtaaaaagccaataaaaaggctggggggggggtttccctttggtaatcccacccctttggggggttaagtggggaggttcgcttaagcccaaaggtttcagcccagcataggcaccaaagtaagcccttgtttttcctaaaaccggaaaaatcagttaggcccaggggcaggggccggtagtcccagctccttttttttttca

SEQ ID NO: 700147 - DNA, 494 bp, Homo sapiens
gaaataagagagactgatgcagttagtataaaacagaaattagctatcagatatcaatacgtggaatcaagctagtctactaaaacaaggcttatcaaaatacttgtgataaagaaccaattgcacactgataaaactgtaaatatcaataaaaataactaattagaaaaagaaaaaatccatgaagacataagaaaatataacccccaaattttattattaaatggacagacatagaattactttgtcaaatggctatagaaatatctaaacactgaactctcgatttcagcactaatttcagtacaagcagtccatgagcctcgcctgaccacatttagagagcactagaactggaggaacatgctactcatatggtctagcacaacgctctatcaaaactacacctttagatgaccccttcatagcatattttacctactgtagctgctacttggcaaagaaagatttagaaaaaggtctcaagtctacgt

SEQ ID NO: 700148 - DNA, 262 bp, Homo sapiens
ttccgacacttgaacgtaagactctgtcaaacgttcctagaactgataaatgacttgagtaaagttctaggatacaaaatcaatgtacaaagagtcagtaacatatctatacaccaataacattacagctgagatccaaatcaagaatgtaagcctatttacaatagcaaagaaaagaataaaacacctaagaatacagctaaccaaggaggtgaaagatctctacaatgaggagctgaatgagaatcatcgatgaaatgct

SEQ ID NO: 700149 - DNA, 262 bp, Homo sapiens
  misc_feature (14)..(14): n is a, c, g, or t
cttaaatataacantcttctggatatgttaagtgaaaaacattattaagtacactatgctactgtgtaaaagcaaataaaaacaggcacaaaactttctaatgcctgtaatcccagcactttgggaggccgaggtgggcggatcacgaggtcaggagatcgagaccatcctggctaaaatggtgaagccccgtctctaccaaaaatacaaaaaattaggtgaccgtggtggcgggtgcctgtagacccagctgcttgggagg

SEQ ID NO: 700150 - DNA, 1055 bp, Homo sapiens
agcggggcggtggtggccgtagacggttcctacctggccctgttaatgtacgtgggccaggccgggggagtgatggctgccctaagaaccctggacttgctggaggtacgtgggcgggagagggacggggtaggggacctggccaatagtcggagtgtgaccctggagtcatgctgcagctgctaggggctgccagttttaaggagaggctgccgactatacgactactatggggccagctaggtggaggcgatagacgagtatcagatatatagcaagacatctacaaacaggaggcccaagctcaacacaaataattctgaattcacagaagaacaaaagaaaaccataggcaacattgcaacatgctatggaattgcgaagtgcagcttctacagtaccacacagtctacaagacagactataacctggaggacctgaagcagctagagccaatcctaaagaatatctaacatataataaagaattcccataggatgtacagcctgacccataaagaagaataaaggcacctggtgacagcaagagaatatggacattgagaagatagaagaacgatggtgatgctggaacagagacacaatgaatacaaaacactgctagaagtaccacggaacttaataaaccaaggtagccataggaaacaggaatgacaattacctcactgaatcaggaaaagcgcacaaagggaaagaacactgctggacactgcaatcgaacccaaatataacgaacgataaaggaaccagcggaggaaacacagcacaggaaagaaacccgcgagctacgagaagacacaaaaatgacaaacggaggacaactccacaagtcattggaaaataacaagagggcgaccgagcgagcgggagacgcgagagcgaaagacggatacacagaaaagggaggaagagaggagtggtgagtagacgcgagcgagatgtgaaggagaaccgtggcgagagcagaggaggggcgacacagagtaacgggcgagcaggaagaaatagaagaaaggggacgggaaaaacggagaa

SEQ ID NO: 700151 - DNA, 1389 bp, Homo sapiens
  misc_feature (475)..(475): n is a, c, g, or t
cattgctgcatcaacagaatgtgtccctaccatgtgtactcgcgttcttcccatgggccccaactctccctacctggtgcaaatggtcctagggagcttacgcaccaaccacctagagtaggtctcattgtctccaggacaggcgtgaaacgaagaagaggaggcgcgtgccacaggcgctttacactcgaaactagttcagatacgcttatctagtcgcgaagaggtagtgtgacgagaaattgtctgaccctagttgtgcgtcaaccaggagtgtgatcgcctaccaagtgatggtccccctatcctcccgccatgggacgcacaacgcaaaggctgctccgcacaacgcatgagccaggcggagggcatctctgggcatctatgaactccatcacgtcacgcatccgcaccacttatggcacgagggcgaggaggccttcacatcgaggacacgcgtcccttggcagttggncaggaaataaaatgtcaattagcgccgccctgctctcacatgcacgcatgcatgtctgtgcaccacgcctctgtgcagaggggacgggtggaggcttacaaagcgcaggctcaaatggaccaacggtcccataggtcatccgtcccaccaaagggtcacccatgcgcgttcgagaccaaccatgctcttaaccccttcctccacctccctgccgtgcgttgcggagcatttggcaaccgtcccacatactcccgcaaggccacattgagtgagaggaccaggggttttggaagccagtaatgtacttaggcggcctagaagaaagccgcggagaaattgggaatgtaaccagtgtctctagggtaccgaaccggcggacacccttctcaggatgggctccgttcatggccgaaatctcctggatccatggtcctacgcccctagaccaaataaaaaggcgaccaaggaaactagaccaatgtctcacacccaaggttcggcggcctgaaaccgctggcgagggggatgtgacccttgtacagggaatttgtccctgttggcacgccctggtcaatacccgatggaacaaccgagaaaaggccaccgaattggatcccacccttacgaagaggaattctttgggcatggaccaccataggtggttccccatctgaactcgagaatgactagggagcaggagaggtcgtaggaagtcacaggacagaacgcacgaacaaaggttttgacaccgggtggtttgtggccccaagactctccttgcagagggcggaaggtgccacccctccagaaaaagttggaatgtacactcgattcaccacgggagccacacatgtgcgtcttggctgagcctcacaagatgacaagattagaccgtggtgtgtgttccccactca

SEQ ID NO: 700152 - DNA, 486 bp, Homo sapiens
ccaccatgcatgtgtatacctatgtaacaaacctgcacgttctgtacacttatcccaaaacttagagtataattaaaaaaaaattttctaatgttgaaatactctcacatttctcaaataaaccatgtttacttgttcaaaacaaaaaaagaaacagaaaagcagagctgacctacattctggaattctcagatagagactcacattaattcgaatatacacatcttaaatgatctggagaaaaaggcagttaatcaacttgcacagaagatggtggccaacttacaatttcagcagtgagaaattgaagaaaaaaaaaagagccaaatggaaataacagaaatttaaaatatcaagatttccactcatcagtgcattcgatgggttaccagcaaactggtcacaccaaaaaatcagtaatcttgaaaacaggttagaagacatctaactggaaaccaaagagataaagtgaaggacaacaaaaaa

SEQ ID NO: 700153 - DNA, 137 bp, Homo sapiens
gcattatgaactaatttacattcccatcagcagtgtaaaagcgttcctatttctccacagccatttaggtaacagccatttaggtaacagccatttaggtaacagccatttaggtaacagccatttagggggtaccg

SEQ ID NO: 700154 - DNA, 970 bp, Homo sapiens
gtgatcagatcaactatcccgagcatcacagtgcctgtgcccaagcagtcctcactttgcttaacagtggccccagagagcaggagtagtgatgctggtgattcggatatgccaaagagaagccacaaagtgcttccttttaaatgaaaaggtgaaagttctcaagcttaaaaaagaaaagaaaaaaatcatatactgaggttgctaagatctacatgacaataagatattttgggagagagatacgttcacataattttattacatatattgttacaattgttctattttgttagttactgtggtaatctcttactgtgcctaatttataaattaaactttagatatgtatgtacaggaaaaaatgtagtatatagtatcgtatatatgtacaggaaaaaaagtactatctgtggtttcaggtatccactgcgggtcttcagaaacgtacccccatcaggatgagaggggactgctgtacacagaatactacggaaggcctctagactaccatccattccttactcaaacaggaggaaacacttcctggtacaagtacaaacggtacaggcttaactgatcactgacagaaaaagctaagaagaacaaacgtcaaaacgagacagagagctcaatcatggcccaagaaggcagtgcaggggccacgagacacggaacacatgacaaatctccaaactacccacggtcgcagcgaagaaccgcagtgcgcaagcatcccaagggagccgggagatacaagacatgacggcaacaaaccggggaaatcgcggaagcaccagcagaagcacggtcgccaaggggcgcggcggccccacccgagcacaggtaacaccacacagcaccaaacagacgggagacgcggtagacagacaaggcaagaaaaccacaacaacaacaagcacacagaaagcagaacaaaagcaaacaagccgcatgccagacggaacca

SEQ ID NO: 700155 - DNA, 1170 bp, Homo sapiens
  misc_feature (563)..(563): n is a, c, g, or t
agtggataatgacagcttgaagtagttcgagaataccgaggatgacttaaatcatgtacaaacatacctacaatacttccacccggttgatgcttatgaaccaggtgaactgggattaccctttgaaagttgaacaaatcgcataatagtccacgcactctcgatatgccacgcccagttcagcccttgatcactttgatcaatcagcgaaagtacgggtcatgtgtcatctccgactgaatgccttggtcactgctactatttcagacatatgagacacatcgatgctagcgaagtgtacacctggtacagtctagatcacaatcccaacgtttcgaccagcgtaacaacagacacggaggaagtgttactcagcgagtctagtttgctacatagaaccattctttgtggtgaggtcgacacacgacaaggtgtctgcgatagccccccgatgctggtgctccttaaagacacatttccgaataatacacacttcgtcataagaaattcattttagtcacatatacatgggacacgcagttgatgttcttaccgcataaatncagtcgtactcgcacgccttcatagaagcccacatacataaccagtccagatcagacaacagttgagaaaactgccgaagccaagcaattaacccccggggaccattctgaatcaatcctcactggatcgccacaagggtgccaaagagggtggttttcctgaaagcagctggctagggggcttattactttgtgaactggaccgtctggtcctcaatcgagttcctctacgtaagaacacaccagaacatttgtcatttggcactttcaaaccaaaaatcgatatcagcaatgtaccaaatcccaaaaagcatcgttactggattgcttactttcacagaacgaagaagcctgcggaagcccagaagagccaggcaaggtgagatccttcgacccggaaaagagagaacttgcgcattcggagcacacgccagactggatccgaaaggtgggactccccatttttcccggagtacaaggctaatctccaggccacgggtaactggcaatcgttgcgcgaggggggaaaatacatttaccccacaggggtggcgctccccgctttttacacccgcttaaatatgtgcggtataacaacaaaaaagag

SEQ ID NO: 700156 - DNA, 968 bp, Homo sapiens
tgcgcggccggagttcagattttattatggggaaagaggggctccgcgtgcccgcaccgcctccccaaagccctctttccgggaggctcgtgatcagcccacaatgtgtaaaagttagattttcgtgccagggtgggccaggtataactcaagtgacgcgggccttggtggacccaggggccaacgcgcactaggggcgcggtggtcgtagcacggcgcaagcgtggacggcagagaaagagagatctccgtggccctgcgagaagaaggcggtcgaaagaaaggagaagagcgcgcagcaggatagtaagaagcacaagaagagaggaagtggtctcgcgggcgcgcgcgcagagaacactaccgcgagcgcggagtatcccacaatgcgcgggggatctagaggggccccctatataagcgtggtacaccacacaaggagagtgctctccagggcgtgggaatacagcgtgtcacaaacaagacacacgaggccacaagagaagacgacgaggaggttatctcccaagcgacaacaccttcggtgaaagcccacacaaagaggggaacccacaggggacgtggaagcccacgagcgtggccagcaacaaagacggggacgccgggggcacaacagtgtctcaccacaaaaaaacctacgtggcgcagaagagggctccaccgcgttggaaaggcaccccacgaggtgggagggacacgtggaggagcagcaacaggacactctacaacgaatcctatcaggagaagacatggcatgcacgtgacaccgaccagggactcccacatcacaccgaactgagaaagtcgcgcagagaagccatccaccaaaaggaagtcgccgcagtgaacacagcgtgcaaaggggaacaccagcgcacgatagcaaccaaggagaacggcgggaatcgaggccaacaacacacagcgagaggatacgaaggaccccg

SEQ ID NO: 700157 - DNA, 174 bp, Homo sapiens
aatatcttcctctaaacatatgcaatattataatagctcacatttcttgaatgtttttgtgctggtacttgtgatggacatttattgcttgccttcccagaacccatcattaatatacaaatatagtacagataatacacatacacatatttacggagctttctcctttctctc

SEQ ID NO: 700158 - DNA, 118 bp, Homo sapiens
ctttggtcactgcttcagcttgacggttgttgttggcctgtaccaaacgcaagttggcttgctcgatcgcaaccacaagatctttacggcaagccgcgaagatcgtgccgatatcgct

SEQ ID NO: 700159 - DNA, 810 bp, Homo sapiens
aatgagttaatatataaagcacttgtgttagtgactggcccttagtgagcattagctattactgctgttactggctttgagttccaaaacagggtattgaagtttccaaaaccagcttgggtaacatggcaagaccctgtctctaccaaaaaaaaaaaaaaaaaaattagccagtccggggggttggggcctggtagtctggagctactcaggatggctagaggcaggaagatcatttggagctctggggagggcagagattggtagtggaactggagattggcttcatggtactctagctggggtgacagactggagactctgtctcaaaaaaaaaaaaaaaaaaaaaaaaaaaaaaaaaaaaaaaaaaaaaaaaaaaaaaaaaaaaaaaaaaaaaaaaaaaaaaaaaaaaaaaaaaaacaaaaaaaaaaaaaaaaaaaaaaaaaaagaaaaaaaaaaaaaatcaaaacaagaggggggcgagaaaaacacgtaccctccgcgggcgcgccaaggacacacccagcagtaccgatacgacgtacgcaggccgacggcgcgccgcagcacgcgcgcagggaagcaaacacaaaagcgatcggggagcagcgggcgccaccccaaccaagccgagagacacacagacaacaggagagacagacacagcaccgcgacgacgaagccacacagcctagcgcggggagaacaactaccccccccaaccaacacgacggaagacaccatcgggcccgcaacaacaggaacgcgggacacggccgaacaccacgcagcgatgaccgggagacaagt

SEQ ID NO: 700160 - DNA, 140 bp, Homo sapiens
aatatcttcctctaaacatatgcaatattataatagctcacatttcttgaatgtttttgtgctggtacattctgagcagggtaggtgctggcaatgacgtcatataggaattgatattgctcgctactctgtgaaagtgg

SEQ ID NO: 700161 - DNA, 150 bp, Homo sapiens
ctgttgtccagcagagagcacaggtagaagtgcgattggctcgctcctgctcccagaggctgttagcagtggcgcatggcatgggcgatgaagcctgcagggcctcctgtgcctcctcccccatgatctgtcattgtgccagcgggggct

SEQ ID NO: 700162 - DNA, 524 bp, Homo sapiens
aaccagggcaattctgtgtggcccctgggtctatgctttggcttgtaagtattattagccattatgcactccactctaaggtgttagcctgagacctgcatgtccagtaagggggcttcctagcttacaaggatctctgtcacagggctggagagatggctcaggggttaagagttaagactgctcttccagaggtcctgagttcaaatcccagcaaccacatggtggctcacaactatccgtagtggaatctgatgccctcttctggtgtgtctgaagatagctacagtgtactcatatacacaaaatcaaccaatccaaaaaaaaaaaggagctctgtcaccactaggctgtagtagaagctcagcctgctgttccccacacttgaccttgaggcacccccagtttctccctgtacctatagtgaagctgagaagacagtaaccattgggccttgctgttctgtaaaactcactttatatccttagcactgtagtggatggccagtggccccacggtaaccc

SEQ ID NO: 700163 - DNA, 263 bp, Homo sapiens
ttttggggtttaacccgccctttttttttatggtttttggcccctttccctgggggagcccttttctgggggggggttttaaccccggggtaaaggcccccccccccgggcccccgccctgttttgctttgggggcccggggtcccccccaaatgttttggggggggggggggtttcccccctttccccccaggttttttcccccccccccgggggggggtttccctttggggttttttttttaatggccttggggcttttga

SEQ ID NO: 700164 - DNA, 381 bp, Homo sapiens
tagtaatcttttttatatcatcacatatgtactttaacaaccgatgtgaataagaatatctggattaccgaacaaatatagtaaaagatctgctattagtattatttagaccaatgaaataactgataaagcttgattatagttcatatgtataaataaggagggttaactaagttagtttttttaataccttcttagaggtgtggtgcatatttccctagcactatatgcagatgccgtctttggaaatgttcaagagaaagctatgaaacttcataaatgcttctaattctgaaatggtaaatactctagtgtaatatcttcaaattagacagatttaaaaaatggtgatacacgtaataagatgacataattataata

SEQ ID NO: 700165 - DNA, 139 bp, Homo sapiens
cagagcaatcaaaacctctatccgacagacaaatagaactcaacatctcctgagagacctttcttacctttttttaaaaacaaaaaatgaaattattttgcatgctgctgcggcctttaaagtattgaagtaactggag

SEQ ID NO: 700166 - DNA, 201 bp, Homo sapiens
ccaaccgtgtgagtggcagggcaacttcggtgcgcggggccaaggccaggtcaaccagggatttgagttgcccaatgacggtttcttcagcctcagcgccgacgtcggcatccaggaaagctccaacgtggccggcgcggtgccggatcgcaccagcatctatttccgccagaacggccagcccgacccgcgcgagaccag

SEQ ID NO: 700167 - DNA, 559 bp, Homo sapiens
gggagggggtaaaaaaaaacaaaaaaaaaaaaaaaaaaaaaaaaaaaaaaaaaaattttggggcccccggccccgaaaattttaaaccctgtgggggggggggcccaagtaattggtatcgaataaccattgggcgcaagaccgcgtgttgtcccactaagggaacaactcgttggtactaagacacggtggtggggggtttctcacccaaataaaaacaacggcgggggggggcagcacaggggcggctttgtggaaccaacatcccacagacgtgggaggttccggaggggcaaacatgggggcgacttttcttaccacaggggggctttccaagagaggagcgcgcaggcaatgaacaaattaggccgcgcgcggaggaaacaacacacaattgatccactgacgacactgtgagcactctaccacacacaaatatcggacaccaaccatccacccagcatccactacacacacacagcacgcactaatcaccacatacagcaccgtacgcatccatacctagtctcctccccctaccagtacacacgagcataca

SEQ ID NO: 700168 - DNA, 83 bp, Homo sapiens
ccacgcgtccgttttttttaaagcaaagacaaaaaagtttatcttattagaaacaagatacaccaccacttatgtcttgcttt

SEQ ID NO: 700169 - DNA, 308 bp, Homo sapiens
attcgcggccgcgtcgacacttgtagaaataatactggctcagccgggtgcagtggttcatgcctgtaatcgcggcactttgggaggccgaggtgggtggatcccttgtggtcaggagttcgagaccagcctggccaatatggcgaagcccccgtctcttctgaaaatacaaagattggctgggtgtggtggctcgcacctgtaatcccagctactcggaaggctgaggcaggataaccacttgaaccatggaggcatatgttgcagtgagctaagatcgtgccactgcattccaacttgtgcgatgg

SEQ ID NO: 700170 - DNA, 122 bp, Homo sapiens
gttcacctgtccctttgttgagaagttctccattgacattgaaaccttttataagactgatactggggaaaacgatgatgtgttcagcctgtctcctggggaaaagaaccagctgataacag

SEQ ID NO: 700171 - DNA, 785 bp, Homo sapiens
aaggtgtatttaaatgtaattcatttcactaagtcccagaggaaaatagagatagagagagagagagagagagagagagagagagagagagagagagagagagagatgtattagtagtagagagaaatatgacgagtgatgagtatgtatatatttgtgttttgtcgttcattattctaatgagctagaggagtgtgtctcagaggaaataataccatattagtgtagtattgcgattcatcattctacagttgagtcgtgtacgcgtgtctgagcaaagtacaaatatcatttttgtatgtgctgtgtgtgaagaagtgaggagagaggtgaggggcagaggagaggagtagagaaatgacataatgtagtataaggggagggagagaagtcgctatacatctttgataccattagatggaaggcgaggagacggattatcatacttctacttccttctatgatgattgtggtgctgccgaattatccacattttgttgaaccatggaatagcagtcataccatgccttccatggttgtaggggtttgttgggctgaggctgttactgcgattgtacaaaagcagtcgtagctagtgctcgctgcggtggttggtgtgctcggttcaccccattcaatcaacaagaaaaacaaaaaaaaaaaacaaaaacaaaaaaacacagagcacggtcggccaggagccggccacccgcggacaaccacaggagataggacataatacaaaacacacggaggggaggacgtggggcccaccggggaccacg

SEQ ID NO: 700172 - DNA, 364 bp, Homo sapiens
tcgccattgggactctaccctgggcatcaaaagtgaaactccatcactaaaaaaaaataaaaaataaaaaaataaaattattgaggccgggtgcagtggctcacgcctgtaagcccaacactttgggaggccgaggcaggtggatcatgaggtcaggagttcaagaccagcctggccaatatggcaaaatgctgtctctagtaaaaatacaaaaattagctgggcgtggtggggtgtgcctgtagtcccggctactcgggaggctgagacagaagaatcacttgaacccagtaggcagaggttgcagtgagctgagatcgtgccactgcactctagactgagtgacagagcaagactccgtctc

SEQ ID NO: 700173 - DNA, 341 bp, Homo sapiens
  misc_feature (132)..(132): n is a, c, g, or t
  misc_feature (157)..(157): n is a, c, g, or t
gaggatcccgtgtagtactggctctggggtgatgattaacgtattctgtctgggagtggagggtatatactcatttgtgacatcttggactataggtacattcattttaagctatcacccctcagatcacancatacttgactaagggtggactgtntgcatagggtacattttgggatgggggcaagggaccatactttgaacttctataaacggttgatttgggtggagttgaaaccaaattaccacattaagttagactgaggagggctctgtcttgactcttgtttagtttctgacctgcacattttatgttatgttacctatcttcgggtttgctt

SEQ ID NO: 700174 - DNA, 108 bp, Homo sapiens
tttcttggtagctgctgccttttttccccaccaaaggtctcctccggctcctaaccaccaacagcagcctccttcccttcctaaccaaccacaggctcctggctggca

SEQ ID NO: 700175 - DNA, 194 bp, Homo sapiens
  misc_feature (105)..(105): n is a, c, g, or t
  misc_feature (122)..(122): n is a, c, g, or t
agcccgggcgagcccggtggggcggccccagagcgtgaggtgccggcggcggccaggggctgcccgggtgcggcggcggcggcgctgtggcgggaggtggctgcnttaggcggtttgtggcnggcggggagcaagaggcccagttttttgtggcggctggggaaggagacattgggccgggcctgcagggccca

SEQ ID NO: 700176 - DNA, 539 bp, Homo sapiens
taatcgagctcgtaccgactttacgcaggctctctagagggatatgaatgcacccagggcctttgagtttcaagctgtggctcgtagatgtgctggcgagcagttcgttgatttaactagttgacgagtttaggcgctaagtcgatagtggggtatctaatcccagtatgggtcttagctatagtgtgtgcagatatgttaaagccagtttcgtagtttatattgtgtcaacgggcagtttgatacaagtctaggtgagtttgagctatattgtgggagggggtgatctacaacactctttatgccgggttctattgacttgggttaatcgtgtgaccgcggtggcttggcacgaaattgaccaaccctggggttagtatagcttaatttaacttacgtttattgctaaaggtttatcactgctgtttcccgtgggggtgtggctaggctaaggggtgagagctgcatgtttgcgtgcttgatgcttgtcccttttgatcgtggtgatttagagggtgaactcactggaacggggatgc

SEQ ID NO: 700177 - DNA, 780 bp, Homo sapiens
cagagcctgtatatgttaggccacttaatgacatgagagggagttctaagacatcggcatctaaacgaggggacgcctttctacattggctccttctggtgccagccgcaaaccatttgtgcggcccctcatctggccttgagattgcacattttcctttcttcaaacctacacatgttggggcaatcttgtgaccccttttggcccctagggccttcggcaaggtgaccactgaattgacaaattcaggaccagggctcaccggtgccgtcacttaggaatgcgggaacaaaagggacattttctcaaagttcccctgaatggacatgccaatctctagaaccattttattctccccgaattctaccccacacctcgtgtcctagagccctctgctggcagagtcaaggaaacattatgggcccagactggatatgttgtaaattggataatttgtgccccgtctcagggaagcgctagtaaaggtcaataccattttatattctacaaaacagacctattctattgttcataagggaacttctggagtgtgtttcagactagggaaatccctcattgagaggatcattaattgcttgtgtgccctgtcccactgctgatcctgaagtttctcaggagggaccaggcaagagcagtaccattctaaagcattccaagttgacctcaggcctgtgttcttttctacaacataacgctctctgtcgcggaggcgcctggtaggttcattgctgacataaccttccctaagcggccattata

SEQ ID NO: 700178 - DNA, 240 bp, Homo sapiens
ccccttgggctgtgggtgtccgcgtggatatctagcgtaggagacagatgaggatactcgatccatccattcatgcgcgctcagcgtaattaaatgatcgaggcctctgagcttaccttttacgagagtcattactttttcccggttgtttaaaccgcgcttcattgaatttcttcactttgacattcagagcactgggcagaaatcacatcgcgtcaacacccgccgcgggccttcgcg

SEQ ID NO: 700179 - DNA, 199 bp, Homo sapiens
gatgaagcccatttctttctttggggagcctgggggtttttattaagggtgtttatgttaaaccaaaagaaggttgaaggcttctttttgttgccaaaaatgtaagggtccccggcttcctttcaggcccacccgtctttcccggcggaccttattaggcgcacttttttgagagaaacacccgcacttttttttttct

SEQ ID NO: 700180 - DNA, 837 bp, Homo sapiens
  misc_feature (41)..(41): n is a, c, g, or t
  misc_feature (478)..(478): n is a, c, g, or t
  misc_feature (597)..(597): n is a, c, g, or t
  misc_feature (602)..(603): n is a, c, g, or t
  misc_feature (614)..(614): n is a, c, g, or t
  misc_feature (718)..(719): n is a, c, g, or t
  misc_feature (765)..(765): n is a, c, g, or t
  misc_feature (804)..(804): n is a, c, g, or t
  misc_feature (806)..(806): n is a, c, g, or t
ataataattaattgtatgttttgatggtaggttgtatattngtttgtagtttagagaagtgagttgcgttttatgtggtagctgtattaaaatatgtgtggtaacgctgtgagtgcaggaacaagcaatacctgtggaagttacttcaaccctgaaagtagggactttccagcactcccatattctggtatgggattgcaatgatggtaaatgtaaaactggaagtggagatatagagaactacgatgatgctactcagctatacaagttgattaggccctataaacttctaggtttgctatacatgttctataaaagctctactgaaagagaagtagtgcagttttgaaatgggacgaggataagtcctagaactactggatcttcttttgtctcactgtctagccatatatgcgtccggcgtgatgtctgtaacaacgtataacaaaagcataaaaaagaaataaaaacttaattnaaaaatatagaaaatagtagagataataggggtggttttgtgtagataataggtgtttttagacgaaataaaagaaaagaagtttagaaaaatagaaagaagaaaagaaaagaggatgnaagannaggaagtgggncgaataacggaggctaacccaatagagtgtgagaggtgtcgttgctttttatttatctagtttaaaaaaatagcaatgttcaagtcgcacttatttttaatttnncatagaatctcaagtttattagtggtgtttatcatggtttatcccnaacgagccccgaggatctgcaatagactgtgggaggcgncncgggaagcataagataggtaataacaagttt

SEQ ID NO: 700181 - DNA, 498 bp, Homo sapiens
  misc_feature (498)..(498): n is a, c, g, or t
tgcccaggtggatgtttaaaaaaagaagtttaaagtcccatcctttcaaattttaacctttttgatttattaaaaaggggattggccataaaaaaaaattactttaaccaatttacaggactggggaaaattggttttttcaaaacataagaaggacaatcggtttttgccatgtgggtgggtctctggaaacccctctttgttgccctccgtaaaagggcgctttgggtttagaaattaacccacttcttcttccccggggagataataagtcctccccacggaagcccagggccgaaaacaaaataaaccagcacccacttggggggggggggctatagctgtttattaaaaagaaaaaacctttgttaataaaaacgagggcgcattaccaatatataaagccggggggggggggtaatataaaaagagccttgccccttaattccagaatgtggggtaaaaaccactactgggatacaattaaaccggaaggcn

SEQ ID NO: 700182 - DNA, 339 bp, Homo sapiens
tagaggactggaagcatgcagccaactaagcatggctacttcagtgtaaaattaacactgagttacaaactgaagtggtaatgttaaaatccatggttctgtggttaggggaacaagtacaaagcttacagttgcaacagcaattgcactgtcattttaatcacactcatatttgtgtaaccaacttaggaatataaccaaagagtatccatggggaccttgtaaaagcccatttgcagggagcttccacatccaacatcaccttttgacatagggtggaattaccaaaaaaaaagttcttggattttaaattaaggccaaactccaggagttttcagc

SEQ ID NO: 700183 - DNA, 177 bp, Homo sapiens
cggatgattacctgaggtcaggagttcaagaccagcctggtcaacatggttaaaccccgtctctactaaaataaataaatgaacaatacaaaaattggctgggtggcacacgtctgtaatcccagctgctcgggaggctgaggtgggagaatcgcttgaatctgagacacggaggct

SEQ ID NO: 700184 - DNA, 179 bp, Homo sapiens
cccatggaggcattcctcccagagaggtacatagtaaaggcagaaaatgtctggaaaacaaggagtgggtcattttggctgatgtgaagggtttgttagaaaacctacctttcaattagttggctgtataatttggagatgactttttgaagccccttctcctacagagcaaagcagca

SEQ ID NO: 700185 - DNA, 1217 bp, Homo sapiens
  misc_feature (9)..(10): n is a, c, g, or t
  misc_feature (37)..(37): n is a, c, g, or t
  misc_feature (42)..(42): n is a, c, g, or t
  misc_feature (56)..(56): n is a, c, g, or t
  misc_feature (64)..(65): n is a, c, g, or t
  misc_feature (159)..(159): n is a, c, g, or t
  misc_feature (183)..(183): n is a, c, g, or t
  misc_feature (190)..(190): n is a, c, g, or t
  misc_feature (195)..(195): n is a, c, g, or t
  misc_feature (201)..(201): n is a, c, g, or t
  misc_feature (229)..(229): n is a, c, g, or t
  misc_feature (249)..(249): n is a, c, g, or t
  misc_feature (277)..(277): n is a, c, g, or t
  misc_feature (281)..(281): n is a, c, g, or t
  misc_feature (283)..(283): n is a, c, g, or t
  misc_feature (290)..(290): n is a, c, g, or t
  misc_feature (293)..(294): n is a, c, g, or t
  misc_feature (305)..(305): n is a, c, g, or t
  misc_feature (332)..(332): n is a, c, g, or t
  misc_feature (345)..(345): n is a, c, g, or t
  misc_feature (371)..(371): n is a, c, g, or t
  misc_feature (374)..(375): n is a, c, g, or t
  misc_feature (516)..(516): n is a, c, g, or t
  misc_feature (558)..(558): n is a, c, g, or t
gctactttnncataaaggcatttgtagtacacagaanacagnagtatcagtagtgnaaaagagnntatacagcccttaaatatcagactttgtaacaggtagaaatattacagaataatttaacgacactacaatggcgggcaaatgaaataggaaaanttttagtgagttacccgtactcanagcattntcagngctttnacaaggaaaaaaggtgatagtttaattntaacatgttaattggctagntcttgcccatatatgacttaaatgtctnagananacccccngcnnaaattaacaantgttagtattagtctcacacataagtnccatacattttancctcatggatgtgatgcactgaaaantcnnccgctccccttttttcttttttttgtcgtgcatattttatttctgtagtttctggttagctaccctaaagtgatttaaaaatttagaatgctttgtgtttcctatttggtaatcttcattgacttttctttagttaatgantattaaatagtgcatattctgtagactatagggtttacattntgttgcatcttataacttgtatagattgagctgattgaaataagattttgttccaagtattatctgatagaatacaagatgattcaaaattatatagatatttaaagcttttctgctgtttttttttttttttaattggcaactggcttttctggccgggcctctcttccctacccaaaagtgatgagttctgaacaagacaagactggtcatattggtagagacttgggtatgtgataccatagaatactgattgggatagccatcctagtcacttaccaatactggactagaatgttaactcttaattctaagctatcttaaaatggctattattatatacttcttggcttgggaagagcaaaacaaattcaatgttggtcatggcctggataatttcagaatgccaccggtatagcaagaggggtgacccgtgcttttcaacccttttacacttttacacgggtgttgtgaagcaccagttactcccttaatatttactcaagtggattaagaaagtttcaagatttggcagaatttatcaattggggctttcggtcctgaagtggtctgtgcggctttgcaagtgtccctttatttccacactttgaacagtggtaagccctgatgtcactgtgattgactcagctgggcatatg

SEQ ID NO: 700186 - DNA, 769 bp, Homo sapiens
agcggggggagtgggctatggccggagcttgagatacgccgctctgaatcttgccgccctgcactgccgcttcggtcactatctaacaggcagagcttcgccctgcaggaggcagattatgggattgcccaggattccaacgatacacgtgtgtctccagcactgtatgacgctggcttctatgtgcttggggcgagaagcgagatccagagtagctagtgttcgtgcatggagcacttcttgtgatagaacggcagtacatatttgggttaccgtacctcgcctccctgggaatacagtcccttgttctacagagagcttgttgctgggaagacgggaaactaagctgataggatgccctagagggactccgacctcctgcactgtgaatacatagaccggtcctagctcatcgatatcagatatcgcacagaaaacggtcatgtggaggctgtatggccgctggtaggtcgcgcctcaggccctggaggcgtagtgaatttctctagcatgaggaaggtcaggtatgctgaccaaacgctgggtatctgtgaaaaggccatagaatacaagatttacctgccttggatagatgtagttcctgcaggggactatgttttagactataaaacattttgtattttgcacagactgaaaacttttttcccatgcatgttccttcttactcctcccaagcactttgtgaggtaatgggtgggtgatctccatgctgggagagtaaaccagggttcacacatctgatctaacg

SEQ ID NO: 700187 - DNA, 1303 bp, Homo sapiens
  misc_feature (2)..(2): n is a, c, g, or t
  misc_feature (5)..(5): n is a, c, g, or t
  misc_feature (18)..(18): n is a, c, g, or t
  misc_feature (21)..(21): n is a, c, g, or t
  misc_feature (60)..(60): n is a, c, g, or t
  misc_feature (82)..(82): n is a, c, g, or t
  misc_feature (85)..(85): n is a, c, g, or t
  misc_feature (134)..(134): n is a, c, g, or t
  misc_feature (234)..(234): n is a, c, g, or t
  misc_feature (277)..(277): n is a, c, g, or t
  misc_feature (347)..(347): n is a, c, g, or t
  misc_feature (378)..(378): n is a, c, g, or t
  misc_feature (439)..(439): n is a, c, g, or t
  misc_feature (441)..(441): n is a, c, g, or t
  misc_feature (468)..(468): n is a, c, g, or t
  misc_feature (472)..(472): n is a, c, g, or t
  misc_feature (475)..(475): n is a, c, g, or t
  misc_feature (479)..(479): n is a, c, g, or t
  misc_feature (558)..(558): n is a, c, g, or t
  misc_feature (586)..(586): n is a, c, g, or t
  misc_feature (602)..(602): n is a, c, g, or t
  misc_feature (756)..(756): n is a, c, g, or t
  misc_feature (836)..(836): n is a, c, g, or t
  misc_feature (905)..(905): n is a, c, g, or t
  misc_feature (951)..(951): n is a, c, g, or t
  misc_feature (1014)..(1014): n is a, c, g, or t
  misc_feature (1016)..(1016): n is a, c, g, or t
  misc_feature (1018)..(1018): n is a, c, g, or t
  misc_feature (1126)..(1126): n is a, c, g, or t
cnctnttctcttttaaanacncaaccgactcggtaaccaacaccgacgaacgcgacaagngaaggtggtaggtgttgtgtantcnacgttagtcgtggcggcggctctgtccggcgtgatgacgcccgcggcangtactgggcgctgtaggtgagacgagtgatgacataatatcgtgccgtagcacaggcagtatcgcgtagtatgcgaagctgctatacatgatgaatgcgnggcgacggagcaggcgccgcggatccgggggcggaggcgcgangcgagcacgggtaagagcggaaacaacgcgaccaacaacgacccacacaaactcaacgaacccaccacgnccaccaacacatccacacaacaacagagacnagggaggacacacgagtgagtgtaggtgagaaggacgatgggaagaaggggtgagaaggananaggatcgacagtgcaccactccacgcntcanctntttntgcattagatatgtgtgacgtgagagtgtgttgggttgtgctggtatggtatcgcgcgtctgtatggtggggctacgtntgcagtgatatgacatatagtattaatnatgtaagagtgcactnaggacctcaatacaatgccaccaaatcactggatcactcgtaccttactgtatgttttagcataatagtcaatactattagtcgatgatgcctagtcacatccgagttccgcgaaatcgtattatcacttctctgctgtcctgctcgctgtcgntatgtggtggcgacgcgaggttagcgcacgcgttacgtcggagatgatgtgccacatcagctgctacgcggatgcccgcngcccgtagcgtagagtgcacatccgtaccttagacacgcgtctgtcgttgcatagatgtggacggatantggcggatcatctgtgtcagcgcacgtgtgtcgattcagaaggganaggacgagagcggatggttagtaactattcgacgacgtgcggtgtggcgcagcgatcgagtgnangntcgcaacgctacgcggcgacgatgcgcgcgtgtagcgctgcgagtgtggctcgacgcatggtgctgcctgtatctgctctcacgacactattgtgccttttgtgtacntcggtctggtagttccgtggagcgacgaatagagttgaaggaggaaggatgaaggtgagtatagatgtgggtgtgtttgctattagccctcatagtcactgagcgatgccccacgggtcccccgcttccgcacccggctgcgcgcggcgcgcggatagtggtttgcttctcgcctct

SEQ ID NO: 700188 - DNA, 179 bp, Homo sapiens
gcatttttagtagaggtggcttttcacctgttagccaggctggtctcgaactcctgacatcaggtgatccaaccgccttggcctcccaaagtgctgggattacaggcgtgagccaccgtggtaaaccgccttgtattaattcaatctgcagccacaagtccttatataatccagacatt

SEQ ID NO: 700189 - DNA, 306 bp, Homo sapiens
  misc_feature (248)..(248): n is a, c, g, or t
  misc_feature (254)..(254): n is a, c, g, or t
  misc_feature (275)..(275): n is a, c, g, or t
acatacacacacacatacatagtgattttaacagacaactcaatagcacacattctttccttttctaagctgtagtagttttgactttttgggaaagatacctgcttactgaggccaaagcaatttttcttcagtgactgtaatttgcctgtgtgactcgggtacagctctgaacataatttttacaaagtctgtgcccacaaaataggacttaaaatcatttaaaaatggcaaaaggacccaaaatngggacngggtgacctgggtgccttttnggggtgtccgggaaatgtttctcttctcctt

SEQ ID NO: 700190 - DNA, 130 bp, Homo sapiens
ttacagataacacaaatctaacctatattccagtgcttcccatgcagtcccctaagcagactcagctaccctttaccctccagatctcactatcttgtcttcactccttcttgtacttcttgaccgtcct

SEQ ID NO: 700191 - DNA, 130 bp, Homo sapiens
gcggtgaatagagcgggtactcgaggaaatactattttgggtcgagaggagtgaaaataaggggagatatgagccttataaaatttgttgaacaggccgggtgcggtggctcacgcctgtaatcccagca

SEQ ID NO: 700192 - DNA, 179 bp, Homo sapiens
gtcgatcgagctcggtccctaatatgggctatatttagaaactgggttcgacaaaatttacttctacacgatagctttgcacattaagtatattgggcctattaaaatttttaattttcagaatatcgtctgccacatattttagcaacacaaataatttttaaaaatattttctggtg

SEQ ID NO: 700193 - DNA, 279 bp, Homo sapiens
tgctggaaggctgcgggaggtagagcatatgttaatcagtggcgtgtaagcgtgtttcctgcaactggatgtcccggtttcgctgtcacccctctggaatccacgtatacaaaattccaaatgttagttgggcatagtggcaagcacctgtagtctcagccacgtgggatgttgaggtgggaggatcgcttcagcctggaaggttgaggctgcagtcagctgcgatagcactactacactccagccttggacaacagagggagacctgagcaagccagg

SEQ ID NO: 700194 - DNA, 1262 bp, Homo sapiens
  misc_feature (380)..(380): n is a, c, g, or t
gctcctactcctcatggtacccattctaatcgcaatggcattcctaatgctgtgaccgaacgaaaaattctaggctatatacaactacgacaaagggccccaacgtgttgataggcccctgacggggctactacaaccctttcgactggacgccgaatagcaacgtcttcacgcgaaacgagccgcctacaaacccggccatcatctagccattcacccgtctagcagtcatcggccccgtgacacttaggctcgtcaatccgatcgcatcgttctgtacatattgaaaatcccacccatccactcaataccctgaaacctcacctgggagtcaaactcctcgagagccttaaagacactcgctagtatattaactatcncaaagctcataggccttatgcccgtcgtaagctccaaatacccttcttagactcacagggggtcggaaggccaatttcagagaccctacaaaaatttgattcggcccctggatatacgggtcggccaactggccgaaggcaatagaaagggactcagagacaaatttctgccaatattggaaaagttcccacccccctgaaaggcgcgaatttccaaatttcctaaacattaaataccaaaacaaattttaaactctcaacgtaaataaacgttcggggcatgcaacctttttcataagcactttcctttcccaaaacccaccttataaattcacagcgataagcaggccaccacggaatatccaaccgctgttccctttgaaactttacatcggatccccgttggcccccaatgttccaattttgggaccccccccggtatgtggagggcgccatagtttaacacgacttaacgttcggaagtttgtacacttttcttgccccaaccggaaacttgagatggcgaacggaaaggaaacaccaaaaaatctccggagatagatccccaccacgcagtaattcgacggaatcctttgatggaccccagcgaaaacgggctgcggcaaaggttcccccgtaagacattctttgaaagggttcactttcccaatgacggttccttttcactagaccggaactttccgcaacaattaaaactggccccccggacaacgggggacccccgcaaaatacctgcgctcccctaaaatatgttccgttctcgcaattaagaacccggcaacaattaaagcagatccaataggacgcccgttttggagttttcacttcggccttcaaacatgcaaaaccgccctttcatcc

SEQ ID NO: 700195 - DNA, 243 bp, Homo sapiens
tagcgggatattgttgacccacgctgtctgtgcatgtgttggactggtgctgtgctgtgactatgcacatgagctggggtgagcttgctcagttgagtgtggatgcctggctggcgggacgtgtgtggatcctgtgtggtgagcctggagtccctgccgattggtgtggctggagtgtggagtgggccctgtgcgaggccgcgatgaagcctgagcggcgaggaccatggctgtgctgcttgc

SEQ ID NO: 700196 - DNA, 464 bp, Homo sapiens
tacagtgatgcccgggagatcgagaccagccgaggcacatagtgagacccgcatatcgctacaaaaatacgaaaaataaaaatacacggggcgtggaggtacacacctgtaatccacatctacttggaagacagaggcaggaggaatagaggccagaaattcaggtccagtctgggacacatagtgaggacccatgtctaataaataattcagaattttataatttaaggtagttcttcagcaagccatatgttttgtgagatgcaaaacaaatataataactttgcatatctcagatattatgacatgatacgtaattcaagaagtctgacatatattctaaagctagtcttgactatcagcttgttcctgtcggactcaagaacgcggaagaaaggtgcctgacaatgtcagagaactaaaaaacattcatcggatcaggaacgcatcactcttacaaagct

SEQ ID NO: 700197 - DNA, 127 bp, Homo sapiens
cacggcatacgaagggcattgaataaatcagtcaaaatgcacaaatgacatggacggatacatagggcgaaaattagtatttgtacttgtatgatacagacacgagtcaagaattccgtgctgttaa

SEQ ID NO: 700198 - DNA, 126 bp, Homo sapiens
agagctactccaaggctataagttaagaggtgaagatagacaccagaagcacaaactagggtaacctttggatagccaggtgtggtggtgtgtgcctaatcccagctattcaggaggctgaggagg

SEQ ID NO: 700199 - DNA, 262 bp, Homo sapiens
aggcaataatggatatttcctttattggctatttcctacagagtgaaaggcaagcctaatgcagttttatatctattctcttaaatgctgaatctaaatgttagcatatattactgtaagccttatgatttgaaaacccaaataacccctctctggatggaaatgggagcctgagacttttccttccttttttccctgccttgatttatttattccaacgcactgggttttacatgcctgttctgggccctaggcatgatgg

SEQ ID NO: 700200 - DNA, 478 bp, Homo sapiens
  misc_feature (38)..(38): n is a, c, g, or t
  misc_feature (67)..(67): n is a, c, g, or t
  misc_feature (74)..(74): n is a, c, g, or t
  misc_feature (94)..(96): n is a, c, g, or t
  misc_feature (100)..(100): n is a, c, g, or t
  misc_feature (105)..(105): n is a, c, g, or t
  misc_feature (132)..(133): n is a, c, g, or t
  misc_feature (137)..(138): n is a, c, g, or t
  misc_feature (142)..(142): n is a, c, g, or t
  misc_feature (144)..(144): n is a, c, g, or t
  misc_feature (156)..(156): n is a, c, g, or t
  misc_feature (160)..(162): n is a, c, g, or t
  misc_feature (192)..(192): n is a, c, g, or t
  misc_feature (198)..(198): n is a, c, g, or t
  misc_feature (200)..(200): n is a, c, g, or t
  misc_feature (203)..(203): n is a, c, g, or t
  misc_feature (205)..(205): n is a, c, g, or t
  misc_feature (208)..(208): n is a, c, g, or t
  misc_feature (212)..(212): n is a, c, g, or t
  misc_feature (214)..(214): n is a, c, g, or t
  misc_feature (216)..(218): n is a, c, g, or t
  misc_feature (228)..(228): n is a, c, g, or t
  misc_feature (231)..(231): n is a, c, g, or t
  misc_feature (280)..(280): n is a, c, g, or t
  misc_feature (291)..(291): n is a, c, g, or t
  misc_feature (319)..(319): n is a, c, g, or t
  misc_feature (333)..(333): n is a, c, g, or t
  misc_feature (341)..(341): n is a, c, g, or t
  misc_feature (354)..(354): n is a, c, g, or t
  misc_feature (360)..(360): n is a, c, g, or t
  misc_feature (388)..(388): n is a, c, g, or t
  misc_feature (395)..(395): n is a, c, g, or t
  misc_feature (397)..(397): n is a, c, g, or t
  misc_feature (412)..(412): n is a, c, g, or t
  misc_feature (418)..(418): n is a, c, g, or t
  misc_feature (467)..(467): n is a, c, g, or t
aaagagatctaattgagaaaatatacaaagcatttaanaatttcatccccagaaactgattgaaggngttacanccctcctctccaaggctcannnctgngatcngttagcatattgaatgatcagtaaaannatgnnaaantnagatgggaaggngaannngtgcattcccctaagctgagggggatggtntttttnancanangtngttngntnnntttgttccangtngctcttcctttccctctgtgttatctttcaaaacagttccaagcttggngaaagcaatgngctccacctactcagcagatcccacggntcgttccccgtggncgtgactnagcagtgaccttncctgcnccgttcctcagccgcccatcccactgcnttgactnangggaccctgcttgtnctcctngggggcaggactgggggtcctaactccttgcttcttttgttccactcanaaaacagttgt

SEQ ID NO: 700201 - DNA, 208 bp, Homo sapiens
atcttagaggattccccctggggactccttatttaaaaaatcttttttctgtttttgtcttttttgcaactggattcttgctgctatctgcccaggctggtctcaagaatcctggagtctctagcgatccttcagcctcagactgccctgagaactgggattatagacgttagccactacacctggccgatgtgcatttttaataagg

SEQ ID NO: 700202 - DNA, 241 bp, Homo sapiens
  misc_feature (12)..(12): n is a, c, g, or t
  misc_feature (36)..(36): n is a, c, g, or t
  misc_feature (127)..(127): n is a, c, g, or t
  misc_feature (182)..(182): n is a, c, g, or t
  misc_feature (209)..(209): n is a, c, g, or t
  misc_feature (222)..(222): n is a, c, g, or t
tggggggacatngagtcacgaaagcaccgtagactnaggtcgttagaggagagacgagtttgaagagttcctgccgagactgggtggttagatgaagtgagtgacatgtctgggggtaattgggatntgcaatgtagaggtgcttcttaatcagtacgtgtgagaaaagcctagctgtctcnaaatggctgtgtctctcatggcttggnccacaagcagtgnggcacactggcgagtgcca

SEQ ID NO: 700203 - DNA, 399 bp, Homo sapiens
tacgacttcgagggcgagcgcccactggtggtcatagaggacgcacatgaacttgagcgacatggaaaacagaattcatactatcgttacgcaagcttccaggacgtgcacgtgatggtcttcgtgggcttcggattcctcatgactttcctgcagagctacggtctcagctgccgtgtggcttcaacttccgtgtttggagtcttcggcatccagtgggcgctgctcatgcggtgctggttccacttcttacgatgatcgctacatcgtcgtgggtgtggagaccttcgatgaacgctgacttctgcgtggcctctgtctgcgtggcctttggggcagttctgggtaaagtcagccccattcagctgctcatcatgactttcttccaagtgaccctct

SEQ ID NO: 700204 - DNA, 203 bp, Homo sapiens
atacgcaatctacaccacagttgatgagatctatctcggggatactctacaggctagccgtactcccgcacgaggcagcgcaccttcacaggagtgcaggaacatatagctgtccatcttccgcatgtgtaacaaatagtaacaaggcagagctgatgaaggcgtgtgacagcctcgacttggtgatgaggtacctgcatgga

SEQ ID NO: 700205 - DNA, 179 bp, Homo sapiens
atattttacagaaaattggggctgggcgtggtggctcacacctgtaatcccaacactttgggaagccaaggtgggtggctcacgaggtcaagagatcgagaccatcctggccaacatggtgaaaccccatctctactaaaagaccaagatcagcctggtcaacattgtaaaacccgtct

SEQ ID NO: 700206 - DNA, 399 bp, Homo sapiens
cacgccgcctctcgaagccaggctgatgacatgagggtggagggcgcctttcccgtgaccatgctgccaggcgacggcgtggggcctgaactgatgcacgctgtcaaggaggtgttcaaggctgcctctgtcccagtggagttccaggagcatcacctgagcgaggtgcagaatatggcatctgaggagaagctggagcaggtgttgagttccatgaaagagaacaaggtggccatcattggaaagatccataccccgatggagtataagggagaactggcctcctacgatatgcgactgaggcgtaagttggacttgtttgccaatgttatccacgtgaaatcgcttcctggggtacaagactcgacacaacaatctagatctcgtgatcattcgaga

SEQ ID NO: 700207 - DNA, 563 bp, Homo sapiens
ccaggagcagaagcagatgctgggggagcgtctgttcccgcgttatccaaacaatgcattcaaacctggctgggaaaatcaccgggatgctgctggaaatcgacaactctgagctgctgcacatgctggagtcccccgagtccctccgctccaaggtagatgaagcggtggcagtcctgcaggctcaccatgccaagaaagaagctgcccagaaggtgggcactgttgctgctgctacctcttagacaagaaaaaaagagtcgaaagccaaataacccctcatggcatccagctaaggtctgaagacatcctagtttgtctgtggacctccacaccaagaaccaagttgcaaattcaataggtcatttgtatcagaaggtcaattatgaagcacctataagtttttcaattataagaatatattctctgggttctgttgtgacccagatgataacttttttttttctattatgggttctggttttttttttccctcatcccagaaatgggttttgatgtacccaagacttaagtttctcaaataaaggaaataaaatctccat

SEQ ID NO: 700208 - DNA, 236 bp, Homo sapiens
  misc_feature (13)..(13): n is a, c, g, or t
  misc_feature (76)..(76): n is a, c, g, or t
  misc_feature (89)..(89): n is a, c, g, or t
  misc_feature (151)..(152): n is a, c, g, or t
aatccttggttcntcaggggttaagtgctgtgtgcctcatgaggggttaagagctgtgtgcataagctggttcatntttcaaactcctntttgtttgcctcttgatggttcagaaacattcagctgctttcacctctaggccaaatgcttnngattttactctcatcaacattggaactttacgaaaacaggattcctggttcatcagaagcctgttttaatgaaaaatgcatttt

SEQ ID NO: 700209 - DNA, 394 bp, Homo sapiens
atccggctccactggtgctcagtgtgtgcagcactctttcagaaaccagcatggagcactaggtacccagaggtgtattgtgattttcttggctactttctccaactttagaaatagatgaagtgaaatagtttcttctacctattacctctggtgtactggaggggatatctgggatcatgctttcttataatttctcttatctttccctcagataccttctagaaactaccaagaaatattcagctgacttgcaggaatactttttcagtaggcagataaaccatataccccaaagtaatatgtagctttctttctttctttctttcttttttgagatggggtctcactctgtcacccaggtaggagtgcagtggcgcgatctcagctcact

SEQ ID NO: 700210 - DNA, 448 bp, Homo sapiens
tgcgtgatagccaaactactggatgctgggaaggaagagtcctcgctcatcaaagcatgcaacttttccaccattgctctaactcttctttacttccctaatcttcataagttgttttgcctgaaatgtacaccctttccggcactggaacgctgctcttcctcttgccattgtctccctgtgaaatttttatcctcctaaaatcatgccatcatgacctcgggaagagctatgccaaccagatgggttccctgtgattccagcatatgctcccttagagacaccagagtccacagaatcatggcggaacagggagggctggtgccaagaatctcctgcagttcgtaggggaccattgttaaaaaaaccatcagaggaattatgtcgacggcggcttactccaaatctaccttctcctctgggtaggacacgaatgttcaggggatcc

SEQ ID NO: 700211 - DNA, 723 bp, Homo sapiens
atgttatgttcacttccactccatttacgctcctcatactaggctctactgtctccacacactttaccatatacctatgatggcgcgatgtgacacgtgctcgcacataccaaggccaccacacaccacctgtcgcgaaataggccgtgcgatatcggcgatgaatccttacttattacgctcacaagtgttattctcttcgcagggatttcgtctgagccttttaccgactccagcctagcccctactccctcctattaggagtgcattggcccccaacaggcatcatcctccgctaaatgcccgctagaagtcgccactccttatacacatccgtattactcgcatacaggagtatcaatcatccgtgacgctcaccagtagtctaatagaaaacaagccgtaatccaaatgtattcaagcactgcttattagcaatatttactgggtctctatttttaccctcctagctcgcctcagagtagcttcgagtctcccttcagccatttccgacggcatctacggctcaacattttttcgtagccacaggcattcgcacggacttcacgtcacttattggctctactttccatcactatctgcttcatccgccaactaatatttcacgtttacatccaaacatcactttggcttcgaagccgccgcctgatactgcattttgtagatgtggtatgctactgtcttattctgccttatagatcc

SEQ ID NO: 700212 - DNA, 200 bp, Homo sapiens
ttttaaaatgtgcaaataaggtaatctgtattcagctttccagagtagtggcatgtgtttttcctttgctctctaatagtcatctaatcagggttcttacaatagcaagatagcaatttatatcactcagtatgagccctagttatttccattaagttttagtttgtaatccatcctccagtaggtagaagaatgacttc

SEQ ID NO: 700213 - DNA, 140 bp, Homo sapiens
aggacaacatagcatgcatgcttcttcttgttggttcgacttagaggatcccgtagaatgggacactaagtggttctcatccttaagcttgcagggccaatgtgctgccgggttgtggagaaggaccggtgggtaccgag

SEQ ID NO: 700214 - DNA, 263 bp, Homo sapiens
gagctcagatgggtctcattatgttgcccaggccggtctcgaactcctggcctcaagtgatcctcccgcctcggcctcccaaggtgctggtaccacaggattgagccaccaagcccggcccgaatataatttttaattttttttttttaagacagagtttcactcttgttgccttggctggagtgcagtggcacgatctcggctgaccgcaacctccacctcccgccatcttgagcctgtgtctccatcttgagcctgtgtct

SEQ ID NO: 700215 - DNA, 779 bp, Homo sapiens
caagtagctacatatatggcattcagcccattgtttctcctttagttggtagtgctggccctgccatatacctagctgcctgcttgtatttctttggtctttgcacagaggctgatctcacactacactcagcgtggaattagcttttgtctcgcagagcagctgttttagatgggaaccaaggtgtcatgctcttgccctcaagcatctgcttagggttaaatgatgaaccggcggggtgctgagatttggcaatggtggctgcatccttaagcaggccttcaagactccagagagacatgaatttattcaggtgaggaagggagcacacaggagacagagaggactcagttgggccactcgagacccagcccagtctctgcttcctctgccaacatctttgctaagccttcagccagaacagctatggtctgcgaagattaagtaaagaaaaatagcagctcctcctcctccttgtccatcagtgtgtgctcagactgttgtttgatcctgtgggctgggggtcgtgagcggcataccagtgtcctgcctctcttcttcttgatctcagcctgggcgcgcgcccgggcccgctgcagatgctcctcctgtaggatcttttgcatctggagcttctcttctcgaagtctgatgcgccgctccttctcctttgccctctcggcctgctcgatcttgacctggggcacgtgctccaggttctctagcagctcatccagctggtgctcaatgatggtcagcatctgcacggtgcccaggtt

SEQ ID NO: 700216 - DNA, 317 bp, Homo sapiens
tgaaataacaaatcacataaaagttcttaacaatcccctctttcgaagtgcatttttttaaagcagggcacgagacatttggactctagctatatgacatactgggaaaggcagagggtgtacggactatttaacttcatggtctagcccataatatctaactggctaacgaaaccattataatgctaaaattgcgtcatttaacactaacaatttatacttgttaaaccgagcatggaataatggctggataactgtcaaagtaagcgccgaatccataaggcttctaacttatttaaaattggtgtgtcagtttt

SEQ ID NO: 700217 - DNA, 1022 bp, Homo sapiens
  misc_feature (903)..(903): n is a, c, g, or t
cctgtagtcctagctacttgtaaaggctgaaccaggagaatcatttgaacccaggaagtggacgttgcagtgatctgagatcgtaccactgcactccaacctgggtgacagagtgagacactgtctcaccatgaaaaaaaaaaagggacactgcgggcgcaaaattggaatcaagggtcctatatataattcacgataatcagcttttattatctaagtcagtagaaactccctctggtaaattccctggatttcggatcaatgcgcagtatgggtcatcggaccactttcaaaataggggacacatggggtcacgtggggtaccacgtgggcaataccctagggtattaatctggggcacgatatttattgatgtcataaccaacaacattgaaaactaatttcccgcaaattgcaacgcgtcatcaccctcttctactatcattacagcgactactcggggacccttacaaaccacagtgtcctacaaccccgttgtgtccttgaacatcccaatagggacccaaggacgagggtgtactaccacaaaagtgcctgcgaaacgggtctccccacgggaaaagaatacaggcaagggtctaacgttcctgcgcccgggtggggcaataaaagcatgttctcatcctttttcatttaaccttacaaacgaaccttaaaccaatggttagggtcgaaaaggctacaccaaagaactataaaccggactccataggggtgttgcactgtccatcatggctcttacgagaacaggaggggcagcttacgttaccatcggccagggtgatccgagaaatgaaggtcactgaacatcttaaaaaaagggtgacgaccacgtgcgctacatgttgtcttcctccatcatctcatactatctcatacccnggacacagacaatgacatcaacgagacacaaagaacaaaagaacaaacaacaagattatgatacagacgtaaaagagagcatataataacaaaaaaaaaacgaagagagctcgatacca

SEQ ID NO: 700218 - DNA, 165 bp, Homo sapiens
aaggaaaggagaatgttatgtggaccactttggtttgctttttcgcgtgtggtagttttacgttattagtttttaaaatcgagtagctttttaatggaaacaacttgaccaaaatatttgtcacagaattttgagaccgcattaagaaaagttaaatgagataga

SEQ ID NO: 700219 - DNA, 169 bp, Homo sapiens
  misc_feature (65)..(65): n is a, c, g, or t
  misc_feature (164)..(164): n is a, c, g, or t
atggaaaaagcgtatattaaggaaaggtaggtctaatggaacaaagagaaagaagatatattaancccttcttatacaatggtattcattaatgaaactggccagaaaaagggaactggcagaagaggggactctttggaaggaaaccaaggtctggagggaanccacg

SEQ ID NO: 700220 - DNA, 220 bp, Homo sapiens
agcggtagccatgctcaccggtgagctcaagaaggcactcatagaggttctgcagccctggatctgctcgagcttgtggtcggtcctcggggaacaaggtcaggtacatgaaagacactgttgacatcacaggttcgcccccatgcgaggggtacgcgagctcgcaattctgtaattctatggtctatagcgtgttccgaagtatcgagtaagtgtatca

SEQ ID NO: 700221 - DNA, 166 bp, Homo sapiens
gactgtgaagacagcacatccaccctccacctttagcccagacacccccatttgtacttataatcaagagaaaagctctaagtatctggcattgccatagggtgctttagtgttaaaagaaaagtttgctgaaaaagtaagatttcttgtgcctggttaaagaaga

SEQ ID NO: 700222 - DNA, 350 bp, Homo sapiens
ggggttttaaaaaattttttttttggccccccccttttaaacaaaaagaattccccccccccctttcaggatttttttatccccctggcaaccatttttccaaggggttcccgggtttagaaaatgggaaaaagggcccctcccccttcaagggaagaatttgggggtttccccccccaaatttgaggggtttggcccgggaaaaaaattgccccttttttttagaaatttatttttttcttggggggtcatgaaccgggccaacccccggggggaatttttttgttttgttttttatttttttggggtttcctccccccggggattttgaataaatgggaaaaaaggca

SEQ ID NO: 700223 - DNA, 240 bp, Homo sapiens
cccaaaaagacccccagaacaccggggcacaacgaaggccccgccacaggggccccgggcgggcaggagcctccccgcagaaccaaccggggccccccaggagggggggggacagcggaaggccaggaccaagaggacaggcaccccccggggaaaaggcccgggaccacccccccccacccccaaccaccggcacagcagagggagacgcagcacaggagcggcagagagacgcacggg

SEQ ID NO: 700224 - DNA, 908 bp, Homo sapiens
  misc_feature (118)..(118): n is a, c, g, or t
gaccagcaaatggcgtgattgaagcacttttggtacctgatgggggagcagtcgaatgaggcactccacttttcacactcaggaaaactggtgctgctcctgctaaggccaagccggnctgatagtctcctgcgtgctgcagtcccaagaagcagaaacctacagcagcggcagtttcctcccccttgtcagcattccagtaccctatctcagaatgccaccgtatgtccctcgacctcatcactaagcctccttctggcaaacctgatgtctgtcaagtaaaatcgcatctgtatgcgcccatcctacatatgctgaagtcgctaggtagtctcgggcataaggtcttggcgttcatgatacgatcgaggtagagaaagtgagacagtgatgccggcagtcgcgattgctcagacgatctgaaggatggcccagaatacatgtgcaaatgctgacaacttttaatgagattgacctgagtaacatccaggagatgagggctcggcacaaagaggcttgagggaagaaacataagcctcaaagctaggcttcatgtcggcattgtgtgaaggcctcagcctttgccttgcagggaacagcctgttgtgaatgcagtgattgacgactacaaccaaagaggttggtgtctagggattcactattgacatcagtgttgcaggtgggcaccgcaaggggtctggatcatcccagtcatcaggcaatgtggaagcttatgaatcttcgcaagactattcgaactggaccatccacttgacctggggcagactcacgggccctgacagacttgacctgtggcaatgagggatatgggactggtgagtaccttctaccagataaggcattgaaggcgttcggggttcgggcttggaacgcaccatatcaacccc

SEQ ID NO: 700225 - DNA, 377 bp, Homo sapiens
  misc_feature (287)..(287): n is a, c, g, or t
aaggggaaaaccccctttttttacccggggtttttggggggggggttttttgggtttttcccctctttttgggggccttttttttttgaaaaaaaattttccccttttttttttaaaaaaattttccaaaaaaaatttttttttttgggggggcaattttttaattttttaaaggggggggggtttattttcctttaaaagggggggggtttttaaatttttcaccaaaaaattttgggggggaaaaaaatttttttttggcaaaattccctttgggtgggggtttnagggggaaaaattttaatttttaaaaaattggggggccaaaaaaaaaaacccaaacccctgggggttaaattttgatttgaaaaaaaaaa

SEQ ID NO: 700226 - DNA, 935 bp, Homo sapiens
ctggcccgtgctttaagagggttaggccgcatgaacccgggttgtgccttgtgagtgaacggaccgggctcagatttgtggcgaacagttagcccagtctcacgggaacctcttgaattaattgaggggaattcgtttcctttcgcgaatgatgaaaataggcttctagttttatgagagctcaccccgcgaaaccacaccgttggcctaggggagtcacccccccctgtgtgtttcggttggtagtaacgtgagattcgcacgttgtccaaagcgttggcgcatcaccacatgtttctttagacctggataatcccggctggcaattctctggaccctttttgcttgacctcagctgcgatccattctcacaggtcttgccccgatttcgtgctagcaagctaccccattctggagtgcaggacgtgaaacctcttggtcctctgacctccatgtaagctgggggtctgtctaagttgaacagattctgccctatgttggtcaccaccaaaagaccaccgcccagacattgtttaagcccttacgctcactcgtcagcagtgagtcttgaggaaattcataacccacggcactcccatattccttgtggaggcctaggcgaacaagtgacagtagggtatattaaatttttgtggctcttggtagggacgaactacccatattagatattcttttaaatctggcccttttttataccaattatgctccatagttcacacgaggttactgcagtcacgctaatttaagtaacaactataatgtatgtgtattaccataattttaggaaggctgcagaatccggcgtactgagtgctttttgataagtctccagttttaggtccatataggctcccttctgtgcattctgttctttgccaagacctgtttgaattaaaaagacaattttaaaacca

SEQ ID NO: 700227 - DNA, 683 bp, Homo sapiens
  misc_feature (323)..(323): n is a, c, g, or t
ggaaaaaacaccccttctctccctgaataatttttttttgttgttgaggggggaggggttttttaagcgggggggcctctctttttaaagaaatttttcttttttttaaaaaaaaaaagaaggggggggcaaaaaaaaaaaaaaattttcccccccccctaacaaaagatttttttaaaaaaattttttttttttttaaaaaaagagcggggccccccccccttttgtgttttctcaaaaggggggggggggggggttttttttttttttgaaaaaaacaactttttttttccgggtttttttttttaaaaaaaaaaaaactnctttccaaaaattttttaaaaaaaaggcccccggggaattttttttcacaaaaaaagggaaaaaaaatttttggccaatttttgcggccccccccccaccccaccttttttttaaaaaaaggcccttccccccccttttttatatttttctaaaaaaggcccccctttgaaaattttagaagaaggggctctcccccccggggttttagaaatttttttcccccaaatttttataccagggggccccccccttttttgggggtttttgggaaaaacccccccctggaataaacccgggttaaaagaaaaagaaaggggaaataaaggtttacccccttctgtgggccaacggcggggggg

SEQ ID NO: 700228 - DNA, 100 bp, Homo sapiens
ttttgtggactggccttctctttatgtttacatttcatttccccaaaatgttcagtgacttgagatcaagtccctgtgcctgtacgtccgacaggaagtg

SEQ ID NO: 700229 - DNA, 182 bp, Homo sapiens
ctgtgtacgtagttgccactgatgactgggctgtccttgggcctatatatacatagctgttggaataaaataatcacagtactttccagtcagtcagtccctggtttcctagaatttgttctaacccaatgcaagatatctatattatcctcccattgggctataatcagtgttcgtaaact

SEQ ID NO: 700230 - DNA, 280 bp, Homo sapiens
cgcataaggaacacctggacttcctgcctcacgtggacagcgcggatggtcgccgagttagggcggattgctgtgcgaattcctgagacgcggcgcaaacccaaataatctacgaaggccccgccagaaaactcaatgtgagtagtgacattgtccatcctggtgtgcgcaggcttagcagtaatctcctcactgacagctcaaagctcatgatattctgaactggatttccaagactctgtactggtcctgggattctctgaagaattacacgaattgt

SEQ ID NO: 700231 - DNA, 794 bp, Homo sapiens
agtgcccattactggccgggggcctctcccttccacatataccttggggtcgagcatgaccgtgctgggtgggtgcagaggggtcacctcctctttcatgtgtacgtattgctacagtaaatcattaagtttacaaaacctgcaagaagatacgtggctgattaagatcaggcaacttggggatactaaacacctgggggaggccgacgacgagccgcgattaaactatctgttaaggaccccccgcctcccttgtggggagcgcggaggtccccccaaaggagtgttcagaccagcagtcgccacgatatagttcacccacgaagaatccccctgtggcgaataagcacgaggggacggcgggagagtttattctccgccagagtaaaaaaacagaggcgcccttgtgggggccacaaagcccaggggtatctctgttacggccaatagacacttccacaaggcggtactacctaagaaggagcctatactcggggggaaacttaaccaaaaagggagggttatacgcgagcgatcttgagctaagagaaaataataagccccaccgcgcccgtgggggtgtaatcattacaatttttacgaaaacacattccttgtttcctacaaacaaatttccccaattcctcgggcatggtaacccagaattttcggttgtctcatatactaaaacaagaagccttgaccttgacattatatttaaaataacctttgtactacacttttatcacccttaacctgggtcatagaaatactctaccaggttataaggctca

SEQ ID NO: 700232 - DNA, 154 bp, Homo sapiens
ggctgtctctaccatgaccaaagtatcctaccttccacccaagctgacatcgtcgtcaggtaagtctggtcaaagtgtataacgacattcctcatgcaagcctacaggacagggtttacgagctgagatcatatagggataatgcttggttgag

SEQ ID NO: 700233 - DNA, 551 bp, Homo sapiens
agatacatcctgtcatcagtatatttcagaatacatgcaatgcactagcaagttacaattgatagaatacatttgaaatgttaaatgaaataagccaggcacagaaagacaaacaccacatgatctcactcatatgtggaattttaaaaagttgatctcactcatatgtggaattttaaaaagttgatctcacacaagtagagggtagaatcgtggttaccaggggctagggagagaaagaaggcagaggcactgaaagatgttggtcaatgggtataaagttacacctaggaagaataaattttggtattcaccacagtagggtgactatagcaaataataatgtagcatgtatttcaagatagctagaaaagcaggtttttaaatgtcaccacaaagaaataacaaatgtttatagtggtggatatggtaattacgcctatttgatcattatactgtgtgtacatgcattgaaacaccacattgtatcccatatatatgtacaattatgtgcccattatacatttaaaaaataaattttaaaaaccttc

SEQ ID NO: 700234 - DNA, 240 bp, Homo sapiens
gacagaacaaataggacatatgtatatatgaaagggagtttattaaggagaagtgatttgcaaggtaaagtcccatgataggccatctgcaagttgaggagcaaggaagccagtagtggatcagtttgaattccaaacctaaagagtgagggaagccaacaagtgcaacattcaatctgtgtgccaaaggcccaagagccacaggcaaaccagtagtgtatagtacaggagtgcacaaag

SEQ ID NO: 700235 - DNA, 217 bp, Homo sapiens
tacccccccggttactgtcttacggcccagagcacctggcgtgatcccccgcgctctcatggacctcctgcggttcacaaggcgaggagggtgctgagggtcggccatgggctctctctgtcaccatttcctacttagagatctaccatgacaaaggtcaggctcttttctgcactctatgaacgaagagacgaccggttaaatcagcacttatctt

SEQ ID NO: 700236 - DNA, 195 bp, Homo sapiens
ttctgtattcatcacttaaaattttaattttccgggacctcaagtacatttgaccatgctgctgttgtaccttaacaaaactcagtgataccgatatttgatctattaaaaatgctctttttgaggaaaaaggtttggaggtctctgattagccgaagtttgatgtgggcctcccataggaaatttggggcccac

SEQ ID NO: 700237 - DNA, 938 bp, Homo sapiens
gggaggaagatgatatcaccgattctagcagcaaatggcaaagacgagactacctgcttctggtgatggagggcacagatgacgggcgccgtgctggaggtatgatactgtgaccaggaagtaaaagttttattggaccagctgcggttcccgaatggagtccagctggtctcctgcagaagacttgtcctggtggcagaaacaagcatggccaggataccgaagagtctacgtttctggccatgatgaagggctggggctgatctgttagtggagaacatgcctggatttccagacaaacatccggaccagcagcgtctggggggtactgggtgggcatgtcgaccatccgccctaaccctgggttgttccatgctggattgtcttatctcgagagaacctggattaaaaggatgattgttcaatgctctttagtcgatagtagacggtgatgaaggttgtgccgctggtacggaagcctcgtcctagaagtcagggacaggggtgccttccggagaagcctgccatgagtcccagatggtgctggtggcccacctacatcagcgaggtgcagcgaacacgatgggcacctgtacctgggctctttcaggtccgccttcctctgcagactacaggctgcaggctgtagagccctccagatagctggccctggcaaggcaggcatggagtcttcgcactcaggcagcaacgcctggtccagcgaggagctgggggacacaggcgtggttccagtgtgcaccatgcaccctgtagtccctgaggaagtgggggggaacgggcggcgacacaatcccgaggaaggcccgggcccccggggtggcgccagctaaggaaggggagaaattgccggcggaacaaaatgttaggcctttcttaaaaaaattctgtgaagacccacagaagagaagcgcgcatga

SEQ ID NO: 700238 - DNA, 111 bp, Homo sapiens
agaggatcccgtggactcacgcgggcacggtgcacggttcacgcctacatcatcagctccctcaagaaagagatgcccaattgtctttggtaaagagagcaaaaagaaaga

SEQ ID NO: 700239 - DNA, 256 bp, Homo sapiens
aggaactgatcgaggataaagggtgtgaaccaagaataggaagccatcaggggttatcagaacatgagctgaggaaaaatgatagagaacaagccgaccaatactgggattcccgaaggaaccggaccaaccccccccctggtgatggaaacggcccttccacgggcggcttgagcccaacccttttaaaccccccccttttttccgccccgggccccccctctgcaggggggggctccccccccttttccccccc

SEQ ID NO: 700240 - DNA, 154 bp, Homo sapiens
aaagtcgcgagtggcttgatgttcttgggagaaaaataaacactatgaccctgcttgtcttactattcctgcaagagaacactactttggacagaaacagaggatgttggctgaagaactgcctaacagcaaataaattaactatggaaaacat

SEQ ID NO: 700241 - DNA, 1500 bp, Homo sapiens
  misc_feature (23)..(23): n is a, c, g, or t
  misc_feature (1019)..(1019): n is a, c, g, or t
atcgagttggctcttggtcttanttcagtcctctcgcgtggctctgttggtggaggtacagtcatctctggttgtccgtgcgaccgaggtagtcgtagttctatctgttgctgcatgctgcggccgcgatgtttcgttccttccccccgctggcgtgttatgcttgttctccgctctcctctgttttgaggaagcgtctctgacgtattttgcccacgagaggaggggttcgttctctattatcgtgggaactactaggggtcgttcgtgcccccttggagaaattgtttgtgcccctctctgtgtgtggtgggggagaaggtagtttctccccctcttggggcccaaggtgttttgaaaagcgtcgctttgtggggttttttaccgccggcccgttagcacagagtagttcccgcggcgtggtcgccgttttggggtgggccccgccccccaacgtaccgggatgggtttttggcgccccacctagtgggaggagaattctcttttgtatgcgcctctcctaggcgggtgaccccaaagccgggggcgcccacacgggacatattcttttgcgtacagacgagttcactttatgtgcgggaagttccacggaaaggcgcaacgcatttgtggaaaaactgttgtagtatttcggccgcgtccctcctccctcttgtgtgttgccacgggggcacccatagccttttcggaccggcaatttttatagggtagaagtatattgcaaaggaattgtattgaagcaccccggcttttttggggaattcctcttggctcgttgggttttctgggtctgtggaacaccagcacacgccttttcgggtctcacgcggttatactcttttgagcccggagccgctttaaagcacatatttgggaagatatatgacatatatgaaaagaaattgcgtttctcgccctccgttttttgagacaccttgagcccctgaatcgccaaaagggtggagaagaaacgagcgccccgaacagagaggaaaccnccctgagaagaggaccaccccacgagaagaccacccaccacgagatgacccccacgaggccacacgaccgcgaagaatgaaagagaatatggagatgtttggggagaccacgaatgagaagaaagaaagataaccacgccacacacaggaacttctaccaccgctgagaaacagagtgagattgtaaaattataacttctcacccactttggagtcctcttgtggagagcggaaatgtgaaatttaccactcactttctcttttgggagagacacttgttttggaatggccccctataatccccttctcccctgcacctgtaaaatgtgggattattgggtcacccgggaaaagtgggttttttagttgaattttttttaacacttcctcactgaaatgtaaagtttgtactatttaactgagctattcttgaatgtaaaatcttgtcatgtgtattaaaattaaaaagatcccccaatta

SEQ ID NO: 700242 - DNA, 145 bp, Homo sapiens
cccctgttatatacactacatcggcgtctcatctgcgggagggagctgtgtgtgtgtgggtgtgtgtgtgtgacggctgatgtgatgcgcggggggcgcgtgtgtgtgtgggtgtgggggactcctctacagtcaccctgcacgg

SEQ ID NO: 700243 - DNA, 166 bp, Homo sapiens
  misc_feature (160)..(160): n is a, c, g, or t
  misc_feature (165)..(165): n is a, c, g, or t
aagacggggtttcaccatgttggtcaggttggtctcgaactcttgacctcaggtgatcctcccacctcggcctcccaaagtgctgggattacaggcgcgacacatgcgcctggccccaagtaaactaattgaaaatactctggggtagtttctgtaatcngtaant

SEQ ID NO: 700244 - DNA, 131 bp, Homo sapiens
  misc_feature (44)..(44): n is a, c, g, or t
  misc_feature (64)..(64): n is a, c, g, or t
  misc_feature (69)..(69): n is a, c, g, or t
  misc_feature (76)..(78): n is a, c, g, or t
  misc_feature (81)..(81): n is a, c, g, or t
  misc_feature (90)..(91): n is a, c, g, or t
  misc_feature (95)..(95): n is a, c, g, or t
  misc_feature (115)..(115): n is a, c, g, or t
  misc_feature (119)..(119): n is a, c, g, or t
  misc_feature (130)..(130): n is a, c, g, or t
agcatcaaataccactcctctccccgccaaaaccaaataaaccnacccaactctttggcaacanttgtnttaaatnnnatnttaggttanncttnttttttgttcctgggttggntcantgctacatggnt

SEQ ID NO: 700245 - DNA, 166 bp, Homo sapiens
ggacccctaggatatgtcgtgcaggtatagctgaaaactgagacattctgtgacaattaaaaatgctgctcttttgtaattttatcgttgcttcatgcattatcggcttagtgatgctgaatcagattgccatactatggcaagatctctctgccagggtctttat

SEQ ID NO: 700246 - DNA, 250 bp, Homo sapiens
atcgcgaatcacctatgttctttttactttggtgctagactcagggaactgtgcatcaccctaccaccagaagttaccaacaggtttctaagagcatttttcatgcagagctattcccaagaattatggctaatttgagggcctttttggataccaccttttggcacaggaggttaaattgcctttagcggtgaatgttaaatgtataatgccagactgggaagcacactggcacagggcaatcgcgaag

SEQ ID NO: 700247 - DNA, 224 bp, Homo sapiens
  misc_feature (59)..(59): n is a, c, g, or t
tatgctatagctgactcctgaggatcccccacacgccccaaaggccagtctctggccgngatgttgctgctcgttgcgcttctggcgccgacgttgttgttggtcgcggtttgcggcgcgcgggtgggcgtgtggagcgctgatttcagtctgggcgtgctggccctgaaagcggggcgggtgctggcctatctgggcttggcggccgccctggccgcctgcct

SEQ ID NO: 700248 - DNA, 1020 bp, Homo sapiens
cacgcgtcgccacgcgtcgggctattgtccttgttccttcatgtattatatgatagtttttaaaaaagacattagtgtgattttttttcttgcttcttttttttctttcttgtttttcttccccataaaaacgcttagggaacaataaaaagaagggtagggatagggttgaggtaagtagtaatggaataatggatgtgaactaatgatatatattataagatattttaaaagtaaaatgacataaatgattagaataggtagtgttgacaagatatcaagcgaataagtagatataaaaacatagtgataaaatgaaataataaatagggtataaaagtgagaagagatggaatgaaattgcaaataaaaaaagatgaaactaataacatgagattgagataaattagtacaagttaaaaaaaaagggtaagtcgattagaggaaatgaagaaaataaagaaaatagactcagaaaatctcacatgcgaaaaaaacaaaaagagacacacagaggaaagaagaatgaacaaaacacaacagcaagagaagagatggaaaacaacgaaaaaacgaaggacaggaagagcatatcgccacaagggagaatacacattgaaaggagaaatgacaaacaacaagaagtacacaatagaagacacaacaagagacacacgaaaacagaaaataaagactaaaaagaaaatggacagaacaacgtaaaaaagaactagaaagacaaaggataaacaagacaacgataacaggtcacacaggaacaacagtaaacgagcataagcaaaaaaacacaaagcaatagttaaaacaaaaaaaggaagatgaagaaagaaaagaaaagaaggagaaatgataacgctgagacgacaacagtatggaagacaacacactaagggaacagagcgcaaacacaatagaagaagacgagacaagaaaagtaacaatgatacacacaacaagaaaagaaggaacaagacagagatagagaaagcaagacagaac

SEQ ID NO: 700249 - DNA, 511 bp, Homo sapiens
tgtctcatttcgggacggacggcatggagggcggaaaccaggagggaagggagggaaggagggaaggagggagggagtggatacaacggaggaagacggaacgaaacggggcgtggactctgtctacatatcttaataccctgtcatgtctccagtgataatcgttgttctgatgtcttgcagggtagatgtcgcggttgatattgcatggtaagaatctcgtaagttattcctatacatatatcccagacggtacctggtctgggctctgcattgtcatcaacaggtatggtctccccgaaagaggccctgtcagcgtccacggcagctgacttcgggaacatggtcctcatgttcaccagccctctgagatcaacaaagcacattactacgctaaaacctgaaaatcctaagatgcagcctggtataagccagtgttttccaacttattttcaccatagcatagttactgcatggaacaactgtgccgccgaacttgtggtctgaggag

SEQ ID NO: 700250 - DNA, 159 bp, Homo sapiens
ggggggggaaaaaaaaacccaaaaaccccccccctaaaatttaaaggggggttccaagggggggggatttttttttttaaggccccaaaaaattttttttttttaacccggggtttggggggggggttttttttcccccaaaattttttaaccccctga

SEQ ID NO: 700251 - DNA, 968 bp, Homo sapiens
  misc_feature (24)..(24): n is a, c, g, or t
  misc_feature (109)..(109): n is a, c, g, or t
  misc_feature (113)..(113): n is a, c, g, or t
  misc_feature (169)..(169): n is a, c, g, or t
  misc_feature (176)..(176): n is a, c, g, or t
  misc_feature (215)..(215): n is a, c, g, or t
  misc_feature (257)..(257): n is a, c, g, or t
  misc_feature (285)..(285): n is a, c, g, or t
  misc_feature (294)..(294): n is a, c, g, or t
  misc_feature (297)..(297): n is a, c, g, or t
  misc_feature (309)..(309): n is a, c, g, or t
  misc_feature (334)..(334): n is a, c, g, or t
  misc_feature (337)..(337): n is a, c, g, or t
  misc_feature (364)..(364): n is a, c, g, or t
  misc_feature (371)..(371): n is a, c, g, or t
  misc_feature (424)..(424): n is a, c, g, or t
  misc_feature (450)..(450): n is a, c, g, or t
  misc_feature (464)..(464): n is a, c, g, or t
  misc_feature (479)..(479): n is a, c, g, or t
  misc_feature (481)..(481): n is a, c, g, or t
  misc_feature (539)..(539): n is a, c, g, or t
  misc_feature (545)..(545): n is a, c, g, or t
  misc_feature (564)..(564): n is a, c, g, or t
  misc_feature (583)..(583): n is a, c, g, or t
  misc_feature (618)..(618): n is a, c, g, or t
  misc_feature (625)..(625): n is a, c, g, or t
  misc_feature (637)..(637): n is a, c, g, or t
  misc_feature (642)..(642): n is a, c, g, or t
  misc_feature (657)..(657): n is a, c, g, or t
  misc_feature (697)..(697): n is a, c, g, or t
  misc_feature (699)..(699): n is a, c, g, or t
  misc_feature (798)..(798): n is a, c, g, or t
  misc_feature (809)..(809): n is a, c, g, or t
  misc_feature (873)..(873): n is a, c, g, or t
  misc_feature (877)..(877): n is a, c, g, or t
  misc_feature (883)..(883): n is a, c, g, or t
  misc_feature (908)..(908): n is a, c, g, or t
aaaactattctcctgctatgagtncaatatttttatttctttacaatgatttcagaagagattacaaagagattaatatacttaaagaatcagattttggcaaacagtnaaancattaaaaagagcttattttcattaacatgtaattaacaggaaggagaggattggngagtctncttcgtaaccaggtccactgtggataggaagggcctccnttccttcccaccatggagagcctaaaatcacaagccccagcntccatcaatgaggaaagggttaccagtnacataagcngantcatcagaagcnaaaaacacgcagagcatggttattnctnctgcagtggcgaatctccccgtttttngtttttncaggaaatcattccgtgcctttccaggattccctctggcttgtatcctttctngtagagagggcgtataaactgtcccngggcacaaacagtngcacctgaggccctncnggatgaaatctgcagcaacaaattttgttaggccaatgacggctgcgttggttgtccngtacanacatttttccacaactccnttgaggctggaagccacanaagacatgtggacaatattgccagatttctgagcnagctttntaggaaggaatnccttnatcatcagggacatncgcgcgcacattgagatttatcgagaagtcccagtttttntnctcaaaatccaggacagttccatgagggacaaaaccagccacattaaagagaacatcaagttttttaacttcattggcaaactgatcaatttgtttttnctttgttacancaaggacacgagttttaatacccgggtacttttccagtccctgaagtttggactcattaatgtntgtngctatnactttggcacctcctcttgcaaaanccaaggcagccgcctggccaataccctaaccagcggccgtgagattgaagactttcccat

SEQ ID NO: 700252 - DNA, 315 bp, Homo sapiens
gaaaggacaccacaggagtggagcctgcgagcattaataatgacacaacacgagaaaacctcacccggaccggaacacggcacaggattgacagcatagatagctcttactcgaatatacacgaggagataggtgatgcatggccgtacttagttaggtggagcgatttgtctggttaattccgataacgaacgagactctggcatgctaactagttacgcgacccccgagcggtcggcgtcccccaacttcttagagggacaagtggcgttcagccacccgagattgagcgtacggggattgggcgtacgggga

SEQ ID NO: 700253 - DNA, 135 bp, Homo sapiens
cggctttggtcgatggacctctgtcctcagtaggagaaggccccgcctttcacgtgcatctgctcactgctttcctcctcagtttccgcacagtgccaccataagtatgtccgacaagcctggcagaaggcagac

SEQ ID NO: 700254 - DNA, 295 bp, Homo sapiens
ctgttgtccaggctggagtgcagtggcatgatcatggctcacagcagcctcagcctccctggctcaagcgatcctctcgcctcagcctcctgagtagctgggaccacaggcatgcaccaccacaccgggccaatttttttttttttttttttttttttttttgtagagataggatctatgttgcccaggctagtttcaaactgctaggctcaagctatgctcccacctcggcctccaagtgccagggtgtgagccacatgcctgggctgtgatttttttttttctttgtcgacgc

SEQ ID NO: 700255 - DNA, 210 bp, Homo sapiens
gtggttcgccgaacatatagatatatcagtctgtggctgtgaatgtatcatcacggagcagaggtacagcaggtacacaggtacagagcagccaggtacagaggtacagcaggtagcagcaggtacagcaggtacacaggtcgagcaggtagagaggtagagacgtagagaggtacagaggtatagagcgatcaatggcagagggccccc

SEQ ID NO: 700256 - DNA, 287 bp, Homo sapiens
  misc_feature (187)..(187): n is a, c, g, or t
  misc_feature (189)..(189): n is a, c, g, or t
  misc_feature (211)..(211): n is a, c, g, or t
  misc_feature (225)..(225): n is a, c, g, or t
  misc_feature (269)..(269): n is a, c, g, or t
gtaacgacggcagtcctgtcgtagctataggtgtaaacgaggtgcgtgctggtactagcctgtgagggtaaaacgagcggctggtgcatgatcattgcggttagtgtccatacaccggcacatctgtggcatagcggtgagctgtaagatatgtcgttggattgccgaacgataaaggtgacatagncntcatagccaaagaggcacgtancgattaggcccagnacccctgcgacgattttggagtggtttcctctctcaacaagganaacaaatagtcagcatca

SEQ ID NO: 700257 - DNA, 719 bp, Homo sapiens
gagctgacgaccaaggggagatgtttattagatgtttgagcgctgccagagatggctggttcaaagggacatccatgcataccagcaagataggggttttccctggacaattatgtggcaccagtcaacaaggtatggttttgaatacatagtatactatgttactaaacaagagaagctttgttcttttccatggttaatcagaactatccagattcctttcacattatcattgacctgtaacatagaccaaggttttacaaaagtccatgtctacatctgctaaaatcccttctaactctacaaatcaaacagctatataatcacatggatctcatgtgaaattataggtaatcataccagtaaatgtactgggtttcaagttatttgctttaatgggagaacggttcaagaagagcattataagtattttatctagtagaaaaggcatagtgttgatacaagaggaaaagctatatcattaatacttatgtgtacatataatgccgtacaaatatgccaaagaagtgcacgaatattataagcattgcgcttagcaacatgattaaagcatatcacttcttaacattaggctgctaacaatatgagggcaacatgagaatactcaataccaagaattgtcatgacaaatcagactacattacacgaaagtgcacacaaacatcaaagccctggagatgctagacatcatataaatg

SEQ ID NO: 700258 - DNA, 92 bp, Homo sapiens
aattcaagcttctaacgatgtacggggacatgctcacttttttatattaatttttacagtatttgtaagaataaagcagcatttgaaatcga

SEQ ID NO: 700259 - DNA, 444 bp, Homo sapiens
taggctataactaagtgactacataaaaaactgagtatgagaaccaagaaaaatagattctgtagttttcgttaaaaaaaaaattgacttgtaaatcccaacttaagcgggaggctgagacacaagaatcgcctgaacccaggaggcagaggtcgcagtgagcagagattgcaccgctgcactccagcctggacaatacagccagactccatctcagaaaaaaattaataaataaataaaataaataaactgaaagtatttcggctccactaacctgttaggctaaaaccagatactgtttgctctttttcaatgactgtaagtataagtcctttgacagcagtcaacataaagtccgtaataacaactgtttacaagatccctaaatgcactctttaagattctacctgtgattaattttcaattacaaacaagtaaaatgga

SEQ ID NO: 700260 - DNA, 273 bp, Homo sapiens
cggttcacctaccgttgcacactgccagttctctggtgctctttgctctggatctgagcctagactcgtggtcagggggaactcgtgctagcggccccactacgcccctgctgactcaaaacaactgtgttgtaggacgttcatcgccgtgttatccttatgtaagaatgaactctggaatgcccagccagggacaatgcacccttcacagagattctgctctattctgagtgaaggtctcaggtttgccatctccccctcatggagaccggc

SEQ ID NO: 700261 - DNA, 240 bp, Homo sapiens
gtgtgaaaatcaaggaagttaggctggtagatgtcattggattaggtagcacaaattttcatccttatatgtatggcttaaaatatgtggggagttgtgccgaaataaattcttatgtctgctgattactgctagtcaatatcttatgatgtgtgtacaatatgtattcgctactgatataaaccattttattgttttctttcaagagattttaagtaataaactctcattctcaagcca

SEQ ID NO: 700262 - DNA, 916 bp, Homo sapiens
gcccagtgggggcacttacaatcccggggcactatttaatttgtgcctgttataccgcaaaatcgggggggacacacacagccgtcgctgttttgggcactttctagcggtgattgtcaaaaagatgagagcatttccgttggtctaaaaaacagaggagacgtccacacgcttcaaacgatgcagttctttgctccgctgcgtacacattggcacaaatacagctcccaaacgttgaattggtttgaagaccctaacaatgtggcggaccatggatttcctcgcccttctaccgggggtaaatcaccggtccgcccttcttttccccgcaggcaatctcctattctttacccccttccgaccaaggggcaacgtctattactgtaaagggtaataaaagccccaatttacatgtcattcgcagtccttagataggtttaatttttcactcatatactcttgcactctgccctgtttctccactacgactgatatgggacaaatcacttacccgctccccccacggccgctggtcttcacgatagcgaggcatctttccacagtgtgttaagttgcccatgtctgcgcagcgtcccgttcccgcaacacatttgaacggggagatacccgacacgtagccccacctggtttaattctccagccggtggccgacgatatggacgagagaggtttgtccctatggagtatcccctgccgccactggttcaccatctgctgtgattttgactagaagaagttatcccttccacacaggcggcgcttacaaatgccgtattttgcaaatggtggaacaactgtccgtcaacttccgaaagcagtttccaaaccagcatgttactattccataatttttttggagaaataaacatatcccaaagattcacatagacgagca

SEQ ID NO: 700263 - DNA, 656 bp, Homo sapiens
  misc_feature (9)..(9): n is a, c, g, or t
  misc_feature (12)..(12): n is a, c, g, or t
aggggttcntcnttcgtgcaccatgaaaatggggcattttgatactggctcatggtcttatttcagatccaacttctacatggtcttgcaattaggaagagtactggggcccagtggaagcctgaaaacagttttgaggttggataacttcatgcttttttttactcctaaatgaatcccagattttgagtgctgtaaattttctgtttttctgtctgacatcagccagaatacttcagggttttgactactgtcttcctttagttttatctgagaggcactctggcaggatcatggcagcccttacctaaaaagcagataagtccaggaaacagtccagaggcttctgggagccagctgggcaggtctcacctcttcaaaggtgggcatccaactccatggtcaaaaagtaagaggctgcccaaagcccagcctaatcccagaagatcaccacaggagcctaccacagcaccccaaatgcccagcactggggccggtcctttagaataaaatactgtcattacaaggttcctttcttgaaattatattattaggttagaagtcagctgacctaccgcgcaaataatccaagcttcaactatcgaactttttttcccctttacatataactctccgggtctgtccaggatcactgt

SEQ ID NO: 700264 - DNA, 225 bp, Homo sapiens
taaacctttaaaacttttttggggtgtttttttttggttttttttttttttttgggtttttggtttttttttttccgttggagagggggggggaacggagtctgttggggcccccggggggggggcccccccccattatggggggttggggggggaaaatggggggaaactttggggaaaccctttgcttcaacccccgggggaaggttttctgccccaaggggg

SEQ ID NO: 700265 - DNA, 112 bp, Homo sapiens
aagtacaggcatcatcataagtgaaatggttaaaatcaatgtaaaagtgaactcaggcaaatcttagccctgctgtttacctgaaacatcacctctagcatcaccagtatta

SEQ ID NO: 700266 - DNA, 492 bp, Homo sapiens
  misc_feature (8)..(8): n is a, c, g, or t
  misc_feature (43)..(43): n is a, c, g, or t
  misc_feature (59)..(59): n is a, c, g, or t
  misc_feature (66)..(66): n is a, c, g, or t
  misc_feature (123)..(123): n is a, c, g, or t
  misc_feature (144)..(144): n is a, c, g, or t
  misc_feature (148)..(148): n is a, c, g, or t
  misc_feature (151)..(151): n is a, c, g, or t
gggaccgnccagacccccaaaggaacccctggagccagcaacnggaatcccccagtgcnccggccngagaccatcaaattaagccattttggagccataaggggcaatttggaaaaaaaaatncctggggattgtttgaagaantccnccnaggggggaattagggaaagtatgggtagaattatccttaccctgtgtggaaggaaaatgtcttttaaataatggcagaggccttagggtgagcattctgattgtgttgtctcatctggcacctgcaatacctgccagagttttagcttcctaaattactctggggcattagagaagatccttctgtccagagatattgtacttctttgaagaatactttgaatgagatttgagtttctatatagctttgacatttgccaaaaaggttacagtatccacagacacccaaatgttgtccctatatatgagtgtgcgtgttttcacggcagcgtagatcaaatt

SEQ ID NO: 700267 - DNA, 179 bp, Homo sapiens
  misc_feature (149)..(149): n is a, c, g, or t
acacaacgtacacgcacgcacttcttactctggtttggtaaactacacggggacttgtcactggtaacgtttggactacatacccccttactatacgttttaaacacgttgctgttccgctgggggactcctctacgacgtcgaccctngcacggcatgcaacgctgtggcacctggac

SEQ ID NO: 700268 - DNA, 344 bp, Homo sapiens
ttggcctgggggagggaatctggagtttttgacaattgagagtcttgctgagcgtggtggctcacgccttgaagtccagcactttgggaggctgaggcaggcgaatcacctgaggtcaggagttcgagaccagcctggccaatatgatgaaaccccgtctctactaaaaatacaaaaattatctgggcatggtagcgggtgcctgtaatctcagctactcaggaggctaagacaggagaatcgcttgaacccgggaggcggaggttgcagtgagccaagattgcgccattgtactacagcctgggcaacagagtgaaactccatctcaaaaaaaaagtcgacgc

SEQ ID NO: 700269 - DNA, 887 bp, Homo sapiens
ctgtggtaccatgttctctcgcgcgggtgtcgctgggcggtcggacctggaccttgcaggccgacaatgtgattcaagttcgaaatatgggaactttgaaagatatcaccaggagactaagagtccatcaataaatccatccaggaaaatgtaccaaggtctatgagaatggtagcgggagcgaaatatgcctcgtagctgagagagagcttgtaaaccagacctcggagagtatgatggatttgggaatctttagctctgtgatgagaaaagctgagtatcgaaggggagctgaagtatgagaaggagaaaaccttcattatatggtggtgtcctcaagatcggtagggactgtgtggatgcctagtggcattcctcgcatttgtctaacaaagatgagaacgcgaggttgtgtaaaactatcagttagcgggggaaagaagttatgcattgtgggactggtgacaaaaatcagaggcatacatgttataggattgcatttctgagccagtatatctggtagggtttcgaaaggaagtgggaaagagaagccccaccaactttttggagatgcgtcaggggcgttgtccttgaatttagtagaattctggatttgaattgatgaagggtacaatatatgtaataaattcacgtgcgcatctcctataggacagaagagaaggccatctgttcgttaatacgcgtgaaggggtgacagggggagtatctaggacgagatgtggtgaggtggcaattacaaagagtaattggaaatgcactagacgagaggggcaacaatatggaagggaaggagaagatgaagggaagagtttgagattggatgcatgcttacggccggcaggaacaacaaggggaatttgaggaaa

SEQ ID NO: 700270 - DNA, 119 bp, Homo sapiens
  misc_feature (76)..(76): n is a, c, g, or t
aggtgcagctgctgctgcggtcgactctagacgtgatccctgtgcaccacttgtgcggctggacactttggtcacnttttgaatgcatgttaataaatgtcactgattaaaaaaaaaaa

SEQ ID NO: 700271 - DNA, 596 bp, Homo sapiens
gaggggatagcattaggagaaacacctaatgtagatgatgggttgatgagtgcagtaaaccaccatggcacgtgtatacctacgtaacaaacctgcatgttcgtgcacccgttatcccagaacttaagaatataataataagaaataaaactgaatatttgaattctcaataagaaaaaaggaagaataaacatagaaaaaagaacttttggggcggctctgggccgtcggaaaagtttcgtcaaccccaatggggtggggcgtcgaggagcgcccctggagcggtctacgtgctgcacactgtgtggtgcataaggagtgttactccaaaggggacaacccgcgggaacatgaacagataagagggagcgtgggggttatttccttccgccctaattaaaaaaaaaaagggcccggggggggtaataacacaggcgaagggtgtttgtgtgagaagccaattgccccaatgagtgcgctgatgcagagagaaggctcacaaaaagggggggactctctacatgacgcagggggtagtcctcaaggggggagcactcgattggttccatttttaaccccccgagctcgggggtagt

SEQ ID NO: 700272 - DNA, 1145 bp, Homo sapiens
  misc_feature (16)..(16): n is a, c, g, or t
  misc_feature (954)..(954): n is a, c, g, or t
tgggcccgtggagtangccgcgttcagtcgggtcccggcagcggctgcagcgctctcgtcttctgcggctctcggtgccctctccttttcgtttccggaaacatggcctccggtgtggctgtctctgatggtgtcatcaaggtgttcaacgacatgaaggtgcgtaagtcttcaacgccagaggaggtgaagaagcgcaagaaggcggtgctcttctgcctgagtgaggacaagaagaacatcatcctggaggagggcaaggagatcctggtgggcgatgtgggccagactgtcgacgatccctacgccacctttgtcaagatgctgccagataaggactgccgctatgccctctatgatgcaacctatgagaccaaggagagcaagaaggaggatctggtgtttatcttctgggcccccgagtctgcgccccttaagagcaaaatgatttatgccagctccaaggacgccatcaagaagaagctgacagggatcaagcatgaattgcaagcaaactgctacgaggaggtcaaggaccgctgcaccctggcagagaagctggggggcagtgccgtcatctccctggagggcaagcctttgtgagccccttctggccccctgcctggagcatctggcagccccacacctgcccttgggggttgcaggctgcccccttcctgccagaccggaggggctggggggatcccagcagggggagggcaatcccttcaccccagttgccaaacagaaccccccaccccctggattttccttctccctccatcccttgacggttctggcctttcccaactgcttttgatcttttgaattcctcttgggctgaagcagaccacagttccccccaggcaccccagttgtgggggagcctgtattttttttaacaacatccccattcccccacctggtcctcccccttcccatgctgccaacttntaaccgccatagtgactctgtgcttgtctgtttagattctgtgtataaatggaatgttgtggagatgacccctccctgtgccggctggttcctctcccttttcccctggtcacggctactcatggaagcaggaccagtaagggaccttcgatttaaaaaaaaatatagaaaactcaagactagttctctcc

SEQ ID NO: 700273 - DNA, 716 bp, Homo sapiens
  misc_feature (525)..(525): n is a, c, g, or t
ggaagggggaggaccaggtgggtaatggggatgttgtttatatttatacaggctcctccacaactgtggtgcctggggggaacttggtctgcttcagcccaagaggaatccaaagctcataagcagtttgggaaggccagtgccgtcatctccctggagggcaagcctttgtgagccccttctggccccctgcctggagcatctggcagccccacacctgcccttgggggttgcaggctgcccccttcctgccagaccggaggggctggggggatcccagcagggggagggcaatcccttcaccccagttgccaaacagaaccccccaccccctggattttccttctccctccatcccttgacggttctggcctttcccaactgcttttgatcttttgaattcctcttgggctgaagcagaccacagttccccccaggcaccccagttgtgggggagcctgtattttttttaacaacatccccattcccccacctggtcctcccccttcccatgctgccaacttntaaccgccatagtgactctgtgcttgtctgtttagattctgtgtataaatggaatgttgtggagatgacccctccctgtgccggctggttcctctcccttttcccctggtcacggctactcatggaagcaggaccagtaagggaccttcgatttaaaaaaaaatatagaaaactcaagactagttctctcc

SEQ ID NO: 700274 - DNA, 240 bp, Homo sapiens
  misc_feature (182)..(182): n is a, c, g, or t
  misc_feature (186)..(186): n is a, c, g, or t
  misc_feature (206)..(206): n is a, c, g, or t
  misc_feature (240)..(240): n is a, c, g, or t
ccagagcaaccaaggaggccagaggcaccaaggaggccagaggcaaatgatttatgccagctccaaggacgccatcaagaagaagctgacagggatcaagcatgaattgcaagcaaactgctacgaggaggtcaaggaccgctgcaccctggcagagaagctggggggcccagaagataacnccanatcctccttcttgccctccnttgtgcctctgaagggatcctctagatcacccan

SEQ ID NO: 700275 - DNA, 604 bp, Homo sapiens
  misc_feature (16)..(16): n is a, c, g, or t
  misc_feature (144)..(144): n is a, c, g, or t
  misc_feature (165)..(165): n is a, c, g, or t
  misc_feature (170)..(170): n is a, c, g, or t
  misc_feature (183)..(183): n is a, c, g, or t
  misc_feature (207)..(207): n is a, c, g, or t
  misc_feature (211)..(212): n is a, c, g, or t
  misc_feature (216)..(216): n is a, c, g, or t
  misc_feature (218)..(219): n is a, c, g, or t
  misc_feature (244)..(244): n is a, c, g, or t
  misc_feature (255)..(255): n is a, c, g, or t
  misc_feature (267)..(267): n is a, c, g, or t
  misc_feature (273)..(273): n is a, c, g, or t
  misc_feature (275)..(275): n is a, c, g, or t
  misc_feature (291)..(291): n is a, c, g, or t
  misc_feature (311)..(311): n is a, c, g, or t
  misc_feature (323)..(323): n is a, c, g, or t
  misc_feature (329)..(329): n is a, c, g, or t
  misc_feature (332)..(332): n is a, c, g, or t
  misc_feature (347)..(347): n is a, c, g, or t
  misc_feature (369)..(369): n is a, c, g, or t
  misc_feature (376)..(376): n is a, c, g, or t
  misc_feature (385)..(385): n is a, c, g, or t
  misc_feature (392)..(392): n is a, c, g, or t
  misc_feature (436)..(436): n is a, c, g, or t
  misc_feature (494)..(494): n is a, c, g, or t
  misc_feature (504)..(504): n is a, c, g, or t
  misc_feature (512)..(512): n is a, c, g, or t
  misc_feature (519)..(519): n is a, c, g, or t
  misc_feature (530)..(530): n is a, c, g, or t
  misc_feature (589)..(589): n is a, c, g, or t
tgggcccgtggagtangccgcgttcagtcgggtcccggcagcggctgcagcgctctcgtcttctgcggctctcggtgccctctccttttcgtttccggaaacatggtgagcggcaggccacggcgcctgaaggaggcggctgcnggtcggtcgcctgcacgcagnaagcnactggagaacaangtccgcaccccctcccccaacacnccgnncagnannaaggtctcgcacgaaggggcgggcngtgccggaatncacgtacacacncgtagncngggaaaggccggtatngacgtcgctcgcactccgcntggactcccctnccccanccncaggtacacacacanagacaccggcagcaggggggangggttcngggcgcgcnctggggngcccctcgcggaacggccggcgtcgcgcctttcttcttaggggngcgctctcgactggagcatgcggcgtccaaacccggcccgggggcggcgaggaaaaancgcgcgaaangtctcggngcgcgcnccccacccaangctgttcctgtctgcacgtcaccctccctcggcagccgggtccgtctcgggagcaggtngcagggatgtctgca

SEQ ID NO: 700276 - DNA, 301 bp, Homo sapiens
tggctgctctagagatccccctccataatgtgtgcccaggtatttcttttttttgttttttgatgttttccccgaaaaggcccccttccagggggggccgcgcccccctggggggaggggggcaattttttccaatgggggttattttggaaaaatgggttcttttccaaggcttttggaacccttaaggaaaagcccccgaatcatttttaaaaaccaatcaagccagggcccgggaagggggagggccctaaaaaacaactttttatggaccggggcccaaagaggttttaaggctcct

SEQ ID NO: 700277 - DNA, 788 bp, Homo sapiens
ccgtttttggaaggtgggacgtattcttacagtactagggggactcatttgtgactcgtgatagggttaacagcgggacagtggaaagagctactgagccccagggtcttgagataggcgagatgagaatagagcagcgaagtgagttcgatgggtatatggtaacaatgattgacgagggagggtaccatggggatctaatgcgtacacgtggtgatgtgaggtatggtgggatcttaacaatgggtgagtggaagctattgcttgggacagaagtgatcagcgaagaggaaatgatacgtgcttgtaaacggattaggacttatgaggggggacatgatatctggcagagctgtgagcatatgtttgaggttctaggcgagtgggatgggggtagagagatgaaaggtgcggactgttatgtcgggaattggggttagagacgccgtatatgtaggagcataaatgggggagtggtatgtcttggtacgtctagggacctgctaggtagacaatatggcgtgttttctagcgggtgaaatgaagaaatgtcggtgtttatatcatacatgggtgcgttataaggagtcgtctatctgagaatgatgtagtgagatgtgtgaggatagcgagaggatgttatttaggaaacagttacgttaaatgatgctatgatcttacggactggatatatgttcgagctgctatgagggctatactcacatattcgggcggattgagttcggctgcgtgacagggagtgtgatccatagcgtgggggtgtcccc

SEQ ID NO: 700278 - DNA, 1091 bp, Homo sapiens
  misc_feature (16)..(16): n is a, c, g, or t
  misc_feature (900)..(900): n is a, c, g, or t
tgggcccgtggagtangccgcgttcagtcgggtcccggcagcggctgcagcgctctcgtcttctgcggctctcggtgccctctccttttcgtttccggaaacatggcctccggtgtggctgtctctgatggtgtcatcaaggtgttcaacgacatgaaggtgcgtaagtcttcaacgccagaggaggtgaagaagcgcaagaaggcggtgctcttctgcctgagtgaggacaagaagaacatcatcctggaggagggcaaggagatcctggtgggcgatgtgggccagactgtcgacgatccctacgccacctttgtcaagatgctgccagataaggactgccgctatgccctctatgatgcaacctatgagaccaaggagagcaagaaggaggatctggtgtttatcttctgggcccccgagtctgcgccccttaagagcaagcatgaattgcaagcaaactgctacgaggaggtcaaggaccgctgcaccctggcagagaagctggggggcagtgccgtcatctccctggagggcaagcctttgtgagccccttctggccccctgcctggagcatctggcagccccacacctgcccttgggggttgcaggctgcccccttcctgccagaccggaggggctggggggatcccagcagggggagggcaatcccttcaccccagttgccaaacagaaccccccaccccctggattttccttctccctccatcccttgacggttctggcctttcccaactgcttttgatcttttgaattcctcttgggctgaagcagaccacagttccccccaggcaccccagttgtgggggagcctgtattttttttaacaacatccccattcccccacctggtcctcccccttcccatgctgccaacttntaaccgccatagtgactctgtgcttgtctgtttagattctgtgtataaatggaatgttgtggagatgacccctccctgtgccggctggttcctctcccttttcccctggtcacggctactcatggaagcaggaccagtaagggaccttcgatttaaaaaaaaatatagaaaactcaagactagttctctcc

SEQ ID NO: 700279 - DNA, 355 bp, Homo sapiens
cctactactactaaattcgcggccgcgtcgacagaacttgccacagcactctgataaagaaatagctttaaggctgggcatggtggctcacacctgtaatcctagcgctttgggaggctgaagtgggaggatcacttgaggtcaggagttcgagaccagcctgaccaacatggcgaaacctcggctctactaaaactacaaaaattagctgggcatggtggtgcatgccttgaatcccagctacttggggaggctgaggcagcataaccccttgaaccagggaggtggaggttgcagtgagccaagatcatgccattgcacttccaccctgagcgacagagcaagactttgtctc

SEQ ID NO: 700280 - DNA, 110 bp, Homo sapiens
cccgtctacggtactcaaaacaacagagtatgcattctcctcatctgcatatggcacatactctaacattgaccatacaattggccaagaaaccatcttcagcaaattca

SEQ ID NO: 700281 - DNA, 629 bp, Homo sapiens
  misc_feature (16)..(16): n is a, c, g, or t
tgggcccgtggagtangccgcgttcagtcgggtcccggcagcggctgcagcgctctcgtcttctgcggctctcggtgccctctccttttcgtttccggaaacatggcctccggtgtggctgtctctgatggtgtcatcaaggtgttcaacgacatgaaggtgcgtaagtcttcaacgccagaggaggtgaagaagcgcaagaaggcggtgctcttctgcctgagtgaggacaagaagaacatcatcctggaggagggcaaggagatcctggtgggcgatgtgggccagactgtcgacgatccctacgccacctttgtcaagatgctgccagataaggactgccgctatgccctctatgatgcaacctatgagaccaaggagagcaagaaggaggatctggtgtttatcttctgggcccccgagtctgcgccccttaagagcaaaatgatttatgccagctccaaggacgccatcaagaagaagctgacagggatcaagcatgaattgcaagcaaactgctacgaggaggtcaaggaccgctgcaccctggcagagaagctggggggcagtgccgtcatctcctggaggcagcctttagagcccttctgccccctccttgtgcaaagctc

SEQ ID NO: 700282 - DNA, 238 bp, Homo sapiens
gtgggaggttgaggtgggtgatcacctgaagtcagaagattggcctggccaacatgatgaaaccccgtctctaataaaaatgcaaaaattagctgggcgcagtggcacgtgcctgtaatcccagctacttgggaggctgaggcaggagaaccgctggaacccagaaggcagaggttgcagttagtggagatcatgccactgcactccagcctcggagggagacgagacttcatctaaa

SEQ ID NO: 700283 - DNA, 311 bp, Homo sapiens
tacgactctacgaggatccgcaaggtacccacctgcaggtacggttgtgtgctgaactctcaggtacacgggttacggctacgagcgatccgtcatcctccggggtgttggagattgtggctggtgataaagggttggggtggctctgcatagactgtgatcgccgggagtgggatccaatggaggccagtgtctgagttatgggcttgacacgtataggatccactattatccacagtgatgtgggggataaagagctcttgggtggatggctggaaagtcccattgacaaaccaagagtactgtgcagg

SEQ ID NO: 700284 - DNA, 1142 bp, Homo sapiens
  misc_feature (16)..(16): n is a, c, g, or t
  misc_feature (951)..(951): n is a, c, g, or t
tgggcccgtggagtangccgcgttcagtcgggtcccggcagcggctgcagcgctctcgtcttctgcggctctcggtgccctctccttttcgtttccggaaacatggcctccggtgtggctgtctctgatggtgtcatcaaggtgttcaacgacatgaaggtgcgtaagtcttcaacgccagaggaggtgaagaagcgcaagaaggcggtgctcttctgcctgagtgaggacaagaagaacatcatcctggaaggacggggcaaaggacgaatccctggggtggggggccgaatttggttggggggggccccccaagggaaaacctttggttccggaacgggaaccccccttaccgcccacccttttgtcaagatgctgccagataaggactgccgctatgccctctatgatgcaacctatgagaccaaggagagcaagaaggaggatctggtgtttatcttctgggcccccgagtctgcgccccttaagagcaagcatgaattgcaagcaaactgctacgaggaggtcaaggaccgctgcaccctggcagagaagctggggggcagtgccgtcatctccctggagggcaagcctttgtgagccccttctggccccctgcctggagcatctggcagccccacacctgcccttgggggttgcaggctgcccccttcctgccagaccggaggggctggggggatcccagcagggggagggcaatcccttcaccccagttgccaaacagaaccccccaccccctggattttccttctccctccatcccttgacggttctggcctttcccaactgcttttgatcttttgaattcctcttgggctgaagcagaccacagttccccccaggcaccccagttgtgggggagcctgtattttttttaacaacatccccattcccccacctggtcctcccccttcccatgctgccaacttntaaccgccatagtgactctgtgcttgtctgtttagattctgtgtataaatggaatgttgtggagatgacccctccctgtgccggctggttcctctcccttttcccctggtcacggctactcatggaagcaggaccagtaagggaccttcgatttaaaaaaaaatatagaaaactcaagactagttctctcc

SEQ ID NO: 700285 - DNA, 506 bp, Homo sapiens
ttgactggcctgcttggcaggcaagtagcggcggcgcttcaagatgcgctgcctgaccacgcctatgctgctgcgggccctggcccaggctgcacgtgcaggacctcctggtggccggagcctccacagcagtgcagtggcagccacctacaagtatgtgaacatgcaggatcccgagatggacatgaagtcagtgactgaccgggcaggccgcaccctgcttgttggacttgcgctcttcctgatgtgcctggtgcatgacccatgagctacctgttccgggtgaaccggacaccatcaagctacccagttctgagacagggccctgctgatgtgccctcgcttccctgtgggtgagcatgctgcttgcgccggtacccatcctggggaagggagctgttgcattagccttgcagagctctgctgaggccatcttgccccggacccatggcccattcatcccatccgacggcctagaagccaaaagatgcttgacttggcaagcc

SEQ ID NO: 700286 - DNA, 296 bp, Homo sapiens
tgtacaagaatcatgctctgctatcacatggttaaacgttgcaactcatgattagatagaggacacatatcaccaacaagtttctgagaatgcttctgtctattttttatgggaagatatttcctttttcaccgtaagcgtcaaggcgatcgaaactgtccccttccacaaacctaccaaaacgacgtgtttcaaaccctgactctatgacaaggccagtgttcactctctatgacgttgacatggacaatatccgacaagacacatttcttgagaattacgctgctgtacgttag

SEQ ID NO: 700287 - DNA, 179 bp, Homo sapiens
tttcctccgccccccgggccatccttttttttcctcctcttttgtaatggtatggccagcctccctctccctccctgggggtggatgggttccccctgttagctacatttgtggtcacaaaccctttttttaagtgaatttttttcatttgatttggcaataaacgaatccaactggga

SEQ ID NO: 700288 - DNA, 510 bp, Homo sapiens
  misc_feature (260)..(260): n is a, c, g, or t
  misc_feature (269)..(269): n is a, c, g, or t
  misc_feature (276)..(276): n is a, c, g, or t
  misc_feature (287)..(287): n is a, c, g, or t
  misc_feature (344)..(345): n is a, c, g, or t
  misc_feature (351)..(351): n is a, c, g, or t
  misc_feature (353)..(353): n is a, c, g, or t
  misc_feature (372)..(372): n is a, c, g, or t
  misc_feature (390)..(390): n is a, c, g, or t
  misc_feature (403)..(403): n is a, c, g, or t
ttgactggcctgcttggcaggcaagtagcggcggcgcttcaagatgcgctgcctgaccacgcctatgctgctgcgggccctggcccaggctgcacgtgcaggacctcctggtggccggagcctccacagcagtgcagtggcagccacctacaagtatgtgaacatgcaggatcccgagatggacatgaagtagtatgccgggagccgacctgtgtggctgactttcaggctggatactggtcctgtcgaacggccatacnccgtcaganggccgtngctgttcgggngatgctggcggacatcgagaggtgatgctgagttgagcttgccgcagctactcagtnnaaagtngngcgtacaccgttaataatncaaggattatgggtctgngagcgcggatcangcagccattggttcacggacataggtgtgaacagggagtgtcggaagtgagcaacgcgcaatcaggtgatctgatcgggacgccacggccgagcctgtgccatcacc

SEQ ID NO: 700289 - DNA, 117 bp, Homo sapiens
ttggcagcttgtgatgtggattttggcacaacccccttttgacatggaaagccttaaattgaggccattacctaccatggttacggggagctcataatggggtccaaggagaattcg

SEQ ID NO: 700290 - DNA, 156 bp, Homo sapiens
ttacttcgactcgggtattggaggatctctatagcaccagcgctccatcttaacgatattgggagtgtcagcacggtgtgctcacgtgtctgacggaacttgtacaggggaggcatgcaccgcagttgtgtgaactacacggtcgaccatggctcc

SEQ ID NO: 700291 - DNA, 967 bp, Homo sapiens
tcttttgttgtttctgtgcattgttcctgccatggccgtcgtgttatgtttgggtttaccttcctgggtcttcttccccagttcttccttcctggtttttcttacgtaccggttccagtttgatttcgttctattccgttcctcaccctatttattgggcggctttgtgttcgtcttctccccgccgtgtcggctcttggctcggcaattaacctttctgtattatgcatgaccattttataccgctatgttgacttggatccatggcccataattccgtgccctagtcttgttatttcgtttcgatgatgccgtggtccgccgggtcattgtcggttactctggatgtccagatcgcatgcgcgtatgtccgctgtagctttctgtgtggactgtgcccgtgtgggttgtccatcagtcttcatgtctggtggcgttggtacactgcctgtcatgctcctggtccgtgtggatgcgtccctccaggccgcactgctgcctacggttcctgggcacgtatgatcgtcctgctgtcgtgctggctcagtggggttcatcgaatgcggccgcacatattcaccctcagcagtgccttttcccgactccccttggatgtgcggaaactcgcccattggtgtcctctggcatccagatgccgatgccccatccaaagtggtggttgggaaggatctcacagtgagtggcaggatcctggtcgtccgctggaaaggctgtagactgtcgcctgctccgaagtcttccgtcatcaactcttcttgaccagcattatccctgagtggtgcggaccatgcagcgctttgggccccccgtttcccgctaagcctggcctgggcaaatggagtcgaggtcccactattgcgtctccattgtaggcagtgcgtccatccttccgtagggcaggaattcccacagttgctactttgacctaacgagcgccgcatgttta

SEQ ID NO: 700292 - DNA, 126 bp, Homo sapiens
atcggccccaagtataaagtaaccatgattacttccgctgtcgtgactttcactgtgtataatcattgtatgtatgtgtgcttaactgcactttgttttctatacatttgttactaattcaaccca

SEQ ID NO: 700293 - DNA, 305 bp, Homo sapiens
tccatttcaaattttttttttgccccccttttaaggactttgaatttttctttgtctttgaagacattgggagatcgggaattttttttttttgtaaaaaatgtgaattttttggtcccctaatttgttgttgccctggggactcccttggttgtaaagtcatttgaatccttggttctctttaaactccccagggacaaattactggtatgttttataagccgcagctactggacccagcctatttgaaataatcttgttttgctgatttgtttcttgtaaaaattaaaacgactcccccatta

SEQ ID NO: 700294 - DNA, 365 bp, Homo sapiens
gcgcctggttgcggttgcagtttgcccgcggctgtgtaagggagacagtgtggaggccacaagggtactttgcaagggtggggcagcaccttaggctaagggtcggcgggagtaagagaaagagttgtttcggcttaaaaggccaaggcccaaaagcaacctttaggggtttttaagggctggtttctcaaagttggggggacacttttctactacaaagggggggtggttggagagctccaagaagaggtttttgattgtcgccaagacaagataatcttcgaataggatttgtttggtccaccatctgtggtgcacactactcattagcaacgtagcaggataattatcatgagcacaacctt

SEQ ID NO: 700295 - DNA, 766 bp, Homo sapiens
gcagcactatgagataccgccatgccacggaggacccccagagcgccacggcgggactcccgtgatggctgggggggggctacggctccgacaagaggctgagtgaaggccgggggctgcccctccccccaggggtggccgtgactggggagagcacaaccagcggctagaggagcaccaggcacgcgcctggcagggtgccatggacgcaggcgcggctagccgggagcacgccaggtgtgcaaggtggcgagaggggcctgtctgggccctcggtgccgggggcacatggcaagccgcggtggagtggctgggctgagtgcggctttgcacaaggtggacattcccaggggcaacgtggtgccaggtggcggactggagtggtggcggagttgccagccaggaccggggcagcagagtccctcacccagaaccctcatccccgccccgcgtacccaccacttcacccggcgcggctactaaggtcgcactcgctgcgagtattcgggtgggcagacggcactgttgaatctgtagccaggcttccctccgagcttggggatcttttttaaaagcaaagtaaatcctgccaacatgttgtagctcagatagaacttgtgaagcttcaccttaatatatatgttgatgaagaaataaggtgttgtaacgttgtagacgggcgatattaaaactggggggcatcgtgtccgggaggggattcgattatgccattatgaggtttaaccttggagaaaatagaacaaac

SEQ ID NO: 700296 - DNA, 524 bp, Homo sapiens
cgacgatgacagacacgaggttctcaacagtctgggtgaggcccttttactacaccagcgaaatataatcctttgtcaccctcagagcaggtctatataatgataacaaaattacttgctcccagaagatagtccataactagaaccccaaaccttccaatccctgtggtcctctttccaccagatcttttattcataaaaatggcaagttctccttctatctaaaatattaataaatttacatttatgcaatatttttctttctctagtaaaataacaaaaaattaatacacaaaacaagagagattgcaccccccgaccccagctcaaattaagatatgttcagcctggaaaacatagtgagaccctttctctataaaaatttttgattaactagccaggtgtggtggcatgcacctgtggtcccagctcctcgggaagttgggatgggaggattgctatagcctgggaggctgaagtgcaatgagccatggtcacccaggttgggtgcagtggggccaatc

SEQ ID NO: 700297 - DNA, 296 bp, Homo sapiens
  misc_feature (10)..(10): n is a, c, g, or t
  misc_feature (37)..(37): n is a, c, g, or t
  misc_feature (65)..(65): n is a, c, g, or t
  misc_feature (114)..(114): n is a, c, g, or t
  misc_feature (126)..(126): n is a, c, g, or t
  misc_feature (139)..(139): n is a, c, g, or t
  misc_feature (159)..(159): n is a, c, g, or t
  misc_feature (181)..(181): n is a, c, g, or t
tggtttgccnaaatggcccctagattgccccttaccnggtaaatacaagtaaacctgtagtgggnatgaagtctgccctaagtacagaatgagggatttaattagaaaagttantttcccttttgnccctgtatcaacntgcagaacagctatatactnggtattttgtacgtgaataccnttttagcttttgtgcccttttgagcttgaagggttatccctcaaaggggaaaactatgaaggggaagaagacaaaccctaagataccataaagtaaaggttgacattacatattt

SEQ ID NO: 700298 - DNA, 672 bp, Homo sapiens
  misc_feature (86)..(86): n is a, c, g, or t
  misc_feature (153)..(153): n is a, c, g, or t
agggccacttataggccacggggagacaccccccgggaggagccacagcccacgggtttcaaccgagagcccaacgcggcgagagnctcagacacacatttgctgggcacagcactcggaggccggcgaccccaacatcgggggccaacaggngagaaagggctctcttattaagattttggagagagagaatacccacgggagaagcccctctctctcaaggggtttctcgaggcacgaaagagggcgcactgagagctgagattcaccactgttctgagaggagcctcttctagctggccacgtgctgaaggaggttggacgagagaaaagggtgtaaaagcacgaggaggaaccacgtgcacgggctgttaaacacgggttgcacggcgaagagactggggtgctgggctcccctagactaggactcccgtgccctcctctccccagagaccaaggcccttgcacttgaaggaggtgggagaatgattagattttgaacataatgtaaattatttttcagtctttttcaaagataccaatatttacatagttttaatcatgtaatatataccatttaatgtcctagtgttttacttaatagtgtatcatgttttccctgttggtatgtagcctggataaatgcttttaattattaaaaattctgtcgga

SEQ ID NO: 700299 - DNA, 95 bp, Homo sapiens
  misc_feature (94)..(95): n is a, c, g, or t
gcggccgcctactactactactgctcgaattcaagcttctaacgatgtacggggacatggaaataaagcacccccattgccccgggcccctgcnn

SEQ ID NO: 700300 - DNA, 420 bp, Homo sapiens
ccaaccatagatgtcaatgctgatgaagttgagaaccaagggtacgtcaaacaaatgtgtgtaagtgtcttagagtgtctacagctgtgcggcctgtgaatacaagaacccttgctgtgacccttgctcatgacatacccaagccaagcaggccactaccaggcagctgccccacagatcaccacatgcaagtttatcccactgtctagcaggtagcaggagagtccgtttccttaacaaagcatctagacagcacactaagaagcaagctcgtgtgcttggtcagtgtgggcaaagcatgagcgtttacccccaagttggccgatgaagtcccgttggggggtgggtttttgtgcactgtgtattcagatgctgatttctgttcccagagatctggttacagtccagacttttgggtct

SEQ ID NO: 700301 - DNA, 767 bp, Homo sapiens
atgaacatgctcattattactgcagactcactcccaccagaggaccgagaggtctctcatcaccactgctagtcattcttaccacctaggccccggtcactgccacaggacctcactctcctgcgcgtaccccacccgcccccgaagtcgtcttgaatccccatacccatcctcgggaatccgagctgcgccggtcgaagatggccgggccactcatgacaggtacagacgcgaacgagccaactgagacggttctcaattgattactggcaagacatgtaacctaagcagaggccacacggtcctacaagctacgcaaaattcgtgcattgccagagaacttgccgcgctaaggggcgaccctcgggagggaggacacgcagagccctccggaggccaagtacagtgcgtgagcgactttcatgcaggtgcaccctgctgacacactaactatgggctgcagagtctcgagtcccaattaacgttagaacgcaatcgggacaccagacggtaaaaccccgtaaggggaaattatacctatggacgccggaatctcgtaagtgtcttatagaggtcgcaattagtacaacccacagtacgcccgcttttataagcggacccctgcggagtggactccggggactcccacgggagcgattcgcccaaacgatggggttgccatgcccgccttactttgacacggcgctgccggaatttgggacccagggtcgcgacttaagaaggttaccgtagacgtggaactcctg

SEQ ID NO: 700302 - DNA, 191 bp, Homo sapiens
ggggtgctctgaggatcccggccgttggggtctcttcgtggtggatttagcataaactgagagtagagtgcttagttgaacaggccctgaagcgcgtacacaccgcccgtcaccctccatgcgccacaccaggagccaccccatgtgccccgcgacagagccccacgacagagaccccaaccgaggggtac

SEQ ID NO: 700303 - DNA, 431 bp, Homo sapiens
  misc_feature (406)..(406): n is a, c, g, or t
gtgttgcttttcgaggtggtttgtgatgcttgggtttcttcctggacagcgccccatcttgccctcacgggaactgggacagatgcggttgtcccccgaccccctcctcgcgaggctccagcaccggctgtgtgggccaccaggcctgccccacatggacagggctgcggaggggctggctccacagcccacggcggggcctctggccaggttctccctcccctggcagtggctgtgacgcttatgcccaggtggacagcccagaccaggctcggagccccatcccctccaaggcgggccggggtagattcacgccagcgtctcccttgaggccaggctctggcataggagagtgattcctctgggaggtccggggtcccgagccccgggaatgccggctgagggncacgcgacccctcttcacggaaccc

SEQ ID NO: 700304 - DNA, 201 bp, Homo sapiens
cagaggacccatgatgcactaactatgcatgtcttcatcatatgttagatctaggtttaattcacttgattaccttgagtcaaaccaattatgatgagtttcttaattttttatgtattacatgaagtattgctaatatctatgatcctaaattgcttcaaatctaccaaagcattttccaatacataacaccacacaatt

SEQ ID NO: 700305 - DNA, 235 bp, Homo sapiens
agtatacctgctgtattaccacctccatgctttgacacaggctgtttccttatgtcagaaaccattccatacactacgccttattaaggtccactgaaaatagcaagttgcaggctatagaatgaagtcttatccatcgcccttatcagaaggaaagtactacctccctaaaggcccaggtctccacatacagtcacactgggggttaggacttcaacatacagagcccatgccg

SEQ ID NO: 700306 - DNA, 690 bp, Homo sapiens
ggatacacggacggggcacaaacccataccatgaccccccatcaggctgctgccaccgctgctgctgctgctagctctgctgctcgcttgtcagcccaggaggcgtcttgcgcggttcccatgctgcgggcaaggggtgctcgcgggttgtccaggggctgcgtggaggatgaggatgggggttcgccagccgagggctgcgcggatgcttatgtctgtctcagtgagggaggggcaggagtgcgtgtggtcttcgaagcccctaactgcgcctccagtgtactgcagtgccatcctgcccaacgtacggacgaggctccttttcgtgcgctgctgctcggccgaggccgattccttccggtccgtgcgcctgctgttgcagatgagaatcctatagggagacgtaaacctccaatgcaggtagctgcctcgtgcctacacgtgatgtaacaccgcagcagatccaacagagcgaagtccaggcacttctaccaggctctcccataccaattctgcgggtgtccacaggacttctgagatgggcctcctgccgtatgacgactctggtagctctacgtgcgtgtgagctgactccagaccttgaggtctaccgatgggctctaacactctacgtgtccatttgtgagcatcgaggtttctagcgtgaagcggcagtgccggtctcgtctc

SEQ ID NO: 700307 - DNA, 751 bp, Homo sapiens
ccacgcgatcggaaaaccaaggaggagaagccagacagccgaaaggggtcaaggtaggaggtcaatgtaggcctgaagtggacctctccagtgctctggcttccttgctgtagtccctcacgtttcttcccactaacccctcagattttatattgtctatttctctgtgtatttatataaatattttattacacactatgaatatcacccagggtgcagaaagcataggggcccgagtctcagggcgagcatggtgcttgggatgagctcattctcgaggacgccactctttgtccagctcgattctatctccgtatacttaaacattgggaaccataaagggtgcgcaggtgctagggtgaaagggatactattatagtgcaaccataagacaagactccgtgacatggccaagtgccttgcgttagtgaggcgtcccggaaaggtagccccttattagaagcgagttgcgtagacagcgggctggctggcgtcttcgaagggatctcacgtgtccttattcgaggctcctaaagtaacatcagccgattctgagatcggttctgtcctacgtgaccttcccgagtaggccatcgaagtgagcgcaagaaatatggcctgccctctgtcatgtcttgctcctaatgctgcaggtggaggttgctagtctagatatcctttttgagatactatgagcactttagtgagcctctgggtcaataccaaggtacatttctaaaaagcgaaacac

SEQ ID NO: 700308 - DNA, 150 bp, Homo sapiens
  misc_feature (125)..(125): n is a, c, g, or t
aaattgtcagttcaggtgtcatctgacgcagcttatgcggaggagaatgtttcatgttacttatactaacattagttcttctatagggtgatagatgggtccaattggtgtgtgagagagttcangtttctcattccttgggcaggggta

SEQ ID NO: 700309 - DNA, 683 bp, Homo sapiens
  misc_feature (105)..(105): n is a, c, g, or t
agggtagtcattaccattaataccagctgggttgaaaatctctcagtgatggatgacttactgacacatagtcaacacattgtttttaatctcactgaacacctnggttcgtcacttaaaaaattggtcacttaattgattcaatttcttaacggtaaatgcatttattagaagcttgaaagttcaaaacattacaaaggcataaagtggtgggttcaaaaaaatttaaatctaatcatatatttcgtatgtaaaaaatcttacttacctttttctttccaagagagagtttaggaattttctcaggtgtgttttctgtaggtgatttcaacaagaattccaaggctcagcttttagaatgctaccaaggaaaataatagggaaaatctccttcgattttggctgtagaaaatgaatacatttccacgaggaaatattgtagataattggtgagttacataaatttataaaacattagttcctctttctgcagggtaaatttctgagagtgaatatctctgttctgtatcctgttatcttgatttctgagtttcatactaaatttcatgagatgaaacttggtacctcctagaagtttttccctatgactaattgtttactacattatttttaatagaaataatacaataataaatttattatctgaaaggaataggaaaaaa

SEQ ID NO: 700310 - DNA, 562 bp, Homo sapiens
  misc_feature (70)..(70): n is a, c, g, or t
  misc_feature (513)..(513): n is a, c, g, or t
tcattacgtcattgtccaaggtgacaggaggaactcagtcgttaaaatgacgagccttattttcatgaantaaccaggctcactgaggtaaatggtgcctgcctgggaaagagttattttattgcaaacccctagcttccatcggccttccctctcgagcctgcctagcctgcttgcaaggagggcagcctgcttgccctcccttggccatatttgcccctgtcctattgtccccttcagactgatgggtccagatcacagcacagagcctgccattgtcaaaacagcccaaagtcacactggactcggagtcctgtggtgtctgtggcacgaggcttttgatacctgtaagatctgcatgcctcttggctttcaagtgtcaggggttctttatattcacagcctagcacactaggcaagttccctcctttgacacaggtgtggccaacgtaaaggaaaaaaacacacacacatcaccgtgtcatttctgtgttcgggtgccttcatcccccnagggagttaatgacagcttgttcacaccacctagaaataactattcatc

SEQ ID NO: 700311 - DNA, 333 bp, Homo sapiens
ctacacaactattgaaaagttaaaaattaccttaattcattattcctggtaccactaccagaaatttacagggcaatatacctgatgtaaatgaaaagcaaaagacaaagacaaagctaacaacagctaaaagaccacaggaatgtacatctaattgacactgaattgcattaatcaatagctgcacttttagcaacactgtggctataacaagtcctgaccaagaagggtatcctagtataagctgcagtaactatatctagactatagatcatcgtaccttctgtggcagatttacacagtacctctaatagcatagggacgaatgtctca

SEQ ID NO: 700312 - DNA, 239 bp, Homo sapiens
ccaaggggggggggggggggtttaaaatgaaagggggggggccccctttttttgggggtagccccaagggggtagggggggggggtttaaattttccccatttaacccccccccggcccgacccccggctccccaaaaaaaacccccccccccccccgggggggggggggaaatttgtccccctttttggaccttttgggggaaaaaattccccaaaaaaatttttttttaagggccca

SEQ ID NO: 700313 - DNA, 761 bp, Homo sapiens
caccagatcatcccatgatgaggctttgaagaggcctccctcactgaagaggaggtccacggagcatccccccacatttaacaacgggaggctttctcgattgtgaaggagatttgttccagaataggtgaacctgggattattcccccaccccactttgtccccctctccatcttaacaggggtttgcaacactctgtttttgcttgtaggccctccactttttttatacacacacttttgtggataaagcgcgtttcccacgcacgagggcgacacactattttcttctaatggggacgagtggttgtaatgagcctcacgttcttactggaagaaagcatccacatggggaaccgtctggaacccgggtcaggcggaaagagggatggcgagtggctacagtgcaccacctctctacacgtctctgagctctactgcctctaagttgtagacacctctgtcctaggagacagaggaagaatgggggagctgtctggctgcatgcttttgggccacggggagccccaggaccttattgcaatccttatttctgaccccgtggcttcggctgagacctgtgtaacccctctgccccctccacccccaacccagtcctacactgtcacaccggacggacccgtctgtgccttttaccatcgttccaccaatgatgtaaaatactcatgttttacatcttttctttcatccgctggctccggccatatttgttgagacaatccccgggataacgatgcatta

SEQ ID NO: 700314 - DNA, 273 bp, Homo sapiens
tatcagagagtcaactttgtggcggaacgccgagatgccagccctacgacacatccacatgatatcgcggcagcagtgccgtcgtcaggtgcttgtacgacgctttcgtccaccgcgtgtcggggttgcagcagaatacccggggttgatttaagctgctcaaagggtgcaaagcacaaggtcgacatcggttttgaatctactcgcgcagttttactaccagaacagtcgggtaacagcagtctatacagccgacatcgataagcttcgggc

SEQ ID NO: 700315 - DNA, 1076 bp, Homo sapiens
  misc_feature (98)..(98): n is a, c, g, or t
ctcgtacttgcgtgctcctacacaatttctgtctatgtggatatgtcttgtcctggtactctcggtaatctcctcacaattgcgactgttgtagatcncaaagagaggctcgctccctcgtgattggtatcgtttctcctccccagatccttttgtgcattctcaggttcgggtatccgtgtagatccatcaggatttcaaggaattcgtcatgaatacgcttagtgcgccccgtcatgctcgtttcctaatgactgcagtggtaacagaggccgatggtcacatgggcaggacggatgcacaccgatgcagtgaccaattcacggtagttcagatgccacatcatagatatccaactgccatgagtgacttactagatgagagcagtgggtatccgggacagtgttccacttcccagaattcgggaactgtcgctctgatcaggacgcgtacctgtgatgccaggccagaacgtcccacatgagcgaccgctgagcctcttccatgccctcgtccatatgtcaggccctttcgcgctagtttcctgtccactgagagccgcatacccttgatagggtagaatgtgccttcctgccactagacaggccagcagccctgcagacagcgccagtgttcagtccacatccgaccccatcatgaccgccagagggatgaggctctcttcagagccgcctccccaaaccagcttcctcaggaaaagtcagttcccaaaagcagaatgaagcagagccaaggcctcagacaatgctcatcattcggatgatgctgaagacccaagtggcaagccagccgcattccagacctgggggagtgaagcatgtctgccaccgggaccctggagcaaggcacccagtatgtgtacatagctctgccagcggtggcagtaatagtgatcagtgacctggactatggagataatgcttttggagctggaagggtacagttagtggaatgcacctgaagagcgcctgcacccagaatagtgagacaacgtgaagaaacataagacgatccccggagaatagactatcgaaattgccctagagtcaccttca

SEQ ID NO: 700316 - DNA, 237 bp, Homo sapiens
aaactgccactctaaactcttgaagtaaataaataatctttggcggctggactatgctgaatctcctcacgcactctctaattagatggcctaggtcctcccaattcttagtccttttatacctctttttcgccttctcatattccatttagtttttcaattcatacaaaaccgtatccaggccatcaccaatcattctatatgacaaatgtttcttcttacatccccaaaatatca

SEQ ID NO: 700317 - DNA, 1008 bp, Homo sapiens
catcacccgatgaggcaaccagccagaatcgcctgaacgcaggcacatacttcctattgctacaccctagtaggtctccctttcccctgactcgatcgcacttaatttacacctcactaagacgcctaggctcactcatacattcttactactgcactctacactgtcccaaggaactatctaaactcgctgagctcaacaagcttaatatgactagcgttacacaattagcctgttgtatgaagttaaagcatgagcctgctttcacggcagctccaacttcatggaactcccgtgaagagctccatgttcgcaagcccccgatcgtctggcgtcaatagttgaccttgccgccaggtttactcttgagaaactaggcggctcatcggtataatacggcctcacagcgtcattctcaacctcgcctgacaataactacatagccgtaccccattccgttgtagcttactccctgatgaggcataatttattacaagagctggcgatctagcgctactgacaaacagaccttaaaagtcgttccattgcatacgtctgtcaaatcagagcacatagccctcgtaaggtagagcagccatggctcatccgaaaccaccctgaagcttcaccgtgcgcatgtcatctctcattaatcgcccacgggctttgcatcctcattactattctggcctagtcaaactcgacaagtacgagggcactcacagtccgcatgataatcctctctcaaggcgttcaaagctctattcccacctaaatagcttctgcgtgagtttctagcaagcctacggtagcctcgacgttaccccgcagagaattagcctacttgggaagaactcgtctgtggtaggtaaccacgttctacttgatccacatgtcaatcctcctaattaacgggagctcacattctgagtcgaagcgcttatatccctctacatatagagcacgaacagggggctcaataccgaacgagttaagacataaaagcgc

SEQ ID NO: 700318 - DNA, 621 bp, Homo sapiens
  misc_feature (568)..(568): n is a, c, g, or t
gattataggcgtgagccactgtgcccaaccacctgccactttttaaataaaacatttgtaatggtgccaaggaaaatggatcatctgtttgtctaaatatctaaagaactctgtctctattaaaactacaaaaaattagctaggcgtggtggtgggcacctgtaatcccagctcctcaggaggctgaggcaggagaatcacttgaacctggaaggcgggggttgcagtgagctgaaattgtgacattgcattccagcctgggtgacagagcaagactccatcacaaaaaaaaaaaacaaacacagcaaaaaaaaacttggtggggccggctctggcacctgaggagaaaggtttcaacaacccattccggttggggccgcgccgcaccccagtttggttaagcggacaaccattgggcatcaagggcgggtccccagagagaagacctggccaagagacataggggtggggtttcccccccaataaaaaacacgcccggggggacacccgacgcgtctcctggaaccaatccccagaaggggggtcgcgagggggaccaagcggggancacccacagggggcccaagggaagacgagaataataaccggcggaggagacac

SEQ ID NO: 700319 - DNA, 441 bp, Homo sapiens
gaaaaaacaataaaaagacggagaccaaaggaaacgtcatctcagtaaaatggttccacggggtgggagaggtttttttttaagacaatctaaattaaaaggtgattctttaaactggtttctcattaagttaatggacagcatattataagatgatgctggacggtgtcatcggtgtgggtaaaaatccacatatccgaatgggccacaagcctttctgagggttggtcttcggggagaatgggcggtgctcctggaaaggccagggggccttctggcgggggcgtgtaccaggcttcggcgtaatgggtaaacaaggcatggcatcttacacacacctggtttcctgagcggtgcggctccaccagcattgggggcataacaatcataagcacacccggtataagtcggttctcacacggctataaataaataaatacc

SEQ ID NO: 700320 - DNA, 625 bp, Homo sapiens
  misc_feature (314)..(314): n is a, c, g, or t
ccttgaaaaagcccaccctagggtagggacagtggaggacgtggcggcgatggtagttctggttgctgtcacgccaggccgggttcgtcaccgggcaagagttcgtggtggacggcggcatgagcaagaagatgatttacagcgagtagggcgggtagctgtcttgaagtcattttgtctttttcagaaaaacttcaagcaggctattgacttaggtccgctacctgcgtaaatttcgcggcctcaacgaagcaaagggtgattagctcagctgggagagcatctgccttacaagcagagggtcggcggttcgntcccgtcatcacccaccacttcttgagagttttgccctagggcaagacgcaacgttaaaggttgcaccgacgcgcagcggtagttcagtcggttagaataccggcctgtcacgccgggggtcgcgggttcgagtcccgtccgctgcgccatattttccaggttcgatatgtcgggcttgagattgaacagccaaggctgatcgatcagatgtttaaaggtggttgagggttcatgctcaatcagccaagcgatacgcagcggtagttcagtcggttagaataccggcctgtcaaaacgggggtcgcgggtt

SEQ ID NO: 700321 - DNA, 124 bp, Homo sapiens
ttctagagtgatccgtgcacacccctgctatgtggacaccccgctacgtggggagtgctgaggtgggaggattgcttgagccatggagtctgggctgtatgtgctgctatcggagcgggggtat

SEQ ID NO: 700322 - DNA, 122 bp, Homo sapiens
cacgagggctttctccaagttgtagactgaactctctgattttgtacaacagaaaaaccattcagttgacttaacaattgcccaggtgtatttttgattgtttcttttgttttgtttttaag

SEQ ID NO: 700323 - DNA, 129 bp, Homo sapiens
aactgagtggtagaatacgtttgtatagctcaggtacaaaatatacataacattattactatatcaatgggggtgggagagaagagtagctacccaatcagcttagacaattcagtagaatcatgctta

SEQ ID NO: 700324 - DNA, 199 bp, Homo sapiens
gcagaggaggagcgcagcctggctcgaagaacttctgcttgtggtggctgaactctgatcttgacctagagtcatggccatggcaacccaaaagggaggttactggtcaaagcgtgcttcagtgattcaagtgccatgtgaagatgcccatgaccctagagtgaaggccatagaaatgggctcgtgcacctgattgaat

SEQ ID NO: 700325 - DNA, 323 bp, Homo sapiens
caacggatggttacctcaactaggcagatgagtgaaaaccttggagttatagacctacagagtactacatgggaaactaatgctccagaaggcccagtgctgccttcgaacgagaatattagtagcattgcggatctctacttagtcctagctttcccctcattcctgatgtggtgtaattgaagggtgtgtgaatgctttgcctggtcatttgtcacctttatccagttgagggcttatacgcattaatgacacctattgcccattaacatcccatggcaaatattctgtgataaaatgtcgaactatcacgattgaatcca

SEQ ID NO: 700326 - DNA, 249 bp, Homo sapiens
ggcctcccaggttcaagcgattcttctgcctcagccaggacggcaggcatgcgccaccagggatggctaattttttattttaagtagagagggggtttcaccagtgtgggtcaggtggatctccggacctcaggtgatccacccacctcccaaagggcggggattacaggcatgagccaccacgcccagttagtcgcccaggccagagcgcaggggtgccgtaataattcacggcagcctcagactccg

SEQ ID NO: 700327 - DNA, 169 bp, Homo sapiens
tgcataccgagactcaatgggacctgtaccttagaggtttgagacaggtatttttgtttgtttgatgcaatattggtatctgtcatacagcaactacacagacagtggagagtggtggagacccagagcaagtgacctgtatagttcatggcaaagcaatgttctttca

SEQ ID NO: 700328 - DNA, 1056 bp, Homo sapiens
gactggctgctctgaaaagccatctttgcatttgttcctcatccgcctccttgcccgccgcagtcgcctccgccgcgcgcctcctccgccgccgctggactccggcagctttatcgccagagtccactgaactctcgcttttctttttaatcccctgcatcggatcaccggacgtgccccaccatgtacagacgcagaccgtaagacacacagatccgaaatcaccaccaaggacttaaaggacgaagaaggacagttgtggcagaggcagaaaaatggacagaagacgcccctgctaacgggaatgctacatgaggcaacatggggagcaggaggctgacaatgaggtagacgacggaccgacgacagaacggctggcgcgcggacagaggaccgagcgcacgcacgacggtgatggtgaggccagcaggcatggacgatgaccgcatgcaggaagctgaaccagctacgggcaagacgggcaagctgcacgctgcatgcacgactgacgactgtcgataaccacagaagcacggaagaaccgaacgagggatgacatagaccagcacaacaaacggacacacgtatacacataaaaagaaaccaaagagaccgacacgagaaccataatacaaacacatccaacataacgcgggtacaccacatcaacagaccgatgagaccaaccatatcagaggatacgcagaagggacaccgcaccgacaccaaacgaacgaaccaagggcacaagcaccggaaaaaataaaacaacaggcagcatcgtcacaacagccccagccccacaacggacccaaaaccagaagtgcaggaaaaataaggacaaacacccacggggcaagacgacaaacacacgcgagacagcaaaaagatacgagcccgaagggcaccccagaacatcgagcggccgcaacacaagaagagcaaacacaacaaaacaggaacaagcagaacaagagcaagcgacgacaaagcaccacctacgagagactgaagaaaacaacaatggagaaacggaccaccgagcactgaacaaaa

SEQ ID NO: 700329 - DNA, 1048 bp, Homo sapiens
gcagtgcgcggcctgacctggggcgggctgctactccgtgaatctgctaatcccagtcggtgccgcatccccagcccgccgccatggccgcctacaaactggtgctgatccggcacggcgagagcgcatggaacctggagaaccgcttcagcggctggtacgacgccgacctgagcccggcgggccaccgaggaggcgaagcgcggcgggcaggcgctacgagatgctggctatgagtttgacatctgcttcacctcagtgcagaagagagcgatccggaccctctggacagtgctagatgccattgatcagatgtggctgccagtggtgaggacttggcgcctcaatgagcggcactatgggggtctaaccggtctcaataaagcagaaactgctgcaaagcatggtgaggcccaggtgaagatctggaggcgctcctatgatgtcccaccacctccgatggagcccgaccatcctttctacagcaacatcagtaaggatcgcaggtatgcagacctcacagaagatcagctaccctcctgtgagagtctgaaggatactattgccagagctctgcccttctggaatgaagaaatagttccccagatcaaggaggggaaacgtgtactgattgcagcccattggcaacagcctccgggggcattgtcaagcatctggagggtctctctgaagaggctatcatggagctgaacctgccgactggtattcccattgtctatgaattggacaagaacttgaagcctatcaagcccatgcagttatctgggggatgaacgagacggtgcgcaacaggccatggaagctgtggtggcaggccaaggcaaaaggcagcgggggcaagaacagtcccagagaccctcctgtccgttgactgcgcccactgaagttaggccattgagagtgagtgttcgacgggcagggacaacaaaactggcagagcacacataaatgaaagtaaaagtatactacacatctaacatataggagcagaaagacagagagaaaccaatatcgccatctacgcttc

SEQ ID NO: 700330 - DNA, 1521 bp, Homo sapiens
tggtggtgtttggttcattctgcatggtgtgtgttcttgggtcattttcttcctcgcctggcctttatgttttgtccttttcctgggcacctcagcttccatgtctttgcgcatccgtctcttcattcccccagttttttgcatgcgtcttgataggcttcatgttcgtgtccattcaatatgacctatgtgtattaccaggtcgtcagtttctgctgccttgatagctctgtttctcgagtagtaccctcctgtatgctttggacatattgtctcctcgtgtaggctgtttgccattgtggctgcttatcaagtactacgtttccccttccttgatctggggataccttatttcttctattccagaagggctagagctctttgcatatatgtatccttcaagactctcacaggtaggttagtctgatcttctgtgtaggtctgcatacctgcgatcctttctgtatgttgctgttgttataggtatggtcgggctccatcggagctggtgggacatcataggagcgcctccagtatcttcacctgggcctcaccatgctttgcagcagtttctgctttattgagtaccggttagacccccatagtgccgtctcattgaggcgccaagtcctctaccactggcacctactatctgatcaatggcatctagcactgtccagtaggtccggatcgctctcttctgctatgagtttgacatctgcttcacctcagtgcagaagagagcgatccggaccctctggacagtgctagatgccattgatcagatgtggctgccagtggtgaggacttggcgcctcaatgagcggcactatgggggtctaaccggtctcaataaagcagaaactgctgcaaagcatggtgaggcccaggtgaagatctggaggcgctcctatgatgtcccaccacctccgatggagcccgaccatcctttctacagcaacatcagtaaggatcgcaggtatgcagacctcacagaagatcagctaccctcctgtgagagtctgaaggatactattgccagagctctgcccttctggaatgaagaaatagttccccagatcaaggaggggaaacgtgtactgattgcagcccattggcaacagcctccgggggcattgtcaagcatctggagggtctctctgaagaggctatcatggagctgaacctgccgactggtattcccattgtctatgaattggacaagaacttgaagcctatcaagcccatgcagttatctgggggatgaacgagacggtgcgcaacaggccatggaagctgtggtggcaggccaaggcaaaaggcagcgggggcaagaacagtcccagagaccctcctgtccgttgactgcgcccactgaagttaggccattgagagtgagtgttcgacgggcagggacaacaaaactggcagagcacacataaatgaaagtaaaagtatactacacatctaacatataggagcagaaagacagagagaaaccaatatcgccatctacgcttc

SEQ ID NO: 700331 - DNA, 156 bp, Homo sapiens
  misc_feature (16)..(16): n is a, c, g, or t
  misc_feature (39)..(39): n is a, c, g, or t
  misc_feature (60)..(60): n is a, c, g, or t
  misc_feature (125)..(125): n is a, c, g, or t
gagagaaagtaactcnaggacgagaccggagcgacccgncagagcaataggcggcgactngcccaggccccgagaccggcagctgcgtggggcgggggctgcgcgagccagatctgccgctccgntccgagtggtctcggaaagagggtcgtggtc

SEQ ID NO: 700332 - DNA, 453 bp, Homo sapiens
  misc_feature (9)..(9): n is a, c, g, or t
  misc_feature (43)..(43): n is a, c, g, or t
gggcccccnaaaccccaggttttgtccctgctcccctttccgnggggagatttccccaaaacccggtcacccttctcctctttgggtaagggttttttctccccccccctccccctggggtgggggggaattggggggccggggaaaaattccaaaacccccccccccggttggggttccggggggcctttttttttttttaaaaacccccccgggggcaaaaaagggggggcccggggggggttttttttttttccctttttggtttggggtttggcccccccccccccccgaaagggcctttcctttttcccggggtttttggtgggggggggggccccccccccccccccggggtttttgggtggggggggggttttttggggggcccccctttttatttttttccggggccccgggggggggttttggccccccccccccccctgggga

SEQ ID NO: 700333 - DNA, 428 bp, Homo sapiens
gataggaagagtgagtgtggtgaggtgactgtgggatgtgcgggatgggtgacgggcttctgggtgacgaggtgtgtgtgaaaaaaactgtagtcaggtctctgtgctgggatggatgatcgggccttctgagtgatgcaggtgtgtgtgacagtgcaattgtagcctccagaagtctctgcgtgcttcccctgacttacactcctaaccaagcggtacctgcctgagaacaaagggccgcggagggacgtgagcgcctgagcctcgccgtggaaattcaccagcaagaaggcagaacacagccatgaggtgacggcttcagagccagaaagtgctgtgcatgcaggcacctgagtgacagggggacggtggctcaggaggtagaattcctcctgttagaggggacagggtcctgatgtgggaaacag

SEQ ID NO: 700334 - DNA, 822 bp, Homo sapiens
  misc_feature (1)..(1): n is a, c, g, or t
  misc_feature (300)..(300): n is a, c, g, or t
ntcgaaagttctgcgtcttgcccccccctgcttaattatgattgtgttcctcaaagaagtataatgggttgtcgccgacccccgctagcggtctggtgtaggtgcgctcgatgatatactctcctgtgcccgagcagaggtgttgctgtcgccgacgactgtgctggtgcgatgcatggtatttcctctcagctgctctgtggtgaagcggagcaaagcgcgcggggtgtgcttggtatgtctattcctattctcatgtgtatgggggcgtctctcctctgatcagtctgttcttggtgntggtgatatgataaacccgatagtgaagggcgctcccccccgacgactgcgatggtgtagcagaaacagactatgagcatgagtggtttctcttcctctacggcgctgccgcaacgcgtcctgtataggcccaacccacggcgggtagtgaaagtgcggtgctctccacgacgttgcgatgggatacgtagggtgtaacatactccactagagtaaaagcgcccctatacttgtgtgttcatgttataagaaccactggagtagacacatacattaccccccgcaggacaatagagagtcagttcttccttatgttcattatagaggagagatatggctcctcgtgtgccccctcgccactggtagagtccaacttcccccccgtcttggggtgcggactccctccttccacccgccgcgtgcggtcgtatgggctctgcccctcccttcgctacgctcgccgtgaacgtggcctgaacaagggagaaaagaaattcctttttcgtaccgaaacaaaacaca

SEQ ID NO: 700335 - DNA, 1010 bp, Homo sapiens
cgcagctgtggcggtacctggagctgacagagactggcaggcacgtgcgtgcttggagtgccatgcgacgtagacaatggtgcgaagacgcgaaacggcaaattcagcctccgtacgcgtcagagacgaggccatgtcagcgagggaggaagaggacctgtgcctgcacgaggggataggctgggtgcggagacaaaagcagaggaaccgtcaggccgcacgggtcaagacgaccgagccaccagaagacgcgacgaagagttgttccagaagtgagcaaggcgtcacgcaagggccgtcgcggacggtcatggccattcgcttaggatagcgcgtagaccccaatttcgccccgttcccgtcagagcccccgaacgaaggccttttcaagcacaggtaaagattatcggcgttcccggtgggccaaaccagtaaactcgagagaaagcaacagagaaacagaacaagaagaaacacgagtagtaataacaggcacccgaaagtctagcaatacagcagcccacagagcgaacaaacgacagagagagccaagggagcgtgcatcactatgctctgcagaaacaatcgagcactcatcaccgagacagaccacccagtgagggacagaccgcacacatcacttcctaggtaccgacgcgagccagtaactaacagtcgagagagtcaagtgaacccaccacacacgagcgggggtcgaaacctacacaagcgagacacaagagcgcacacaagcggtcaccgtgaatctagaacacagacgagacaacgagacggaaaccttaggaggcgcgaaaccgcaacacgcaatagacgaacaaaccaagacgcaacggatgctagcgcacttgtgtgcaggagatgagaaaactacacgcggcacgacatacaacggagagcgggacaccgacaacactagagtgagcagaccagaacagcacccactctttaacacagctgtggaggcgagggacaaaataccgcataaaaac

SEQ ID NO: 700336 - DNA, 218 bp, Homo sapiens
gataagagtgtattttggggatacacgttgagtatcccttatctgaaatgcttggaaccagaggtattttggatttcagtttttttcagattttggaatacccgtatttgcattatactggttgggcatcctggaccagaaatctgaaatgttccagttagtattcctttgagtttcaagttgtaaaatttggagcattgtcgagtttggatgctcaa

SEQ ID NO: 700337 - DNA, 1594 bp, Homo sapiens
  misc_feature (1)..(1): n is a, c, g, or t
  misc_feature (138)..(138): n is a, c, g, or t
nttatagacaccacggcccgttctcttttttggtggcaccgccccctgcagtggtctctccccctgtggtgcactcccaaatcgtacgacccgtggtggtgtttacacccctcctccatattagagagagccgcctcntgggggggctcatgattttctcttacctcctttctccgtggaattttttatcccccttactgtgccccctcgcggggcgcccggtggtgttccccgcaagtgtgttcttccacaccgggtgggatgactcatgcggttgtgtgtcgccctctctgttggccccgctatatttttttgtggggtgggcaacccccttcatttagggacaccgcaagatggttgggttcacccacaacataaagcccagagctcttgtgtgtaacacctgcggttccccgtggatattttttcccccccgcgaattttggtgttggtgctttctgtccctttttagtagcccgccaatacagacgtggggggtaaaatttcagggtggtgcgctcccacaacatagtcccgactagtggggccccaccgcgagagacgctgtcggggtgttttttgctgtccccccagacaaaaccatgtgattgtgtgttggaacccccctcctctgcgtggggatgaagccccccttcttttcgtggacgacggatatattctcctcgtctggtctttcgtcgaacgcacaccacgagatggctctggtcaaagagcttcgtatatttatcgctgcgcgcacgattaattatagtgtgctttctcgcggtgaatcaacaaaacggcggggtaggagttttcttcgtacagggtgtcccacacaactttgtaaacaccccttggcgccgcacagagattttctcgcctcatagtcgtctcgccctccgcgggtgtatactttctcttctaaaacgcgcctttgtattgtaggtaaaaggggagacctcccctccgcggcttttctttattttctaaaagggcacatacgcccccctcttacttgacggcacgcgcgctgggttacccaccactcttggggggttctctctcgagtattagtgggcccaaaaatgatagacccttgggagtatacaccatcctcttggggcgcctgcaaagaatatagagcgagagatttttcttatagagagaggaaaccccctcgccacagaaccccacgggtttttcaccagactggcgcttgtggccacacaatccactactcacacacacacgctctgcgctgttagatataccccccacgcgcccactacttcacgggtctccccacaagacacggtggatgaaacattcccgcttccttcaactgtgtcgccccctcggagtttcccacaaagcgaccacttcgaatttttcttctgcggctctcttccctaacgcggggtggccgccccgcggcccgccgttgaaagaaggaaagaattccccaaaatgggccacaggtggggctgtgggctggaaaccacacaggaggaggattaaatccccccgtccctcctgggttggtggaattgttttgtttttctccccaaataacaggatccgcccttttcca

SEQ ID NO: 700338 - DNA, 161 bp, Homo sapiens
tctgaggatcccggggctcagttgatcctcaaggatacagatccaccgggatgatgctctccggagccaggaggacctgaaggaccagcgggctatggtggagcgcagagccaaccggctgcaggctgagatcgaggagctgcgggccactcgggaacaga

SEQ ID NO: 700339 - DNA, 130 bp, Homo sapiens
cttgatgacacaggagatggagaagtcgtcacaattgagaaaacatatttaataaatcattgtcaatatttgtataactgtttcaagccctattctttgttgatatgcctccacagtttatataggttaa

SEQ ID NO: 700340 - DNA, 770 bp, Homo sapiens
ggcgctgctcgcagctcgcaggcgccgcgtaagcctgtctgccaccgccgccagcccgtgcgccctcgtgcgctgtaccctgccgctgctcccatccccgcccgccgtgccaggggtgctgccgctcgtgcctgccctggacaggtgtccctgctgcggctccgcggcgatggccaccaagatctgacaaagatggcttgcctgggcggtgtacaacctggtgcgcgacgactgggctcggccgtcatctgtgagttgacttttaaatatagacggtccaccatcgtccccggcgagcagggagccggagtaccagcacttcatccagcatgtgcacagatgacgtcctggttgtttgccttcgtgctgcttcaccaccggggatgccatgaagcaagagggtccaagttttgccctcatcacgtgatcgggtgagaacgtcagcgggctgcatcgcgccaaaaccgtggatggacaatgaccctgggtgaaggaggtcggaacagaaatttcggctaaggcagtttgtagattcagtggaatcgggaaggcagctggcaaggcaaagctttccataccaagagcggacagattgaaacaaaggcggtggtggaatacaaaatcacgaaacccagaataggaagtaacaccaagccaccctgacaagacaacaaccttgcaaaaaggtaatcgtgcctgattccccgagaggagaggaccgccgactcagataattaaccaaaaagaccaacaggaacaaaagaagccta

SEQ ID NO: 700341 - DNA, 853 bp, Homo sapiens
gagagcccgctagtcgtccaggagcctagtagcgcagaggggggcacccagccataacaaggagggttgtgggggccacgccgcacacaccgataaaacgtgtgccggaagacaccacacagggggggggggcactttaaacaaccgtggagcacacattgcaggcaagcacacaaggagagttgtaaacacagggggcactgcccacgtgtgccacacgccacgcgaggatgattgttcgaggccccgctgtctctccaccaaagagaggtctttccccttctctgtgtgccaacctggtgttgatacacacctatcgcacagagggggggcgccgccctgttgcccacacatctagagggtcagctttggagctcaccgaatggggcctctgacacacagttttcccaccgaccaacgtgggcgccgcgggaccacacccgttcccacttcttgtggggcttggttccctcggatgtctttggcgcctgcgcctcttcccaaaccccttctcccgaggggctacgcgccacaagggtcccaccggggacacctccctccaacaggaggaagacagccacacccctgggggcgccagctgggtctgccacagaagaggtgggaagacttcttagctgtcttggtgcgcgcccacttgaggcgcgccatcgagacacccccggatccccagaagcgattctcccaggcaactccctcccaccaaagtacttttgcctgaccccaaatgggggcctcaccccccaagggtagggcccccaatatttttttataatattttttgtttgatctacttttaggagggtactcttttaaataacatgggccctgatta

SEQ ID NO: 700342 - DNA, 185 bp, Homo sapiens
accagcttccaccccacggggcccgggcacagttctaccagctcaggaagcagctcccacccttggggccagggcacagttctaccagctcaggaggcagctcccaccctaaggggcccgggcacagttctaccagctcaggaggcagctcccaccccacggggcccgggcacagttctaccagc

SEQ ID NO: 700343 - DNA, 216 bp, Homo sapiens
ttaatgcccccctggccccccttccctttaatttttaaaagaacaggatattttttttttcctagagccctcagatgagaggggaccggatttttttttgcccgtttcccattccccaaagacctctttctttggggggccaaggggggggggtccctttaaccccggggtttgacctccacctgggcaacatgggggccccccgtttttttcgga

SEQ ID NO: 700344 - DNA, 862 bp, Homo sapiens
  misc_feature (565)..(565): n is a, c, g, or t
  misc_feature (580)..(580): n is a, c, g, or t
caagacccatggagaattcaggagcgatgctgactatcaattaccaactattgcggtgtaatgtagacttgttatagataattcagctaggactgacatttatgaatgagcaaggagaataccctccaggtaacttctgcttggcaggtttaattttaaatttaatttgacggaggacatgtatgcccaggactctatagagctactaacaacatctggtatccagtttaaagaacatgaggaggaaggagagttgaagacccagtactttgcagaactgtcttatgagttctggaggtggtcctctgggaaggggtccaatggttgtcatgtcagtagcggttagcgacgtttggctacttaagtcaacacatcctaaccaagcatctaacttgcctgacatgaagaacttgacttcttttgagatccttcgattgtgattttcctgtcatttatgagtgtgaagtacctcatgaagagctgcgatatctcaataggtggacttacaggaggtggcagaaccgttagagtctgctaacggataggaatcacaacattcaggcanggatctgagttcatngctcacaggagctggctcttttcagaatgagagaactgtcttttgacgcaccatatgatgatgccactattgtgctcattctgtatgggcatgggttttggttcatcctatgtactgaaatggcccggtatgcttggacgaggagccacacgcgcctgcacgcacaggccgttataaatcgaggtaacaatgctgcttattggtgaactggagacctcgaaaaagagacctttcccctatggcattggtggcctcgacataccgccttagttataaaaaagc

SEQ ID NO: 700345 - DNA, 448 bp, Homo sapiens
  misc_feature (333)..(333): n is a, c, g, or t
gccccccccagactagggctagtgagagcaggcgtaatgagcagactatacggcgtaagtacgagctggtgggaatcggccgaggcatctcgcctctgtcttccgcgtcgcggcgcgtctctgcgtcgcatggaagagagatcgcgcgctgtcatgacatggctcggcatgtgcaagctgttgctggggacgaagctcccgagccggtttcttccatcgtcgggcgccagacacaggcgtctggtgggatgggcgaaggactctacgtgggcgacgaggccagagcaagcgtggcatcctgaccctgaagtaccccaatttgagcattggcanttccggtcaccaaactgggacgacatggagaagatctggcaccacaccttctacaacgagctgcgcgtggcccggaggagcaccagtggtggtgactgagccccctgaacccagg

SEQ ID NO: 700346 - DNA, 698 bp, Homo sapiens
tagcagctacccaggcttccctgtgagtcggccccacggatcatgcggctggtggcctgaatgcagcctgctccagtggcccggtgcaggcgagctgtggctgcctgcatggtgacagtggccactcctgtgttcatgccagtggtgccgcaggccaccatgaagggcatcacgacctgaacatgctggactgctctggtgttgccgcatctgcctgggcaatacctaccatctgggtctaagtgccggttgaccctgagctgatccagaaagccaactggtctccactggcttcattgaatttggcctcataatctgctaactggacagctggctggtttccaggattggtgtctgcatggttgtctactgtcctgaggttgactgtgaggcagggctgtcctgacttcctgcatccacccgtacagacgtgcaaagtggaggaacccattgcatgaagcacctgggaggaaagtccagtagcaggagtccacgacatgctggcttggggctctggtgacatctatcattgccagcttgagactgaccgtaggattagacaatgtacatgttgcacttgtgtgccacgttgtgcgagtgcagtgccattgtaccaggtccaatcccgcttgggctggacctaggtgcacttgcaagtcccatcaggcgtgccggaacaagcaggaacctccttcgac

SEQ ID NO: 700347 - DNA, 108 bp, Homo sapiens
gccatagataatttggaaagtggaaagccattccaatctcgttgggtaaacaattaactaagacttacatttataacaaaggctccagaactggccaatccaatgggg

SEQ ID NO: 700348 - DNA, 667 bp, Homo sapiens
caactcgcatgaagtacgccctcgaatacagtattctatcctatctgttctctgtgagatacacaatatgcttcacaacacacatccttatcgactatgccatactagttagtatgctcaccagataacgcgatatttagtctcatcactttgaatacaaagtgcgctcattgtattcccatgatccggtctacgactgatatcgtcgatctggtaccatgagtgtacatatgggatctgcttagaattatcatctaatctcaatcactttgtctcgtaatctgtataagacatacatactcattactatcgccagttctctaacaggtcatgatgacagcaacgactgagctcaatgagctccatcggtatcggtattccgacgacacgcctctctgcgtgctacctcgttgtatatgcgagatgtgtatcgggcttttgctgactgtaccatatatgcacttatctgatgagccgcgatttgactattcagataacgaatatatttcgtcacctagtcactaaaatcacatatatcttctattgtactaattcttgattatgctttcaaagttcctcgctcagatgttgatctcgacgatactttataccatagcaagaagttaccttatacattacatattcggtcaattcactgccataagag

SEQ ID NO: 700349 - DNA, 569 bp, Homo sapiens
gcacggcaccatggaaatgtagctgaacgtctccagtttccttcttgggcaacttctgtattatgcacgtgaagccttcccggagccagcgagcatatgctgcgagtgaggacctttctatcttacattatggctgggaatcttactctttcatctgataccttgttcagatttcaaaatagttgtagccttatcctggtttacagatgtgaaatttcacagagatttactgacttctcctagatagtcttatgaactgtgctttaaagcatgtgataggatgctgtacggttagttttgtgaaaacagtccctttctcctaggtaatgagtaggctgtcataactttagttctatgcatactgcatctttacatgctatcatgtacatttagatgatggccttgatttttttaaatctgtgtgtgtgtgtgtaaatgccaataagaccactgctttcatccatgtagcttaacgtgtatgtggtccacgacatgggagattctaatttactactcatatatgcgatgcgctatattagcttaataagcaatatatatggtttaaacag

SEQ ID NO: 700350 - DNA, 287 bp, Homo sapiens
ccttgcttctgcgtcagtctgaggatcccctccgaaagctagtacccaaatacaaaaaattagctggggtgtagtggcaggcgcctgtagtcccagctacttgggaggctgaggcaggagaatggcgtgaacccgggaggcagagcttgcagtgagccgagatcatgccactgcactccagcgtgggcaacagagtgtgactctgtctcaaaaacaaaaatgaggtcttggcctggcgcagtggctcacacctgtaaccccagcactttgggtactacgctttggca

SEQ ID NO: 700351 - DNA, 589 bp, Homo sapiens
ctgttttatcaaaatcgcgtgcggggcctcggtacttttactatagaggattctctactatgggtgccttactttctgctgagagtattcatctttttccatccccatcagacctttgaattccacacttacatcaccttccatggctgccttttactcctcattagttttagcggggggcgggattcattcttcagtccatattggagctctactctagctaacgctctcgaccgccaagatgcagttcacataagcacagcacagctttgtcatacgaacaatgccctgctgccataccaaaactaacctcatgagagattcagagatcttgcaccttctggtgccctatacgccacatacattgagtaactactggcaacatgtgacaatctttacctccacatgttagctgccatttgttcactctgacttgacctatcactacttattattccctgaaccctaactccaggactgcttcctgcgaacaagttaccgactcaaacacttattgtgcatatcaataactacttgtggcaggaggccttttcctacaaatgtacctcttctatttagccacactttt

SEQ ID NO: 700352 - DNA, 360 bp, Homo sapiens
tacagagtgaatgtgaggtgtactccatggccatcctgcttcgtgaagaaggcttgctggaacgcaccatcggctacgccacggacatcaaccccgcgtcgctggacaaagccaagcagggcatcttttccctggagaacgtgcgcgcctacaccgccaattatcagcaggccggcgggcaacgttcatttgccgactactacacagcggcttacgattacgcgatcttcgacaagacattgcgcgagaacgtgacctttgccgaccacagcctggcaaccgacagcgtattctcagaaactcaattaatttcatgtcgtaacgtattgatttatttcaataaaaaattgcaagatcgag

SEQ ID NO: 700353 - DNA, 191 bp, Homo sapiens
ttttttttaaaggaaaacccccctttttttttttggcttttttaaaggggggtttaggggggcccggggaacgttacatgactcgttgagaaaggtgggggatttcctcccccccctttgggggttgaagaaaaacaggtttttttaaaaagagggggtttctttgaagaaaagaaaaaaccccccgttta

SEQ ID NO: 700354 - DNA, 758 bp, Homo sapiens
  misc_feature (666)..(666): n is a, c, g, or t
ttgtggggaggcctcaggaaaactacaatcatggcggaaggtgatgggggagccagcacttcacatggccaggagcagcaggaagtggaagaggtgctacacacttttaaacagccacatctcatgagaactcactatctccacaacagcaccaagagggatggtgttaaaccatgagaaaccagccccatgatccaatcacctcctaccaagctccatcttcaacaatgggaattacagttcaacgtgaaatttgagcaaagacacagattgaaaccataccagccatagatgggtgctgcacagccagggctttccgtttggagctgcccattaaatacccagttgctgtgcccattcactggcaggccaattaatactttctaatataatttaataaacccttaactttgtgagtggccaaatggctactactactcagttttcaagactcagttccaatatgcagatacagttgtgaaagaatggagaaaactgttgagattagtttatactgggaaaggagagtaagttggggtgatcatgtacagggacttttcacctgtataacctcctatggctttttgaagtatcatacaatatatagtgtattaatcgatcataaaaagacatttcacaaagttaaaatatatggggagtgtccanccttactgatatataggatttaaaattaacctaaaatgaccttgttaatgatagggcaaaaagcccttatatagatatacaattaatatttc

SEQ ID NO: 700355 - DNA, 133 bp, Homo sapiens
gaagatgaagaagatagaaaccgacctggattactccggtcttctgagccctgtcccctcgtgtatctccagggtctattcccagcacctttccactttccttcctgggatcactgtgggtcctgtgcgcaag

SEQ ID NO: 700356 - DNA, 957 bp, Homo sapiens
ggccccgctgcgccggccgagtcgctgagccgcggctgccggacgggacgggaccggctagtgctggtgctgcgccccccgggccccgccgtgggcattgtgcgcactggccctgggcgctgctgctgcctctgctggcccagtggctcctgcgcgcctgcccctggatgcttggcccccgctgcccttcacgctgcccctccgggtggcctgctggcacagaaccgcgtagttgcgcccacccctgggacccgggaccccttgtcggagctgccacgtccgacgtgtcttgtgcgctcgccctgtgagccttgcccttggcgttcccctgctgggcgccctgcaacattctttggccaatggtatgagcaacctgcagggtgggacttctggccggcggtcttactaccttggagaatgctgatcggtgacccccccggagaagctacagatttctcgtatgacactggaagcagtaaacttttgccgtggcaggaaaccccgcactcctacattaaacaccgtactttgacacagaggaggtctagccaacattaccgttccaacgggcctttgacgttcaccagtgaagtaccacacaagggaaccttggaccggcgcttcgactgggggaagacctcgtcaccatccccaaaggcttcaatacttctttacttgtcaacatttgccactatctttgaactcagagaattcctcttggcctgggattaaactggaactggaactactttgtgctagccttatgccaagactttgccaagccatcaagtactatggagaccttctttgacttccctggtgacacaagcaagattcccaataggtttcttcctgcagatgttctgagccggatgccagttgctggatctgggaccacggaggtagcatagtttgggtggattgacccagtctgtataaggaacatctgataaccca

SEQ ID NO: 700357 - DNA, 127 bp, Homo sapiens
cgagagccaccatcctgtagacctgacagtggcatgcaagatacacatttctttgctgtaccttgtctactgctttatatccccttgtgtgctgtcgagtttggggtatcagacgaactgccgcagt

SEQ ID NO: 700358 - DNA, 409 bp, Homo sapiens
gtcttcggtctttgtgtattgtggtacgagcagagaattcgcattgagaaaacgtgggttcagatcctggttctgtcacctcctagttcaatgactttgggcaagctatttagcctctttgagtcttgagttccttatcagtccctggcccacctttcctcacagggtagtttagaaagtgtaggccagatgactaacaagacaggcatgtggagatgcagagactgtactaacacaaggtgttttaactagaaaactcgaacagggtcagacctttgagcactccctgtcatagctggaaccatagtgggacaggcacgtggatagatgtacactgaagacacttccaggtcaaagaggccacttgcctggcctgggctgagccctcaagataaaggggattggtctg

SEQ ID NO: 700359 - DNA, 364 bp, Homo sapiens
  misc_feature (19)..(19): n is a, c, g, or t
  misc_feature (356)..(356): n is a, c, g, or t
ggatttcaaccagatgagnagtagacaagaaagaaaaagaaaacttcagaacaatattcattaaactaaaactgaatttatttcttttggtggaaaatcatcagaaaaaacaaatttaaaagttaaattcaaattgaaattatgttttttgtataaagtaatccattctttagtgtgacaaagatccaaagatatgtgtgtgtgtgtgtgtgtgtgtgtgtgtgtgtgtgtgtgtgtgtgtacatgagcgtacgatcgtacatgagtcagttttctgtattcatagtcagattggtcacaagatattccttgatttcaaattcacagaagcttaagcctctttttttaaaaaggcngtgggggt

SEQ ID NO: 700360 - DNA, 936 bp, Homo sapiens
tgcgcggccactgtctcttcgccagtaggtggtgaatggcgtcctgtgctcggagctgtagactgaggacgatgaggaggaggaggagggttcggtagggagacgcccgaagacagagcaggtgcgtctgcatgtctggcgcggaaagcagggaagttgccgagctcctatcgaaaaggacgagagacaatacaacgatcgtgtttgggaaagtttccttctgactagaacacaatatccggtgcatcctaacgtttaatatagttggcataatagcgaaataatctgcgagatagccatctcgtggtccatcgattgtggatgtaatggacagttcgcgaggagtcatgggagcaggcatagttaggttagtagcgtaaagacgtcgtggactgccatcggtgtagcaacgaacaagacactacacatctgatgcctccatcagcagggccttcctgctgtgtttttactcattctaacaaatccaatttcccctcgggtgttctctcatctgatcagtagcagctctgacctagtgattggcatgaaggcatcaaagccaaggaagtcacgtggggcctggtaaaaaggttggagggactcttggatccaacgggaaaggaaaccaatgacgagcattacaatactttcatcaactaatggatacgagcgatggttacccggatctattaatagagcctcatgatatccacgcggaaagctcttctcttttctccatatttcctgaggagccctaaaaacacagaatttcataagactcggcggttgtttggtccatttgctagaaccaaccgaatatatgtaactagggaccttacctgcagagagttctaaggctaatgtccaagttttgggaaaatccccggcaattgctggaacttgtggttatacttggatgtcgcatggcacatgcgc

SEQ ID NO: 700361 - DNA, 211 bp, Homo sapiens
ggacaggaaaagaatggtattaagctgattctcagcaacaagtgctttgggggatagcagaaagtttctgaacatgacagtgttgagagctaagcctgcataatgcaattagctgtctacgttaccaccaaaggcagaaacagtaaagtgccctgcctggaataggctctcaggtttaacttgcacaactgcacaagcttgtggagatggt

SEQ ID NO: 700362 - DNA, 411 bp, Homo sapiens
gaaacaggcaatgacctgggaactatttctgaacacccctaggtttcccgtgtatgccctttcctttcacatttggacccctttgtgtgctgaccactgggctgtttcacatggacataacataaaaaagacaggccaggtgcattggctcatgcctgtaatcacagcactttgggaggccgaggtaggcgaatcgcttgaggccgggagttcaagatctgcctggccagcatgagtaaaccccgtctctaccaaaaatatgaaattagctgggtgcggtgatgcacacctttgatcccagctatctcaggaggctgaggctggagaatcccttgagcccgggaggcagagactgcagtgagccgagatcgcgccatctgcactccagcctgggtgagagtgagactctta

SEQ ID NO: 700363 - DNA, 326 bp, Homo sapiens
tgtggtttgaacagttgtcccctccaagtgtcatggtgaaatttaatctccaatatgggcgtattgagaggtggggcctataggaggtgaatgggtcatgatggctctgctctcatgaatggattaatccattaacaggttatcgcaggagtgggaatggtgaataaagaggaaatgagacttaagctagcctccttgccatgtgatactctgcaccaccttgagactctgcagagagtacccaccaacaaggaagctctcaccagatgcgcccccttgaccttggacttctcgtcgacgcggccgcgaatttagtagtagtaggc

SEQ ID NO: 700364 - DNA, 112 bp, Homo sapiens
cagtggtgatctagaactcctgatctcaagtgatcaccgccttgcctcccagagtgctgagattgcaggcgttagctagcgttgcacagcatggagttaatactttctagaa

SEQ ID NO: 700365 - DNA, 483 bp, Homo sapiens
  misc_feature (36)..(36): n is a, c, g, or t
  misc_feature (69)..(69): n is a, c, g, or t
  misc_feature (337)..(337): n is a, c, g, or t
tcgaacaaatggaagaatgcggtgatcatagaccanagacacacagataattaaccccatgtgtccacncaggccaaagttcttcctgataccccacagtggatgtccaggcagatggtccccacatgatggggaagcagagggcatagtgtggttttgtgggacttgttcatgttttgtagtgtgggctcaacagtgccaaaggaaacactagggaaaagttggtgaaacatgccagctagcaggaccagtaaaggcataatcaggcatttggcaaaattgtttttatatcaagaaggtttccaaagcaaatttgcaatattttcaaaacaagttntagatggccattcccccataaggaaaaaaaaaacagcattcttttttcaatatctgtcaattcagatgtcattaaaataaatggatgagtcacagaggagctatcagatgctttcatgactaccataatccaaaaaaaaaaacaaa

SEQ ID NO: 700366 - DNA, 167 bp, Homo sapiens
gtcttttcccctcaaattccccggaactcccctagcgtcatcatatcgttgcagcgcttgggcacagatgcacatacctccacagcttgctctagatctgcagtatccatcccagccctattgtaatacttgagaaaatccttgagcagcatctgcgttccacttga

SEQ ID NO: 700367 - DNA, 768 bp, Homo sapiens
cggcacgagggagattgtgcgatctctgcgcgctggggcccctggattgtttcgctaccggcgcggaggaacgccgtgcatgggcctaaaggccacggaggtggaggagcagaacctgcagggccgaccttgagcccaagtactgaaagccctgaatcaccactgtccagaatctggacctatagagcgggatcccaaggctacaaagcaggagctgaggaagattttgcaggcacaggaaactttttaccagcaggtgaagcagctgccagaggcttctgcggattaggcctagaagctgcaggaacttgaacaagaggatggagaaccctttctggctgtcatggaaaagcggctatttgagtacttgagtcagatggagaaagcactgcctacaccgcaagcacagcagctacacgatgtgctgagatggaagcaacctggagtctctatcacctcttctcttgcctggagacaatatgaggtggacatggggtggatgcttccagagagaaatgtaactgactcagagaacctgggtgagcccatggaacagaaaccccctcagcaacaaagactaggactccacaatcccctgccaaaagccaagccctggcacacatctgcctcagggaccatctttaaggacgcacccagaacctctagctggccgagacttctggccccactagggcgacgaagagctcagggccaatggggctccactaggggaggcccggagcggcccacagccgcagtttcctatgg

SEQ ID NO: 700368 - DNA, 743 bp, Homo sapiens
  misc_feature (525)..(525): n is a, c, g, or t
gacagtatgaaatggaaggcggcaagaacttcccggcactgacggccggtccgaatcccggcgccttatcaaaccgacagtgacagcgtcaccccacccgccgacggcgtcatcctcagcggtggcaagaccgatgcccgtgactgcatcaacttcacccacgaggaaatggccaagaaacttggccgcgccttcacctggccgttgctcaatgtcgagtcgggtcagaccttcaaggtcacctgggcatacaccgcgccgcacaccacccgtggctatcgctggctgatcaccaaggatggctgggatccgaaacagcgcatcacccgcgcacagctggaagcccagccgttcgctgaagacttctatgcccaggtgccgtactacagccatgcaggcgaactgaaggccaaggtcgatcatgaagtgaaactgccgacccacaaaaagggccagcatgtgattgtgttgatgtggatcgtcgccaacaccggcaacgccttctatcaagccttcgatgtgganttcaaataagcccgcgccgttaaacccacacgttctgaaggattagaacatgtcaagattgacttacctcactgcaatcgccgctcaacgatgccgcttcgccgatgccgagcatcgccggcaaaaagatcctcatgggcttctggcacaactggcctgccggcccgagcgatggctaccagcgtggccagttcgccaatatcagcctggtggatgtg

SEQ ID NO: 700369 - DNA, 136 bp, Homo sapiens
tccactgcaaagctaactatgcaagacagacgatcatgcaggtgtgggtgtcctgaatgatgtgctcattatcttgttcacgcctttatggatgtcagactagtatagatggatctagaaatgttatacctggtga

SEQ ID NO: 700370 - DNA, 313 bp, Homo sapiens
aggatcctccacactagtccaagataagtgtatacccaccatgaggtagctaattacatattctcctttaagagtataagaccacttttttaagtggggaaaaaactccagcttgccagtttaagaaaacttctaaaagtaccgaccacttgggccctgggggacccccatgttccacgaggcaaattccaaaagtcttttaaaccaaaagtatgggcctggcggtggctcgcgcctataatcccaggacttcgggaggcccatgcaggtggaccacctgaggtgggagaatcctttgagcccgagagtttaa

SEQ ID NO: 700371 - DNA, 339 bp, Homo sapiens
  misc_feature (65)..(65): n is a, c, g, or t
tacaagagggcgggcgaagaggtatttacgctgatcaggaccacctcctcttcaaccgtctctgnacagaacttctatgtggcgaaaagtctcgccgctctttacccggaaacaggttggggagatgacacgcagaaaatcatacgcaaccgcatcggggagagccgcggccagttctactttgacgtacaggaaggctccaactgggcccttcagcgcgaacagcaacgcttgcgcgaagagcggcgagtgcagcagcagatggcagaactccactctcgggtgcttgagcgctatgagcagctgaaggcgggcatgaaggactacgaaggcagggag

SEQ ID NO: 700372 - DNA, 456 bp, Homo sapiens
caggccgcccgccgggatgcatgtgggccgtgggccggcggtgggctgtgggcctgcgctgcgtcctgtgctgtcgcagcgtgtgcttgacccagtgtcgtcttgtgctctgtgctgggtactgcatgatgcttctgtctatccatgctgctgaatgatgatatgctgcatgttgtgctgctggcatgtactgctgtgtgcttgtgaccactgatgcttgtgccttcatctctgtacttgatctgttggatgcttgcggcggtgctgcactccatgtgccactgttgcttggccctgactgatgtgatgcttgcaggttggtgttgttctgttgaaattgctgtggttggcttggattgtgtgctgccaatagtagccattcttgcactgcctctgctagtcctgagtattgttgcttgctacttcggtgcacctgccattgtggcttccctgctg

SEQ ID NO: 700373 - DNA, 575 bp, Homo sapiens
tgcctcctacaggcagcaccacagtacactgggttgttgctagtggcccagcccacggatgtggtaaaagcgtccgattccaagctcaggcccgggttgaggtggtcgggagatagcagagcaccgtcaatgcctacaagaccatttgcccgagaggagggtaccggggcctcttgaaagtgacctctcccagtgttgctcgtaatgcccattgtcaactgtgctgagctggtgacctatgaccttcatcaaggatgccctcctgaaagccaacctcatgacagatgacctcccttgcaatttcacttctgcctttggggcgggcttctgcaccagtgtcatcggctcccctgtagacgtggtcaagacgagatacatgaactctgccctgggccagtacagtagcgctgtgcactgtgcccttaccattgctccagaaggaggggccctgagccttctacgaggggttcatgccctcctttctccgcttgggtccttggacgtggtgatgtcgtcacctatagcagttgaacgagcctcatgctgctgacttccgagaggtccttctgagctct

SEQ ID NO: 700374 - DNA, 158 bp, Homo sapiens
tccctccttttcacggacacctatctgaggtacaggctggggctgccaccaggtgatgtcccaccacagtccctcacctcccgacctccacatgccagaaccaatttccactcaaccatgacctcacccctccttggtttctccctcgatctgtggcc

SEQ ID NO: 700375 - DNA, 682 bp, Homo sapiens
  misc_feature (97)..(97): n is a, c, g, or t
tcaacttttcaagtatagcccatatgtcctaacaggcaccctttttcgtgtgaaagatcatctatttggaggtctctgcccaaaaacacaaacccancaaagcaaccagagcctccttaccctagctcagaagtatagccaaaaagaacacaggttagcggtaaaaatgtatgtttaaatgaagttttgttttttttcccccacttcatattgattctcttctcacatgtcaatataaggtggtacccatggccaacaacattctctctcacctatcatactaatgccatataagtagtagtgtttgtgttttccagagtggggaaatatatacagctcaaaaaaacaaaaatatatctagcatctatctccttgccagttcccttgactctctgacctttaagtcccaaggttctaagtatccaatgaataagaaacctccgtgtctcaaacccaacagaatatgtttttttctggtttgattaaggcttcgaatttggacacataaatcctctcagtaatacttagtaattcatgaagttacggcttgtgtaaccttgcagaatatttacctttaggagattataaatcctaacatgcccataggggccttctgcttttattcctacatacaacacatacaacatgtgtgtttttaaacacaatgcacataggacaggtg

SEQ ID NO: 700376 - DNA, 168 bp, Homo sapiens
atacggtctagtatatattagtctgttttcacacgcctataaagacctacctgagtaattccagcactctgggaggccaaggcgggcggatcacctgaggtcaggagttcaagaccagccgcgccaacattgcttgctttcagtagttgctttcagtccttatctcag

SEQ ID NO: 700377 - DNA, 394 bp, Homo sapiens
gcctgttacagatgcacatcatgcaaatgtggttagtgattgatatggtatggctgtgtccctacccagatctcatctggaattcgcaagtgttgctggagggaactggagggaggtaattgaatcataggggcaggtttttcctgtgctgttctcatgatagtgagtaagtctcatgagatctgatggctttataagtcagagtttccctgcacaagctctctctctttgcctgctcccatccatgtaaggtgtgacttgctcctccttgccctccaccatgattgtgaggtctccccagccgtgtggaactctaagtccattaaacttctttcttttgtaaattgcccagtctcggatatgtctttatcagcagcatgaaaacggactaatg

SEQ ID NO: 700378 - DNA, 249 bp, Homo sapiens
ccatgcctgacggtgggcacatcgatggttccagtgagtcatgattgtgacacatgctttccgagcctgggggacagagtgagaccctgtctcaaaaaaaaaaaaaaaaaaaattaaaaaaaaatgtacagggaatacggacttaccccccacctaaattctatattaaaaatcttgcaatctcgtgggtttaataacattattctacccattcacacaattctatttctcaaaaggttatttccaagg

SEQ ID NO: 700379 - DNA, 838 bp, Homo sapiens
gtgggcggcaggacgcaccgcggacccggagagggcggacgagcaggcgccggcgcgcatggacctggtcatcacgcaggagctggcccgcgccgagagccagcaagatgctgcgtccttgaagaaggcctacgagttgatcaaatcggccaacctagggaaatcggagtttgacccctcagagagcttcagcccagacctgtttgttctgtgtgcagagcaggccctgaagatgaggcagccagaggtgagcgaggactgcatccaaatgtacttcaaggtgaaggcgcccatcacccagtttctgggccgagcgcacctgtgcagggcccagatgtgtgccccgaagtcggcagaaaacctggaggaatttgaaaattgcgtgactgagtacatgaaggccataaactttgccaaaggagaaccgaggtactactttttggtgtacaatgcatcagtcctctactggcagatggtgaggccgttcctcaagcctggatatcgtcaccatctgatccccagcctttcccaaatcataaacgtgctgagtcagactgaggaggaagacaaggagtggcgtgctgagctgatgctggaacttctggagtgttatctgcaagccggaagaaaggaggaggctgccaggttctgctccacggcagctccgttcattaagtctcacgtgccacagaaatccggcagatattctctgttatggtaaatccagcgtattagaaaatagagacggtagaagtaattttctttacaagtcattgttcagaaaactgggtagacattaccttagtttgctgagaggatattaaaatctatatgcatc

SEQ ID NO: 700380 - DNA, 189 bp, Homo sapiens
tttagtgagggagagatttggtatactattgagatgggggctagtttttgtcatgtgagaagaagcatggccggatgtcagaggggtgccttaggcaacctctgggactcagaagtgaaatggggctattcctatttttcttgctatagcctttatgatttttaatgattattattgattggtacctat

SEQ ID NO: 700381 - DNA, 1245 bp, Homo sapiens
aagaccttctgcactgtccatctaaggatgcaattgaagctcattttatgtcatgtatgaaagaagctgatgctttaaaacataaaagtcaagtaatcaatgcaaatgcagaaaaaagatcacaagcaactctggcatgggattgcacaacatgacagcatttgcacccagtttatgggccatcaatcggaaactcatggcaatatcctgcagaagaaaatggatttcgttatatcccctttagaatatatcaggacaacgacctgacaaggacctttcattcaggaagctgtatcggtcctgtggctgcagatggacaggtggcaccaccactaggcagacatctcctacaaagaaagttctggtcctttctggctattggatcctgacagaattgggggcacaaaaaagaacttcacgttgacttgatctccatggcacactctggaacgcccaaatggttgggaaaacacaccctacatggcagcgcggcgtgtgaagtgtgacaacattcttgtgaggctaaaccgggaactatagtattcaccatcatcaatcatacgtcacgacatctacattcacacaacaggccaaaccaggacttgggacacagagatccacacacacattgggcctgggaacagacaagcaacgacagatccctataacaaggggggcacataacaacaaaaagccagagtcacaccccttgacgggcccaaacaacagagcttaggaggcgaaaggacacacaccgtggacacacaaaacacgacatccgaaagacaatgaacgcccaaaccgagacaacacaaccaccacgaccagacaataaagggaacaagcgaccgcgggcaccccacagagagcaatcaacactgcgcgacttcccccaccaactggccaaaacgaataaaaccaacaacgaggagaaacacgagaagacattagagagccaccagcaagggacatcaagaaaaaaaaaacgaagccgaacccataggcacataaaagcaggcacagaaggcgccaccaacaacactcgataagaagcgaaggagactagccgaggacgagctaaacccaatgagggaagaggactcacagaacaagcacagaagcacgacacagcacatcacaaaacgcacgaccagagacaaaccagtagttaacgagcaacagccaacacactgcaggttgaacaaaaagaataaggatagctcgtttatcatgtacatatgcaga

SEQ ID NO: 700382 - DNA, 735 bp, Homo sapiens
agacgggcttcccaggaatgagggggacagatgggctccccaggataaggggggacagaagaccccaggcctgaggaccaggcctgccccctggcaccaccagacaccaggagggcactgctgctcttaattgaaagtcttggtgcaggtgagggcgtggaggattcctgggggaagcttcgtgctgcaaggtggacaaagacagataacaagagaaaaacagaagcttaatagcatgtataccttggtctgcaagggacggactcgggacaggctatgtcgcaaaggcgtggcttggagctcagccttaaagaccatgttcgacggaaacaaagagaaagagtgtgtggggaggggcccaagaaattaccccaaactggggtcaggccttctccatggatgagcgtctccggtgacttacaggcggccttctggcccagagagggggcaccctggtgagcgcagatgcctgtacggcatgtgactttctctcatagaacagcagcttccactcttgtcatcagaatttctcctgtggttgcagtttctcaaaataagcagctcaacataatgcttatgccaaagaggccatataaggggtggcatattctggtctgctctacgtggaagcggacagaaaccctggggcagaggccagggacggggagccgggaccgacttcacagttcccagaaccgagcaagggaaacctgaggccgagcctctggagccttg

SEQ ID NO: 700383 - DNA, 184 bp, Homo sapiens
tgtgtacatacaaggcatagtaaacgtgtatttaaaacttgtttcaatgtcgcacatggcttaagagtttgaatcagtaacgtaaagttacgagagtaaaatcatatgaaggccacacagttaaactgacaggacagtctaacagtgctgtgccgccgctcctgccatagctcttaccccatct

SEQ ID NO: 700384 - DNA, 758 bp, Homo sapiens
acagggctgggtttgcccgttcccggattttctccgcgggtattgttcgtttggggccccccgccgcttcccgcggtatttttctcgccctctctttcccacaacgcttgttgctccccctccggcacctctcgcgggggaactttctatttctgtcggggattccctcccccctcctcggtggtgatagagcccccccctcctccccaaggagccactcttttggtattataaaccggcgctttgaaaccatagagaagtggggcaagagtgtttctcatccgcaagactgtgttcactagcacgatctacccggtggcccccccttggaataataagatttgtgcacaccaccgccccgggtcgccgcgccatacattttgttcccccccccccgagagatttaaaaagaagaatctccacatttcttttaaagagaacaaacagcgtttctcacacggcgcctttttcgcaccagttttttcttagagggcgcccacaaatataagatttcgggaatatagggaataaagcctctatagtttgtttatcacccccgcgcacccctcctccaccagagagtttgtgaaaaaagtttttccaacacaataattttggttttaccagaaaaaatctttttgtgtataaaaatacttttttaaaagtgtttttttaaaccccttaaaggttttttttttccccccaagaacccacccaaagtgggtttgtgtttccaaaaaattttggggaaaatccca

SEQ ID NO: 700385 - DNA, 301 bp, Homo sapiens
gggttcgcccccgggtccgcccccgggtccgaaaattttttgtccttttttcaatttgaaccattccggtttttttgccccaaagtttgaaaattttttttgttacgcggtttaggattcgtttgaaattgttccttttcccctttttagccccaatttaggttttgtttattggcaccaataaagttgccctttttttttttttttagcctccatccccaaggtttttttttttaacttttggccccttttttttcccttttttttttttttttaaaaataaatataataaaaaatttta

SEQ ID NO: 700386 - DNA, 511 bp, Homo sapiens
gcgtaactacagactcatgagaaaccacggaaatggcccgaattgtgcttacgtgtgaaaatactgatactgtgagttcaacagagctgtttttcaagccaggatgcagaatgagaaatactacttgaaatgacggcctctaaggttgtggcttttgaagtcaagtcattcagtttgtgattagtgtataaaaccctgaaaatagttactacagaataaagaacaataagctcaaagtacatgtcacacatataatagacaccaacatcatgacccgtgggtatggttagggcaacacactaattttgggattagacgtgaacactgaaaacggatgtttcacattcaatatcctagtctgaaacacctatgtaaaggacagcacagtccttcaaaggaagaaaactatgtacagcttaatttaacagtggaagtaaactaacccttgagtactgcctaatggctgaccatctatttgaattactaatatctatatatctatacattgtcg

SEQ ID NO: 700387 - DNA, 209 bp, Homo sapiens
  misc_feature (1)..(1): n is a, c, g, or t
  misc_feature (9)..(9): n is a, c, g, or t
  misc_feature (14)..(14): n is a, c, g, or t
nacccaggnacccncctccttttcgtaacactggtccccccggtcagcccatctagccctgtccttcattcctcacgccatctcggtgcccatcttgagggctggaacggccctgggtgcctgcccctcactgtgcaactctgggagcagcccggcaggttggggcgtcttccaaaacctctcccttctggagccactctgcactgcgg

SEQ ID NO: 700388 - DNA, 117 bp, Homo sapiens
ggtgcctattatcctcagtgtatccatgttccctcccagaggatacaccagttctcatggagtgagcactcagtctctcttctctccagcttagacactggaccagcttgagacacg

SEQ ID NO: 700389 - DNA, 366 bp, Homo sapiens
ctcagatggcttagatgcccagtgtgggcaaccacagtcttcaatagatgctatccggaaacatctcatgctcaagacagttctgtttgttgcccaccagttacagtacctggttgactgtgatgaagtgatcttcattgaaagagggctgtattacggaaagaggtgcccattaggacctgattactttatatggtgactatgctaccatttttaataatctgttgctgggtagatactaccgacagttgagatcaattcaaaaaaggaaaccagtggttcacagaagaagtcacaagacaagggtcctaaaacaggatcagtaaagaaggaaaaagcagtaaagccagaggaagggcagcttgt

SEQ ID NO: 700390 - DNA, 936 bp, Homo sapiens
tcgggcgtgtggctgctctggtggtcggccactgggtgacgcaggagggtgcagcgtcgtgggggttctcggcctgctgcgcagagtctcacgcaattggggaagggtgcgacatggagaaccctctgtgctgtgggccccccttattctgcggggtgaaacagcgtggcgcttttggtgctctggtgcgaggatatatgagagtaagtcctggcgagaaagagaaagaagcgccggggaacggtcatggggtatgggatagaatggccgtgggtgcgagcctatggtcgtgagtgccggtgtatcgattggcgcggcgcaaggtcttgttgttcgtagccaggggggaagcatctggttatatggtatgggctccgagtcaggggagaaggtacataggaaggggtcaggctatgtgcttgtgtgactaggtgcgcttgtgttatgagtgtggaggcgggtggttgagcccgcgtagccagccgtgtggttgtgtgaggaggttcttggcgggccacggtttcgtgattgtagtgctgcgggactgcgcgggcgttggtgacgatggcgcctgggaggggaacttctatttatgtgggagtcccccaccagttcgttagtcctggtacaaaataaaaggctggttgtgtaagggcgaggtcatagtatggttggttggccgccaccgaagtttggctaccgtgtcattgggtcacgtcgacgaccacgagtgggtgggaatgatgttacgcgagcctatgggtgtagttgtactgctcgtattcagttgcgatgagtaagccgccccggggggcggtagatacggggtgtaggcactaggatatgtagcttgcctggccgccccacgcgccggttcatgttctggcgcgcggtcgtccgggttgagaccaagtgggataattttaaacaacccac

SEQ ID NO: 700391 - DNA, 132 bp, Homo sapiens
acgtattcaggatggttcatcattatatagagaggaggtgagcccaacagttgtggtgttgccttccctctgtaagggtctaggccatttggttgccatggcaatgggcttgatgtaccatggagacttgtg

SEQ ID NO: 700392 - DNA, 212 bp, Homo sapiens
aggctccagcaaacgatattaggaggtcagcacggtgctcacgtatcgacggaacttgtacagtggaggcatgcaccgaattggtgaatacacgtcgaccaggctccatgtaaacgatcattgggaggtcagcacggtgctcacagtaatcgaaggaacttgtccagggaggcatgcaccgcagtggtgaataccacgtcgagctgcaggcc

SEQ ID NO: 700393 - DNA, 109 bp, Homo sapiens
acggccgtgtattactgtactagaggggattacgatttttggagtggtcattaccgccccttaggccaacccacctactactttgactactggagccagggaaccctgg

SEQ ID NO: 700394 - DNA, 571 bp, Homo sapiens
  misc_feature (17)..(17): n is a, c, g, or t
  misc_feature (490)..(490): n is a, c, g, or t
acaaggggtcatattgncttgtttcgtgaagcatatgtgcttatatgcacacacacacacatttccatggacccaggtcttgcttgtgtccccaggcaccagtagtttgagcccccctcaaaagacatgaagggggttggggtctgtgtgagtagtggggaggtgcatgtgtttcggcggtggtgcgtacactctcaagttggttgaaaagaggactccatgttgatctctggttccccgtgcttaccaaatacctaggcctcttggatgaaaggttaaaacattcctggtatctatttccgccagtggtaagtccctatcttttcagaaattttggatgtgcaggggtcatggagtttccgtttttgctgcggtctaccccgcgagaggccacccctctatttctgggctttttactaaaagcgctatttgctatttgcccctgtgcggaatttgtgccatccagcggtctcctttcagacgggcgtgnggagacagagagaacccaacaccgccgttctgtgaacacctctttgtcctccttcccttgctgggtacggcctttcaattg

SEQ ID NO: 700395 - DNA, 355 bp, Homo sapiens
ccgccccgccctgggcccccggcccccctccctggggacaaagttacaccccctcatccttccgcccacagttcaggttacccaacagcagtccctgttacagactgccccatacaccctcggtttccccctcccctgtggggtttgggtccgttccatttgggttttttactttacaggggcaggtccgcctcccctccctttgtatggagttccatccagggggtttccccccctgctcccgtccttaggcctcctgaccctggcgttttgatacccccccccaagatttttgttttttttattattattattgataataatttttttaatttttttttgttattaattttta

SEQ ID NO: 700396 - DNA, 213 bp, Homo sapiens
  misc_feature (97)..(97): n is a, c, g, or t
  misc_feature (158)..(159): n is a, c, g, or t
gtctgttactgctctctcagcttatcaataacttgcatttaagggttgtattggcattttaactaaaatgtgcatcatgatggaaggtgcagacttnttttgaaagttttccgagaggaggggtctatagaccatttgtcagaaaatcagatcagccnnctcaaagaatgggggtctgtggggctagttaaatagaaataacttttaaatatc

SEQ ID NO: 700397 - DNA, 386 bp, Homo sapiens
agacacttgactccatggacttctctgcaattctgttctgtgtaggactgcctagtgcctagccttcttgtgatgttccttgcttatgtcttgtctccccatttgatttggagggtcctgggcagggaccactgggctgggctctagtaggccccctgtaaagacctgttgagtaattagaagagacagtggccccatctgggtgaatcctgaatttaatcaatttcctggatccttgtttattttgcaagtaggataagaatgtcattgaaatcctatcatgtagtcatggaagggctaatacagtcagtgtactgctactcactaagcatgctgtttagctcagcggttttttgttttgttttgataacaagactgtctcgatg

SEQ ID NO: 700398 - DNA, 492 bp, Homo sapiens
ttcaaattctttctgggaaagtctagctcaccaaagaaaaagatcaagttgaagaaaagtaaaaatgtagcaactgaaggaaccagtacccagaaagaatttgaagtgaaagatcctgagctggaggcccagggagatgacatggttggtgatgatccggaggctggggagaatgacatcggaagatccgtggtccagaagctggtcctaatatagatgaagaacaaagtggagtgcgaaacagagggcttggtagtcgttctcataaactactgctgccaagggtgcccaaaaaagcgaagacatggattcctgaagttcatgatcagaaagcagatgtgtcagcttggaaggacctgtttgttcccagggcggttctccgagcactcagctttctagggttctctggagccacaccaatccaagccctgaccttgggacctgccatccgtgacaaactggacatccttggggctagtgagacaggaagtg

SEQ ID NO: 700399 - DNA, 176 bp, Homo sapiens
  misc_feature (125)..(125): n is a, c, g, or t
aagctcggtacccggtagactgtcatcacagaagaggtgaagatgcctctcaaaagacatgtgccacagaaatagatagaagggaaacttctctcttctcctttgcctcctcttcgcgtcaccangcgcagggcgcttctcttaggggtggtgagaaggatcttcgagaaatcgtg

SEQ ID NO: 700400 - DNA, 884 bp, Homo sapiens
  misc_feature (5)..(5): n is a, c, g, or t
  misc_feature (87)..(87): n is a, c, g, or t
  misc_feature (91)..(91): n is a, c, g, or t
  misc_feature (96)..(96): n is a, c, g, or t
  misc_feature (111)..(111): n is a, c, g, or t
  misc_feature (123)..(123): n is a, c, g, or t
  misc_feature (160)..(160): n is a, c, g, or t
  misc_feature (164)..(166): n is a, c, g, or t
  misc_feature (185)..(185): n is a, c, g, or t
  misc_feature (188)..(189): n is a, c, g, or t
  misc_feature (191)..(192): n is a, c, g, or t
  misc_feature (207)..(207): n is a, c, g, or t
  misc_feature (221)..(221): n is a, c, g, or t
  misc_feature (223)..(223): n is a, c, g, or t
  misc_feature (245)..(245): n is a, c, g, or t
  misc_feature (248)..(248): n is a, c, g, or t
  misc_feature (261)..(261): n is a, c, g, or t
  misc_feature (271)..(271): n is a, c, g, or t
  misc_feature (273)..(273): n is a, c, g, or t
  misc_feature (277)..(277): n is a, c, g, or t
  misc_feature (290)..(290): n is a, c, g, or t
  misc_feature (325)..(325): n is a, c, g, or t
  misc_feature (330)..(330): n is a, c, g, or t
  misc_feature (340)..(342): n is a, c, g, or t
  misc_feature (344)..(345): n is a, c, g, or t
  misc_feature (365)..(365): n is a, c, g, or t
  misc_feature (367)..(367): n is a, c, g, or t
  misc_feature (374)..(374): n is a, c, g, or t
  misc_feature (384)..(384): n is a, c, g, or t
  misc_feature (392)..(392): n is a, c, g, or t
  misc_feature (394)..(395): n is a, c, g, or t
  misc_feature (401)..(401): n is a, c, g, or t
  misc_feature (403)..(403): n is a, c, g, or t
  misc_feature (419)..(419): n is a, c, g, or t
  misc_feature (475)..(475): n is a, c, g, or t
  misc_feature (507)..(508): n is a, c, g, or t
  misc_feature (654)..(654): n is a, c, g, or t
  misc_feature (684)..(684): n is a, c, g, or t
  misc_feature (798)..(798): n is a, c, g, or t
  misc_feature (875)..(875): n is a, c, g, or t
ccttntttagaccatcacacaggcaggagtggcccagacagacaagtagatagacagacagtacagagggacaagaaaacaaccaantggnttagnggccctaggccaggntcagcagctgtntccaggcttcagctccagctctgctctggggaactgntgtnnnagaaaaactggccggggcntcnntnnttacagggctccttntcctcatgccctantntccctcatccagcctgttgggntcnttggcaggtgganttcccagggntntggntggctgggctgantgagcagaggatcgaggctcttggagactccctgnggagntggaggcctnnntnntttggggttagcagcagcantngggggantctggtcaanttccaggntnnggccantnctcagcagggcccctntttccagggcaggccctccacctgcccaccacaccaacatggtgcaataaataaantttcaagtagtaagtcagtttcaagcaggagnnctgcaggttggcagaaaggcagggactgagaaagataagcctccagccacccaccatatctgctcagtgggctcaagcggtcgcaagtctgtcttgtgcactggagtgggtgtctggccctgatgtccacatgagcactccccgcngacttcaagcccctcacaccagcgccagancctgctcggtggggcagaagcagggcaacatggtgcccacagcgtccacgatggctgccaggtgctcgttctgcgcctgaggcccacagagctgcatgaagtctgccagacgcngcaagttttcaaggttgtggccggagaagccccggcaggccaggatctgcgtggcaatggcctcttcaggcgcgggnccaggtaac

SEQ ID NO: 700401 - DNA, 316 bp, Homo sapiens
tttggctagggatctagttctcgccatcgtccgccattcctggcaatacgacctgcgcataccggtcatttcgtcggtgctgccagatggccaaggaatcgatacgaaagatctcatagccatcgtcagcgccaccacagaatacgtgtatgggtaggctaatcccacatccaatagacccatgtattctggaaacgagaccatgtgcctcgcaagttgatcaagccaactgagcgtcgcagagaaccgggcatgggctgggaaggtgattttgcctaggctgtacccgaggcagccgataaacaaggggaggggt

SEQ ID NO: 700402 - DNA, 268 bp, Homo sapiens
  misc_feature (34)..(34): n is a, c, g, or t
  misc_feature (116)..(116): n is a, c, g, or t
  misc_feature (190)..(190): n is a, c, g, or t
  misc_feature (248)..(248): n is a, c, g, or t
gaggaaggcggtggggaggtgctacatacttttnaacaactggatcttgtgagaactcactatcacaagaacagcaagggggaattctgcgccctgatccaagtcacctcccaccnaggctcctcctccaacagtggggattacaattcgacatgagatttgagtggggacacagatccaaaccatatcngtgtcattaaaacaatagttgccctgctaacttttttaatcccctgtaactctaaatnaaataatgatgtgaacataa

SEQ ID NO: 700403 - DNA, 120 bp, Homo sapiens
tcagtcaccgtaacattatgggccttggttttacctattaagtagacatgttaatacttttcatgtcaactaaggatattaaatgagatagtgtgtgaaagctcttaaaacagggacagg

SEQ ID NO: 700404 - DNA, 163 bp, Homo sapiens
aagcggatgtcggatccgcggatcttgacgaaggtgcggaaacgcttgagcttttccgggtcggacaggccgttggcccattcgcattcatagcggtccaccaccagctgcatctgcgcctccagttcggcgcccagtcccaggctgtcatcgatgaccacgg

SEQ ID NO: 700405 - DNA, 504 bp, Homo sapiens
gagctctctcgtgtggggtttcaatcaagtactcagtgtcaggttcttgccatgtaaagtcacatgcagtctttttattcacctcgaccggccatcatactcttcaggagtatgtgtccattctggctctgctgacaggcatgagctagtcaataatcgggaagtatggtaaattcaattgagcagtcctgggcatattcactgtggggggtatttccatctgccattctcctgtgacggagcattattcccctgagggaatgcgcagaccaagaggccttgcctagtcccaaaggtgtgtcatgggctccagctgcgaatcacagactcatagaatcatggggctgagagtgggtttaactgccctcagagtggcccttgtcaaatccaagtctgagttctcaacttttagctaatccaaaacagttgtcctattttcatcagggcaagggtcaggcccgatgttcaacgcaggcaaagcgtgcatccttggtgtcctcttac

SEQ ID NO: 700406 - DNA, 341 bp, Homo sapiens
gttgctcaataatatgcacctctgataagtgttgattagaaatgtgctcatgtgtttagacagtgctttggtatacagttggatgttcatcctggggtgagtgaatcatagtgtgttagaattcctgctagcatagaggctcacatgtccatttgaagatagggaacagttctctatagaatgtgaccggaccatgactgaccaatatacaaatttcagtaggaataatttggcgtatatcgcacaagatcattatcacatattcaaaataaataccctgtttgttaggtaattctgaaattgtcatttctattttggagttacaaataataagccctgag

SEQ ID NO: 700407 - DNA, 542 bp, Homo sapiens
  misc_feature (35)..(35): n is a, c, g, or t
tgtttcaatctcctcgcattctctcccgattactnagtagttctaatgttggcaacagtaatggtactctatagggttcatatctttcatctgctaatcatccaccacaaacgcccagcgccactcctgcccagaaactgggtaaggctgctgccactgaggacagccctgaaaatgcctcgaggggacagctgaactgtgcactcatccattttctgtttatttttggttggttttaataatttttggcactaattaattttcaccatgcagatgcaaatggacaacaagcacatgaaaaaggctgaacatcaccatcatcaggaaaatgcaacagaaaccccaatgcggggccgggtgtgtccagtctgaccaccacggtaaaaccttgtctctactaaaaacataaaaactaaccaggcatgatggtgggcgcctgtaatcccagctactcaggaggctgaggcagggacaatcacttgaacccggaggcggaggtagcagtcagctgagatggacccatgtaccccagcctgggagac

SEQ ID NO: 700408 - DNA, 624 bp, Homo sapiens
ataaccctcaacacccactccctcttagccaatatggtgcctatggccatactagtctttgccgcctgcgaaagcacggtgggcctagccctactaggtctcaatctccaacacatatggcctagagctacgtacataaccctaaagcctactccaatgctaaaactaatcgtcccaaaagttatattacgtaccactgacagtgactttccaaaaaacaccataattgtgaatcaaccacaagcacccacagtccgtagattattagcattcatccctctgctatttttgtaaccaaattcaagcaagcaacctatttagctgttccccaaccttttcctcggacccccataacaacccgcctcctaatagctaactacgctgactccttacccctcgtgacaatccggcctgcttcattctcacaatgagaacaaagtagccccacatctcaatcatataccaagatctctccctcaattgaaaccgtcaaggcctttctcactcactctgctcaatctttatccatcatagcaggcagtttgaggtgggattacaccaaacccagctaacgcaaaaattcttagcaatactcctccaattgacccacataggaatgaacta

SEQ ID NO: 700409 - DNA, 158 bp, Homo sapiens
cgaatacatcagtatagactaatctcaggtacaacaccagcagcctttaccttatatttaaaagtcccaaatagcactcgaatgatactgagaaggccacatttgcttttatcataaaataagaggaagaggaaaggcagtgtttaactgttctgacc

SEQ ID NO: 700410 - DNA, 501 bp, Homo sapiens
actcactcatatttcccacacctagtggtcagaggagggaggggcacagtgaagaacgcagcccaccacctttgcgggaatgccgcgtatagtggccgacatgtggtgccagcatcgcgctaactatgacataatctgtatcttgccagcggagctgtgaccccaggttactgcaactacctgactgctactctcttctgatgtgctgctccttccagacagagcctttcccttataccgtgaccccctgtgctgaccccattgtgtgaatgtgcacatgccacctccctatctatgaggccatactgtgtatgaaacaggatcttcagggctagccttaatctgcgcatcaatctggtagggtgggggcccccgagccaccgtacctacgtctacggagcccgtacttcagtattgcgtgtgtaacaagagctacggctgttggctcttcaagacacgaatgcctggctgcgtgagatatattggtgcttgcttagtgtc

SEQ ID NO: 700411 - DNA, 373 bp, Homo sapiens
tcgggccgagggctggagcaccgtcggcgtgccgctcagggtgcacgtctttgggtcgagatgcaggcccgcgggaagtgccggttgcgcctggcagctggtcacgttggcgccggaaataggagtgatgggcgagatgggcacgccgatgtcgaggctcacggcgatcgtgggcgtggtttgaatcgtctgcaccgtcgtcgtcgtgtcgccgcccgaacagcccgcgagcagagcggcggtgaggagaataaaggaaaacgatttataaatgggcgtgcgaatcatccgaggggcaatgcaacgcccgtaccgtcgcggaaacagcgtaatatcggcggccaaagggcgcggcggcgccagctgagctaag

SEQ ID NO: 700412 - DNA, 198 bp, Homo sapiens
ttttttctgaggggtgtacattttattggaaaccttaaaccttaaatactgttcagaaataatatatcttcaatcaaggctctttgtgcagcctacacagaaaaatgagctttttgggtaggggcaaggagagagacagtacagaggacaaagaccctcacgatgagctcttcagccagcttatcagcttttgccacc

SEQ ID NO: 700413 - DNA, 151 bp, Homo sapiens
cttagaggatccgggatgaggatctggcttcaattacttggtcaagggaaacaactgcatatccagcaatctgtggggtagctggtgggctggaagaggagccatctatgaatagttgatcatcggggttggagtgacgttccctcatccg

SEQ ID NO: 700414 - DNA, 647 bp, Homo sapiens
tataattttaaatggatcaaaacaaagcttctaaaaccgcagttcctgggaaaaaccactggttctggcctgtctggttatctctcttcaaatcttgaccttggccctcccgttcgggccatgcgttttaagagcaggactcctcgtgaagacatctccttatgtgacgacagttttggctccaaggggatttctccacagaagtcacctgtgtgggcatttagggtgatgtgtagttataccactttcacaaaagatttttactcttggactcctctgtggcgagatcttcttctttgcccatgtgtgcagctgtccacttgtgcggggggtagcgggctccaattcacagcccaccaagagcatgtggctgtcagggcgcgactcgtgaggggtgccatcactcaaggtgttctctcaccgatgaacgagacttgtggcgtcccggagataagcgttcacagccgagtgacagagcgaccactcttcccgaggttttcatggaatcttgcccatttcgggcgagcgaacccaccgcggggcggcagggctgaggcggacggacggcggcggcggtctatggaacgcccaagaggagtctctgtccgcgcgggcggccctggagaccgaggggctgcgcttcctga

SEQ ID NO: 700415 - DNA, 142 bp, Homo sapiens
  misc_feature (136)..(136): n is a, c, g, or t
agctggtacgggcattgggactctgcaggagcaggccaacgacggcacgccatatccatcggggacagcatctttgtgggagacgcagccggacgcccggcccactgggccccgggcggaagaagaaagacttctncctgcg

SEQ ID NO: 700416 - DNA, 273 bp, Homo sapiens
ttgaaggggacggacccaccggagcccattgaggcagcgtgtggccagggctcgtacacagccagctgcgcgcccggagcagacaaaggacaggtccccaacctgagacgccggagggcggggacaggggaaaacaaaggtgccggcacctcccaggaaccgtacttcagctacgctggggccaccaagtgcccgagagacggggctggagacgaggctcacagcagagagagcacagtgagagaggaccggccagacgaggctgaaagggac

SEQ ID NO: 700417 - DNA, 861 bp, Homo sapiens
aacttccccttgattcccaccttcccagactcacctagcccatcttccagcctcaacatatagagatgttagtgcaaggtcctgggctctaggtgatcatttcataagtcctttgaacagataaagaacacacagtaggtgttcgtatggtgtgtatctatataaggtacaccccaacaacgaacatttatatgtgtaagttcagacaacatattggcaattcagggtggttgtaagtatgttagcaacatgcaagtgcctgctcgtcttaaacgcgattgacttgttataatgaagaagttgcatgtgctccagctaagccttatgaggtttgtctcatttgttaggtatatggctttgtgaatcatgtaaaagtgaacacattagtgtggtgttgcgattgtgtagttgacaggttcgttctgttgctaagtaaagatgctgctgaaattaagaagaaaataaaaacaagaaagaataagaaaataagtgggggggggggccccgtaagacagtgtccccgcaagaggcgggcccatagtgcttcggcacggcccacgcggactcttcgggcggcaacaaggaggcggcccctagatcaacggttgcgtgagcgcacttatcacaggccagagggtgacgtccggcccacgggggctcctgtgaacaacccggggagaacgcaccttggagcgcaagagcagcggagaaggccccgtggggagaacaccacggcgagaagaagagaggccgaataggaatcctggagagggggggaggagacagcaactcagggggcgccaccaactgtcccgctgacaaggcttgcctttaagaggccccttacgggactagaaaata

SEQ ID NO: 700418 - DNA, 136 bp, Homo sapiens
ccctagtacttcctgtaacctgggactataggcattccagtcacacctggtctaatgtgtgtctatttaatagatatggggttttgccatgttggccaggctggtcttcaacacctgggctcaagcaatctgtcca

SEQ ID NO: 700419 - DNA, 112 bp, Homo sapiens
atggcatgtggtgaggacaggaaatataaggttaggtctgatagaacaaacatcaggactgaactccagagatgccaatgcatagaactggcgagtcagggtaggcggaatc

SEQ ID NO: 700420 - DNA, 182 bp, Homo sapiens
  misc_feature (77)..(77): n is a, c, g, or t
ctagaggattccaaatctctcattgcgcctctagagtagctgttctgtatcgataaaccgatcaactcacactcttntcagcctatataccgcatcttcagcaagacctgatgaaggctacaaagtaagcgcaagtaccacgtaaagacgttaggtcaaggtgcagccgcaatgagagattt

SEQ ID NO: 700421 - DNA, 662 bp, Homo sapiens
  misc_feature (229)..(229): n is a, c, g, or t
  misc_feature (312)..(312): n is a, c, g, or t
  misc_feature (360)..(360): n is a, c, g, or t
  misc_feature (465)..(465): n is a, c, g, or t
gggaaaaagaagcggggaattctgtttttttagggcttggcgtggcccctgtcagccccagaataaggttgaattatggccagatatcggggccttttgtctctccggcccggagggaacactgggggttttggggcttcctccaactcccccttgccagcaacaaaggaagaagttgctccctgcacgggatatcaaagctctgtttgtgtgtgaggaggagaaaaanctgcctcggaagggggtttccctcaagaatggggataaaaaaggcagctgttaaaaaaatgctcaatatgcccccggttatgncaaagtcaaggacttttcaaggggggtccccccccggttcctttgtantgggggggggggtcccttttctgcccccaaaacttgcaagggggattttgggggcccctttatagttcccaaaaaaagttgtttccttcaagttggggtaatcanctggggggtagtggatgtttgcaaaaaccaaaaggggcaaaagcggggtcctgttcccgcccgagatttttccatcaccctttttcaaggggggcccggggtgaaggggaaacccccaaatgggggtttgggttttttataaggggtttcctgctgggcagggggggggggtttaatttaaacagctgggcccccca

SEQ ID NO: 700422 - DNA, 936 bp, Homo sapiens
gcaagacctcatctctgctaaaaattaaaaataaataaattagctgggtgtggtggtgcatgcctgtgatcctagctactcaggaggctgaggtgggaggatcgctagagcccaaaaaaaaaaaaaaaaaaaaaaaaaaaaaaaaaaaaaaaatatacagcgggggggggcccaaaaacacggggggggctggaaaaccccgggaaaggggttaaagggtgtttccccaaaaggggttgggggcccccggggggttccccggggaaaaaaagggggggcaccccccctgtttttgaataagagaggggctgtgtgtcccgagctgtgggcgcacgaaaaatccacaagaggggggaactaagagttactcttctcccgcggacgccctgcgaagaaaaccacaaaacaaaagcgcagcaaaattttaacacgccgaggtgtttcccggcggagttgatgtatattattttcctcccgttttcctccccagaggtgattttaccaacacagccggggcgaagtgggagagcgctgacggcggggacacaccccggcagtgggtggcgaccgcggggggacctcacttgaatgttgttgttcaaccccgcgggggtgcaacctctataacaattgcggggcaattttatttgcgctccccaaagattatactcttgccgccgccttcctaccccgtttgtagtgagtacgggggagaaaggggcccgttgagcgtgtgggcccccgcgcggttcttctgctggaggtgttgcgtgatagcacgccgtgtgtgggatcgccgcgtgttgccgtcgtcacattttgggtggcacgctgtcccccgcaagtattgggttgttgggtgcactgggaaaggcccgcccgtgccgcgggggggggagcgcggggggctccccccccacaggtgcgccatagagg

SEQ ID NO: 700423 - DNA, 388 bp, Homo sapiens
  misc_feature (17)..(17): n is a, c, g, or t
  misc_feature (382)..(382): n is a, c, g, or t
tatatatatatatatanattgttggttggttggttttgttttgggtttttgaagacgggaagtcttgcctctgttgcgcaggctggagtgcaaatgactcgatcttggctgactgcaccctctgcctcccctggttgaagcaattttccctgcctcagcctcctgagtagctgggactgcaggcgtgcaccaccacccccagctaatttttgtatttttagtagagatggggtttcaccatgttagccaggctagtcttgaactcctggcctcagacaatgctcgcctcacgcctgtaatccagcacttagggaggatgaagcgggaggatcgcttgagcccaggagttggagaactgcctgggcaatatagcgagaccccngttaat

SEQ ID NO: 700424 - DNA, 890 bp, Homo sapiens
ggacaacggtacaggacttattcccttttcgctcttacgtcctagttctccccttgtctacaattctgcctccacaatttggcgctttataatagccgtggttttatattcttcccgtgtggtgtatcctccccccctgatgggtgccctctccccccctttaaaaatggtactcctgttacatgctcctacttcacaaaggggcgccccctgtaacttattgcacgatgcttcaactctgtcgctatataacgcggtatctgctctcaacgtcttaatctcgcgggattcctccccggcttctggcccccaccagatagttccccccggttggtactgcatgtcccacttcccttctcaaagcgccacggtggggagaaacaactccaggcgcaccctcctcacggctggtgccgccccccctcggttgccgccccgcttctgttaggtcccccgggtgattccatcggtggttctggggcttctgttggaacagcgcccttctatctcgtggcaataacatctgcgaaatatccgtgctactagtaccgcacacgctgctcctgctctccaccaggattaatgaggcgcgtcagcgtctttttgaaatgtccttgcctactgtggactctcaccccctctgttttcttctcccccacagcggcggcgcgcacacaatgtgttctccatatgccggtgttgttcaagcccccctttttgaacccctagtgtgcgtgaaggccttcacacatacattaattgagaatgggtcgtggctgctcccaaacatgaaaaaggcattacagataagacgcgtgagagataatacaaccacatggctcaaaacggtagacgccccaaacgagtccaaaaaaccgcccaacaaaaca

SEQ ID NO: 700425 - DNA, 911 bp, Homo sapiens
gtttagtcaaaatatattgtatcttaaaaatgtatttagactaagcgtctacatgtattgtgacggaattcctgtccagatctgtgcatcttttacagaattaaaggatttcactaatatatttgctaactgctatcatctagacatctagtgggccatggaatgaaatccgtcatatatcattcagttcaatcccatggcttcgagaatcagatcgatagcatatctattctaagtagaggaatgctttttccttttcttgaaagtgtctctttcaagtagatttcaggcctctagagtcttggcaaccctcacattcaggaatacctttgatcgtccattttcatgctttaagtaatgttctgacttgtttgtattcaattttgtctatatatggatgattaagatgtactttgtattattctttatccatagctttttaccatataaagtatgtattcttagggtcagaactggtgaaagagacaaactcaggccaaaaataattggaaaaggcatattgtggaatctgcattggttaggatgtctaattttcccataaagtactgaagtcaaaatggcttgcccgaggtggaaccagcgaaaaactataaaggtagaactggttaaaaagcagagtgtccggggacggcgtatgcatccaacaggttctggaacctcgtgttgggccgcacccgaagcgaggtgaaacgctctgaagggtgccgaagacctggcggagcacagcgcgcgggcccacaaaaagaccgggccccgggttgcacccatccacggctgcggctcagggccaacaggccaccgacctacccaccccacgggagagaacacgagggataagacagcggaacccgagcacacaacacgccgagaaaacaacaaagacaaaacag

SEQ ID NO: 700426 - DNA, 242 bp, Homo sapiens
agaagtactattggacataaactaccggatactatccacaacatgataatgcacaatttgcaccaaacatgtgaaaaaaaaacacattaaacacaattggactggaagactataggggatgggaaagggaatgagagaacactgagaataaaaggaattaaataaacacgcaacacaggccgcagtgcgttcccagcctcatccctagcactgcagactaaccacttcccccaacaccatca

SEQ ID NO: 700427 - DNA, 459 bp, Homo sapiens
  misc_feature (27)..(27): n is a, c, g, or t
  misc_feature (66)..(66): n is a, c, g, or t
  misc_feature (74)..(74): n is a, c, g, or t
  misc_feature (81)..(81): n is a, c, g, or t
  misc_feature (112)..(112): n is a, c, g, or t
  misc_feature (256)..(256): n is a, c, g, or t
  misc_feature (430)..(430): n is a, c, g, or t
  misc_feature (447)..(447): n is a, c, g, or t
aaaaattatgccaggcaatcgggtttnaagccgttgaccccccaaggcgaccttgcggccaaactnaagtgaanttgaatnaccaagcgtcaacccccggaaaagtcacccnagaccctgggggaaaggccgggccatgggggcttattcgttgggcccagggttttctcaattcgtcgtccagcactcgttttgacgagctgctgcagcaactggaaaagctcccaggcggaatacggcctgaaactgcaggatncctcggctccagcaagcccgcccacgcagcattggcgagctggcggacgcgagcaaggccagcctcaagcaaggcagtgagttgttcgaagagcaggtcgtcatggccgaaaccctcgacgcccatggcaaggcttctacgacgacgtcagcacgttgatggccaagacctccncccgcccgacgaagccnccctgacctttc

SEQ ID NO: 700428 - DNA, 772 bp, Homo sapiens
tgggaagcttggggagaggaggacatgaggaaggatttctgaacaacatgtggggagttcctctatataacaagcacgtctcgaggtcgcataggcatcccaaagtttcacagtccagttgggcgtcaccgacttagggtcactacagggcacattgaacaccttgtcttgctatgaaatcgttccctctcaaattcctcatcaatggcatacagcagccagttcatgaaacatctggaagcataagaacactcagcatgacattgtatctttgtattcttcatgaaaggtgtgcagtcttgtctgttattactagtgtctaatgtcattgattagttgaatcagatggtgtcatgtagtaaggattcttatgagtctctgttttcttaagagatccagagtttctgttgctacatgtgagatagttggcattttaactggcatgtcagttgcacacaagagagatgaagactagagcaaagataatgcaacgcgaggaggagaaaagaaatgcactaagacaagaacatgctcgtcatagaacattgatctgttctcacaggaacacaaacgctgctgggaaatttagacagggagactgtacataattgcgtgaaaatagctatttttttcctaagacattgtcacttcatgactatcttcaagttttgcatactgaccacatttcttaaaacgcatgataccaggcagaatgaaatgaatgcgaatgggcctgtgttattactccagtaccgggttgtgggacattacc

SEQ ID NO: 700429 - DNA, 143 bp, Homo sapiens
tacctcgactgggcgggcacttagaggtggggagcagagatctctttacaacatcaaccatctggtccgcattgaactcttcaatctcttgcactcaaagctgttaagatagttaagcgtgcataagttgcccgccaatcgaa

SEQ ID NO: 700430 - DNA, 195 bp, Homo sapiens
agagctagcaccatgagcttcaataccctgtctctacaaaaaatacaaaaattaactgggcatggtggcatgagcttgtggtcccagtactcaggatgcttatgtgggaggattgcttgagcccagaaggtggaggttgcagtgagccgaggtcacaccattgcacttgggtgaaagaagtgaaaccctgtctca

SEQ ID NO: 700431 - DNA, 240 bp, Homo sapiens
tcttacatatatgaagtgagctgtgtacctgtgagggcgagatttcggcagtgctgtcagcctggaggcctgcgagcctccaggcttcttcgaaaagcgcaagcccgacttcacgaagttccagtagcaggtcggcgatccggattggccgtcatgggaccagctccccggtcggggtgctcagacgatttgctgtgcgttgccaatgccgattgagcgcgaggctcattcatcgcgcaa

SEQ ID NO: 700432 - DNA, 105 bp, Homo sapiens
atctagactgctactagtggtccatcgttctattctgtaaatggctcatagaaggaaatgattttccaggtacagatacctaaatgggtatctatctcacaatgg

SEQ ID NO: 700433 - DNA, 472 bp, Homo sapiens
  misc_feature (225)..(225): n is a, c, g, or t
  misc_feature (425)..(425): n is a, c, g, or t
  misc_feature (431)..(431): n is a, c, g, or t
  misc_feature (435)..(435): n is a, c, g, or t
  misc_feature (444)..(444): n is a, c, g, or t
  misc_feature (457)..(457): n is a, c, g, or t
  misc_feature (466)..(466): n is a, c, g, or t
catgttgcccagactggtctccaattccttggctcaagcgatcctcctgcttcagtctcccaaagtgctggcattacaggtgggagccacggcacccagctgagtatctgatcgccctggtagtatgtacaagagcatgtgatatgggcttaatgtgcagcctccaacttagaatctggagagaatgtgtgaaggaaccaaattcagagttatatgaagtggctncagctgtcaaagttgcagcagtctatcagtgagtgaccacaagtggtggagaacaataaagtgatatcaagagtccagtgacatgacacaagtagtagctttctaagcagtttatctctgtggcatgatcttgactctattatgcctcatttagtttctgcctgttttctaagcttggttctcaagctgcttagtcaatnttgtgngtcnctgatagtntcacaataaatcnccttactgnttaaaa

SEQ ID NO: 700434 - DNA, 282 bp, Homo sapiens
atgggaggatggcttgagcctgggagacaaaggctgcagtgaactgcgatctcgccactacactccagactgggcaacagagcgacaccgtctcaccccaaaaaaaaaaaaaaaaaaattagtatggagatggacatctgtgagggtgaaccaaattggcttcatgtaagttactacatctctgccactttgaagcagcgccatctggtggaagccctggtgaggcaggtaggtgggcatccaaactgtgggccacaggaggcctggaggtggggaggatgc

SEQ ID NO: 700435 - DNA, 395 bp, Homo sapiens
ggcgggtgccctggaatctggggtcccggtggctgtcggggttatgctcggggtttcatgcggaggtgaggcgggtgccctggaatctggggtcccggtggctgtcgggctcatctggatgcgtggccagagggcagaagactccaggagcatttcagagcctcttccaggagtgggacatggacagaaagcgtgtcatcaccacgtctctgaacttcctggactgttctaggaaaaggggcatccagaagccagggacagcccgcaggtggcctgtgaggcagattggcttggcctggatgtcaaagctgtgaggatcccagaacaggctgcctcggggctgggaatagaactgcttgttctgtgaacagccagcgtcattggaaagccccagg

SEQ ID NO: 700436 - DNA, 600 bp, Homo sapiens
cggtaggagctgttaaagacatctacctagttgttgggactgttgacgcatactacaaagcttcttatacgctgcatacacaaagtctaatattaaatgagaaaaaaatggctactacgctgcgatatcctcaaatggggaaactcataaagatttcttggcagagtgggttgatttccttttgacacatcataagactttaacatcctggagcaccacgttcttcatttattccagtttaatgcccccatactggttgaagtccatattggtcggtgatacgcacctatagctcttgcggtaagacgcaaaatctgaattggctcaatctcacggcagttgtttcatgagctaaagggtcccactgacgcaataagtctgcgtggactggtcaataagacacgacacttgcattcgcccaatgggctacgactcaatttctactgttgcccatgggctaatacaccttactgtggagaacattaagcgattctagcactctctctcaggtggatgggtgtaccatggaatgctctatgaccttcatccatgggcattcgtactgagatcactgtattgctcataacgcctggtccccct

SEQ ID NO: 700437 - DNA, 244 bp, Homo sapiens
gggcgaattctggggctgctggaagcttacttgaagacgaggacttttctggtgggcgaacgagtgacaatggctgacaacacaattgtctgcaacctgttgtggctctttaagcaagttctagagccttctttccgcccagcctttccccataaccaacgctggttcctcaactgcaattaaacagccccattccggctgtcttggcgagtgaaactgtgtgagagatggccagtttgatgct

SEQ ID NO: 700438 - DNA, 593 bp, Homo sapiens
agagccttccatgctgctgagcttgggctcccgggaggggcagagattcgaaggccaggcgtagtgaccgaagcacacccgtctgctcctcacacgcggagtgtttaactattgctgagaaggtatttcagagagttatgactcttgctaccaccagagctgggacgggctaaccttccgcaggcactgactatgttgtgggcagtgtgctaactaccatatatgtgtatgttgacatgcatgtgtatagtctaattgaatcccatgaggaagacatttcaagccccattttctagtaaggaggactgaagcagtggaaagggcagagatgatggggtcagcccaggtctgcacagcggacagctggtgaagccaactccaggtatgccttgcccaaagccctggctctgaaacgccattgccaggtggccagagccttctagtagaagccgttaggagtagggcaggcagaagcactcgctcttactatgtatgaggcctggatttagcttctcaatcttggtgttcttacggggtgtctgtgaggagggctgatttcatatttaaattgtataaataagcattgttggata

SEQ ID NO: 700439 - DNA, 130 bp, Homo sapiens
ccgttcgtgtattgaaacttgaaactaggcgtagtaatagatgtttcagtagctcttattttacagtaagattacaaaaatttaggaacatgaggggttactgagagtgggaatcgatgcgcttgagatg

SEQ ID NO: 700440 - DNA, 1544 bp, Homo sapiens
  misc_feature (1252)..(1252): n is a, c, g, or t
  misc_feature (1380)..(1380): n is a, c, g, or t
  misc_feature (1495)..(1495): n is a, c, g, or t
ctcagccccgcttccctttgaaatgaatgttcctggggcgccctctcgtggattttggagctaatcgtctgtgaatgcagtgatggcaactgccctcccgccgcgtctccagccggtgcgggggaacgagaccctgcgggagcattaccagtacgtggggaagttggcgggcaggctgaaggaggcctccgagggcagcacgctcaccaccgtgctcttcttggtcatctgcagcttcatcgtcttggagaacctgatggttttgattgccatctggaaaaacaataaatttcacaaccgcatgtactttttcattggcaacctggctctctgcgacctgctggccggcatcgcttacaaggtcaacattctgatgtctggcaagaagacgttcagcctgtctcccacggtctggttcctcagggagggcagtatgttcgtggcccttggggcgtccacctgcagcttactggccatcgccatcgagcggcacttgacaatgatcaaaatgaggccttacgacgccaacaagaggcaccgcgtcttcctcctgatcgggatgtgctggctcattgccttcacgctgggcgccctgcccattctgggctggaactgcctgcacaatctccctgactgctctaccatcctgcccctctactccaagaagtacattgccttctgcatcagcatcttcacggccatcctggtgaccatcgtgatcctctacgcacgcatctacttcctggtgaagtccagcagccgtaaggtggccaaccacaacaactcggagcggtccatggcactgctgcggaccgtggtgattgtggtgagcgtgttcatcgcctgctggtccccactcttcatcctcttcctcattgatgtggcctgcagggtgcaggcgtgccccatcctcttcaaggctcagtggttcatcgtgttggctgtgctcaactccgccatgaacccggtcatctacacgctggccagcaaggagatgcggcgggccttcttccgtctggtctgcaactgcctggtcaggggacggggggcccgcgcctcacccatccagcctgcgctcgacccaagcagaagtaaatcaagcagcagcaacaatagcagccactctccgaaggtcaaggaagacctgccccacacagacccctcatcctgcatcatggacaagaacgcagcacttcagaatgggatcttctgcaactgatcgtctccatgcgccctgctctgcggctgtgtncttatttattgcatgcgtcgcttccacaggggcccctcaagagctgtgactcgggagagctaccttactttgaccaacagcctgcccagtgtggatgtctcttacagagggggcccaaggaatcaccnccccgcttcagtgtaaacaacgtgccttgtccactttgggctccagagtctttcagatgtactaagctgctgacatcatccactgccttctgctgcatcctagacaccctccctnttgttcacagagagggaaggtcgtgggccacacaatgctgtgtgaccct

SEQ ID NO: 700441 - DNA, 140 bp, Homo sapiens
ggtcgtatgagacagcaagcaaagatattgatgaatgtgacattgtgccagacgctcgtaaaggtggcatgagagtgtgtacaacactatggaggatacctctgcctaccgaaaacagcccagattatatgtacaataat

SEQ ID NO: 700442 - DNA, 239 bp, Homo sapiens
ggtcggccggcgcggtgctatgatgctggtactttttgactttttgggtacgacgacggggtttcaccatgttggtcacgctggtctcaaactcccggcctcaagtgatccatccacctcggctcccaaagtgctgggattacaagtgtgggccactgcgctaggcctagtttttttttttttttttttttttgggggggattctttaaaagtcaccgggagggcatgcaagtggggca

SEQ ID NO: 700443 - DNA, 160 bp, Homo sapiens
ccaaacagctgagcaatctgggttgggattttatcacacattatttttaattgatgaaatttccttctgtggtgttttgttctgtttttgttttgcgcgctttttttttggttggttttttagaaaaaggggtgggggagaagaattaaatttagagaaa

SEQ ID NO: 700444 - DNA, 234 bp, Homo sapiens
cagagtattggtctgagagagcactctgggtgtgcacagcagtatgggtgtcacacagagtatgggtgtgagagagcagtatgggtgtgagcagagagtatgggtgtgtagagacagtatggctgtgtgagagcagtaatgggtagtagtggtaggcgggggtccttgtatctgtgcgctcaagcacagtagcaccacaagtaacagcaggtagctatacacggtatcaactag

SEQ ID NO: 700445 - DNA, 207 bp, Homo sapiens
gtgactcagaaacagttactacaatgctggctgtggcggctcacgcatataatcgcatgtgctatgcgagtgccacacggcaggagaagtgcttcagtccaggaggtggcagctccagtgagctatgattgtgccaccgtattccagcctgggccacagagcaagaccccctcacttcacaatacaatgctgggggtaccgagctcg

SEQ ID NO: 700446 - DNA, 1212 bp, Homo sapiens
  misc_feature (577)..(577): n is a, c, g, or t
  misc_feature (582)..(582): n is a, c, g, or t
  misc_feature (596)..(597): n is a, c, g, or t
  misc_feature (608)..(608): n is a, c, g, or t
  misc_feature (645)..(645): n is a, c, g, or t
gagatgtcgctgctgcgtgtcgctgcgcgtgttcctggtcgcgcggaccgggagctacccggctgggtctcttctgcgtcagtacgccccagccaaggcacacattttatgctgggccccgtctgtctgcctcggcctccagcaaggagctcctcatgaagctgcggcggaaaacagtgctactcctttgtaaattgcaagaaagctctggagacttgtggcggtggacctcaaacagtgcagagatctggctccacaaggaggcccagaagggaaggtgctggcagctaaagactgccatagctccgtaggtgagtgaagactcaatagaagtgcctgcattgggctcgttgcagtgaatggaaacactaactgtattagtagagtgtacaactgtgagcacagattttgtatctagaaactttagaaatttcaacttgttggtaccagtgaagtaggcccgttggtaccatcgatgcgattgtcagaccctaaacggatcaagcctctgcatacagtagaggtttcttgaattcctctgagctttctggacttccagctgggcctgacagagaangctcnactcacaggatcanntggctttagcnattggaaaactgggagaaaacctgattcttaaacganctgcatgggtgaaggtgccctctgggtttctaccttggctcttatgtccccggagccatcccgagtccctcccttcacccagctggtgctggggaagtatggggccctggtcattctgtgagaccgtcttgcaccagaacacccaccccttgaagaccgttggcccccccccttgggccacgccatgtggtgggccatggccccccctcgtcttgttggcctcctggaccgatgacccctgggggagagcccagagactaagatgctgtccccagcccgtatttgctggatcccctcccattaccttgggcgccagtatgtgccagcctccgggggtttccggtagtagactttgtcccggtttgaatgtggagaaggtgaagaggccacgccagaaactgaataggttcccagagacttttggccccggaggaatatttacttttagctctggaccatccattcaccaaaaaggaatatttccccaaacctcttccagaccgagaatgcctgggtaaaattattaaatagttgtataataaaaataattttttccttgtttgcgta

SEQ ID NO: 700447 - DNA, 537 bp, Homo sapiens
ggtatctagagatcctagctggcgcagtcactgtcttggagtacataatacttttgctacttactagttgcgtacaatctatctgtgatcattgatttctaggtatttagcattttatgttgaggtggttcatttctattatcacagagaatattttaacaatcaaaatcacctgttcctttttgagctttatttcctgtctgactggttgattttcttgatactttttcatttttacttctgtccagatgaacatttccaaaactcgttccaattgttgatcttccaacagatggatttacaccctcagaaaggtcattttccatgttaaagaaacacacaaaggctttgatgctaaattaacattattccaattatccttgcttatcatgtagtcatcttttataagtacaagcaaattgggatctaattaaagtttgcttcatcttaattttctctcttgcattgacacacagatgcgttctcttaggggttcatcgaattttcacctgtgtgggacactaaaaagtgtacatc

SEQ ID NO: 700448 - DNA, 290 bp, Homo sapiens
gactcgtctatgatcatcttctagagctcaacctgacagatatgctagctgcttcatgctggtcttcatacatcgttgttgaatgttaaaaatcctggcggcattgtacaagggtttccttttctctacatcctcaccagcatttgttattgcctgacttttggataaaagccattttaacgggggtgagatgatatctcattgtagttttgatttgcatttctctgataatcaatgatggtgagcaccttttcatatacctatttgacatttgtatgtattcttttgag

SEQ ID NO: 700449 - DNA, 239 bp, Homo sapiens
  misc_feature (221)..(221): n is a, c, g, or t
agacggatttgagatggggtttcaccacgttggccaggctggtctcgaactcctggcctcaggtcatccacccacctcagcctcccaaagtgctgggatgacaggcgtgacacccgtacccagcctcggtgaaaacctcagaggcaggcagcatattccctgccgagccggtagtggcgcagtcagataagcattaactaaatcacagctccctctccccntcagaatctttatctaga

SEQ ID NO: 700450 - DNA, 624 bp, Homo sapiens
atgacgggccaagccgcctgggggacggaggcgccatcagtgatcgcccgtccccaggcgggccccatccgcaccctggtgtccccgtggttacccagacctgcacgaacacgcggctgtcggacgggacactcgagcggccccgggcgggaggaaagacgatccgtctgtgtcggacatgttcaggcgtgaagaggggtcgtgcagcagccaggggccggtgttgccgcggggaacgggtgacgcatggcaggggcgggcgaaggtcggccaagaggagagaaaacgcgcagccatgcacccattagtgccatccgggaaaatgtgacccgagcaccatcagcgcacacgagcggcgaccgttatgaaaaaagggaatgccgattgcaggacgggcgcgatacaacacgctatgactgggactacgaagacaaaatacacacaccaaaaggagcacgaattacaacacgggagaaaacaccaggggaacacggaccaagacacccgcaacatgaagaccagatacacaaaccatgagacgccatagaagtaaccactgcgaagactggataaggccctccactgaggcagaacaaggcaaccgacacctaccaccaagggtaa

SEQ ID NO: 700451 - DNA, 879 bp, Homo sapiens
  misc_feature (429)..(429): n is a, c, g, or t
  misc_feature (433)..(433): n is a, c, g, or t
  misc_feature (435)..(435): n is a, c, g, or t
  misc_feature (437)..(437): n is a, c, g, or t
  misc_feature (439)..(439): n is a, c, g, or t
  misc_feature (446)..(446): n is a, c, g, or t
  misc_feature (455)..(455): n is a, c, g, or t
tgtccaaataaatggattgttgccaagccctcctcttcctttctccgccatcgtggtgtgttcttgactccgctgctcgccatgtcttctcacaagactttcaggattaagcgattcctggccaagaaacaaaagcaaaatcgtcccattccccagtggattcggatgaaaactggaaataaaatcaggtacaactccaaaaggagacattggagaagaaccaagctgggtctataaggaattgcacatgagatggcacacatatttatgctgtctgaaggtcacgatcatgttaccatatcaagctgaaaatgtcaccactatctggagatttcgacgtgttttcctctctgaatctgttatgaacacgttgggttggctggattcagtaataaatatgtaaggcctttcgttttttgaagagaatanaaananananaagaaancaacaaagnagaaaatgatgctgatcatatacacatgaataaaatacaaaagaattatactacaggcacatatatggccaaagctcagtgggggaccttccttgggagcagaaggtagaatccgtataacaaagctactgacaagctctggaactacattcttaatgccgatggtcctggtccccttgaactaccaagcagtggctctgggatatatcgatgagtacatctaccagttacagtcaattcagatcagtacgatgtaagactgccaagaaagtcagaaggaggagatgactactatcgaccagatcccaaatctggaacgtcatagagcactacaatggcctaacatcccctggtagacaaatccagcacctccaacagacagttgggaagtatacacaagcggaaggtgaccatgaaaagagag

SEQ ID NO: 700452 - DNA, 924 bp, Homo sapiens
  misc_feature (29)..(29): n is a, c, g, or t
gtctgagcggggatgtagaggcggcggcngcagaggcggcactggcggcaagagcagacgcccgagccgagcgagaagagcggcagagccttatcccctgaagccgggccccgcgtcccagccctgcccagcccgcgcccagccatgcgcgccgcctgctgagtccgggcgccgcacgctgagccctcctgcccgcgagccgcgctcagctcgggggtgattagttgctttttgttgttttttaatttgggccgcggggagggggaggaggggcaggtgctgcaggctccccccctccccggctcgggccagccgacaaggacaggcgcgactcgggcataccggacccgggcactgctggcggatgagagcggagctgcacacagggcggatggtgcccagagcggagcgcagatcaccatgacaccgaacactaccccctcggactacgcggagacggacggcggtggcggcttggacgactcggagagccgagtgaagacattgaccacctggacacctgacgcatgtgccatgcagcctgagcagcgaggcacaccaggcaattctacgtggtacggcgaggcgacaagcaacggggccaaggagtacccagggaccatggtgggaccaccacaacggagcaaggagagacagggacatcccaccaatcaatagcacgactgcgaccgacatgacgggcccatccggggcaccaccacccaaggcggtacagaagccccataccgagaacagaggtgggacatcccccaaggagcattgcaggcgcacaccaacagacacaaacgacagaccaacgccacacacaactgagccacacccgcgacggcgcaaggacggagcagacaccgatagaggccccaagcaaggaccacggaaacaccaagagaacgaaccaaacaa

SEQ ID NO: 700453 - DNA, 969 bp, Homo sapiens
tgtccaaataaatggattgttgccaagccctcctcttcctttctccgccatcgtggtgtgttcttgactccgctgctcgccatgtcttctcacaagactttcaggattaagcgattcctggccaagaaacaaaagcaaaatcgtcccattccccagtggattcggatgaaaactggaaataaaatcaggtacaactccaaaaggagacattggagaagaaccaagctgggtctataaggaattgcacatgagatggcacacatatttatgctgtctgaaggtcacgatcatgttaccatatcaagctgaaaatgtcaccactatctggagatttcgacgtgttttcctctctgaatctgttatgaacacgttgggttggctggattcagtaataaatatgtaaggcctttctatgtttaaatgctcgatacagtctttagacagaaatgcaacaaagattgcacacgaaagctcagcagagagtcggagggctgcgtgtgtggtaaacctgagtgccacagaatgaaaacccttgtacctcacgtattgtgccaatcaccctttctggcagtgaatgtcctcacggaacacagctgaggaagttgggggcagttcatggcagaccaaaggtgccagcagcccatggagatctcgtgctgaacacgggcatgagccaacccttcatgcgcctggataaataccctacggctgctcaaaagagctcgagaagacacctgggaggattatcatacagatagacaagatattcaaaaaatccactggctgccttcaaaaaacctttcaggcccaagggtcaagaaggtcggaacgaggaaagaagttgaagctgcgagatccctgagggaagccatccgggaactgggagggcgcatgaccttaaaactcagggcaaggcacttcactgcccaggtccgatccaggggccggaaggacgaacagaagaccgac

SEQ ID NO: 700454 - DNA, 787 bp, Homo sapiens
  misc_feature (29)..(29): n is a, c, g, or t
  misc_feature (279)..(279): n is a, c, g, or t
  misc_feature (288)..(288): n is a, c, g, or t
  misc_feature (297)..(297): n is a, c, g, or t
  misc_feature (306)..(306): n is a, c, g, or t
  misc_feature (311)..(311): n is a, c, g, or t
  misc_feature (315)..(315): n is a, c, g, or t
  misc_feature (327)..(327): n is a, c, g, or t
  misc_feature (329)..(329): n is a, c, g, or t
  misc_feature (331)..(331): n is a, c, g, or t
  misc_feature (335)..(335): n is a, c, g, or t
  misc_feature (350)..(350): n is a, c, g, or t
  misc_feature (360)..(360): n is a, c, g, or t
  misc_feature (362)..(362): n is a, c, g, or t
  misc_feature (368)..(368): n is a, c, g, or t
  misc_feature (370)..(370): n is a, c, g, or t
  misc_feature (372)..(372): n is a, c, g, or t
  misc_feature (386)..(386): n is a, c, g, or t
  misc_feature (389)..(389): n is a, c, g, or t
  misc_feature (392)..(392): n is a, c, g, or t
  misc_feature (397)..(401): n is a, c, g, or t
  misc_feature (406)..(406): n is a, c, g, or t
  misc_feature (419)..(419): n is a, c, g, or t
  misc_feature (425)..(425): n is a, c, g, or t
  misc_feature (431)..(431): n is a, c, g, or t
  misc_feature (442)..(448): n is a, c, g, or t
  misc_feature (450)..(451): n is a, c, g, or t
  misc_feature (453)..(454): n is a, c, g, or t
  misc_feature (459)..(459): n is a, c, g, or t
  misc_feature (479)..(479): n is a, c, g, or t
  misc_feature (495)..(495): n is a, c, g, or t
  misc_feature (503)..(503): n is a, c, g, or t
  misc_feature (511)..(511): n is a, c, g, or t
  misc_feature (515)..(515): n is a, c, g, or t
  misc_feature (520)..(521): n is a, c, g, or t
  misc_feature (538)..(538): n is a, c, g, or t
  misc_feature (547)..(547): n is a, c, g, or t
  misc_feature (549)..(550): n is a, c, g, or t
  misc_feature (552)..(554): n is a, c, g, or t
  misc_feature (568)..(568): n is a, c, g, or t
  misc_feature (572)..(572): n is a, c, g, or t
  misc_feature (574)..(574): n is a, c, g, or t
  misc_feature (576)..(579): n is a, c, g, or t
  misc_feature (585)..(585): n is a, c, g, or t
  misc_feature (623)..(623): n is a, c, g, or t
  misc_feature (670)..(670): n is a, c, g, or t
  misc_feature (681)..(681): n is a, c, g, or t
  misc_feature (720)..(721): n is a, c, g, or t
  misc_feature (747)..(747): n is a, c, g, or t
  misc_feature (749)..(749): n is a, c, g, or t
  misc_feature (767)..(767): n is a, c, g, or t
  misc_feature (776)..(776): n is a, c, g, or t
gtctgagcggggatgtagaggcggcggcngcagaggcggcactggcggcaagagcagacgcccgagccgagcgagaagagcggcagagccttatcccctgaagccgggccccgcgtcccagccctgcccagcccgcgcccagccatgcgcgccgcctgctgagtccgggcgccgcacgctgagccctcctgcccgcgagccgcgctcagctcgggggtgattagttgctttttgttgttttttaatttgggccgcggggacccccaccaccccaacctnattaaccanaaaaaaaanaaaacaatncccantcanctccacctcacnananccanaaccaaaacccaaancatccaccancntcaccncntnaataccaccgccgnaanacncaccnnnnntgaangtttaaacaaaanaaaaanatcaanacaccacaacnnnnnnntnnannattgnaacaataccacacaacactnaacaaatttaaaaatncaaaaatnaaaatctnaatnaaatnncaacacaccaaaaaaancaatatatntnntnnnaacaacccaaaccnaatncnannnncaaaanaccaacttccaaccataaatatcaactcccctatcccnataccaaaaaaatctacacaataccacctccataaaaccatcaaccnccactacaacnacaacaaaaaatccaacacctcccactccaacaactccnnaaaacccaccacaaccacaaaacacncnactcctccctccaccacnaaaaccatnactcccacatc

SEQ ID NO: 700455 - DNA, 1113 bp, Homo sapiens
ccgttttcccaagcactatatattaagtagggaatcttttccccatgcgggtaagtcaggtttatcaaagatcagatggttgtaaatgtgtggtgttatttctgaggcctctgtattgttccattggtctatatatctgtttttgttcagtaccatgctgttttgtttactatagccttgtagtatagttagaggtcaggtagtgtgatgcctccgctgctcgccatgtcttctcacaagactttcaggattaagcgattcctggccaagaaacaaaagcaaaatcgtcccattccccagtggattcggatgaaaactggaaataaaatcaggtacaactccaaaaggagacattggagaagaaccaagctgggtctataaggaattgcacatgagatggcacacatatttatgctgtctgaaggtcacgatcatgttaccatatcaagctgaaaatgtcaccactatctggagatttcgacgtgttttcctctctgaatctgttatgaacacgttgggttggctggattcagtaataaatatgtaaggcctttctatgtttaaatgctcgatacagtctttagacagaaatgcaacaaagattgcacacgaaagctcagcagagagtcggagggctgcgtgtgtggtaaacctgagtgccacagaatgaaaacccttgtacctcacgtattgtgccaatcaccctttctggcagtgaatgtcctcacggaacacagctgaggaagttgggggcagttcatggcagaccaaaggtgccagcagcccatggagatctcgtgctgaacacgggcatgagccaacccttcatgcgcctggataaataccctacggctgctcaaaagagctcgagaagacacctgggaggattatcatacagatagacaagatattcaaaaaatccactggctgccttcaaaaaacctttcaggcccaagggtcaagaaggtcggaacgaggaaagaagttgaagctgcgagatccctgagggaagccatccgggaactgggagggcgcatgaccttaaaactcagggcaaggcacttcactgcccaggtccgatccaggggccggaaggacgaacagaagaccgac

SEQ ID NO: 700456 - DNA, 151 bp, Homo sapiens
caggggtaacaccactgaatcaggaggtggaggttgcagtgagcgagatcacgccattgcactccagcctgggtgacagagcaagactctgtctcaaaaacaaaacaaaacaaacaaaaaaaggccgggcacagtggctcaagcctgtaat

SEQ ID NO: 700457 - DNA, 284 bp, Homo sapiens
agctgggagagtcaaagtcctggtcgtggttgatgagcgaagaagatctggagccggagccctttggagcatgatgttgttagaatctccttgggctgtgtcaccggccactcgtaccctcatgtcggactcagaatacagctttgcaattatattacaaagttcaagtcttcatcaacatcttttttttttgttggagatggagtctcgctcggtagccaggctggaagtgtagtgctgttgatctcagtccacggcaacctctctctccaggggtgcagcag

SEQ ID NO: 700458 - DNA, 428 bp, Homo sapiens
catcatggcggcctggaccaactactttgacctaattgctagaaagagttcccttttacaagatctggcgcagtctttacatttccctgtctaaacccggaaaccgtcatcctgaggctttcttaacatatttcctagttcaaagcaacccatcgttcttgcttacatctgcatttcaaaccagctttaaaaacttaagtggattgattagttctaagttattcttgcccagactttcatatatttccttgactggctactggattatagtattccgaaccctggccagcttaagattagagtagatagcaagaagacttttcttctgcaacagctgttaccgagtttagaagccctttagacttgttccgagggattgtgctcttacaggatagatccctggattcccactctccccaggccagtcg

SEQ ID NO: 700459 - DNA, 696 bp, Homo sapiens
  misc_feature (8)..(8): n is a, c, g, or t
  misc_feature (136)..(136): n is a, c, g, or t
  misc_feature (151)..(151): n is a, c, g, or t
  misc_feature (208)..(208): n is a, c, g, or t
  misc_feature (210)..(210): n is a, c, g, or t
  misc_feature (217)..(217): n is a, c, g, or t
  misc_feature (225)..(225): n is a, c, g, or t
  misc_feature (240)..(240): n is a, c, g, or t
  misc_feature (276)..(276): n is a, c, g, or t
  misc_feature (359)..(359): n is a, c, g, or t
  misc_feature (364)..(364): n is a, c, g, or t
  misc_feature (367)..(367): n is a, c, g, or t
  misc_feature (389)..(389): n is a, c, g, or t
  misc_feature (391)..(391): n is a, c, g, or t
  misc_feature (402)..(402): n is a, c, g, or t
  misc_feature (421)..(421): n is a, c, g, or t
  misc_feature (436)..(436): n is a, c, g, or t
  misc_feature (444)..(444): n is a, c, g, or t
  misc_feature (462)..(462): n is a, c, g, or t
  misc_feature (474)..(474): n is a, c, g, or t
  misc_feature (567)..(568): n is a, c, g, or t
  misc_feature (573)..(573): n is a, c, g, or t
  misc_feature (594)..(594): n is a, c, g, or t
  misc_feature (608)..(608): n is a, c, g, or t
  misc_feature (617)..(618): n is a, c, g, or t
  misc_feature (624)..(624): n is a, c, g, or t
  misc_feature (630)..(630): n is a, c, g, or t
  misc_feature (672)..(672): n is a, c, g, or t
caggggtntgtccaggttgctcttgatggtgttgaggaagttcgtggtgttcaggaagtgttcgttcagctttaaattgctgaggccgtgaatgcagcccgccaggtccttggtcatgggtccactctccaccgtntccacgcacaccttntccagcatttggggaaacctgatgaggttttggttcccatccagcttcccccggtgntncagggcncgtgttcnggcaaagatgttggngatggggttggtgctggtgggccggccttctggtgntcccgatagtggggggtgacggttacactgacggggggttacggttacacttgttttttcacttacggggacgaccacggacnggacngtnactcacgggcaccgggacgcancncgccctggggncacggactgtttgacctgnacactctcccgtacnacgttctntggacggggcacacaccncgccaccccgancgacctctgacggaccctgacgcgacccactgttcactcacctgacgggggggtgggtcactaccacgacccttactctctttgtcgaccgtnngggtnttactacgtgtgttggtgacnccactctccctggnacgactgtnntttganaccggncactcgtacgggttttcacgtactggtgtttctttggtggtnactgtacacgggggaacttttatt

SEQ ID NO: 700460 - DNA, 599 bp, Homo sapiens
gtgacagccgatatatgaagcaatatatacgctaaagagagagagagaccccaatacaataatagctggagacttcaacactccacttacagcacggacagatcattctaacagaaaatcaatgaagaaacagtggacttaatctgcactacagaccaaatggatttaacagatatttataggacatttcatccagcagctgaagaatacacattgttctcgatctcttgacctcatgatccgcccacctcggcctcccaaagtgttgggattacaggtgtgagccactgcgtctggcctatatttgtaattgttatatcttctagcttaattgacccctttatcattatataatgaccttctttgtcttcttctatagttttggtcttgcatctgtttggtctaatacctggtattagacaaaatagttaacatttgcatggaatatttttttccatctctttattttcagtatatgtgtcttgacaagtgaagtgtgtttcttctaggcagcagatcatggggtcttgtgtgtgtgtgtgtgtgtgtgtgtgtgtgtgtgtgtgtgtgtgtgtgttatatccatatacctagtgagt

SEQ ID NO: 700461 - DNA, 710 bp, Homo sapiens
ttgttcctcatcctgcctccttggctcgccgcagccgcctccgcgcgcgcgcctcctccgccgccgcggactccggcagctttatcgccagagtccctgaactctcgctttctttttaagtcccctgcattcggatcaccgtgctgtgcccctaccattagtcgagaacgctagcctgtatgacaaccatgctcgctgaatatcgaccactcatagtgacttaagatggatgaagaaggaagttgtggaagaggcagaaaatggaagagacgcccctgctaacgggaatgctaatgagcgacaacatggggaggcacgaggctgacaatgaggtaccacgaacgaacgaggaagacaggtggcgcgcacggaagacgacggcggacacgaaacaaggtgactggtgaggcacaagcaggatggagactgacgatgaggaacctgactcagctacgggcaagcggtgcagtctgacgactgatgaggagtgacgatgtcgataccaagaagcagaagacctgacgaggtatgactagtacaggcaacatgaaggaaacagttaaactaagaatacaaaaaggccgccgttgacctattcacccgtccacttcccggtctcagaatctaaaggtggtcaccttcgattatgagaggtccgccgtccctccgtgggcagtgcccaccgcagatgacagaggtcatcacaacct

SEQ ID NO: 700462 - DNA, 447 bp, Homo sapiens
  misc_feature (163)..(163): n is a, c, g, or t
cagaaaatgaagctgtaccatccactgcagctcctcactgccactcatgttgctgatccttggcacgaggtggaacttctgctgggctgcctgcactgcggccggggggctgcgcggggtcgccatacccacgccattcccggagctcgggccgggttccctnaagtctcagaacatgccccgggctggcggctccgcgtggtccacggccgctggcttccgactctctttccagattttgaccacatgatgttttactgtcttggccctctactgtgccttcacacagattttttaaacctactttttcagctgttctcagcaatagggttcatctgaattagccagtctaccacaactggatgcacaaccaaagcctaattttggtttttgtttttgttgttgttgttatttttaataaatttataccttgccttgttcaaaaaa

SEQ ID NO: 700463 - DNA, 747 bp, Homo sapiens
  misc_feature (35)..(35): n is a, c, g, or t
  misc_feature (209)..(209): n is a, c, g, or t
  misc_feature (216)..(216): n is a, c, g, or t
tgtcaatctaagaatcctgtggcaaatccaagttnatccacggggtcggggggggctacaaaaaactctaaatacactgagcaatactgaaaaagaaaaataaaggtggagtactcacacttccctaaattcaaaatttaccacaaagctacagtaatcaaaacagggggggactggcataaaagtagatatataggggggggggctanaaatganattccaaaaataaacccaaacatctatgggcaattgaattacaacaagaatactaagataattaaatgtggagacaagaatcaaatagacgcaataaaaaatgataaaggggatatcaccaccggtcccacagaaatacaaactaccatcagagaatactataaacacctctatgcaaataaactagaaaatctggaagaaatgggtaaattcctcaacacacacaccctcccaagggtaaaccaggaagaagtagaatctctgaatagaccaataacagggtctaaaattgagacaaataatagcttaccaaccaaaaaaagggcgggaccagagcggttcacaggtgaattctaccagagggacaaggagggagcgtggaccattccttctgagactattccaatcaacagaaaaagaggggatcctgcctaggtcattgtatggggccagcatcatgctcataccgaaggctgggagagacacaaccaaaaaggggattttagaccaatatccctaataaacatgcgg

SEQ ID NO: 700464 - DNA, 109 bp, Homo sapiens
gtcgacgatttcgtcatttttcaagtcgtcaagtggatttttatcattttccatgattttcagatttcttgccatattccaggtcttacagcgtgcatttctaattttc

SEQ ID NO: 700465 - DNA, 589 bp, Homo sapiens
gggtggggttggtgggtagcgtggcaggcttgggggctgcggctggcacggtccccagtactcacgggtgccacaacgcggatacgggctgccttgggatgtgctgctgttcccccactttgaccactcgagtgtgtactcccccttgtgcttgagcaggtcggacacgctgtctagccggctgcccacgtgcttcaccaggatctcctcgcagggggtccttgggccatgaacccccaccagctgcatgttgttgcctgctttgctgcagtctactgtgaagctgctcttctggcctacgtaggccttgctcagccccaggcccttggccaccaccttgctggcgtcagcaggcccaggacccggggccccatgctggggggcacaggtggccttggtcagagagtctacaaacactgatgatgtctcgtggaggctgtggttgctgacgagacgggggcctgtgactttggccttgaaggggctgcccccaatgtggtaggggccgccgtacttgatggagatgaggtagctgccaggtgccatgggggtataggtgacgcggtagccctcagggcactcctggcaa

SEQ ID NO: 700466 - DNA, 948 bp, Homo sapiens
gatgccccgctgctgactgtgcccgggcttgggccctgcccttccacttgcccagtccttaatgaccaccgagcggctctctgggtcaggcctccactggccactgagccggactcgctcagagcccctggcgatggacgtgccacgcgggcatgcgcccgcctggagcagctcaaaagctcacgtccaggtgatcgcgaggtcagccaagcctggagtgagaagccgcgggtgaggccagataccctcggctgaagacctggagacagatggcgggggaccgggtccaggtggtggacgatggctggagccacagggagcatgggccatgggacagctgagggcagaggccccgctcctctgcagcgagcacccatcaggtgtagcatctgggagacagggaagcgatgggctgggcgggcatccccccggggaaggaacagtgggacgcacttgcagcctgctatgcctctggacccagtggttggtgcacagaggcctctgtaccccgggagctcagatctatcaccagacagaagcttgacatcacatgttaaggccaccaagatgactggcagccaaggcccagagttcctctcccacgtcaggagagccctgaccaggaaccctgcaacttcaacacagggatgatctatgactcgagtcagtgctggactcaccagtggatcatgagagggaaaagaggcagggaacacggagcaaagcacgggcgagaattcgaggaacattgggtccccgatggcagacacgaggcctacaggaacaggggacagactcagaggacgaaagaggcaactgggaaagctgactgggcagtgaaagggacgggacaaatagagacaagccgtacagggacatgagaaacggaagtgaagactggccgggcgtgtctctcctcttgtctggggacgagacaaagagcagaag

SEQ ID NO: 700467 - DNA, 852 bp, Homo sapiens
  misc_feature (852)..(852): n is a, c, g, or t
gtcagaggagggaggaggaataaggggaaggaagagagagggagcaggcggagcgagagagggagaaacaggcgcggggtctcaggttggattatttgttggccttaagtcccaactgatgtccattagccggactcgcaaagctgaggagccgcttaatgtggacctatgcgatcgcatcctacgctcacttaccggacttaaccgcgccctggcattctactcatctgcggcttggcggggatgacggcggggctgcgcgaacaacgactggactggacaagcggacgggcaaagacaagatgcaactagcgaacgagacacacctgaccagcccctccccccaggctcaggtgggagtcaaactgctcctcccctcccccatctagagtctagacagacggcacaggcctagcgagactaggagcggaatctggagggggcgctggaggagtgcgaaacggggcgcaagcgcgagcccgcgcagcaatacagggcatcccggctactggctggcagtctgtgtccgacgggtcgactagcggcgcagcggggtcctgggcccggtgaccgcaggcctcagcatctccactctgcgtaacaggttcctcctttgggcccagcggccggcgaggccgccagacatacacacgttaccagacgctggagctggaccaaggagttcactacaatcgctacctgaacgcggcggcggcgcatccgagatcgcgcacgcccgtgcctgaccggagaggccgacccagatatgggtccagaacccgacgcttaagtgggaacccggagaccaactgcccacgcgtcccaacccatgccagggacacggaaaacccn

SEQ ID NO: 700468 - DNA, 220 bp, Homo sapiens
caaaggaaatccgaaatctttccaaaaaaaaaatgcccatgcctccaactatggaggatttcgagatggctttaaaaaaggtttttaagtcagtgtttgctgcagccattgaaaaatacgaaaaatggatatttgagtttgggtcatgctaaattttcccatgtaaactgtgaaaaatgtgccttaagggtttgaatattaaatgcagtaattccttgta

SEQ ID NO: 700469 - DNA, 1136 bp, Homo sapiens
  misc_feature (1136)..(1136): n is a, c, g, or t
gcaaagcagaattgcagctgccgccgccgccacctccaggccactatggcgcctgggctgcccaggagcttcaggccaaggtggcagagatcggagctccgatccagggtaatcgcgaggagctggtggagcggctgcagagctacacccgccagactggcatcgtgctgaatcggccggttttgagaggggaagatggggacaaagcctgtccacctcccattgtcgggcacagttcccgtggaattcccatgccaccgaccacctttgggactcccccctctgcagtctcctccgacagccccagcaactacagcaggacatggcctcggctttgcctgatggacccagccacgcaagatcggggcccccgaactacctcatacgcgtgatgggtagagccagatggcactgaacagaggaggcagcggctgaacgttggctcagacagcaggcggcatagctgatgcagccaggaggagcgtgccaagcagcagggagatcattcgctgaaggaccatgagcgtctggagcagcagaagcgggcagctgtgttactggagcaggaacgacaagcaggagactgccacgatgggcacaccagatacctcgagcccccacaagacatgggccagattaggggagacgcaactcctctgggaacctcgagctagctgcatcagcggggcacagagagggccacaagtcatacaagttgaggcacaaaggagaagccaccacgatgacaagggcacagagaaacaacaacaggcaaccaggagacacgaaacgaacaagacagcaaactcaaagacccaacaaagcccacagaaaagagaaaaacacaacacgggggaaagaagcaacaacgaagggaaaccacacagcccaacacgagggaaaccgacccaacacgacagaggacacagagaaaaaaaaaggaacaagacgaaacagagaaagggcaacaaaaccaaccaaacaggagaaacacagagggccaaacagcgagacaaacagagcgacaacacacgagccacagaccacacaccaacgcaagcacacgctagccagacaacaccagagagacgaccaagcaccgagcagagaaaacacgagacacgaggccacggtan

SEQ ID NO: 700470 - DNA, 452 bp, Homo sapiens
  misc_feature (274)..(274): n is a, c, g, or t
taacaaagaactggtgtctattaaaacataacttaaaaactatggaactatataccttgactggtggtgtagaacatggggaaggagtcatcacacaggtttcttgactattataggaagggctgtcagtcaggttcaggtataactcatcttcattggtaaagtttccctgattgtccacttctggagagatgcagattactatggcactagtgttatctgctcggagcatacgctgcctccagcggcccaatgctcgattcacaagcatttnggcacaagattgtccatgctcaccctgtattcaaaagaacaaggagaaggaaagtaactcagatttagctgccactacatctgtatctatatcaaattaaatatttggtgttcgctgtggcccaaacaaagctcccaattttttttttcttttctcttttttttttttggaaacagag

SEQ ID NO: 700471 - DNA, 138 bp, Homo sapiens
gtgtccaccttgcaggaacaaaccaatgtgtttctgtttcttttgttattttggagacacgagtctcactctgtcgcccaggctggagcgtgtggacagtgattgcgtccaccgactcccagaccttaatagttacaa

SEQ ID NO: 700472 - DNA, 663 bp, Homo sapiens
  misc_feature (509)..(509): n is a, c, g, or t
  misc_feature (544)..(544): n is a, c, g, or t
  misc_feature (566)..(566): n is a, c, g, or t
  misc_feature (573)..(573): n is a, c, g, or t
  misc_feature (596)..(596): n is a, c, g, or t
  misc_feature (622)..(622): n is a, c, g, or t
  misc_feature (632)..(632): n is a, c, g, or t
  misc_feature (637)..(637): n is a, c, g, or t
  misc_feature (641)..(641): n is a, c, g, or t
  misc_feature (643)..(644): n is a, c, g, or t
  misc_feature (647)..(647): n is a, c, g, or t
  misc_feature (651)..(651): n is a, c, g, or t
  misc_feature (656)..(656): n is a, c, g, or t
  misc_feature (660)..(660): n is a, c, g, or t
gagccatttaacctttgggaacaaggcaactagcgtctggcagcaggaatccaaccagtgccctgagttctgaggcagagaggaggacagaagaaacaagaggctggagattgtcaaattcagtatcccagttggctcttgattcttggtgaaaccatccctcagctcctagagggagattgttagatcatgaaactaattaccatccttttcctctgctccaggctgctactaagtttaacccaggaatcacagtccgaggaaattgactgcaatgacaaggatttatttaaagctgtggatgctgctctgaagaaatataacagtcccaaagtaacaaccagtttgtattgtaccgcataactgaagccactaagacggttggctctgacacgttttattccttcaagtacgaaatcaaggagggggattgtcctgttcaaagtggctgcacagcaaccgtggggaagaggagcagtacgaaattctccgtggctacccagacctgncagattactccagccgagggccctgtggtgacagnccagtacgactgcctcggctgngtgcatnctatatcaacgcagagcccaganctggagcccattcttagacacggcantcagtctttnaccancacncnncanttcntcctnttcncgc

SEQ ID NO: 700473 - DNA, 282 bp, Homo sapiens
ccacggcatgttctgagttatggggagttcacggggagcattagtgctgcgagatcttctctctcctgcttgcgcgttcggccctccccacacttcacttatgctactctaatacccagagtctgccaacatacgggcaggatgagagggctgaccctgggctaccaaattcctcttgtgatctcctcacctctcccaatccgttgataccaactctgtccctacattcccccaagcttgcattaccaagcattgcatgtgtgtaccgcgctcgaagttcgt

SEQ ID NO: 700474 - DNA, 369 bp, Homo sapiens
  misc_feature (262)..(262): n is a, c, g, or t
attgatcacattacaatgactcctctttgtacttgtaccccttttaaatttaaactagaccttcctagaagtaatcctatcatccccgctggcaagggtccacagactcctgttgggaccttgtgtgggggttccctagccagtagtactgcagtagattgatactgcacaaaagctatgagtcttctgcctgtggcgctgtggcgggggacaaatattgtataggggtgagggagtggcctgagctggaaatgccccagtntggaacggggcccaggatgggccctgcatggcatttcctgaatttaaaaggaaaaggctcaaatgtagctatatttccctgttgatttggggggtgtatgctaacag

SEQ ID NO: 700475 - DNA, 218 bp, Homo sapiens
tcccttttcctaggcacttctaacatccctagtacctcaactacctaacctacacattttgaatagtaatccctactatgcacactttatttctccacatactcgattctaccctatcatcacacaccgcacaatcccctatctaggtatatcttacgagccacaagctgcccctactcctcctatacctgttttggctgatttgccttttgtaaatt

SEQ ID NO: 700476 - DNA, 190 bp, Homo sapiens
atcggcaaaataaagctttgtgcggcagtaaattgtcctttggccagtaagaagccggcttgaataatattacccgtttgtaagctggcaaaccgttccccatgatattgaaaggtgtaggcatcgacaaaaccagaattggctgctaagagtaacgcgatatagagacgttcatgaatcggatgtgtcg

SEQ ID NO: 700477 - DNA, 900 bp, Homo sapiens
  misc_feature (197)..(197): n is a, c, g, or t
gtggcggtcgccgagtagggtgtgcgcatggggacaaggagcgtgatcgtggtggacgagtgggcccaggcgggtctaacgggagaactcccttgcgtctgctagcacaaggtgtgtatgagtggtgcccgcgtgtaaggtcttgcgtgaatactccgtcactggactctctggatagcacggcgagcgattgaccngtgcctattgtagtgcatctcagtacgaaggggcagcccgcatcccgtggctgctagacgagtgcccaacacaggggcctcataccgagtgaccaatgtctggccggtctcgtgcagtgtggggggggtctttgcgaggcgacgccatcctgggccgtcttccagagggctcgaaggcgtcaacgtatcgcttgtccgcaaactttatagtcccatatgcggtgacttggtcgtcccagtcgaaccctaggcaggccgaccagatcaagggtgctgcgatccaataggtggtgaggcacagcgacgggccagggtaaccttttaggccacggaaccgggaccaatacagaagcaatccgatggataggcacggacttggagccccgagcgtgccccaacccgggtggaatttgggacttgaccttggactttactttgggcaagcatggacacttgggggattcatatggttgaaaaacgaaacccgcgttggaccaggggattccatccaccgtggtgccacatttgaattcaaggggtaacagtaatttcaaaaggggatccagggacctgggcctgggaacagatccatatcttaaaaaccaagaccccaagggaccacacatggcacccgtgtggaagtggaacccaaggtgtgcgcacaaaaggtaaagggaaaggatgaacaggtagtaagaggtta

SEQ ID NO: 700478 - DNA, 165 bp, Homo sapiens
gacgaacgtgtcgtcaacaaccagatcggcttcaccaccgaccctcggatggcccgctcctcccccgagcccactgacgtgcccgagtggtgtatgcccccattttccacgtgaactcagaatgaccccgaaggctgtccatgtacgttttgcaaatgtggtcgg

SEQ ID NO: 700479 - DNA, 516 bp, Homo sapiens
  misc_feature (484)..(484): n is a, c, g, or t
atataatgaagatcacccagaactgatgaagtctacaagtatacagccgaaagacacactgaaaacgttaagaggtcaggcagataaatgtagacatgaggagaatacgatattcagagaaaaaagtgctaagactttttcagaataaaagctatggatggaatctcacatttatgacagtactttaaaaatccatacctcagtacaatagtaaaattgttgaacatcaagggtaaagagaaacattttaaaactttacttgggaaggaatggcaaatatttaagaccagatccaccctctacaatcaatgctagaaaaccatggagttagaacatcaaagtgctgaaggaaaaataatcgtgtcctataattctacgtataagtaaactatcaatcaagaaggagagtgcagtgaggacagtttcagaaacacaagatgatttacacccccaccctccaagccctgctctatattttatactntgataaaaaaagaaaagcccagaacaagatac

SEQ ID NO: 700480 - DNA, 456 bp, Homo sapiens
cgacggtaccaacaacattgaatcaatctcacaaatataatggatacccggtggctggggagagatccccaaacagcaatgggacctcaaccccagctgttgtccaggctcttgacactgtcgtgagaaggaatttaaggataagtcagaaaatagtgaaagcacagtgatttatggcaaagggaaaagtacacactcaagggaatgtgggcggactcaaaagtcacgtgtaagggggttggaggttgctacctctataggtttctttaaccagggactgggatattcatgaacattcctgggaaaaggtggagatttctgggaactgtggtgccacccatttttacatcaaaccggggtgttctgggaactgtcgagacacgggtgggtgtgtgttaaggatattaatgagtgtatatggaggtcctaggagaaacctgttcacatccagtgaca

SEQ ID NO: 700481 - DNA, 1270 bp, Homo sapiens
  misc_feature (686)..(686): n is a, c, g, or t
gggtggatgcgcgcatctttgtggtctgccccactgggggatggtttgtctcccatacgggggagatatgtcccgccctacatgagagatgcgccctgtctagagaagaatgttctgcgtattggggttgtgcagagcccccccttaatggagattttattgttaagtgtcccccccgcagactcgggggagagaatgtgtggtcggggtggtggtggggataagggggagcgccagccgccccgcgttcgacagtgtgtggcgaacacaataataagtgctcttatttttcgctcccccccccctctttttcgccacacagagatgatgattatatattataaccggcgctataatatattttttcgtggagtataggagcccttctttggagagttgttaatatgttttgtcacgcggagtaaaagaccgtatctacacggcccccctcctttgttgtgttttttatgacaacacggcgccccctgcttttattataacatctttttcgtctcgtcgtgtggagaaataaatgtgttgagaaagcaccaccttcgtgtggttgttcgcgcgagaaacatcatgcgcgtcgtgtatagtagtacacacccacacggcgtttagtaagacacttcgcatcatgggttctctgtgtttttgtcacaccacgcagcacatataaatgngtgcccgcacggcgctttgtttgtgtgtagacgcacacatgggtatattttctttctttgtgagagccacagagaaatattgtctctttgtgtgacaccacagagagcacacctctctcacacacactctccactacttgagagagagagagaagttctctcacagagaacacactactctccgccctgttgtctctcacacttgtttaatatataatatgtttatataaaagaacagagagatatctaagacaccacatatcttggacatcttattttctacacacaccgcctcgcgggagattgtaacattaacacctctcctctctgtatatatctctttctttccccgcgagagagagagaatatgaaacacccacacacaaggagatttgtgtttttcttttgaatgtcccacgttacacacccactcccagttcttgtttataattttgtaaaaaaatatacccccccctttatttttgtttgtggggaataataaaattatgttctctccacggaaaaaataataaatgaactgttaccagtttctttgtgcctttttaaaaggggttacccagata

SEQ ID NO: 700482 - DNA, 281 bp, Homo sapiens
attgagcagtactgtggcgaggaggaagttcacttagatggtggtgcgatgtgtgggagtcaggcaaaattggactgtgggggacaggcgaaaagtcagcaattcgtgatgatgcgtgagagcagtgaacaagtcctcagccgctggcccgtggatgaacttgaacccgatctgtgtgaatgggcccaagtttattgtgtgccagtgcattccaatatcccatggtgcctatttcataagttacttttagccaggcctcgtgtttaaattgtccgtcagga

SEQ ID NO: 700483 - DNA, 208 bp, Homo sapiens
ctctgaggatcttctgccgctactactacatgtgaaattcggaatgactgcattatcctgacgaagtgaaagaggcaggcatgagcaaggacagttaagaggggggagagcctcatcatgatggggagtcttgtctgacatctcgggaaaaactgtccacagtgtgaagtcatccacttgttgtcctggtttacagtttgagcatctg

SEQ ID NO: 700484 - DNA, 430 bp, Homo sapiens
cggtgactccgactatcatcgcgattcttgtgctgacacggagtcatccaaaaggcatgctgtggcgtcctaggcctttgcaactgactttcatgacaaagctgcagctaagaagctcatcaacgactacgtgaagaatggaactagggggaaaatcacagatctgatcaaggaccttgactcgcagacaatgatggtcctggtgaattacatcttctttaaagccaaatgggagatgccctttgacccccaagatactcatcagtcaaggttctacttgagcaagaaaaagtgggtaatggtgcccatgatgagtatgcatcacctgactataccttacttccgggacgaggagctgtcctgcaccgtggtggagctgaagtacacaggcaatgccagagcactcttcatcctccctgatcaagacaag

SEQ ID NO: 700485 - DNA, 836 bp, Homo sapiens
agtggagctgagccatagcgacttatttgtacaatactcacatagcccagcataccttctgtaagagatgtggcgttcagcagcttctatactccacgatcaaaccccggagtgctttggaattgtcccccactgcctggatgagggcactgtgcggagtatggtcactgatgaattcattggcggtgattgggagaaggccatgaaagagcacaagaccatcactaacatgtctatagagtgagcttctgcctcttctgccctgaaaaggaggaatgattgaggcctgtatctttgctcttcctgccgtgcctctgaggcgctcctgaatgtatgctgacctgggctgctggttccttggactaaggtcatcttgatctctgcagattgctccagctaccagtttatttaggcagctctttgtactccctctgccaagattatgatgtagtgctaattgacatccttctctatacaacttttgtgtgatcttttaagaaaaaaatatatatttttaacgtttctgaagacccacaaaatatgcaagacattctgtaatttatacacctgagttgcaaagagttaactggacttctttcaaagcttctaaataattataccgtatatatattaccaaaaaaatctctacactggcctttgttggccataatagggagattactgcaatcagtttcgcttgacgggagggcgaatacatgatctgagttcatagaaaaactacacaccccttctaaagctatcagaacaactgtattctgtagcctaaaggatgtaatactgtccactccataatcttgcggataaccccagaagat

SEQ ID NO: 700486 - DNA, 1049 bp, Homo sapiens
gaatgaacaagaactattagccatcagtgcattgcggagagtgtctgtgagctaagagccagatagaccagagcagcgactgatggcagctaggctgtgagcttcacccgaacagtatgtccgcatgctagctgactgggcctgtgaaaccgcgtacgagactggctgcggtacgacaggcagcctatgcccatcgtggtgacacgctgctggacagaaggggctgggtcggggcaggactgtggccccagcaagcgtatcctgggatctctcttgtcttgactccctgtttcttgaagtgaaagagctcttcctggcagctgtgcggctggaccctacctccattgacgcctgatgtgcagtgtggcgtatgggagtccgttttcaacctgagtggggagtatgacaaggccgtggactgcttcacagctgccctcagcgtacgtcccaatgactattagctgtggacatagagctaggcgccacccgtggccaatggaaaccagagtgaagaagcagtagctgcgtaccgcggtgcctcgagctccagcctggctatatccggtcccgctataacctgggcatcagctgcatcaaccgtcggggctcaccgggagggtgtggagcactttcgtggaggccctgaaacatgcagaggaaaagccgggcccccggggtgaaggcaggtgccacgtcgggagaaccatctggaggacctgggttggggattgtctatggtaaggccgagcgaagctatgggggagcggaagcgccgggaacatgaccacaccgtctaagaatgttgtggctgggccacagaaagtgcgcagggccgtcccgggaagggcacccgtgagacgaaccccgcgagggcagcgagtaccgcgcccccaagggggcacccaagggggggcgaagaaccaaagggacggagtcaagacaaggccaaagaggacggaaaagagcagtacacacatccgagaagaaggcgcatacacacgagcagcagacacacacaaacgacacatcataggagaggacccacgaac

SEQ ID NO: 700487 - DNA, 862 bp, Homo sapiens
agcggcggtaccggttgctagccgccgctggcgggcggcgagtctggagagagcgcgcagtttgcgcggcggctcgggcgacttccctgtacgtcgcactttgtggtatgctgcagctcggtggtgcctggggctagcccctagacaccccttacttgggcgattgtgtgcatgtttcaagtggcgcctccataccagccgaccgactggccgctaaccacgggtacctccgcaataccataggcacgactacggcgaccagtacaccaatcaggaacaaagacagagagcggagcgatggacgggcacccgccgaccagcaaccccaagacaagcacgaaccaagaaaaacggggcagggacagacacgggacaacggaccggcgaacctggcaaaaaggaaagaaagcatcacggaacagaaagcaagacagacacgaaagcataaaacatcagatcacggagaccacaagcacaacaacagacaaaaagtcgttgcaacgggaggacaggccaaacggaccatgcacgaaaaagcgacgccacagaggagtgccaccaaatagagattgcgcaagaacaagcacagggaggaaaaggacagaataagcaaaaagccagcatgactaatggaaacgcgcatgcaacgagaaaccgcgacagcaagagggaaagaaacagaagagtggaagattgcacaccgacccccgacaccgacacaacacacataggagacagagacacacatcgatagcacgccgataacacagcgacaaggcaatcaacccaggcaaggaacgaaaagaagacgccggaggaaccagtgcgagaagggaggagccacaaaaggaaaaacaaaaca

SEQ ID NO: 700488 - DNA, 192 bp, Homo sapiens
gggagtatgtggctctttgcgagatcaaccaacttaatctggttgaccgtgctgtacttaatctggcactcagcccctctggtaaacatcttttaattagcatctcagaaatgcaatgtgttaaggtaaagtgcgctagttcacgtggaaatctgctcaatgacatgagtcctctctgcgtttggggtaccg

SEQ ID NO: 700489 - DNA, 291 bp, Homo sapiens
ttttttttccccgctctttttgtttttgggggggggggccggcccctgtcgcccccacctttttgttttcccccaagagggggggtggtcctttgtgagccctccttaacccgaagtgaaaaggtttaaaaaatttttcccgttagaatagggggcctcttttttcccccccctttaaaaaccaaacccctctgggttttgggatggcttatactaatttcccttgttttccccgcgggggggcttttagaccccccctttaaaagccaaataaacttgggttccctttta

SEQ ID NO: 700490 - DNA, 102 bp, Homo sapiens
atccgtactgcatcaacgcctcgcggacgctacgccgcgacgataggagggcgctgcggcggtccacccgggccgcggcgttggatgcagtcgggtaccgag

SEQ ID NO: 700491 - DNA, 510 bp, Homo sapiens
  misc_feature (250)..(250): n is a, c, g, or t
ctgggaaccacaagtcaaagatgctgggaaatgccatcaatccagaagagaaatgcagccgcgtgatgcctcactcaccagaagggattgcagggtgaccctgtctgattaccagcctcgacttaggaaatacagccaatgatgaaattcatggcaggcaaattccctgttcaaggtggagcaacagcatgatggatgggccagcagtgatggatagcccctctgaattttggttcatgggtttcctccngcaaggactgagttgtcccagagataacactctaccagcggctgggctctgggctgaatgcttgcttagggataacaccctcattacccagtaaagcaaattattattgacaatgtaaggttttagttcctttcggtaatttttaaattaagcagacagcctggcatatggatcaagattccttgaactctaaaagattctctcttccaaagtattagtgaaacatagaattaaagtaaaatgaaagatttatatatagg

SEQ ID NO: 700492 - DNA, 816 bp, Homo sapiens
  misc_feature (21)..(21): n is a, c, g, or t
  misc_feature (77)..(77): n is a, c, g, or t
  misc_feature (103)..(103): n is a, c, g, or t
  misc_feature (130)..(130): n is a, c, g, or t
  misc_feature (159)..(159): n is a, c, g, or t
  misc_feature (218)..(218): n is a, c, g, or t
  misc_feature (228)..(228): n is a, c, g, or t
  misc_feature (290)..(290): n is a, c, g, or t
  misc_feature (393)..(393): n is a, c, g, or t
  misc_feature (437)..(437): n is a, c, g, or t
  misc_feature (473)..(473): n is a, c, g, or t
  misc_feature (479)..(479): n is a, c, g, or t
  misc_feature (495)..(495): n is a, c, g, or t
  misc_feature (503)..(503): n is a, c, g, or t
  misc_feature (535)..(535): n is a, c, g, or t
  misc_feature (583)..(583): n is a, c, g, or t
  misc_feature (632)..(632): n is a, c, g, or t
  misc_feature (650)..(650): n is a, c, g, or t
  misc_feature (656)..(656): n is a, c, g, or t
  misc_feature (664)..(664): n is a, c, g, or t
  misc_feature (668)..(668): n is a, c, g, or t
  misc_feature (674)..(674): n is a, c, g, or t
  misc_feature (697)..(697): n is a, c, g, or t
  misc_feature (703)..(703): n is a, c, g, or t
  misc_feature (738)..(738): n is a, c, g, or t
  misc_feature (814)..(814): n is a, c, g, or t
tttggttaacagataacctcncagacgaatcaacagtatagaattatagcagccaaactggttttaggtgtcgtttncaaacataaaagccaggcagccaagntctccaagtcgtgtcacgtggtaagcngagggccttgcaccaagtcagtctatctntctacatcactaggcacacacctctaccactaaggaacattatggtaaatctgaatgtnctagataaanatcaggagtccccatcaatggttagtcagtggttaagtcagttaaatcaaagaaattcagtnttaagtatacatgccgattcttggaaatcaattctaacattagtggttagggagaaagaaaaggaagacattcacctcacaaaacacagagtgtgacacagcnattaaatacatacgttaaaagtacttcatacaaaaacacatcanagtcttttaaaaattaaattctcaggcacaggtacngtcaanatgtggatggcacccncccaaggnttgacaacacacagccggatcatgcatctggnatgttttcttttttatccaggaaagtgttttctctgactccttgacangtgcacatcaccttacacgtggtgcccgagagcgccgccatcgccatcnccgccctgcatctgcatntgcatntgcgcctncatncttgcnatcatctcttgcatgcggcggantcagcntctttttccagccagatctggtctttattcatgtnctcattctccactttcctgccgcctctcttgagttttttagaacggaagttttcataatgaaggtcctgggtcacncc

SEQ ID NO: 700493 - DNA, 220 bp, Homo sapiens
agacctacttaggtgtataataggacgtatgtgcctgcgtacaggcgtactggctggtttgctcatcggcgtgatgctctgccaacgtggggataaatagataggtttcgaagaagatatacaatatgattcgttctgtggctgtgcaatgtcatcacattcagcgagcatttgtcagggagcattagtatccagaggtagagttctactcgtgatagtg

SEQ ID NO: 700494 - DNA, 117 bp, Homo sapiens
gtccgcaccagtgcgcacttctgtgttgagaagctacgaacttcctccctgtagtaaaagtgaaccccctggggggtgcagtggccttagggcacccactgggctgcactggtggca

SEQ ID NO: 700495 - DNA, 141 bp, Homo sapiens
tggagttccgtggagggtcgactgctagaggactccccgaatctatgttggcgcgtatcgttggtctgcatggttcttcatgatagaagctcctcaccaggaagtcctcacgagccagatgtgctcggagtaccaggttca

SEQ ID NO: 700496 - DNA, 770 bp, Homo sapiens
cactggcccccgcccagtgggtgcccccccggcgaacaaggtgcgcgccgacacgctcgaaggaagtcccgacccaaaacacaggtgtgccacagcaagaatttcgacccgaattcatggctgtgtggagcgccaacaacaggccccccccccccccagttccccgccccccccccggcgcgcgcccccggaaaattggagtccgccaccaccagggccacaacacccgtttgcacaaacgagccccgcgcgggtcccatcgacgccgcctctcttcccggcggaagttgccgacacggttttcgggcgtaagagaaaactaagcgaagagcgagactctcatttcgcgcctcggtgcatggggaaaactcgtgcgaagaattcccttcgggtgttatgcttaaaagcagaactgactgattatggtgaaaaccagccattccatagttgacacaagaacatgattttacccaccttctattgcgggcgcacacacgtcttcttcgcaatatccgcggcgcctccgcggagcgggatatttttatttgtccgccccaggcgatgggatttcaaaggtgcgctccccacgaaaccgattctctggaacaacatacactgcaccacggccaagctcgtcacaccgacggcttgtgaagccccgccttagattaaaagtgtctgttggtgtcaaaatatggtctgtcctaggaccgcttgccagctgtaccacaagagaccctggagttgtggagccccgcccacatagccaa

SEQ ID NO: 700497 - DNA, 131 bp, Homo sapiens
tgcggtgtcactgcgatcttcttttggtcttcctggaatgacaggttcctccctgccacctgtgaggagagttggggcccagccgtcttcctggcctccttcctttcctcagtggcagaggccatgcgtgg

SEQ ID NO: 700498 - DNA, 163 bp, Homo sapiens
tagaggatctgtgcaaggtctctacctagaaaaccaatcagaaaaatcttccctgggggaaccccaggcatcaaaaccagtatattccaatttgcttcgtgctatactcaccaagtggccaaagggttcggtaatgccatctcaggcaccaattctccttccc

SEQ ID NO: 700499 - DNA, 612 bp, Homo sapiens
cgcgctaaggctgcttgtgaatctatgctcgcacatgagctcaggatcgttcttcagtgctcagtgacaggagcaccatcctgagcattgacatcagcagtcaagttctctaaaagctgcattatgcccaggtagccatggataaaggcttaagtgtacacacgtgtggcctggaagatcttaaatgactcaagtagtctgatcatctgaattttaagaacctgcagtctgggttcgtaatgacctttatataggcatccaataggcactctgcccgcattgtttctcatccttccatatgttatcagtttaagctcctgcgtggactctttaagttggcccacatgccccttctctgtgtcacctgccctacgagggggtagggcagggcatttagccatacattccgttgtagttggtagcgttcagcatgaagtggaggtgcggggtggtgcagtcctgagtcaggactctttcgctgcctagtcagccctgctcacaggcaaggtgcagcttggtatttcctcatcagtcctggagctcaggattacagtcagctctcacaagtgcagcagcaatttctgcatggtcggtgatcacagcccagtggag

SEQ ID NO: 700500 - DNA, 404 bp, Homo sapiens
  misc_feature (81)..(81): n is a, c, g, or t
gggtcaccccctttgggtggtttttttttacgggggggatttcccccccccccccccaacacagggggggggtttcccttnacccgggggggttttggggccccccaccccccaaattttggggtcttttttttggggggccggaatttttttttaattttttccctttgggcccccccccccccaaatattggggggggggcccccggggccccccggggaaagaggagggggcccaggtgcccttttcccggggggggttttccccccccccccccgggggggggggtttttttggggggcccccccctttttccctgggcccccccccccttgggggtttttttgttcccggggccccccccccccgggttttttttttttttttttttggggggggggca

SEQ ID NO: 700501 - DNA, 296 bp, Homo sapiens
  misc_feature (8)..(8): n is a, c, g, or t
tagtgtantcgatgggcctcggcataactggcgcgttcgtcgccgaacaggttgcgaaaaggtgtgagccagtgactgttggcgatcaggcgatcccagtagtaatggccgacttcatggcgaaaatggccaagcacggtccggtatggctcgcgcatctgtacacggactttttcgcggtgggcgtcgtcggcttccttgatgtccagggtgatcagccccttggcgtgtccggtggtgggcgcgtagccttccaggtcgataaccgatgaagtcgaaggccaggacagactcta

SEQ ID NO: 700502 - DNA, 985 bp, Homo sapiens
ccctcatcactcgaaagggtacattatgggtgaatcatccgcgtaccttcacaagccaactgcttgcttggcacatagtcttttatctcgcctgctacctacacaatcgagggaggcctatagtactggatcattattctcttgactcaaggaaaccttgcaatagatctggctattgtcgcttcggggtttgcaaacttatcagcaaatagccttcgtacaggcataggtacatctgcgtgagagccctagtatccattcgtggagagggccaaagtgattttacaaaacttagtatggggcctatctcatattacttgggggtaaagcatggtgatttccaaaccgcaatctgagggaggctgatcaagccaggaaagtgtacgaacctcgtgcagattcgtttaacgtccagattagtcaagcgcgtaccaataaatgtggaccctagcagcaatgtgacagctcgctagtacgttgccccgtaggcggtgtctgacaacccccctaggaattgcctgcccattccgattaagaatcttgcttcctaccctttacaataaatgcacaaaagggcatgggttaaacttcaatgttcccttccggctccttaatgaccttaatactattattagaagagctgcattaggagatcgagagattatagcatagtcgatccccatgatggacccatgcaccggtgaggccgaatggtgttacgtatagacttcacaaatcacgatcgaccttagaaagattgagggtcttacctatgatatcagcttataataaataatccgagcactaattcaaagacaagctgttagaccgggggccataatatgtagctacgaagcgacatttaagaaggagagaatgaaacttacatgcaatgacgatatagacatgtatcatcgctagcaatgggcgagagaaactgggcggacaacgggggagtgtagaagcaacacgtaatggaaagaaa

SEQ ID NO: 700503 - DNA, 1047 bp, Homo sapiens
gcatctctcaggaataaaacgaaatgtgacttttccaggaacatagtttgagtatcaatatatagatgtagaaccaacagatttgatatttgattgtaccttttggctggttgaaagtttcttgatggaattctattcatacaatggtctcgacgggccctggagtagatcatgcttgtcacccgtctatgcactaccgtgcccttatcttgtgcattatagctccagacacataggataacagatattctgcagccgtcagcacctttacatcgaagctgtctgcatcggtttgctcttaggtcacaactcatactgtcacatcttcgaaatgatcgttcctgatgccttctctaaaaggcacccctttcctgacatcagtgacaatattgcttacatttggtgtaaaattgtcgcacaccatttctttaaaatctattactattaaggtccctagggcacgatgtgtgcccagatggtgcgcaacttaggttaacaatagtgttagtaccgatggtgccaaaatgcttaggatgtcgtctgagaccccaattttaacttccgatatatatgagcagttagaggtactatttatcccataaaggctttgacccatcgccataatgactcgcgaaacgcacccaaatgaagaagagacgcaagaggaatgacacaatagtgacccccattaccaggcaacaggggcgaacaacggcaacacacggtagttacaacgcaagggatcagcccaaacaggtaaggggtcagaccacaggtatcaaacgctccggggccccataccagacacgggaaaaagaaaaagcacacactccgcggtatcacaacgacgaggagcatgcaaaaccgctcaacacagttggaccacctacgcgacagaaagcaccacgagcaacacagagcgacctaccactcagccacctcaaccacgctaactgacagacaaacaccacggcactgtgaacaccgaacagacgactcgaacaccaaccggacagccaaacacagaacaaacccacaagaaaccaa

SEQ ID NO: 700504 - DNA, 105 bp, Homo sapiens
gagctggtcccccacctgggcatgagccagctgacccgctggctgagctggactataagaacgagatcatcatctatacccacatctggcgacaactggatgtgt

SEQ ID NO: 700505 - DNA, 413 bp, Homo sapiens
aaggttggtggaaatctttagatggttattaagaaacaaagaataaactggaaactgttggtgttaaaacaaagatcttagtgttttttttttttggagatagggctctcaaaacaaccaaacaaccaaacttaaccggtcagtaggtaatataatcaatccacatgccaaaggcaggggctcacacctgtaatcccagctactcgggaggctgaggtgaaggtggcagagagccaagatggtgccacggtactccagcgcggccgacagagcgagaccctgccacaaaacaaacaaccaacaaaacaaaacaaaaaccaaaacaaaccaaaaaagctagccgaactcagacgcaggagtgcccctcccggggatacgggggtcacgagctcagaatcgaaatcagggccata

SEQ ID NO: 700506 - DNA, 379 bp, Homo sapiens
aagtccctttttaggtcctttagggatacatatcccggagcagaactactagatcacatatggtaaggtttgaatgtcccccccccaaattggtatgttgaagccccccccaacgtgataggtgaggctttaggaggtgattatgtccttagagctccatcctccttaatggatttaggccccttattaagggggtcaagggaacccattccctcccttttgcccttggattcccttcccccatatgagggcccagcaccaggccccgtcctaaaagctgagattgggccccccatagatgataccagtttgccagcacgctgatcgtgggcttttcagttttcccaactataaaaaataaattcggccttttaaatta

SEQ ID NO: 700507 - DNA, 83 bp, Homo sapiens
cagctcccgcgacgcctctcctgcccctcgccggtacctcagcaaggtgcgttgccgccaggtgccactagaagcgccaggct

SEQ ID NO: 700508 - DNA, 155 bp, Homo sapiens
ccagctaagctcagaacaactaactcatgtggactcggaaagacgggcagctgtggtagatgtagagacaggaagccagagacagagcgggatagatgtggctacagacgatgagtctcctgggaccggtagccttcaagctagtccaaaggcag

SEQ ID NO: 700509 - DNA, 123 bp, Homo sapiens
agggcctcagaactcacaaagactccccagtgctgttcctcttccaacgaggctggactccttccagccatctgcgaactcaagcaggacgcaaggttccttaggacaggttcctggcatgcc

SEQ ID NO: 700510 - DNA, 133 bp, Homo sapiens
atcggcacttcagctattcatcaggacctcgctataacatcggcccatcgctatacatcggcacctcgctattcatcggccgtattgaattcaacacaccacaatactatgacctggtgccgatgaatagcga

SEQ ID NO: 700511 - DNA, 241 bp, Homo sapiens
gattcaccagcattcccttaccagatcaaaccgtggtgttagagctattgaggtgacggaggctcttgcagaagaagccagtcctcaaacaaactgatattgcaaaaacctttagtatctgctttgaggggcaggctatgcaagtggggagtatgaggtagaagtggtgttgtacttgtgattgggtagtgtatggtgaaggttgagggacctgaactgctaggtgggggtccggctgtct

SEQ ID NO: 700512 - DNA, 426 bp, Homo sapiens
tggaatcatcatctgtgtcactgaccatgctccgagctaaacgcgacttggtgtacaccgccatcttcgttgaagctgtggcggccatggacaggctactggtagtcagagcacagatgaccgtgtgctggagggcgtcatcaagggcagatcatcgcggacaccacctgtaggacctcgtcccatccacgctgcccccagagcttgggctgccctcctgctggacactcaggacagcttggttatattataagagagtggggtaagcacccctacctgccttacagagcagaccaggtacccaggcccgtgtgcagacaaggcccctggggtaaaaagtagccctgaaggtggctaccatgagctcttcacctggcggggactggcaggcttcaaaacgtgtgaatttcaaaagtttttccttaa

SEQ ID NO: 700513 - DNA, 1749 bp, Homo sapiens
  misc_feature (33)..(33): n is a, c, g, or t
  misc_feature (97)..(97): n is a, c, g, or t
  misc_feature (143)..(143): n is a, c, g, or t
  misc_feature (152)..(152): n is a, c, g, or t
  misc_feature (193)..(193): n is a, c, g, or t
  misc_feature (238)..(238): n is a, c, g, or t
  misc_feature (284)..(284): n is a, c, g, or t
  misc_feature (293)..(293): n is a, c, g, or t
  misc_feature (384)..(384): n is a, c, g, or t
  misc_feature (460)..(460): n is a, c, g, or t
  misc_feature (1157)..(1157): n is a, c, g, or t
cgatggactccgtcactagcctagtctaggctntatggctcattagtgtcgccgctcgcgcgtcatcatatcgatgtctggttagtgtcagtagctntctacttttagtgggtggagctacagtacagtaggcgctgattcgnccgccctgnttcgtggttgagtatacgctcccactcgttggtagtcgatntgcctgggtcgtccggatcgatgatgatgaactgtgcgcggtgtntttgttgctcacgccaccagcattgagcgtgtgtatagtgtgctcncctcacctnaagtgagtataccgtgtggtatgtatgctgtcgcgttcggtctctaccagcctgtgcgtgtgcatacctacttcatcacggaggcgtgagnacacgactctttataattgtgcggcgccacgcctgttgatgggcgcgtccctttgatatgatgggacgtggcgtanccacgcaggctcgttttgttgctgtcgccgcagtgtatgttcccccccgtcggtgtgtttgggtgtccaccacatggggtgtgccaccagagcccccaccttgtgttgtgcgcccgacccaaggtgccccccaggaaccactgatgttcccgcgagtatgccaaaatgactctctttgggggagggcctcttgtttttgacgagccacagatgtgtgtgcggacccgccccaggaaggtgttcgtgtgtattggggcggttagattgttttcgcccaacactcctggggcggcaacacatgtgttgcttggtgtggtgcttgatggtgcccgaccaacgccacccccccacagggaaaaaaggtgttttgtggccccctggattgtgtttggtggtggggagcgttgtttgtcccccccacagtggccgccaccactattacgcgttctcacctggctgttgttgtgtggcaacacaacaggggcggacactctccctctgggggagagatttataatactgaatagtgcgatttttgatcctgctctcgtcgcaactagaatagccgcccctcgtggccactgctcttctacaaaggagcgttttctttggtgacgattcaccaattttggtgggacaaccactgggggcgctccttctgtaataagtgtgtgtccgccctcctcttttgtttttntgtcctccacacaatacacaaagacacagctggtttgctcatcagagaatagagaagaggtacatcagaggggagggagggtacaccccgttcacgccacagaagagagcgataaagagtggtgtgtcattttctttgtgggtgtgttaatgagactattctgtgacacacccctcttagtaatatagacactcacaagagtctcttaaaatatttctcgttgtcatagaataagagagagctttagaggagatttagaatatattgcgatatactctatctacatataatatctcagcccactgttacacattatagtgaccccaggctcatcttcattacattaacacttctacctgaccatttatttccactttagatccctttatctatccctttaacaccaattttgtgacaaaacacaaatttaatttccattttacacaccaaagggaaatccgggccattggtggctctatagccctgtatatttccacgccactttgggaggctgtaggcagaaggattacctgaggacaaagagtttgagacccgctttgcccacatagttagaccccccttttcttttata

SEQ ID NO: 700514 - DNA, 411 bp, Homo sapiens
cagttaataaattattggtaacatcaaaaaagaatgctttagggatacatatttccctcatggaacgttttctatgatgggaaaatgtttgcaagcacagactcttttaaaagtggttccctctaggcggaggtatagaatttaaagtctatgtgtgtctgtataccagcaagtgatgtcaaaaataactgtttaaagatactgctttgggctgggtgcagtggcttacgctaataatcctagcactttggcaggccgaggctggtggatcacctgaggtcaggagtttgagaccagcctgaccaacatggcgaaaccctatctctaccgaaatacaataaaatttagcccggcatggtggcgcatgcctgcaatcccagctacttaggaggctgatggaggagaatggct

SEQ ID NO: 700515 - DNA, 359 bp, Homo sapiens
actatctctgacactgttaactttacgattttttttcttctgtacccaaaaaaaagtttgtttcaatagtgaactatgagccagggtggtggcttatgcctataatcccagcactttgggaggccaaggcgggcagatcacctgaggttaggagttcaagatcagtctggccaacatagtgaaaccctgtctctactaaaaatacaaaaattagccagatgtggtggtgggcacctgtaatcccagctatttgggaggctgaggcagcagaattgcttgaacacaggaggcggtggttgcagtgagctgagattgcgccactgcactccagcctgggcaacagagcaagactccatctc

SEQ ID NO: 700516 - DNA, 382 bp, Homo sapiens
aatcaccaacttcttaccattgactcacttataaccgtttccagatttatggaggatgaagacctatcgtaccaatgtggcagttgaaaagtgaattgcaacacaatgagatatattcacattaggagaggagcagtacctgtgcattcagaactggaactgcaggtgtaccattactgttgatagaggcatctcctgccgcggtccaacccagcctgagctgccagcctgcctagcttctgcaaagccccgagttgtcatggcaaccacttcctgagacttgatactcatgcctgcagactctgggtcctgacttaaatagttttattttttttaaaaaggcataaattgatagtgcaataaaatctggtttaaagattga

SEQ ID NO: 700517 - DNA, 102 bp, Homo sapiens
ttaatcgtgctggtgcttgtagccatggagtacgaagccactgcggcataggcactcataactgccgaacgtgttgacgcagtcctgctggcagccgccgtt

SEQ ID NO: 700518 - DNA, 425 bp, Homo sapiens
aggatccccggcgccatggggtctgtaatctcagctacttgggaggctgaggcagtttatttgcttgaacccaggagatggagtttgcagtgagctgacatgatgccactgcactcctacctgggcgacagagtgaagctcagtctcaaaaaaaaaaaaaaagggggggtttaattttaaaaaaaaatggccttaaaaaaaaccgggttcgcaaccagaaccgggtttacttttaaaaatgaaggttgggggaaaaaaggcaaaaaaaattttttggcccagtgtgttttatttccaaaaaagagggaaaaatttttttttcctttttaaaaaaccctgttttttttgcccctttttcccaaaatttaaaggaaaattaaaggtattgggggggcaggcccaggaggaaccttttattttttaaa

SEQ ID NO: 700519 - DNA, 664 bp, Homo sapiens
  misc_feature (664)..(664): n is a, c, g, or t
gtccaacaaaaggtccaacagaaatctgtgagttaaagaaagactatttttactttgctataggaccccatcatttaaaaaaaggacctggtaatatgaagaaccttccctgtaattgtctgtgaccttgttatctgagaccggcattcacgataggagtctagatatttacctgatactaatcaagagatatatgatatccggatctaaaaggtagatagttatatttaatgacctcagtcctaagttcctttttcgctaatggagctttcatttctgatattgctgtttgaataatatgattaaatagaaggattgtgccagtagacattatgttactaaaacagcactttaaaaacgttggttctctaattcatatgaaaatgatgggtgctctaagttctttgagctcttctagtgtgagtgcgagtcaaacttgtgtgtgagacagaacagagcaactgtgcagggaaatgaaagaagaacatttggtggtgagtatgacgtgaaacccaaaggattaattgttactgtccaacaccgtggagcaggttgggcaccaaaaagggaattactatttattggtctaaggaaggataaaaaaagacaggggaaagggggaaactttgttttaaaaacgaaacctggttccacttgcgtgtcn

SEQ ID NO: 700520 - DNA, 911 bp, Homo sapiens
  misc_feature (608)..(608): n is a, c, g, or t
  misc_feature (653)..(653): n is a, c, g, or t
  misc_feature (752)..(752): n is a, c, g, or t
  misc_feature (825)..(825): n is a, c, g, or t
agttaaaataatgtttccctttgaaatgtttaattagctctgttttattacaaaaacattcttgatgtggagcacagtgttgagctcgaagactctgatgagttaaatggtgtaaagtgttctcacgccctatgtggagcagaacctgaccaggagtggctgttgtcagcagatgtctggaccactggggaaaccatgatgcttgctccaagcagcaggccatcatttcaacctttgttgcttccaccaaacctcccattgtgctttcaatttaacagcatcacaagcagacaaagaaatttcttacaatttgcccttcagttcagagacgaatcctatttaaacttgtctaacctctcataacatattagttattgttgccagcctgcgtgtgtcctctggcaatgagctactcattctgggagaaggagggggtgcccttcagtttgataaagcaagaccagatttactggcacacttacaggaggcttgtctcaagactgcagcaaatttaattaaccttattacaaatatgggtttcttgatgattacatcacaatttggtattactttgcctactgctgtttcaaagtaatatgtgctttctnaaatagttttctagaaaacgccaggatattggaagtagtaaactnatcctagccatgacctaccctatctatgtcctgttctcacacatacataggttatcaacatcttctttcctgcatcctatgaccttacctctgttcttncacactccactgaaataatggcagaggtaactttacattagaactaaagtgattctgggacagtaaacatacntcaacactctgctgtggaaatcgatgccagactaattgctgccctaaattcttaccaaagagatgatcctgatctgtgaaaagtac

SEQ ID NO: 700521 - DNA, 849 bp, Homo sapiens
atgtcccccctggcgcacccgtcatatactctatcatcttcgcgggttcactcgttaaaaagtctacccgtcactcggttctttggaccgtgggtagggccgtagctggtaatggtgcatagcggtaaaggtccatattctctcgcgacgacttaagcctgtcgcttccacagatagtccgtgcactcacatgctattccgtccatgcagagcggagcggtagtccagtagatcctacattgttagccataattctctcacactgactactagctctccgggacaatggatgcaaggagaccaaattattaccctatattcacagacgtcgatcactaatagaatattcattaatttggctatgaggctatagtacaaacatcgtatgggacaatatgcgccacctgtattcaacatatccttggacgctaacccaagaaggctttaaccgcgaatgggtactcggacatcttgatcagtcctggctctagttgcttgactgcatcattggattaaagttacttacgtcccctcattcaatcaagtcagtatacctaaaatatttcttacctcatatcttaggctctgttactgccgttgcgtcactcacttcatgcaacaatctggatgcctcaataggtctgcgcaaggagtcggtgtcattaaatccaacactaaggctgaagcttccaacctattgcatttttccttcaattacccatcgtgagtgactggaatagctaggcatgtactgtcctgtaaaatcccttacgataactatgctgtagttttacttggtatctttatcctattctagctaccggttgcgttttagggcatttttagttc

SEQ ID NO: 700522 - DNA, 501 bp, Homo sapiens
tattcatggcagtcttctaatactactgcctatcctcataacatcagtcatcctttacctcatcctaatcatatcacccatttagctcgggtctacctagtgcgacctctagagacgacatgacatgtctgccagtatgtactagtacagtcagcgccacataatcatacaaagaccccgcaccaataggatcctgccgaatcaagcctgacccctctccttcataaattattcagcttcctacactattaaagtttagcacaaacaccaccccatcatactctttcacccacagcaccaatcctacctgggttaggtctacctgccaggtagacctaactagacctaacccatgtagacctccaggtagacctaactagaagtgtgaaaacgtaggctcggattaaggcgacagaaatttctaggatagtcagtagaattagaattgtgaagatgataagtgtagagggaaggtaaatggttgatattgctaaggtggcg

SEQ ID NO: 700523 - DNA, 209 bp, Homo sapiens
aatccttaaagcttctagcagaagaaagtcttcccacaaccccattttatttcatattgggaaacacaggcaacagcaggatgaaaactaacgaactttagagaatgagctggtacaactacccttacagaaacatacccgcaattagtaggtagtaattattgaaaccatgtgaacagattaatgcacttaagcacctaaggttaggg

SEQ ID NO: 700524 - DNA, 233 bp, Homo sapiens
ctgctgcaatagagcgagcatcctcattctcctcctcattgtgcagttgctcagatgtatgcatccggctttcggatcagagggtccaccagcatacaggaaggacatgtagagcaacagggcacccaacacggacaggtagatgaccatgatgaacttgatggtggtggtgctgagctcctcgtacctgcactcgcacagcaggcaagataggcctccacgtcatggccagg

SEQ ID NO: 700525 - DNA, 321 bp, Homo sapiens
  misc_feature (48)..(48): n is a, c, g, or t
  misc_feature (50)..(50): n is a, c, g, or t
tgcggcggcagtggctcacgctatccagcactttgggaggcgaggcangngcggatcacgagatcaggagtttgagaccagcctgaccaacatgttgaaaccctgtctctactaaaaatacaaaaatttgccgggcgtggcagtgcgcacctgtaatcccagctacttaggaggctgagacaggagaatcggtcgaacccggaaggtgggggttgcagtgagctgagatcgtgacgctgcactccagcctgggagacagaactagactccatctcaaaaaaaaagaaaaattcctgtcttgtgtatatctgtgtatggtcg

SEQ ID NO: 700526 - DNA, 702 bp, Homo sapiens
ctcgggtacccatcccccctcggcccacgcgcccacacgtcagctgtctccagcccccccgggacgaggaggagaccagccagtggcctggacctgcttcccctccccgggtgcctcctgcgtggatgcccctgtcccctcaatggctcgatggacacccagccccctggtaccaccatggcagcatcccctgctgccaccccgtgctctcaatgctcacctgggaagaccatgcccaccacccagagcatttgcctcatgaccccaagtacgccaccacacccaaggtgatccatggcccctgtgccctgctgggctggtccctgacaatcctgcccatctgtcctggggatgtgcaagaatgtgtcagcagcacccactagttacttgcttgcccagagctgaccatcctacctggatgcgctaccagacggcttccatgctgatgatgtgcccatgagcccccggaggcagccctaccacccccattgcactagagcgctactgcatagcttgccacatcaagcgaggagcgaggaggaacagggagcgacaacagaggaacgagagcagcgacaggggacgcgaacagggaccgagcgagaaaggacaggggaagagaaggacgagcggcgggaagagggcagcccgagacggaaagcgcagggacagagggcaagacaggaaagcggaaagcgagac

SEQ ID NO: 700527 - DNA, 783 bp, Homo sapiens
agcgggtttgaaaaccaggcggccgccttagccggtggtaagacagttgcatgcagaggaatcttgtaatacgagagcgacaacgactgtctggcatgaccggtcgggctcctggggttcagccgtggccgtcctcggtctacggactgacctaaggtggtggcttaatgacaggtgtatagcctgcatcgcccccctctgcgctgaagccgcgtggccagccggccaagacaacacaaatctcaggcgaccacgtatcataaagaggtctcttaacctgttaggttcatcacgagaagtcggaatggtgtctcacaagcacgcattacacttcaaggagagtccacgagcatactgaatgttacggcaacattcaccatataggatgaggatcgagtacaatgggcataattgttaagctaccgtgatcagctgccaccagtaaaggaatgtcagaaatcggctacatagacctactgtacgttaagtcagaaaattcagaatggatagagagctcgaaggacacacgtataccatggctgttacgatagctcgtcaatcaagcatgttgcaccaagagagttgactgaaagctcagggagagctgaagggacctgacccagtaaggtagagctgctggagaatgtttcagtggacaggctgtttggcaaatcttggatgcagcaagggccttgatccagcctttaggcctcgtgagaccctggcatcacgacaagaatccatctacgtgatcacatggactctatgttgctgtgagaaact

SEQ ID NO: 700528 - DNA, 165 bp, Homo sapiens
tagaattgtgggaatacgcataccctagattcttactactgatagaacattatctgcatatccaaaaaattttaagcaaaatgaaagctaccaatttacagttacggactctaccattttaaagttattgcttgtcacgctattaccacaacttctaaggttaag

SEQ ID NO: 700529 - DNA, 221 bp, Homo sapiens
ctgtcatgcagttgacactctatatttcaagtaacgcttcgggccgcggacactcagctacagcatgatgggcgcgagagcaaggcgggacggcggtggtcgccttggggacgcccgccgtcccagatcaactacgagctttttaactgcggcaactttaatatacgctattggagctggaattaccgcggctgctggcaccagtgttgcatggacaccaa

SEQ ID NO: 700530 - DNA, 212 bp, Homo sapiens
ccccccccttttttgaatggggggggcacccttttttttccccctgtgggtcccccggggcagggggggccacgaaaaaaggatattttaggctttggggggtgctagttggggttggggtttcccccctgggaaaaacccccctttgtttttcccctgtggactttttgggggcgggtttttttgttcccattaaatttttgtgggcccca

SEQ ID NO: 700531 - DNA, 193 bp, Homo sapiens
  misc_feature (16)..(16): n is a, c, g, or t
  misc_feature (58)..(58): n is a, c, g, or t
gggcaggtgtcaaaantgggcaccaggactggagccccctccggagaccaaaacttcncctcctcagtcctccccaacagggtactaggactgcagccccctgtagctcctctttgcttacccctcctgtggacaccttgcactttgcctggcccttcccagagcccaaaaagtaaaaatgttttggttttga

SEQ ID NO: 700532 - DNA, 474 bp, Homo sapiens
  misc_feature (226)..(226): n is a, c, g, or t
  misc_feature (236)..(236): n is a, c, g, or t
  misc_feature (239)..(239): n is a, c, g, or t
  misc_feature (245)..(245): n is a, c, g, or t
  misc_feature (359)..(360): n is a, c, g, or t
  misc_feature (380)..(380): n is a, c, g, or t
  misc_feature (460)..(460): n is a, c, g, or t
  misc_feature (468)..(468): n is a, c, g, or t
ccaggccatgcagaactccggcatcgtccttgagcgcgctgctggggaggagggtgccctggagccagctcctgctgccgggtccagtccccagcccctggcagtggcatgcccctgcatgcttgcctgtgtacttgtgaagttgcatgcctgctgtgagacacatggtggccagcgatggcctcagctggtgcccatggacccacccatgtcctcatgttgcagnttggaggaanccntttccngcttgacatgcatgcccaaccctgtgaagtgcccacaagacggggccacacctgggcctgaggcctgttctgccttgcgctgccagttgttggcaaatgggccctttccccccnnaagggcccccttaaaccccntttggcctttctcaaaagccaaaagcccaatccccaagcggcagggcttgccaacggttgccgttgaagcctggcctgcntttcccgnctttga

SEQ ID NO: 700533 - DNA, 1525 bp, Homo sapiens
agcggaggtcggggtgacctggcacgcgcaagcgctcggcggggagttcccgaccggtcaggacgcagagccgacggagctctcgagggctctggcgaaagggggtagggaagcggactccggcgaagagcagtcaggaacggtggacggggccgagagacgacgctgcggtagtctgaatggggccggggtcacagggagaggccaatgagggcagaagcactcttcagacggagacggggctgacggctgagcattcaaaaaggggcgtgaacttggagtatcggcatgaaaaaaaggtgggggcccagatggggagcacctcctcattcctccctgcccaactcagcgatcgtccgcgcctcccaggcggaaaaagcgtttcgcgggctttccaactgcccggctaagttcgcgatccccctccctccagccgtgactccgtcgctttttgtgcccgcccgccgggctgtgctgcagtgcgcttcgggtaggggcggtggcgccgcggcatgggtcgttacgaatgcggggcgcggtgggccaatcagaacgtttcatttccgggtggcggcgtggcgccgttttgtgaggagcgatataaacgggtgctgtagtgccgggtgcccgcccagttgttacttaggtgcgctagcctgcggagcccgtccgtgctgttctgcggcaaggcctttcccagtgtccccacgcgtaaggcaactgctgagaggcgcgcgtcgaccgccagagtgaggaagccggcgccagttcgcggggctccgggccgggctactcgagagctatgagctacggcgatccacctcccgatgtgtcaggggtatgacctctcgctcgaaggtggacaatctgacctatcgacctcgacacgacacgctgaggggcgtcttcgagaagttagggcgcgtcgaggagtgtacatcccgcgggagcgtacatccaaggcagttcccgcggcttcgccttcgttcgcttttcaacgatagagcgcgacgacgtggaggacgctaatggaatgccatggaacggggccgtgctggaacggcgcgagctcgcgggtgcacatggtgcgctaaggtcgcctgcgggactcacaccagagcgccgggtgacggcaccccgctggtaacgggggcggtggctacggacgccggagcgaagcctaagcaggcggtccctgcagccgaaccggagttgggagccgtcaaggctccccaccgattggccaagcggctcgaagtgcggtcacgaacaggcttgacctcgggaccccaaggtcacattccgcgaaggccagtccagctcgtggaccaatttgtacggcacagccggtcgcccaggcctccccatgttcggggacaaccggcggtagagagctccactctgagaaggggtttaaaaagtttcgcagtacagtggcgtacagacaacagtcctgtctagatgtatacatactaggaatactagatctgcagaatcttgtcttgttctgccggcttgacttctg

SEQ ID NO: 700534 - DNA, 983 bp, Homo sapiens
ggtcgtgccgcgccctttggtgcgcctgtaatccctctttcgtctcccgcccggcgtttttgggcgccgtttatagccacgcgcaatgttggggaggtctttaacagtgggggcaccctaacccgcgtgcccgaggccccaagttggcgtcccgagaccccgtatctgggctgcccgctcattttcgattgcacccgctttgcactttatgtatttgggcgccttcttgcatgtcggctattatagaggtcttgcatacggacgcgaactcttcggtggcttcctgcccgggttctctggggggttccggatcgcggggggcaacagccctcttggggatcacctcatcgcgagccctccctctcgacttctataaacaggagaggaagggcgcggtgtaatagggcccaataagaacgggggcggggacccttctattagcttgctcccaccggcgctggagttcgcattgtgctcgtgcaagcaaagggacagccaacgcacgtcatgtggttgaaaggcgcctccctcctcctttatctctattgtgttagtagacatggactccacagtcatcgttaaggatttaactgttgcttcctctttcctatgtaatcattattgtagcgcagcgcgccccctctgtacgccaaggcggcatgtatgcccaccggcagcgtcgcgcaagcagtgtgcaaggacggactccctgtaaaaagcgcactctttctgtcatcgcggctttttggggggccctacgtagacgttttctacgcctgccatgattattgttgcagacaagttagcaacaaaaggtgggtcgattatttcagataaatacgtcgggaagacaaacctcctatcttcagtccagggccggtcatacaatgaggccacaggagaccccccgcgagtgaatcaggatataactttcatgtcgtttttgtttttaaagaaatgcgtttgaagttcaaacatgtaca

SEQ ID NO: 700535 - DNA, 391 bp, Homo sapiens
cagggctgttgtctgaaaaagaatgcatttctctttcattttttaagaatatttccaacaggtacaacattctagatgacattttttttccttttaccactttatagagatgtcattcagttatctcctgtcttctatcagttgaaaagtaggctatatttttgcttctttgaaggaaatgtcttttttcctttgaagacttttatcggccggacacagtggctcatgcctgtaatctcagcaccatgggaggccgaggcaggtggatcacggggtcaggagatggagaccatcctggctacggtgaaaccccatctctactaaaaatacaaaaaattagctgggcgtggtggtgcatgcctgtaatcccagccactgggtaccgagctcg

SEQ ID NO: 700536 - DNA, 426 bp, Homo sapiens
agcatactcttcggactcattgtgccccttacggctgcaagtatacgcattgtgccacacgcgcaccctctgctttgatccctatggaggccgtgatgcgacccagggaggagatcggctacctgacctgcattgactcgtaacacagagcactgaggccccagattatctgaccactgcggatgctgactccaaggctgcacagcattgccagtgcattgagctcactgacatctatgccaagtgcgaacatgcgcttgtccagactagccagtgcctgacctgcgattactggatgatgagatacgtgccagatgataagggcattggcagaggagacagtgtgctagtgtatgggacgacctgcgatgagactgctacatgcaagagatctgcccgtgttgcactgctagcctatgactctgt

SEQ ID NO: 700537 - DNA, 125 bp, Homo sapiens
gtgctccctcgacagtgactactttaaataccccctcatggcactaggtgagctctgtgaaaccaagtttgggaagacacaccctgtgtgcaatttggttgcttctttgcggttgtggttgccga

SEQ ID NO: 700538 - DNA, 132 bp, Homo sapiens
aggttgggcaagctactccagcatgctcagtcaatcatagtatacttcgatggtggcatgctcagatgcaccatgcatccatgttccagtttgcaacaccactccaatcagcatcgggcaggccattcatca

SEQ ID NO: 700539 - DNA, 147 bp, Homo sapiens
cacgaggctgacctggcagtgggctgccaccatgactccagggggctgttgcactgtcttggcatgctttttcacacgctccccattcattgtgtcggtcatttgcagtggggttggatgggtttgctggtcttttaggccaccatg

SEQ ID NO: 700540 - DNA, 928 bp, Homo sapiens
  misc_feature (1)..(1): n is a, c, g, or t
  misc_feature (4)..(4): n is a, c, g, or t
ngcnacgtgatgaccataaatgatagattatagagtgaagaagcaaacagaagtctgacgtcctgtacactgcaagtctgtttctcaatacctcctcttgggacactccctggttaatctttggatttttatgtttctctgaaagaccagttgtcgacagtgttgtgccaacaaatgtccctgatcatttgttgaaggcccgccgctgcacggtttttttgttttctggcagagaatttcacagttcaaattctgtgtctggggacacattatcccttaagtgtctcgagcccttctccgtcagaggctgtgcgctaaccatgtgaacattggaagagccgtcgttcgcaccccgcccgggatactccggcggtgaatcatccgcctcacgggggttaagtacaacgtgtcaacccgacgcctacacccagcaaacgaggggaaaacaaagaagcaacggctcccccacacgggcaataatttcttgaaccatcgatccgggaaagtcgggattacaaaaaaatagccacacggcggggctacaaatatcaaatggctcacgccacaatccacccccgccgttctagggcccccaccaaatctgggacacaatacggcgatgatccaatcgcctggggcctgtcaagggagttctctaaaaactgccctgcgaggcgacaacaacaccaaaatgttcacgaatgagtgtatacaaataatgggagatattcttgagtaatccaagcaccgcaagtttctatttaaaaaatttgatgtaatactccacaggaacaataaacaccgtgcctgtctgaaaaaaaatgttagatttgcatatgttgaacactcatacaaaggggtaaacccaaaaaaaaacagcctttggggggaatatctttaaaaaaacaaggttttcccccaccaaaac

SEQ ID NO: 700541 - DNA, 116 bp, Homo sapiens
gcagagatccgcgatgtggaacttctgctctcattcttcaaaccatccatggttagctctaaggagcgtttgaataacgccatctggaaaagcttatttcaacttcccttgggaag

SEQ ID NO: 700542 - DNA, 929 bp, Homo sapiens
  misc_feature (929)..(929): n is a, c, g, or t
ggtccttggtgctgacggacctggaatggcgactctcgatattaacaaggatggcggcggccgcaggaagtcgaggagtcggggcaaagctggctctacgtgagattcgcatccacttatgtcagcgctcgcccggaagccatcggtcgtcgatgtacttcattgagaacacgctacgtggagctgaggaaggcgaatcccgagctagccatcctaatgcgcgaatgctccgatgtgcgagcccaagctctgtgccggctacgcattgggccaagagacgaatgtccctttgaacaacttcgagttgctgatcaggtaaccagagccctggagaacggttctaaggtggtgaacacgcctgaagcctccaactgaggatgaggatgcaacagccccaagagccgtggggtctgctggacttagtataagtgttgaccgagaactttgtgtcctccgtatttcgtcataaaagttgtgctcaacataggattaccgcggaacgtacgaaaaagtgtttggggcgtctccgaggccacgagaaattttcagcccactatccttttggggtgcgcgccccctttagtttgtttacatttggaccctgggtacccctaggggacgcacgacaggacaatggtggatttcccccatgtaaaaatggcccgtggtgaccacgttttgtaaacactcaacaggggtttgggggctgcggggccatacagggcggtcagggggcaattcaatcgccgccgggggcttgtgagcggttttacagtacttttggaattatacaccctatctcatactcaaatcaggcttagcagcacaccatttcggctggaccacaaatagcgacggacgcaactcagtatgtaacagacatgcgaacagcaacactagaaaacggtcgggattgacatatcacctcn

SEQ ID NO: 700543 - DNA, 239 bp, Homo sapiens
agcgctgagcttatcttacttgaatcatatggtctgggtggctcatagaatggttttcattcaatcaggcatcgggtttggtccaaccagttttacattaaaaaaaaacggggatataaaagtggatatttaattaatggtggaggatgacgtggaggatatcctctagtactggatccacaaggagaaatctctcagggggtcaggtctcaggtattggctcaggcggcggggtaccg

SEQ ID NO: 700544 - DNA, 506 bp, Homo sapiens
  misc_feature (498)..(498): n is a, c, g, or t
tggactcctgttaccatgaggttcctgatcctgttcctagccctgtccctaggagggattgatgctgcacctcctgtccagtctcgaattgttggaggatttaactgtgagaagaattcccagccctggcaagtggctgtgtaccgcttcaccaaatatcaatgtgggggtatcctgctgaacgccaactgggttctcacagctgcccactgccataatgacaagtaccaggtgtggctgggcaaaaacaactttttggaggatgaaccctctgcccaacaccggcttgtcagcaaagccatccctcaccctgacttcaacatgagcctcctgaatgagcacaccccacaacctgaggatgactacagcaatgacctgatgctgctccgcctcaaaaagcctgctgacatcacagatgttgtgaagcccatcgacctgcccactgaggagcccaagctggggagcacatgcctagcctcaggtggggcagcattacanccgtcaat

SEQ ID NO: 700545 - DNA, 243 bp, Homo sapiens
  misc_feature (240)..(240): n is a, c, g, or t
agccggtacctatgggcgtagcctgcttttgggcaaataatcgtgcaagtattctctcatggcaggtgtagctgtgaacgtaattgtaaccacaacggtgaaaggatctcaacactgtgccttccaagtgatcttggatcataagatctgtcgataatgctggtgaagaaatatagactctcatattgattatttttactgaacatggagtggcaccctcaataaagataacagagcacnttt

SEQ ID NO: 700546 - DNA, 1269 bp, Homo sapiens
  misc_feature (15)..(15): n is a, c, g, or t
  misc_feature (23)..(23): n is a, c, g, or t
caggctgtaccgccnggagttangggatcggagctgcgtgagctcggatcttctcccccgtctggcccggctctctgacccgctgcgctctgctgggccatggagccgggcccccgactgcccagtgaggcgcgcactgtgcgcgaggcgctgggccgctacggagtgcggcgctggagggtgcggtgctctgcgctgcaacgaggacatgcgggggctgcagcgctggcgtggatgcggcgagtggcagagtgcgatgcgcctggcctggccccctggcgcgcacggtggccggacctgcagctgggacaaccatgcggctgcagtgctgcagctctgatgctgccgtgacgcgccagtgttggatgtgcgcttgtggctttgtgccatgctgtggacttgtcccctgtgttgccctgtgcacttccctgtaaaccgcgccaatggcgccccccatgccctgttgcccctggggggtatcgcctgacatctgtctgctgccccgcgaacatggtgcaaagacgcagcagactatcggcgcaggacacacagaccagcacgtatcgatcgaactgataccgggccggccggatccaagaagtattggggaaatcgagcgaatggagagcgccgggtggagtcgggcacgcattgaaggaaaagaagcctacaaaaacatcacattggcgagtacacttggtgcagcagccaattgggtgtcatacccaaggaacccggggagacaccagtggatcgccaaagggtgaccagcaagatggggacccccccccattggaacgataattaagtgcaaacccaaaaaagatacatataccatccaagagcaaaacgccaggaattacacacgccgccaccaagagggaccctatacgggaaaccaccatggattaggaaagagccacggtacatgtacgacagtttatacagtaggagggacatacgcaacatgtcgccaaagacacagagagtgtccaatgtgatacaacagctgaggtcaccgaatacttcgaaacgcaaccagtaaagaaattctattcatatggaacgacgagggtaatacaatacctttggaggggtgtaacgaaatcccctattcaagagaccattggcaccacgtgacgatcatcataaagatcataagccagccaaatttggttactattggcctatggaccgctaggacgctcaatggatgaagcggggcagagacacactacgcaaagaacgcgccaaaagaggacgacgtaa

SEQ ID NO: 700547 - DNA, 707 bp, Homo sapiens
gcaggagaattgcttgaacccaggaggcggaggttgcggtgagttgagatcgtgccattgcactccggcctgggcaacaacagcaaaactccgtctcaaaaaaaaaaaaaaaaaaaatgccacctcacagtctttatcgtggggccctgtggttgcaaagttgcctcctgaatttaagaagggaagggggaaaagatatagctgggaagcgagtggaagagatgcttgagggcggggggctgcacagacgtgctcagcagggctacagggtgctcaagccctatgggggatgggtgggcgagtggggcagcggcgttggccaccttaagaatgggggccaaagccactgatgtttatttgacagtgacactgcactggggtaacttaaagaattttattccccgtggtaattataatgacgtggcgttattagggaaaattatggggatttttagaaagaatcacgtttggccacccaaatggctaccactggttaatctttgggtggttaaatggttccccctagacttttctggtggcatagatttcgggtggtggtcacataagtcgtaatccggtatatccaatttttatgtccctttggtacctttaaacgttattaaaacattttttttccattgattaccagctcgttaaggcagaaaaacaaaaaacaagaaacaagaaaaagacaacaaaaaggaggg

SEQ ID NO: 700548 - DNA, 350 bp, Homo sapiens
acgcctggctaatttttgtatattcttttagtacagacggggcttcattatgttggctaggctggcctcgaactcctggcctcaagtgatccaccgccctccgcctcccgtgctgtcactacacccatgagcccaccgcctgcctccctcaccccctttcccaccccacccccgccctgccgcccaccccgccgcgcaccccccctccccctcctcactccacgccctccctcccctgctcccccctccctcccaccccagccccctccccccccccgctcccccccccctctctcccccctcgcccacccccccccccccccctccctccccctctccccccctcccct

SEQ ID NO: 700549 - DNA, 315 bp, Homo sapiens
ttagttactgtgttttatgttggaaatattttaatattgcacttctataaatagtatgatacatgcacagacgattgcagtaaatacttttttaagctaggatatgtgaaatgacaacctttggttaagtgtgtcaaggttgccaccgaattttcaccacttttttgttgtttgcgacttgttactaatattgaagaggtaagggaggcaatgcgaatgatttttaatctttctttattatcttttcacgcggttatatattttgtgacttatagcaccctatattacttgtcttgcaactgaaaaatataaggt

SEQ ID NO: 700550 - DNA, 147 bp, Homo sapiens
tggttcggctctacttgtctctcggctctacttgtccctcggctctaccttgtctctcggctctaccgttgtctcgcggctctaccgttgtctctcggctctaccttgtctcgcggctctaccttgtctcgtggatgctatgcggcg

SEQ ID NO: 700551 - DNA, 765 bp, Homo sapiens
ggacagagcccgtctcgggtgatagacccaggtcagctgaactttgtgttctccgatacaaagttgttacagagtgtctccagagccttctctctccattgtgcaaagtggcaacgtctgtagggaaaatcctcatagcaccatgtgggggaacgaatagggcaacagtcccgaaacaataagcatcactgtagtgagtctgttggcgcacgaagtgcggtactggctgttgtgctagtcagcgatgcctggggaaaaagtctctgggactggtggaaaactatagttcttcttttgtcgaattggttctagtctggagaaagcaagtaagagtgctttcagaagagggggcacgtaggcattgggaatttgggaatttcgttgccaacgtgaattggggggcaatggcttgatgagtttttcctatcgatgaaaaacggcataaaaaagagttttggttgcgcaatgaaatagaaaggagtttaagtaggctgggtaggaccacgggactcaagagtgcgttaaggaacttgggttagggtggggatacagctgggccagggcaggatcacggtacgaggcacaaagaacccgggggaagaaagtcggggctttcagattcgttgggttgcaggaggaacactggtttcatctgggttcttcgcagaggatttccaatttaatatccccttcaagtcattcgcagatccaagaggtaacaggagtccttggaattgtggcgttcccattacatgtgggttggga

SEQ ID NO: 700552 - DNA, 368 bp, Homo sapiens
  misc_feature (207)..(207): n is a, c, g, or t
agcgcgcgagggagtgtgagtgtgtgtgagcgcgggtgtgaggcggtgccaggggcgggcggagcgctgtccggccccggccaggcgccggcggggagcatgggaaggggctagaactgctcgatgcccccacccccctcgccgggatccgcgccccccttcccgggagaggggccgccgccccgggacggacatgggctcgcccangttcgccgctgccggtcgggggaagagacctgacaggtaattaaatgtgtattctgtcggccaagctttacactggatgcagcgatcaacccaccactcagggacggctcccctcgcctctgcccccggctcgttagctccagctggctccagggtagttg

SEQ ID NO: 700553 - DNA, 865 bp, Homo sapiens
gcgtgccatatgcaaaagacagtcgatcatctacaaagcgtgaagatgcgtcctgctgtgagagaatgtaggacaagagagcaagactcccgcggatacttaaagagaacaatcggtcctgtgtcatcaagaacaccgcaaggtaggcctaatgagtggtcgcatagcgattgaacagaagaaaattgccctctttcacgaggataactgcagttctcgattcggagcgggcggaaatccattcacatgggaagtggtctgtaccaacatgtcactgcaagagaattgcatgaatgagatccctatttaggggaccagacccgactcacgagaactaatgcgagcgtatctgacaaatcgctggttagagtatagcaatgcgcattgacggagaagaggcaggctcaacgatacgaaaaactatgttgtgtcaatagggtaagcaaaccacaataggtataaccaccgccacggtaggacttattacaaaggggggagaaccggggttttcccaagagaaaacttcggaggaggttggaaactatcttgcgtgaggttcctggcccaacggcgtgtgagacaaccaggaacagtgatttgacccaggggtgccctaatccgtgtggacagatttcggccaggttaaacatggtttgcgcccggccatatacacacacacgtaatgtgcctttctaaggtgtgctacaaaacccctaaagggtacttggctcggagatacctgaaagtgaaatggcaggtcttcccgtgacagttactcagaaggactggaacagatcggttcggcatacgcacaaaaagtgaaaataaggagtttataagactgcgatatgctaccataagagca

SEQ ID NO: 700554 - DNA, 135 bp, Homo sapiens
gcagcgggggggtgtcagtacctgcgctgtggagtgaagtgaaccggtatggccagaacggcgacttaaagggcgctcttaagaccgtcaataagatactacagatcaacaaagatgacgtaactccccttcatt

SEQ ID NO: 700555 - DNA, 502 bp, Homo sapiens
  misc_feature (273)..(273): n is a, c, g, or t
  misc_feature (346)..(346): n is a, c, g, or t
  misc_feature (349)..(349): n is a, c, g, or t
  misc_feature (365)..(365): n is a, c, g, or t
  misc_feature (389)..(389): n is a, c, g, or t
atagctctaattttacagtgaaaaacacccacagtgtgacaacatggaaagaatataatcaacttcaacccaatatactcaactccaatcccaattttggcagatagaacaaaaagtcaatacatgttatctgacattaaacagagcttatggaagacagaagtgggtgaggcagataggccgtacttggtcagatccagatgaacaaccagacaaaaataggagtagagccgggtgcagtgcttcatgcctgtaatcccagcactttgggangcggaggcgggaggatggcttgagcccaggggttcaagaccagccttggtaatttagggagaccctttctctncanaaatatgaaatcactncctaggcatggtggtgcatgcctntagtcccagctacttgggagactgaggtaggaggattacttgagcccaggaggtcgaggctgtgagccgtggtggtgctactgtgatccagcctgggcaaaaccctgtatcaa

SEQ ID NO: 700556 - DNA, 802 bp, Homo sapiens
  misc_feature (561)..(561): n is a, c, g, or t
actcttggatactaaattgatggccagcacacaagcttttaaggatatcattaacaacacatcccttgcggaattggaaaagcggttaaaagagacaccttccgatcctgctaaaaacgagcccaaggtttaccaagttatgacacaccctctgaacaactccaccaggcaggctacgacgcctacatcgcaggccctgaggttcatcgtcatggacaaagacctcatgctaacttttgaggccatcacctactatcatgaggtcaactccaccaaagcccgcgcccccttcgtttaacgctgtgagcgccgcgacacatacactcccctcgactgcagcttcaatatggccttcgagtatctattcggtcgctacagtggacggggataggcacgacagggtcgtcatactcataatatatttgcgcagcccgtgcagggccggctacattcccccttgccactcccactacacgccaggacctcgcacccgctctccccaccgccgcagccccacaccccactccaccatagctgtgtcggcagatctggcaaatgtcncgtagggcgtaagtattgctactttcgtgcgtctaccacccgctactgcgcgactagtcctgccgcgtaatgaccccggggcgttcttcgaagagaagtggaacgccctagatcgcttagaccaactcgtttctgccctcggttggctggctcctgctccgacatccggaagtgtgcctctgcggcccatgagatacgcccccaccgagcgctagcgcctgccctgcagatctcatcgggg

SEQ ID NO: 700557 - DNA, 411 bp, Homo sapiens
atgtatacagcaagcatcaaagcatcttcatttctctaacagggtttttttttctgagacagagtctcgctctgtcaccccggctgcagtgcagtggcatgatctcagctcactgcaagctctgcctcctgggttcacaccattctcctgccttggcctcccaagtagctgggactacaggggcccgccaccatgcctggctaattttttgcatttttagtagagacggggtttcaccatgttagccaggatggtctctatctcttgaccttgtgcccgcctcggcctcccaaagtgctgggattataggcgtgagccactgtgcgcagccgtctctgagggagtttaatgagttgttgccttttgagttggtccagctttttacttagtgttagaaccgagtgacaaatt

SEQ ID NO: 700558 - DNA, 192 bp, Homo sapiens
ttagcaaacccccttttttaaaaaaaaaaaaaaaaaaaaaaattggccaggcttggtggtgtaagcctgtagtcccagctacttgaaaggctggggtgggaggattgtttgaacccaggaggttgaggctacagtgagctgtgattgtgcccctgcactccaggttgggtaatgcagcgagactgggtttca

SEQ ID NO: 700559 - DNA, 159 bp, Homo sapiens
gcaagatgcaatgcaggcattttactgcaatgtggagtgtcagaaagaagattggcccgtgcacaatggctgggaatgttctcccatgtgttgttttttggaggtaataacttgtgcaagtcccttcggaagatctggtaagatgacctaatagcagtc

SEQ ID NO: 700560 - DNA, 1355 bp, Homo sapiens
  misc_feature (295)..(295): n is a, c, g, or t
  misc_feature (310)..(310): n is a, c, g, or t
  misc_feature (323)..(323): n is a, c, g, or t
  misc_feature (353)..(353): n is a, c, g, or t
  misc_feature (357)..(357): n is a, c, g, or t
  misc_feature (360)..(360): n is a, c, g, or t
  misc_feature (370)..(370): n is a, c, g, or t
  misc_feature (385)..(385): n is a, c, g, or t
  misc_feature (397)..(397): n is a, c, g, or t
  misc_feature (447)..(447): n is a, c, g, or t
  misc_feature (484)..(484): n is a, c, g, or t
gtagagtttcccaaccctacatgtataaatgctcacaaacaattctctggtatttgagtcacatagagacttttgaccccttgctttttaaagccacacactgaatgtacaccttgcccctgtctagttgctcttattctctctcacatgttgagcccctgcagattcacgaaactctgggaaatcacttgaagagtttgctgatcacacactttgacccccccccagcagattctatttttactgaagaaggagtcgatgcgcaacagcctggctgagtagaggtcccgcccanctgcagaccctccangctggaggaccanccgccctccttccctcctggatggaagtanaaanccnagctttctcnccaccctctgtgggncacacgtgcacntgcaccccccacacacacacacacacacacacacacacacagacacatangcacacacgtgcacacatgtacacacggatacacacncacacacacacacacacacaagtgtatatcgtgagcacgccctctcgcagtgtgtctcagccttgcaccttcttcagagattatatagtgtgaagagatttatatatagtatttttctcccttttttctccaaaacactatatactttaaaaaaaaaaaaaaaaagagcaactcccggggcggcgcgtgtgtcgccctcccaaccctgtggctccccctcttcgtgtcgtcacagcacacctcttcgtgttgtggggcattcgatgacgcgtgggtgcgcccgtttgcccaaagaggcttccttggcagagaggagccacaagagagtatagaaacgccaagtggggcagggggagatagctccctcaaaacgagggggagagaaacatcggagagagacgctagtaggcaccaaacccccaatctattaacaggtcgcaccaaataaacgtcaatgatataaaagaccaactctttgctcgtggccccccatatttgtggcgccccgcaagtaacaccaaggagggggcgccatacaacgaggaaacaagaagggggcacgcactaaaaaacaaaggctgagacaacccatcctaaggaggtccccccaaaggaaggccacctcacattagcgaagcggccgtggtgctgcgatagtgcggatttgaccaaaaacaacgcccggaacagagaagcacccacacaccagaaagagggggggtgttactacccacactagagggggaaccaccacctggaaaacgccccgtcgttatgaagcgcgataactaaaacagccggcgtccccgagaaaagaaaaacaaacaacacaaggcgggggggacggcactactacgaaaaaatctcccgc

SEQ ID NO: 700561 - DNA, 585 bp, Homo sapiens
  misc_feature (295)..(295): n is a, c, g, or t
  misc_feature (310)..(310): n is a, c, g, or t
  misc_feature (323)..(323): n is a, c, g, or t
  misc_feature (353)..(353): n is a, c, g, or t
  misc_feature (357)..(357): n is a, c, g, or t
  misc_feature (360)..(360): n is a, c, g, or t
  misc_feature (370)..(370): n is a, c, g, or t
  misc_feature (385)..(385): n is a, c, g, or t
  misc_feature (397)..(397): n is a, c, g, or t
  misc_feature (447)..(447): n is a, c, g, or t
  misc_feature (484)..(484): n is a, c, g, or t
gtagagtttcccaaccctacatgtataaatgctcacaaacaattctctggtatttgagtcacatagagacttttgaccccttgctttttaaagccacacactgaatgtacaccttgcccctgtctagttgctcttattctctctcacatgttgagcccctgcagattcacgaaactctgggaaatcacttgaagagtttgctgatcacacactttgacccccccccagcagattctatttttactgaagaaggagtcgatgcgcaacagcctggctgagtagaggtcccgcccanctgcagaccctccangctggaggaccanccgccctccttccctcctggatggaagtanaaanccnagctttctcnccaccctctgtgggncacacgtgcacntgcaccccccacacacacacacacacacacacacacacacagacacatangcacacacgtgcacacatgtacacacggatacacacncacacacacacacactgcccgcacatccgtactggcccgacatccgtactggcacacatccgtactggcccgcacatccgtactgcccgacatccgtactg

SEQ ID NO: 700562 - DNA, 94 bp, Homo sapiens
ctgcctccgcaagctgtcagtggtgcagcagcctgtctgagtgggtgtgggagtgtggactgctgctccgaaatctccgctgagctcattcgct

SEQ ID NO: 700563 - DNA, 370 bp, Homo sapiens
gataatacacagaatagagctcgggcgtagtgatagcgcgccgagtaagtacccagctactcaagaggctagaggagggagaatcgcttgaatccaggaggcagaggtatcagtgggccaagatcataccactggactccaacctgggtgacagagtgagactcttgtctcaaaaaaaatatttttccaacaatacagagtatatagaataagaagttaacttagacccgctattaactctgtgtcagtcaggaaaagagaaatcataccagctaattaatttcccagctttatggagatgtaattaataaataaaagctgtaatatatccaaggtatacagtgtgatgattagatatacatagtgtaat

SEQ ID NO: 700564 - DNA, 580 bp, Homo sapiens
agcggggtggctgcttctgccagtattgaatgtgcatgctgtgtgccctggtgccctcacctcacctgagtgtcctggcctgcccagtgtgatgctgctatgccgtcgggatgtgtgaccagtcgccaccctggccccactgacactcccaccatcctggctgtgatgtgacatgcctcgtgatgacggagtgaggaattgactgacaggacgagtgcggaagaccgccgatgccagaactgccgagatcgcacacacacctcaagatccagcaagccggtatcagacaagagctgtgcaagacctggcgtcacaccatggacagagtgctggcagcaggtgcactgcttggcctggtgcacagataaccagcagacattgactcccggaaaaggcttaacaaccgccctgcgacggcgcaacactggactctttcgatattgcgctatcagcccatgatgaccccttattcatgtagcgcatagtcagtgaactaatcactgattcgcaagcttggatacagccaaagtgggaccagactgaaaagggaaacatacgggtcgtctttaaactagaaatc

SEQ ID NO: 700565 - DNA, 1052 bp, Homo sapiens
gtggctgactcccggacgtaggtagtttggtcgggccgggttctgaggccttgctttcctcttatacttttccacttctaggccacgatgccgcagtaccagacctgggaggcagttcagccgcgctgccgagaagctttacctcgctgaccctatgcaaggcacgtgtggttctcaaattattaggcattcctgcctgggaacttgtcgtgctccccagctccccagcactgactcacgctcaggctccgctgctactaacacacagacccacatgctccaaccattgctcccacgccacgcacttggacccaacaacttcccacaaggctcaaaccttaaacttgcagacctatactgggtcagcccaaatggcaaagcccctgccacatggttaacccactggcgccaccaccttggcgcttgcaccctcgcccaccatctgcacacccttcgacccctgacccttagcgggccccgacggctacccctatacagcgcgacaccggctacacccctacactccttctctccggcacccacttatcacgcacgcaccaccccgctctgcctccgggggcgcaccccagtgaacaccccgcgtctcaccctatccctccctttggtctaaacccccttaaaacggtcctggacaaccctttggcctccccacaggaaacacgcgcctattacacggccaacgcgtctacacaattactcaaccgtctgtggctcacacgcgctccactcccccctttctctcccctctcaacacactttttaaaaccctctactctcgccaagcgcacaaaggaaatcagccccttataacgcggcccacaactttggaccccaacaaatccgtcgttcggtcctctactcatcctaccccaacgcgcacctccttcaagccggccacatcaacatggtgccccccctcttattcctatccaacatcttttctcctacaccccccctattctctctctcacagtgtcggacaccaacaccacgtctttgttcgtggcgcacacacactcccaacacaatga

SEQ ID NO: 700566 - DNA, 306 bp, Homo sapiens
gctcgacaggttatctatgagggccctgcctgcagcaaacttctgcctgggcatccaggagtttccatacatcttctgaaatctaggcagaggtgcccaaaccccaattcttgacttctgtgcactctcaggctcaacaccacgaggaaactgccaaggcttggggcttgcaccctctggtccactgcctgagctctacattgagcaacggggacgcagggttccaagtccctaggctgtatacagcacagggatcctgagcccggcccatgaaaccactttttcctcccaaatctccagtcgacg

SEQ ID NO: 700567 - DNA, 852 bp, Homo sapiens
gcacgagtgtacacttcacgggctcttgtgggggtccccggccctccccccaatttgggtttcatatagttcgacagggcgtacccagctccccgtaggatttgtgccgccacgacccagctcccccttggaagacagaagcggttgtgttcctcttctgctcaggggccaccccctaaatatgtgttcgaggcccccacgggaaatcatgttgttttgttcgagacagcagttaccacttatcgtatgccggctcgtgtgatggcaccaccgttctgtcccccaggccccgtcttggtcaacgggggggggcctttaagtccccgaaggtgcttttgacgccccgggcgttgccgaacatgcgccggggattagtttttgtggacacccaccgccggccgatatgtttgtctcgactcgagtgtctccaatccaccctttgcgtagagcccctattcttgtgtggttcttctccccccccaggtgttgtgcaatattcgaagaaaaatattcttgcacgcctgccgagtgtttgcccaccgagacgctcgccgcacttgctgggctcattcacttctttttccctcccacacaacaagcacgtctctgctttttcccacacccacctattagcaccatttttctccaggtaaccaacatggtccccctaattctataaggtcctattcctctttattatttgaactaaaaaaaattgtttatcgcacgccggtatcacacaaacaccccctcgtccagacccttttacaccccccacaatgaaacattacgcccccacaagtcccggctaaacataaaaaaaaaataaaatgccgtttaaaccacataaca

SEQ ID NO: 700568 - DNA, 367 bp, Homo sapiens
tctgatactctgtcagcttatctaattagtatctaacagcaccttatctgctgggtgtagcagcttggccctgtaataccagcacatggggaggctgaggcaggatatcgcctgacagctaggagtacaagcacatgcctgggcaacacagtgagcaccatctctagcaacaaattttcacaattcgccaggctagggccaggtgcagtggatcacgccggtaatcccagcactttgggaggccaaggtaggcggatcacctgaggtcaggagttcgagaccagcctggccactatggtgaaagcccgtctctactaaaaatacaaaaagtagccgggcgtggtggcacgcacctgtaaccccagct

SEQ ID NO: 700569 - DNA, 322 bp, Homo sapiens
  misc_feature (147)..(147): n is a, c, g, or t
  misc_feature (155)..(155): n is a, c, g, or t
  misc_feature (166)..(166): n is a, c, g, or t
  misc_feature (175)..(175): n is a, c, g, or t
  misc_feature (177)..(177): n is a, c, g, or t
  misc_feature (179)..(179): n is a, c, g, or t
  misc_feature (205)..(205): n is a, c, g, or t
  misc_feature (207)..(208): n is a, c, g, or t
  misc_feature (322)..(322): n is a, c, g, or t
agaaattgcagagcaacctgggcaacatggtgaaacccgtctgtaccagacaaaaagcactcaggcgtggtggcacatctgaggacccagctacttgagaggctgaaccatgaggatcgcttgatcccatgaggcggaggttgcagngagctganatggcaccacntattgcacncnancccgacagagcgagactccatctacnannccttatgacgcagctgatgcctgccttggttcctaccactctggtgtagacagaggacttgtccaagtctcacactatacatgccatgcgtggataaaggggccgactgatttn

SEQ ID NO: 700570 - DNA, 229 bp, Homo sapiens
  misc_feature (39)..(39): n is a, c, g, or t
  misc_feature (45)..(45): n is a, c, g, or t
  misc_feature (71)..(71): n is a, c, g, or t
tacatatatatacacatatatacatacatatgtatgtanatacanatgtatacacatatatacatacatanatatgtgtatatacatatatatacacatatatatgtatgtatgtgtgtgtgtatatgtgtgtgtatatatatgtgtgtgtatatatatgtgtgtgtgtatatatatgtgtgtgtgtatatatgtgtgtgtgtattttctgaaacacggtttcactcca

SEQ ID NO: 700571 - DNA, 1067 bp, Homo sapiens
  misc_feature (207)..(207): n is a, c, g, or t
cccaaccttgaagaaagtcctaaaagaacaaattaattacatatgaggaattaagggatatgaacagagagtcatatgaagtatctatcaaccacctacatacagactagacccctcgtcacggtcatggtgctattgcatgaaagacgtgccacaaagaacgaagttcaaaagtgaacaacaaacgctactgcgtatgatactgtnaggattagatgctcgcaacacacatttgacagtcatccggacatgcaagcagttctcacatcactccacgctctcaatcgagtgtggttcatcgtattcaccctggcgaagtgcttctagaggctcagcccagcaggtcttactctaaatacacatttcacacaccaagaaacggatacctcggagattaactcgtaggtccccgacttcctatgtgtagttcgtaacataaaacaacagatgtcctagctgttaacactattcgtcgtcccatgtccctcacccttaggggaatacatttagataatgaatggtatcagtaccatgaattgtatacatgctttgtgaccactgtgtgtgcaagggcaaacgactatctcattaacaaaaaaccgtagacgagttaaaatggtcctagaatcaaggatatttaggacatatataactgactatgtgcaatgtagaaattgggcgtgaatggggggggaagccaaagtcctgaaattaaaagtgtgatgcgtttgccttcaggaatagtgattgaagcagctgattatctacttccgaggtaatctacgtgtattaattcggtgaaagagtcacatgggcaatataacctggttaaagggaacgatgggcaagaacaccacggaagcaatattttcaccttccggttaccataaatcaatcggtaatcccccaacggggtccaagtcatttacagctgattgcccaacatccgggggcagcaatttgaaaatggctcggcgggcggcattgagacccacagatcttttaaaaaccgccatggcgagcggaataaaaaagcacgcgctaaaaacgggcggaaaatcatggcc

SEQ ID NO: 700572 - DNA, 101 bp, Homo sapiens
cccccccccccgcccccggggggggggggattaggggggttgggccccccccccccccttttttgggggtttggggggaaaaagggggcccccctttttta

SEQ ID NO: 700573 - DNA, 158 bp, Homo sapiens
ccgaacagtcttcaatctgattacaagacaacattgtaagagagatgagcactcctaagtcgagtatattataatacattagtactggattattcaggctttagagcattatgcttctttaaaaaagctataaattatattcctcctgcaaattttgg

SEQ ID NO: 700574 - DNA, 1710 bp, Homo sapiens
agcgggactgttctgaggagcggcccggacgcgcgccgcccccgcccgcgtttccccggcaacccgcggccgccgccatggacgcgctgttgggcacagggcctcgccgggctcgcggctgcctgggcgcggctggacccacgtcttcaggtcgcgcggcgcggaccccggcggcgccctgggcgcgcttctccgcctggctggagtgtgtgtgcgtggtcaccttcgacctggagctgggccaggcgctggaggtgagcgggcgcgagcgcgggcgcgggcgggtgggcagggctgcgcctctcggggccagtcccgcctcgcttggggccctcggccgccccgcactctccctggccttcggccgccgcctcctggaggggcctcttctccgggctccagaagcgctccccaggccgaggagggaaggcgagctgctcggagtcggatcttgtcttcacattgggatggagcattttgcataacctaagtggtactctttcgatttttcccagtaaatgtctcacatctcccccctccattccccaccggagcagtgacaccttcatcccctcagtggctcccgccagagtcccgggcttaccctccgctccgcatcccatctctgggcataggcgaggctgacggctccttctgcaacaaaggtctcggatccgttcctttgctgccatcactgatgtcatccccaccccagctgcaccccagagttcaacctttgtggctctcctgcttaaaaccctgcagcgcctccttgttcacctagcatcagatccagaccccatgggccccgtccctccacctgcgtcttgtggtgttcttgctcgtgggggtctgttcatcggctgtgcccatgggctttcgatgtggtctttctgctgcctgcaggcctccactcacctacccacacaggcagcctcctttcctccagggaggccccgcaggatgatcttctctgtgtcctgtgtaacacacaccagggagctgaccagcacaggggaggcccacctgcagatggagggaggcttccccgcgctggcgcaaggaacctcgtgaggggtagtgagctctctattaccgcaggtgtccaagatcaggccaaatcatcatcatcaggaaagccaggcagcgcgtctctgtggttgggagatgctttctaaggccctgctgaactccaagaggccatgagaagcatatagtcttctaaacagaaaagcattaactctagcactctctggagcccctcccaccacacacggtccccagcaggtgcacagcctcaaacagcatcactgggtgggggctgagtaccaagaagtgtggtgacctgcccagggttgaaaacctttcttagttcaatactgttgcccagattgttccccacaaaatcacaaaagaagttaagaggttcctggccggacgcggtgactcatgcctgtaatcccagcactttgagaggccgaggcaggcagatcacaaggtcagcagtttgagaccatcctggccaacatggtgaaaccacatctccactaaaaatacagaaattagccgggcgaggtggcacactcctgtagtcctagctactcgggagactgaggaggagaatggcttgaacccgggagggggaggttgcagtgagcagagattgcaccattgcgctccagcttgggcgacaaagtgagactccatctc

SEQ ID NO: 700575 - DNA, 674 bp, Homo sapiens
  misc_feature (484)..(484): n is a, c, g, or t
  misc_feature (674)..(674): n is a, c, g, or t
gacatttacagcgctttgaggcctatgttgaaaaaggaaatatcttcccataaaaactagacagaagcattctcagaaacttgtttgtgatgtgtgtattcaactaacagagatgaacctttctttttacagagcagttttgaaacactcttttttgtagaaactgcaagtggatatgtagagcgatttgaggcctactgtggaaaagcaaatatcttcacataacgactacacagaagcactcctagaaacttctttgtgatgtgtgaattcaactcacagagctgaacctatcttttgatggagtagcttagaatctctcttcttttagaatctgcacgtggatatttgaagcgctttgagacctaaagtggaaaagccaatatcttcacataaaatctacatagaggcactctaagaaacttctttttgatgtgtgcattcacctcacagagctgaagcacacagtgcttgagtgaccagntttgaatctctctttctgtacaatctgcaagtggatattgggagccctttgcggcctgtggtggaaagggaatatcttcaattctacacagaagcattctgagctctttgcgatgtgtacattcatctcacagagttgacactttcttttgattgagcagttttgacacactgcttttgtagggctgggn

SEQ ID NO: 700576 - DNA, 2101 bp, Homo sapiens
  misc_feature (671)..(671): n is a, c, g, or t
agcgggactgttctgaggagcggcccggacgcgcgccgcccccgcccgcgtttccccggcaacccgcggccgccgccatggacgcgctgttgggcacagggcctcgccgggctcgcggctgcctgggcgcggctggacccacgtcttcaggtcgcgcggcgcggaccccggcggcgccctgggcgcgcttctccgcctggctggagtgtgtgtgcgtggtcaccttcgacctggagctgggccaggcgctggagctggtgtatccgaacgacttccggctcacagacaaggagaaaagcagcatctgctacctgtcttttcccgactcgcactcaggctgccttggagacactcagttcagcttccgcatgcgccagtgtggagggcagaggagcccctggcatgccgacgacaggcactacaacagcagggcccctgtggcactgcagagggagccggcacactacttcggctacgtgtacttcaggcaggtgaaggacagctctgtgaagaggggctacttccagaagtctttggtgctggtgtcccgcttgccctttgtccggctgttccaagcgctgctaagcctcatcgcccccgagtactttgacaagctggcgccctgcctggaagcagtgtgcagtgagatcgaccagtggccggcgcctgcncctgggcagaccctgaacctacctgtcatgggcgttgttgtccaggtgcgcatcccatccagggtggacaagtccgagtccagtcctccgaagcagtttgaccaagagaacctgctgccagccccagtggttcttgctagcgtccacgagctggacctgttcaggtgcttccggcctgtgctgactcatatgcagacactgtgggagctcatgctcctcggggagcccctgctagtcctggcaccctcgcccgacgtgtcctcggagatggtgctggccttgaccagctgcctgcagcccctcaggttctgctgcgacttccgtccctacttcaccatccatgacagcgagttcaaggagttcaccacacgcacgcaggcccccactggccccacatcctccgagtcggggagcccaagatgtcaggtcaggctcccggtgaggtgcagggggtgctgctcagaagcctcgttgagtgtggggccgcctcagagcccgtggggatggccagagctgcgggcactgaggcctggccaccgggcgtgtctcgtaggagacctgcctaagcaagtcaagctgaaaaagcctttcaaggttgaagaccctggacaccaagccaggcctctacaccgcttacacggcccacctccaccgcgacaaggcgctgctcaaacggctgctcaagggcgtgcagaagaagcggccgtcagatgtgcagagcgccctgctgcggcggcacctcctggagctcacccagagcttcatcatccccctggagcactacatggccagcctcatgcccctgcagaagagcatcacgccctggaagactcccccccagatccagcccttcagccaggatgacttcctgcgtagcctggagcatgctgggccccagctcacctgcatcctcaagggcgactggctgggtctctacaggcggtttttcaagtccccccattttgatggctggtaccggcagcggcacaaggagatggccctgaagctggaggccctgcacctggaggctatctgtgaggcgaacatcgagacctggatgaaagacaagtccgaggtggaggtcgtggacctggtcctgaaacttcgtgagaagctggtgcgggctcagggccaccagctccctgtgaaggaggctacgctgcagcgggcacagctgtacatcgagacggtcatcggctccctgcccaaagacctgcaggctgtcttgtgccctccctagaacaaagccaagggccacggtcccagggccctaggtctgcctgagcctcccactccccagtggtggcggcactgggccaagcacacgctccccttccttggccccccgcccagactgcaggctccccttcctgcaccaccattgtctcagcagtaaaggcgacatttggaaccacaaaaaaaaaaaaaac

SEQ ID NO: 700577 - DNA, 238 bp, Homo sapiens
gactctagagggcctgtcttcgacggtgtctggaatgggacacggtatggggcttcataagcactgctggataaacggcaatcaatacatgagactgaagtctccccatatggggcttctttttctcttagagctgggtggactccatccataatgagatttttttaaacataaagaatctgatgtgatccgcacaccgtaaacatgcagttaaatttcttatatgagaagcatgtat

SEQ ID NO: 700578 - DNA, 1027 bp, Homo sapiens
  misc_feature (551)..(551): n is a, c, g, or t
taaattttaaatcactgggttgggtatttttctgacaaagattaagaaaaagaaaaaaaaattatttgtggggcaaactgttcaaatttttatggtttccccttttacctcaatggtatcatagtactggggtttttttggttggttttattggtgtggccaaggtcttggggcatgatgctatctaatcatggttaacgtggtgagaacattttctgaagatgggaaagacaaatttatgttagctcacaaacgggcttaattatatatatggataaaaaactttttccatgggtggtcttaacacttttatttaaaaatgaaactggaaaaaaagtcccattgaactctctcttccttctccttttctttccttccctctccagagatgtgggtttctacagaaaccctagatttaaaatggtggctttaaaatatgcttgaaaccacctttaatttatccagaatgaatcagattggtcttttcctcaccaacttccctccaaaactgtgactttaaccaatatttttgtgcgcttgggatcctgggncccttttcccatttctcaagacgcatccaatccctctgtggacaacgggtcctacggcggttcatttagccaggcaggagattcctgaaggggattcaaacacggtgtaggggggagccattcccgtttgggttttatccgggtagccccggggagccccgtgttagggaaatacacgtgtgtaagatggaaaaacccggttaaaggagcagaggggctagacggagagaatatgtttccaaagttttggctttagaaaagacccgtttggataccgagactgtggggcccagaactttaatataggagataagaaatcaaggggattaaaaaggagatatattatacgcggggaaaaaaaaacgtggaggaatttcgatggttaaacataaaaaagaacaatctgagttaccaagcgccggcgcttttctttttttttcttttcttacgtgcatcttctccttttgggggggggg

SEQ ID NO: 700579 - DNA, 1933 bp, Homo sapiens
  misc_feature (671)..(671): n is a, c, g, or t
agcgggactgttctgaggagcggcccggacgcgcgccgcccccgcccgcgtttccccggcaacccgcggccgccgccatggacgcgctgttgggcacagggcctcgccgggctcgcggctgcctgggcgcggctggacccacgtcttcaggtcgcgcggcgcggaccccggcggcgccctgggcgcgcttctccgcctggctggagtgtgtgtgcgtggtcaccttcgacctggagctgggccaggcgctggagctggtgtatccgaacgacttccggctcacagacaaggagaaaagcagcatctgctacctgtcttttcccgactcgcactcaggctgccttggagacactcagttcagcttccgcatgcgccagtgtggagggcagaggagcccctggcatgccgacgacaggcactacaacagcagggcccctgtggcactgcagagggagccggcacactacttcggctacgtgtacttcaggcaggtgaaggacagctctgtgaagaggggctacttccagaagtctttggtgctggtgtcccgcttgccctttgtccggctgttccaagcgctgctaagcctcatcgcccccgagtactttgacaagctggcgccctgcctggaagcagtgtgcagtgagatcgaccagtggccggcgcctgcncctgggcagaccctgaacctacctgtcatgggcgttgttgtccaggtgcgcatcccatccagggtggacaagtccgagtccagtcctccgaagcagtttgaccaagagaacctgctgccagccccagtggttcttgctagcgtccacgagctggacctgttcaggtgcttccggcctgtgctgactcatatgcagacactgtgggagctcatgctcctcggggagcccctgctagtcctggcaccctcgcccgacgtgtcctcggagatggtgctggccttgaccagctgcctgcagcccctcaggttctgctgcgacttccgtccctacttcaccatccatgacagcgagttcaaggagttcaccacacgcacgcaggccccaggagacctgcctaagcaagtcaagctgaaaaagcctttcaaggttgaagaccctggacaccaagccaggcctctacaccgcttacacggcccacctccaccgcgacaaggcgctgctcaaacggctgctcaagggcgtgcagaagaagcggccgtcagatgtgcagagcgccctgctgcggcggcacctcctggagctcacccagagcttcatcatccccctggagcactacatggccagcctcatgcccctgcagaagagcatcacgccctggaagactcccccccagatccagcccttcagccaggatgacttcctgcgtagcctggagcatgctgggccccagctcacctgcatcctcaagggcgactggctgggtctctacaggcggtttttcaagtccccccattttgatggctggtaccggcagcggcacaaggagatggccctgaagctggaggccctgcacctggaggctatctgtgaggcgaacatcgagacctggatgaaagacaagtccgaggtggaggtcgtggacctggtcctgaaacttcgtgagaagctggtgcgggctcagggccaccagctccctgtgaaggaggctacgctgcagcgggcacagctgtacatcgagacggtcatcggctccctgcccaaagacctgcaggctgtcttgtgccctccctagaacaaagccaagggccacggtcccagggccctaggtctgcctgagcctcccactccccagtggtggcggcactgggccaagcacacgctccccttccttggccccccgcccagactgcaggctccccttcctgcaccaccattgtctcagcagtaaaggcgacatttggaaccacaaaaaaaaaaaaaac

SEQ ID NO: 700580 - DNA, 2026 bp, Homo sapiens
  misc_feature (671)..(671): n is a, c, g, or t
agcgggactgttctgaggagcggcccggacgcgcgccgcccccgcccgcgtttccccggcaacccgcggccgccgccatggacgcgctgttgggcacagggcctcgccgggctcgcggctgcctgggcgcggctggacccacgtcttcaggtcgcgcggcgcggaccccggcggcgccctgggcgcgcttctccgcctggctggagtgtgtgtgcgtggtcaccttcgacctggagctgggccaggcgctggagctggtgtatccgaacgacttccggctcacagacaaggagaaaagcagcatctgctacctgtcttttcccgactcgcactcaggctgccttggagacactcagttcagcttccgcatgcgccagtgtggagggcagaggagcccctggcatgccgacgacaggcactacaacagcagggcccctgtggcactgcagagggagccggcacactacttcggctacgtgtacttcaggcaggtgaaggacagctctgtgaagaggggctacttccagaagtctttggtgctggtgtcccgcttgccctttgtccggctgttccaagcgctgctaagcctcatcgcccccgagtactttgacaagctggcgccctgcctggaagcagtgtgcagtgagatcgaccagtggccggcgcctgcncctgggcagaccctgaacctacctgtcatgggcgttgttgtccaggtgcgcatcccatccagggtggacaagtccgagtccagtcctccgaagcagtttgaccaagagaacctgctgccagccccagtggttcttgctagcgtccacgagctggacctgttcaggtgcttccggcctgtgctgactcatatgcagacactgtgggagctcatgctcctcggggagcccctgctagtcctggcaccctcgcccgacgtgtcctcggagatggtgctggccttgaccagctgcctgcagcccctcaggttctgctgcgacttccgtccctacttcaccatccatgacagcgagttcaaggagttcaccacacgcacgcaggccccaccaaacgtggtcctgggagtcacaaaccctttctttatcaaaacactccagcactggccccacatcctccgagtcggggagcccaagatgtcaggagacctgcctaagcaagtcaagctgaaaaagcctttcaaggttgaagaccctggacaccaagccaggcctctacaccgcttacacggcccacctccaccgcgacaaggcgctgctcaaacggctgctcaagggcgtgcagaagaagcggccgtcagatgtgcagagcgccctgctgcggcggcacctcctggagctcacccagagcttcatcatccccctggagcactacatggccagcctcatgcccctgcagaagagcatcacgccctggaagactcccccccagatccagcccttcagccaggatgacttcctgcgtagcctggagcatgctgggccccagctcacctgcatcctcaagggcgactggctgggtctctacaggcggtttttcaagtccccccattttgatggctggtaccggcagcggcacaaggagatggccctgaagctggaggccctgcacctggaggctatctgtgaggcgaacatcgagacctggatgaaagacaagtccgaggtggaggtcgtggacctggtcctgaaacttcgtgagaagctggtgcgggctcagggccaccagctccctgtgaaggaggctacgctgcagcgggcacagctgtacatcgagacggtcatcggctccctgcccaaagacctgcaggctgtcttgtgccctccctagaacaaagccaagggccacggtcccagggccctaggtctgcctgagcctcccactccccagtggtggcggcactgggccaagcacacgctccccttccttggccccccgcccagactgcaggctccccttcctgcaccaccattgtctcagcagtaaaggcgacatttggaaccacaaaaaaaaaaaaaac

SEQ ID NO: 700581 - DNA, 2153 bp, Homo sapiens
  misc_feature (671)..(671): n is a, c, g, or t
agcgggactgttctgaggagcggcccggacgcgcgccgcccccgcccgcgtttccccggcaacccgcggccgccgccatggacgcgctgttgggcacagggcctcgccgggctcgcggctgcctgggcgcggctggacccacgtcttcaggtcgcgcggcgcggaccccggcggcgccctgggcgcgcttctccgcctggctggagtgtgtgtgcgtggtcaccttcgacctggagctgggccaggcgctggagctggtgtatccgaacgacttccggctcacagacaaggagaaaagcagcatctgctacctgtcttttcccgactcgcactcaggctgccttggagacactcagttcagcttccgcatgcgccagtgtggagggcagaggagcccctggcatgccgacgacaggcactacaacagcagggcccctgtggcactgcagagggagccggcacactacttcggctacgtgtacttcaggcaggtgaaggacagctctgtgaagaggggctacttccagaagtctttggtgctggtgtcccgcttgccctttgtccggctgttccaagcgctgctaagcctcatcgcccccgagtactttgacaagctggcgccctgcctggaagcagtgtgcagtgagatcgaccagtggccggcgcctgcncctgggcagaccctgaacctacctgtcatgggcgttgttgtccaggtgcgcatcccatccagggtggacaagtccgagtccagtcctccgaagcagtttgaccaagagaacctgctgccagccccagtggttcttgctagcgtccacgagctggacctgttcaggtgcttccggcctgtgctgactcatatgcagacactgtgggagctcatgctcctcggggagcccctgctagtcctggcaccctcgcccgacgtgtcctcggagatggtgctggccttgaccagctgcctgcagcccctcaggttctgctgcgacttccgtccctacttcaccatccatgacagcgagttcaaggagttcaccacacgcacgcaggccccaccaaacgtggtcctgggagtcacaaaccctttctttatcaaaacactccagcactggccccacatcctccgagtcggggagcccaagatgtcaggtcaggctcccggtgaggtgcagggggtgctgctcagaagcctcgttgagtgtggggccgcctcagagcccgtggggatggccagagctgcgggcactgaggcctggccaccgggcgtgtctcgtaggagacctgcctaagcaagtcaagctgaaaaagcctttcaaggttgaagaccctggacaccaagccaggcctctacaccgcttacacggcccacctccaccgcgacaaggcgctgctcaaacggctgctcaagggcgtgcagaagaagcggccgtcagatgtgcagagcgccctgctgcggcggcacctcctggagctcacccagagcttcatcatccccctggagcactacatggccagcctcatgcccctgcagaagagcatcacgccctggaagactcccccccagatccagcccttcagccaggatgacttcctgcgtagcctggagcatgctgggccccagctcacctgcatcctcaagggcgactggctgggtctctacaggcggtttttcaagtccccccattttgatggctggtaccggcagcggcacaaggagatggccctgaagctggaggccctgcacctggaggctatctgtgaggcgaacatcgagacctggatgaaagacaagtccgaggtggaggtcgtggacctggtcctgaaacttcgtgagaagctggtgcgggctcagggccaccagctccctgtgaaggaggctacgctgcagcgggcacagctgtacatcgagacggtcatcggctccctgcccaaagacctgcaggctgtcttgtgccctccctagaacaaagccaagggccacggtcccagggccctaggtctgcctgagcctcccactccccagtggtggcggcactgggccaagcacacgctccccttccttggccccccgcccagactgcaggctccccttcctgcaccaccattgtctcagcagtaaaggcgacatttggaaccacaaaaaaaaaaaaaac

SEQ ID NO: 700582 - DNA, 2164 bp, Homo sapiens
  misc_feature (734)..(734): n is a, c, g, or t
agcgggactgttctgaggagcggcccggacgcgcgccgcccccgcccgcgtttccccggcaacccgcggccgccgccatggacgcgctgttgggcacagggcctcgccgggctcgcggctgcctgggcgcggctggacccacgtcttcaggtcgcgcggcgcggaccccggcggcgccctgggcgcgcttctccgcctggctggagtgtgtgtgcgtggtcaccttcgacctggagctgggccaggcgctggagctggtgtatccgaacgacttccggctcacagacaaggagaaaagcagcatctgctacctgtcttttcccgactcgcactcaggctgccttggagacactcagttcagcttccgcatgcgccagtgtggagggcagaggagcccctggcatgccgacgacaggcactacaacagcagggcccctgtggcactgcagagggagccggcacactacttcggctacgtgtacttcaggcaggtgaaggacagctctgtgaagaggggctacttccagatcaggcgttcctggggcagctgtcctgtgaagttggtgggacgtgctaccctgggccagctccagtctttggtgctggtgtcccgcttgccctttgtccggctgttccaagcgctgctaagcctcatcgcccccgagtactttgacaagctggcgccctgcctggaagcagtgtgcagtgagatcgaccagtggccggcgcctgcncctgggcagaccctgaacctacctgtcatgggcgttgttgtccaggtgcgcatcccatccagggtggacaagtccgagtccagtcctccgaagcagtttgaccaagagaacctgctgccagccccagtggttcttgctagcgtccacgagctggacctgttcaggtgcttccggcctgtgctgactcatatgcagacactgtgggagctcatgctcctcggggagcccctgctagtcctggcaccctcgcccgacgtgtcctcggagatggtgctggccttgaccagctgcctgcagcccctcaggttctgctgcgacttccgtccctacttcaccatccatgacagcgagttcaaggagttcaccacacgcacgcaggcccccactggccccacatcctccgagtcggggagcccaagatgtcaggtcaggctcccggtgaggtgcagggggtgctgctcagaagcctcgttgagtgtggggccgcctcagagcccgtggggatggccagagctgcgggcactgaggcctggccaccgggcgtgtctcgtaggagacctgcctaagcaagtcaagctgaaaaagcctttcaaggttgaagaccctggacaccaagccaggcctctacaccgcttacacggcccacctccaccgcgacaaggcgctgctcaaacggctgctcaagggcgtgcagaagaagcggccgtcagatgtgcagagcgccctgctgcggcggcacctcctggagctcacccagagcttcatcatccccctggagcactacatggccagcctcatgcccctgcagaagagcatcacgccctggaagactcccccccagatccagcccttcagccaggatgacttcctgcgtagcctggagcatgctgggccccagctcacctgcatcctcaagggcgactggctgggtctctacaggcggtttttcaagtccccccattttgatggctggtaccggcagcggcacaaggagatggccctgaagctggaggccctgcacctggaggctatctgtgaggcgaacatcgagacctggatgaaagacaagtccgaggtggaggtcgtggacctggtcctgaaacttcgtgagaagctggtgcgggctcagggccaccagctccctgtgaaggaggctacgctgcagcgggcacagctgtacatcgagacggtcatcggctccctgcccaaagacctgcaggctgtcttgtgccctccctagaacaaagccaagggccacggtcccagggccctaggtctgcctgagcctcccactccccagtggtggcggcactgggccaagcacacgctccccttccttggccccccgcccagactgcaggctccccttcctgcaccaccattgtctcagcagtaaaggcgacatttggaaccacaaaaaaaaaaaaaac

SEQ ID NO: 700583 - DNA, 357 bp, Homo sapiens
tggtgttgttttgcatttcacggggctgtggccggatttgctggacgcattaacagtgtggtgttgccggtcggtaaaaataaaattacggtactgagtattctgcaggcatgtatctccgtggcactgaccatggtgattgcattgtgggccagcgctgctctcgaaacccgcctgatgcaattgcctactgcacacatgtcgctcaaagtggtgctttcgagagtaggccgtgcgttgctgattctgctggccttattgatcagcctcaccatagtgggtattgatcttactgtattgtctgtttttggtggcgcattgggcgtgggacttgggtttggtttgcagaaaattgcc

SEQ ID NO: 700584 - DNA, 2173 bp, Homo sapiens
  misc_feature (818)..(818): n is a, c, g, or t
agcgggactgttctgaggagcggcccggacgcgcgccgcccccgcccgcgtttccccggcaacccgcggccgccgccatggacgcgctgttgggcacagggcctcgccgggctcgcggctgcctgggcgcggctggacccacgtcttcaggtcgcgcggcgcggaccccggcggcgccctgggcgcgcttctccgcctggctggagtgtgtgtgcgtggtcaccttcgacctggagctgggccaggcgctggagctggtgtatccgaacgacttccggctcacagacaaggagaaaagcagcatctgctacctgtcttttcccgactcgcactcaggctgccttggagacactcagttcagcttccgcatgcgccagtgtggagggcagaggagcccctggcatgccgacgacaggcactacaacagcagggcccctgtggcactgcagagggagccggcacactacttcggctacgtgtacttcaggcaggtgaaggacagctctgtgaagaggggctacttccagaaggccctagggtccagccccaccggccgccacccagggagttcagtgttgggttttctcctgtctaataattctggggtccaagtcaggcgttcctggggcagctgtcctgtgaagttggtgggacgtgctaccctgggccagctccagtctttggtgctggtgtcccgcttgccctttgtccggctgttccaagcgctgctaagcctcatcgcccccgagtactttgacaagctggcgccctgcctggaagcagtgtgcagtgagatcgaccagtggccggcgcctgcncctgggcagaccctgaacctacctgtcatgggcgttgttgtccaggtgcgcatcccatccagggtggacaagtccgagtccagtcctccgaagcagtttgaccaagagaacctgctgccagccccagtggttcttgctagcgtccacgagctggacctgttcaggtgcttccggcctgtgctgactcatatgcagacactgtgggagctcatgctcctcggggagcccctgctagtcctggcaccctcgcccgacgtgtcctcggagatggtgctggccttgaccagctgcctgcagcccctcaggttctgctgcgacttccgtccctacttcaccatccatgacagcgagttcaaggagttcaccacacgcacgcaggccccaccaaacgtggtcctgggagtcacaaaccctttctttatcaaaacactccagcactggccccacatcctccgagtcggggagcccaagatgtcaggagacctgcctaagcaagtcaagctgaaaaagcctttcaaggttgaagaccctggacaccaagccaggcctctacaccgcttacacggcccacctccaccgcgacaaggcgctgctcaaacggctgctcaagggcgtgcagaagaagcggccgtcagatgtgcagagcgccctgctgcggcggcacctcctggagctcacccagagcttcatcatccccctggagcactacatggccagcctcatgcccctgcagaagagcatcacgccctggaagactcccccccagatccagcccttcagccaggatgacttcctgcgtagcctggagcatgctgggccccagctcacctgcatcctcaagggcgactggctgggtctctacaggcggtttttcaagtccccccattttgatggctggtaccggcagcggcacaaggagatggccctgaagctggaggccctgcacctggaggctatctgtgaggcgaacatcgagacctggatgaaagacaagtccgaggtggaggtcgtggacctggtcctgaaacttcgtgagaagctggtgcgggctcagggccaccagctccctgtgaaggaggctacgctgcagcgggcacagctgtacatcgagacggtcatcggctccctgcccaaagacctgcaggctgtcttgtgccctccctagaacaaagccaagggccacggtcccagggccctaggtctgcctgagcctcccactccccagtggtggcggcactgggccaagcacacgctccccttccttggccccccgcccagactgcaggctccccttcctgcaccaccattgtctcagcagtaaaggcgacatttggaaccacaaaaaaaaaaaaaac

SEQ ID NO: 700585 - DNA, 2058 bp, Homo sapiens
  misc_feature (628)..(628): n is a, c, g, or t
agcgggactgttctgaggagcggcccggacgcgcgccgcccccgcccgcgtttccccggcaacccgcggccgccgccatggacgcgctgttgggcacagggcctcgccgggctcgcggctgcctgggcgcggctggacccacgtcttcaggtcgcgcggcgcggaccccggcggcgccctgggcgcgcttctccgcctggctggagtgtgtgtgcgtggtcaccttcgacctggagctgggccaggcgctggagctggtgtatccgaacgacttccggctcacagacaaggaggctgccttggagacactcagttcagcttccgcatgcgccagtgtggagggcagaggagcccctggcatgccgacgacaggcactacaacagcagggcccctgtggcactgcagagggagccggcacactacttcggctacgtgtacttcaggcaggtgaaggacagctctgtgaagaggggctacttccagaagtctttggtgctggtgtcccgcttgccctttgtccggctgttccaagcgctgctaagcctcatcgcccccgagtactttgacaagctggcgccctgcctggaagcagtgtgcagtgagatcgaccagtggccggcgcctgcncctgggcagaccctgaacctacctgtcatgggcgttgttgtccaggtgcgcatcccatccagggtggacaagtccgagtccagtcctccgaagcagtttgaccaagagaacctgctgccagccccagtggttcttgctagcgtccacgagctggacctgttcaggtgcttccggcctgtgctgactcatatgcagacactgtgggagctcatgctcctcggggagcccctgctagtcctggcaccctcgcccgacgtgtcctcggagatggtgctggccttgaccagctgcctgcagcccctcaggttctgctgcgacttccgtccctacttcaccatccatgacagcgagttcaaggagttcaccacacgcacgcaggcccccactggccccacatcctccgagtcggggagcccaagatgtcaggtcaggctcccggtgaggtgcagggggtgctgctcagaagcctcgttgagtgtggggccgcctcagagcccgtggggatggccagagctgcgggcactgaggcctggccaccgggcgtgtctcgtaggagacctgcctaagcaagtcaagctgaaaaagcctttcaaggttgaagaccctggacaccaagccaggcctctacaccgcttacacggcccacctccaccgcgacaaggcgctgctcaaacggctgctcaagggcgtgcagaagaagcggccgtcagatgtgcagagcgccctgctgcggcggcacctcctggagctcacccagagcttcatcatccccctggagcactacatggccagcctcatgcccctgcagaagagcatcacgccctggaagactcccccccagatccagcccttcagccaggatgacttcctgcgtagcctggagcatgctgggccccagctcacctgcatcctcaagggcgactggctgggtctctacaggcggtttttcaagtccccccattttgatggctggtaccggcagcggcacaaggagatggccctgaagctggaggccctgcacctggaggctatctgtgaggcgaacatcgagacctggatgaaagacaagtccgaggtggaggtcgtggacctggtcctgaaacttcgtgagaagctggtgcgggctcagggccaccagctccctgtgaaggaggctacgctgcagcgggcacagctgtacatcgagacggtcatcggctccctgcccaaagacctgcaggctgtcttgtgccctccctagaacaaagccaagggccacggtcccagggccctaggtctgcctgagcctcccactccccagtggtggcggcactgggccaagcacacgctccccttccttggccccccgcccagactgcaggctccccttcctgcaccaccattgtctcagcagtaaaggcgacatttggaaccacaaaaaaaaaaaaaac

SEQ ID NO: 700586 - DNA, 2339 bp, Homo sapiens
  misc_feature (685)..(685): n is a, c, g, or t
  misc_feature (713)..(713): n is a, c, g, or t
  misc_feature (909)..(909): n is a, c, g, or t
agcgggactgttctgaggagcggcccggacgcgcgccgcccccgcccgcgtttccccggcaacccgcggccgccgccatggacgcgctgttgggcacagggcctcgccgggctcgcggctgcctgggcgcggctggacccacgtcttcaggtcgcgcggcgcggaccccggcggcgccctgggcgcgcttctccgcctggctggagtgtgtgtgcgtggtcaccttcgacctggagctgggccaggcgctggagctggtgtatccgaacgacttccggctcacagacaaggagaaaagcagcatctgctacctgtcttttcccgactcgcactcaggctgccttggagacactcagttcagcttccgcatgcgccagtgtggagggcagaggagcccctggcatgccgacgacaggcactacaacagcagggcccctgtggcactgcagagggagccggcacactacttcggctacgtgtacttcaggcaggtgaaggacagctctgtgaagaggggctacttccagaaggccctagggtccagccccaccggccgccacccagggagttcagtgttgggttttctcctgtctaataattctggggtccaagtcaggcgttcctggggcagctgtcctgtgaagttggtgggacgtgctaccctgggccagctcccaggtgagcntggcttcggtggtccccgtgggctcctnagtggcgagggtgaggcctggcactgggcctctaactggccccgtggccctgcagtctttggtgctggtgtcccgcttgccctttgtccggctgttccaagcgctgctaagcctcatcgcccccgagtactttgacaagctggcgccctgcctggaagcagtgtgcagtgagatcgaccagtggccggcgcctgcncctgggcagaccctgaacctacctgtcatgggcgttgttgtccaggtgcgcatcccatccagggtggacaagtccgagtccagtcctccgaagcagtttgaccaagagaacctgctgccagccccagtggttcttgctagcgtccacgagctggacctgttcaggtgcttccggcctgtgctgactcatatgcagacactgtgggagctcatgctcctcggggagcccctgctagtcctggcaccctcgcccgacgtgtcctcggagatggtgctggccttgaccagctgcctgcagcccctcaggttctgctgcgacttccgtccctacttcaccatccatgacagcgagttcaaggagttcaccacacgcacgcaggcccccactggccccacatcctccgagtcggggagcccaagatgtcaggtcaggctcccggtgaggtgcagggggtgctgctcagaagcctcgttgagtgtggggccgcctcagagcccgtggggatggccagagctgcgggcactgaggcctggccaccgggcgtgtctcgtaggagacctgcctaagcaagtcaagctgaaaaagcctttcaaggttgaagaccctggacaccaagccaggcctctacaccgcttacacggcccacctccaccgcgacaaggcgctgctcaaacggctgctcaagggcgtgcagaagaagcggccgtcagatgtgcagagcgccctgctgcggcggcacctcctggagctcacccagagcttcatcatccccctggagcactacatggccagcctcatgcccctgcagaagagcatcacgccctggaagactcccccccagatccagcccttcagccaggatgacttcctgcgtagcctggagcatgctgggccccagctcacctgcatcctcaagggcgactggctgggtctctacaggcggtttttcaagtccccccattttgatggctggtaccggcagcggcacaaggagatggccctgaagctggaggccctgcacctggaggctatctgtgaggcgaacatcgagacctggatgaaagacaagtccgaggtggaggtcgtggacctggtcctgaaacttcgtgagaagctggtgcgggctcagggccaccagctccctgtgaaggaggctacgctgcagcgggcacagctgtacatcgagacggtcatcggctccctgcccaaagacctgcaggctgtcttgtgccctccctagaacaaagccaagggccacggtcccagggccctaggtctgcctgagcctcccactccccagtggtggcggcactgggccaagcacacgctccccttccttggccccccgcccagactgcaggctccccttcctgcaccaccattgtctcagcagtaaaggcgacatttggaaccacaaaaaaaaaaaaaac

SEQ ID NO: 700587 - DNA, 101 bp, Homo sapiens
aaaatgggcttcgggtacgcatcagctcattgcttctttccatgtgtttcttgctcattcagggtcactgcagctcgacattctgtaaatccatggtcata

SEQ ID NO: 700588 - DNA, 2018 bp, Homo sapiens
  misc_feature (588)..(588): n is a, c, g, or t
agcgggactgttctgaggagcggcccggacgcgcgccgcccccgcccgcgtttccccggcaacccgcggccgccgccatggacgcgctgttgggcacagggcctcgccgggctcgcggctgcctgggcgcggctggacccacgtcttcaggtcgcgcggcgcggaccccggcggcgccctgggcgcgcttctccgcctggctggagtgtgtgtgcgtggtcaccttcgacctggagctgggccaggcgctggagctggtgtatccgaacgacttccggctcacagacaaggagaaaagcagcatctgctacctgtcttttcccgactcgcactcaggctgccttggagacactcagttcagcttccgcatgcgccagtgtggagggcagaggagcccctggcatgccgacgacaggcactacaacagcagggcccctgtggcactagtctttggtgctggtgtcccgcttgccctttgtccggctgttccaagcgctgctaagcctcatcgcccccgagtactttgacaagctggcgccctgcctggaagcagtgtgcagtgagatcgaccagtggccggcgcctgcncctgggcagaccctgaacctacctgtcatgggcgttgttgtccaggtgcgcatcccatccagggtggacaagtccgagtccagtcctccgaagcagtttgaccaagagaacctgctgccagccccagtggttcttgctagcgtccacgagctggacctgttcaggtgcttccggcctgtgctgactcatatgcagacactgtgggagctcatgctcctcggggagcccctgctagtcctggcaccctcgcccgacgtgtcctcggagatggtgctggccttgaccagctgcctgcagcccctcaggttctgctgcgacttccgtccctacttcaccatccatgacagcgagttcaaggagttcaccacacgcacgcaggcccccactggccccacatcctccgagtcggggagcccaagatgtcaggtcaggctcccggtgaggtgcagggggtgctgctcagaagcctcgttgagtgtggggccgcctcagagcccgtggggatggccagagctgcgggcactgaggcctggccaccgggcgtgtctcgtaggagacctgcctaagcaagtcaagctgaaaaagcctttcaaggttgaagaccctggacaccaagccaggcctctacaccgcttacacggcccacctccaccgcgacaaggcgctgctcaaacggctgctcaagggcgtgcagaagaagcggccgtcagatgtgcagagcgccctgctgcggcggcacctcctggagctcacccagagcttcatcatccccctggagcactacatggccagcctcatgcccctgcagaagagcatcacgccctggaagactcccccccagatccagcccttcagccaggatgacttcctgcgtagcctggagcatgctgggccccagctcacctgcatcctcaagggcgactggctgggtctctacaggcggtttttcaagtccccccattttgatggctggtaccggcagcggcacaaggagatggccctgaagctggaggccctgcacctggaggctatctgtgaggcgaacatcgagacctggatgaaagacaagtccgaggtggaggtcgtggacctggtcctgaaacttcgtgagaagctggtgcgggctcagggccaccagctccctgtgaaggaggctacgctgcagcgggcacagctgtacatcgagacggtcatcggctccctgcccaaagacctgcaggctgtcttgtgccctccctagaacaaagccaagggccacggtcccagggccctaggtctgcctgagcctcccactccccagtggtggcggcactgggccaagcacacgctccccttccttggccccccgcccagactgcaggctccccttcctgcaccaccattgtctcagcagtaaaggcgacatttggaaccacaaaaaaaaaaaaaac

SEQ ID NO: 700589 - DNA, 129 bp, Homo sapiens
gaaggagctcactggggtccgataactgggcaaataccctaggagttcaaggttataaacaccggtatgaacaaagcatgctttcagctgcagacggtgaatctccgggcttttaagtcgaagtttata

SEQ ID NO: 700590 - DNA, 459 bp, Homo sapiens
  misc_feature (276)..(277): n is a, c, g, or t
  misc_feature (283)..(283): n is a, c, g, or t
  misc_feature (331)..(331): n is a, c, g, or t
  misc_feature (353)..(353): n is a, c, g, or t
  misc_feature (355)..(355): n is a, c, g, or t
  misc_feature (367)..(368): n is a, c, g, or t
  misc_feature (372)..(372): n is a, c, g, or t
  misc_feature (383)..(383): n is a, c, g, or t
  misc_feature (432)..(432): n is a, c, g, or t
tacttccacagggaaacgggcatacactgggagaagaaggtgtgggtggtctcggtagtcacaccgggatgtaaccagcttcctacttgggagtcaggggagaattatacccggaccataaatgatgaccagggtttactcctctctgagacggtcgggggagctctccgaggtctgggagacttttagccagctggttgggaaatctggctgagggcacattctttatcaacaagacggagatggaggactttcccggctttcctcacgggggcnngcggtnggatacatctcgccattaccggccactctctagcatccgggacactcnggatgtcatggcgtacaataantngaacgtgtccannggcntcgggtagatnatccttccttcccatatgagagcttcacttttccagagctcatgagaanggggtcctacaaccctggggaaaagta

SEQ ID NO: 700591 - DNA, 178 bp, Homo sapiens
ccgcgtcgacgggatgaggaggaagcaaatgttgatggtagtacggcagctcgtttgccatgaagcggtaggtgctttgcaaagcatcgtatctggggaaggaaaagctgagctgcaccgcagacaccgggggaagaggcaggagttctgatgctgtggtcgacgcggccgcgattta

SEQ ID NO: 700592 - DNA, 106 bp, Homo sapiens
cattggtccgagagaaattaggcctacccgccgcagtactgatcattctattgccccctctattgatccccagcctccaatagtatctcatcaacaagccggacta

SEQ ID NO: 700593 - DNA, 262 bp, Homo sapiens
  misc_feature (229)..(229): n is a, c, g, or t
  misc_feature (238)..(238): n is a, c, g, or t
atccacccgcaggacccaaacaccttctattagggccaaccttcaacattggggattacatttcaatatgagattgggaggggacaagtatcccaactatatcaggcagaatatatggcattgatatatatttgaattataacattctctataattcaggtgactgtaaattatgtcggatctgacctggggggatgtgttacctaagatttgactaggatcaggggcnctgtgtccngtccggggtgtatttctgtaggtc

SEQ ID NO: 700594 - DNA, 343 bp, Homo sapiens
gatagtatatcaacatggaaccattaacatttggactggtatagaaccataccagtttttgatataatatgcacatgccgcctccccaaacatgaacgccattataacccttaatggaataataggctccaaatactttcttctgcaagtacccaccctttcatatgtagttaaatgacacactagactgataaatcagttctttttcttaatttaaaagaaaaaagctttgagaaaggcaaacccccttctccatggtgaagactacatgcttgcatgtgaggactcaagcccagtggtctggctttgaatctgcttacaaactccaccttgtgttgctcag

SEQ ID NO: 700595 - DNA, 213 bp, Homo sapiens
ataggcatcccacctccaccaccgcctgtaggatttgggtttccagggacgcctccaccaccctgtgccccatctttgccaccttaccctgattttgctgcccctccacctcctcctccaccaccagcagctgactacccaactttgccaccaccttctttgtcccatgccaacaggagggtggaggaggaagaagaggatttttacagggtt

SEQ ID NO: 700596 - DNA, 1169 bp, Homo sapiens
  misc_feature (1169)..(1169): n is a, c, g, or t
cacgcaccggctcgcatcgcagagcgcacgcgccggagcggggccgagagaacgcagcgcaggtgagcagcccgagagcgagacaccagcgagaccgtccggcacctcccgacagatcgcgagccggctcctctaggcccggcacagccggtgcgtcgtgcttgcgtggctcggaccttggattacctcgcggtctggctccacggcgccgcgaatgtgctgcagctgtggcagcccagtgggtcgccggagtcagctcctcctcctccctgtctgcatccgatggatcccggggtgatgcgcgcaaggggctcggaggcccagaggctgcggcctcacccgataggcttaccgctcttggttgagtccacgactgcaatccgtctgcgtgggtcattgagacaaacgaaggcacccttcgtctctacctggccacttagagcaagcaagcggaaagcagcaggaatgtgatgcgacgaatcatgaggtagcttggcgattgctgcagcggtgtaacaaaagggtcgtagccttagcgaagcctacgcttccgcatccttacatagcatacagttataggctttgataagccctccctttgcataacaataaagcccttagagaccggcgactggttgtcccgggacggacgaggcgagagtctcctatttggttgtccacttctgacccggatgtgtgtatgcccatacttagaagacccgtcgttggtaacgcccgaagtcaaagccatgtggatcgtggagctcaattcatatcttttcgatcgtacagaatgggctctcaggatggagacaaccagttaaccgcactccggccggttggcgatgaaaaggcggtcgccaaccagtaggggtaggccagatccccaggtataaccgactggaatttaatcgccaaagttgacgcccggatatcaaaggccgtggcaagatacaccacaggggaaccagaaattggcgcagcatcagaaatgagaaccaccgcaagagtgagttgcgccactggtataggacgagggcaaaaggcaactggggtgcccgaaaacggaattaagcggttgacaagcggcacgaggaggccccccgtattggttggcagtagcaacggccacagaggtccgtacataagggtggaaagccccaaacacn

SEQ ID NO: 700597 - DNA, 245 bp, Homo sapiens
  misc_feature (41)..(41): n is a, c, g, or t
  misc_feature (65)..(65): n is a, c, g, or t
gataggcgcggtctacaacaaagattgagaaacgcgacagnctctgtggcaatggaggcgagaangctcagagaaactcgcccagaagaatttcccttagcgctgagggccaaggcacaacagttgtgccaggaattggcttggttgtgtggagcagctgggagctggggcctcaagagagcagaaatcctacccccgaagacagacaagagcgaggctatttgggagcgaatcctgacacccct

SEQ ID NO: 700598 - DNA, 338 bp, Homo sapiens
agcgcacgattcgcgtcactgctgctctacttcatccccgacacgccactccctcaggccctgacatcgagtttataaacgcctaggagtgtcaacatcgtccctgtcatcgccaagggtgaacactcaccctggagagagggtccacttcaaacagcggatcaccgtagatcttgctgtccaacgtcatcgacgtgtacccccggaaggaatttgatgaggactcggagcaccggctgctgaacgagaagtccggggagcatgatccccatttgctgtggttggcgagtgaccacaagtaccaggtcaacgggcaaggagggatcccttttggaacg

SEQ ID NO: 700599 - DNA, 493 bp, Homo sapiens
ataacttggtagctagctagcctaaaaacccaccagaggctatctatctgcttcttaacaccaacagcagccttcttatcctatacttacctaccagaggctacttgcctgcaaccgccgccttctcatctagatttggcctagtagtgccgctgctagcagcagctgccttatccacccggagcttgtgaatcctggcctggcgacgaatggtgtaccggcgcatggtctttgcatatgggtttagcttcaacatgattctcaagtatttcagtgggtccttctttaggactctgcgatggatctatacttgcgtggtgctcgaagggctcttaggatctctgggctacacaaggattctgctaagatctgtatcaatcatctagtgcatgggaagatcgtagtaactcttgagggaagcggcttaacgccaagtgccgtacaattcatccaacttccggaaagcacttacagtccaaatgcagaaacgtcc

SEQ ID NO: 700600 - DNA, 408 bp, Homo sapiens
  misc_feature (192)..(192): n is a, c, g, or t
gggaacaaaagctgtctgggcggccctcgaggcacaggcccttatggccggatccagctccagtgggtccgtccagccttatcccttaacctggtgtagccacacaggggtcaccatcctgcagacaggcccacactttcctctcactgtgactttaagacacaatttgctcattctgtgtgtgttagaagncccgtttcctcaagactctttatttttacacatttctctgtgacatgcctttgctgctgtccttggtccgaatgactcatcattcgtgtacttcttgctacttgctcactccagttcaaatgctgctccttctcggaagccttccctgttctctccctccctgcgccgatgattggtttttctgcctctgccccttcctcgctctgctgcggcgcc

SEQ ID NO: 700601 - DNA, 2685 bp, Homo sapiens
  misc_feature (183)..(183): n is a, c, g, or t
  misc_feature (209)..(210): n is a, c, g, or t
  misc_feature (213)..(213): n is a, c, g, or t
  misc_feature (216)..(216): n is a, c, g, or t
  misc_feature (234)..(234): n is a, c, g, or t
  misc_feature (317)..(317): n is a, c, g, or t
  misc_feature (461)..(461): n is a, c, g, or t
ggaccaagatgttggtatctgaaagcaaggagacggcatctggagatgtagacagcttctacaatttgctgatatacagatgggaatatgaagtgcaagtgtggaaccaggacttggtattaagcctttcccaacttgtgaatatagaatttgataatacactttgtgtattagcaatggttnttactaatgctaaaactttgaaagtnnatnttntaataaatgttgagtatnacatcatttacttgaggttcaaaaataattcattttaaattaagtagttttaatcagcttaaaagctatttaacccattttantaagcttgcagtttgtttctctgcatatgatattcttattagaaaacagaagtagctaaaagtttattattttaatcctatttaaatgttctttcaaatctctaataatttaaactttcctcagtgctccatgatacttttttngagactccatatcatgcttattttacctttttcaatttagagggattgttactagtcgatcaattagaatgaacctatgcacatttttatgtacacatatccagttatataattgcttcctagttgcattatatggcaaatgagattttgtacatggagttgacataatactttgtaaattgaattttttaaagaaataggcatttgataaccagcttggcaagtaactctactaacagatgttggtatagctatttaaagactacttcgtaagtagtatgattatttgaataaattacacattgtttagttttttaatacaactgctatatgactcttctgcttcctgataagaaaaggtatatgcaatgctaaaactgtagaagcccaatcaccagcagtttttaaaaaggtgataacttttattagctcttgtgggctatcaagagaattagaacaaaaccttgtgacttttaggtaagaaataggcatgatgataagctatgcagattattaaaaagcttgatacatttgatttttcattagatatgccattcatatcaagtaatgttcaagtatgataaaattattttggttgctttaaagcactgtttcccaaatctacctgatcataataatttaccaggaagcagaggagagctacttgtttaaaaatccacattcttggacccaatcctcagatgcacggattcagtcttcaggggaaactctgttttaaggggtatgttgtaatctaaagtaattggttcaggaggtgtcaataggttgaacttgtgagaaggcactgaatctgccatccacatcacatatagcagctattatgaaatcagctttcataggcctatttttaaaaggaatctgaaatttaattctattttgataaaactaagactgaaaataaccacttgtaaacattcctatgattgttactaaaatgtattttcatgtttaaaatgtttttggatattttgggttaataactactacattgaattgcatgttaaggtgcagaaataatacattaaaagattttcactttaaattaattagtaatattgagcgctcaccctgtgcgtggccttgtgctaaccattagcactgcatcatttcaattcttttataagggcattcaatactacaaaatcaacatgatttcataaggtgcaaataaaagttggtgacagatttaatataattttgatcacaatttacaaatgatctttgcaaatagtggtcagacggcattagtttttcccttagttaagctaaattaaagggactccatcctgttatgattatattattattattattattattatttttgaggtggagtttcactcttgttgcccaagctggagtgcaatggcgcgatctcggctcaccacaacatccgcctcctgggttcaagcgattctcctgcctcagcctcctgagtagctgggaatacaggcatgcgccactacacctggctaatttttgtatttttagttgagatggggtttttccacgttggtcaggctggtctcgaactcctgacctcaggtgatccgtccacctcagcctcccaaagagctgggattacaggtgtgagctaccgcgcctggccatgatgatattattaaacaccattattcacatttcaaataataacaatactttttgtttttcaaaaataaaatgcaatgttatataaagctataaactaagttctttatgatatttgagcaacaactcaggaatataacatataagggagatgttaatttaaaaatttccactacacttattatctattaaccaaagcttaaaattttgtattcttctgttagataagaccttttacccatttaatttgtctttaaggacagtcatttggcttctgaatgtttgaaacgattttaaaaaataagtagtgctatggttgtttctataattctaacctttgatagtaatcagaatgtattacatttcatttctgaatagcttttgaatttatgaaaaattattaacaatgaaaaattggtaattttattaagttatatgtgtttaaatattatattagcttatttctcttgcattaatagtactgctgtttttgttttgcttctttatatttatgtctagcttttatatgtaatttatctagtgtttataaaatgtgatttgtaataaatgttgttaaaatgaaaatggaaaaaaa

SEQ ID NO: 700602 - DNA, 396 bp, Homo sapiens
  misc_feature (138)..(138): n is a, c, g, or t
  misc_feature (141)..(141): n is a, c, g, or t
  misc_feature (316)..(316): n is a, c, g, or t
  misc_feature (356)..(356): n is a, c, g, or t
tttaaaaacacctttattagccaatatagtgatatatgataagttgttacacaaagtatacagtttgattagttttgatgtatataagcccggtgaagcctatcatcacagtcaagagagtgtggctgggtgccggtntcnacgcctgcgctcctagaactttaggaggctgaggcccactgattgcttgagctcaggagttcgagactggtctggccaacatgatgaaacctcatctctacaaaaaaatgcaaaaattagccaggactggtggcatgtgcctgtggtcccagctacttgggaagctgaagtgggntcatctgagcttgggaagttgaggctgtagcgagctgtgntcatgccactgcactctagcctgggcgacagagtgagacc

SEQ ID NO: 700603 - DNA, 439 bp, Homo sapiens
aattttttatcttactgcagtgaccaacatgtcgatgtgaaattcgcctttcgtcagggattcgataaaccaagtggatgtgtcatatattgccaaacattacaacatgagcagcagcaaagttgacaaccagttctacagtgtggaagtggagactcaaccttcacagttctcaagcgttaccagaatctaaagcctattggctctggggctcagggcatagttcggtaagcggaatggatttgctgtatttttaaagggaacacaccgtgtgcaactactagacacaaacacacaaacaaacaaaatccccaaaataaatagcataatttgggagggaaaaataatcctactgaagaaaaaaaaataacattatgagcattatgtttaatttgttatccacttgctaacaatatatacaacttggcttgtgaaaaaa

SEQ ID NO: 700604 - DNA, 498 bp, Homo sapiens
cttttggctatcatgaataatgttgctatgtacatggttgtacaaatatctttttgagaacctgctttcaagtcttttggatgtataatccagaagtggaattgctggatatgataatcctatttttaattttttttaggaactactatgctgttttctgtagcagctgcaccattttacattttcaccaaaagtgcaccagggctccaatttctccatatccttgccaacaccttttaaaatagtagcccccctaatctgtgtgaggagatacctcattgtggttttgacttgcattttcctaatgattagtgatgctgagcctctttttatatgcttgttagtcacttctatattgtgtttggagaaatgtctatacaagttctttgcctattttttattcaggctatttgtttgttgttgagttgtagctcagtggcatactcttgattttgaaatgtactacaatatctggaagcaaatatttcctcatgggta

SEQ ID NO: 700605 - DNA, 212 bp, Homo sapiens
  misc_feature (15)..(15): n is a, c, g, or t
  misc_feature (40)..(40): n is a, c, g, or t
  misc_feature (65)..(65): n is a, c, g, or t
  misc_feature (75)..(75): n is a, c, g, or t
  misc_feature (89)..(89): n is a, c, g, or t
  misc_feature (92)..(92): n is a, c, g, or t
  misc_feature (94)..(94): n is a, c, g, or t
  misc_feature (147)..(147): n is a, c, g, or t
  misc_feature (197)..(197): n is a, c, g, or t
  misc_feature (201)..(201): n is a, c, g, or t
  misc_feature (205)..(205): n is a, c, g, or t
gcagtttgacctgtnaaacaggactagttcaagtcaaganactaaggttgttgtatacacctggnggcatctctnattcagcttatccnttnantgggtatttcgcacaatgaggataaacttatgtcacccacttgagtggctganctaataatgtagacattatgcattctgtacttagtgaaatgtcagatganaatnactnatgaata

SEQ ID NO: 700606 - DNA, 457 bp, Homo sapiens
  misc_feature (55)..(55): n is a, c, g, or t
actaatactattagcatttagcgtagcgcatttgcatttccagagctctgatggnacgcctgcgtgccaggtaggaccaagaggttaatgaaagtttgatttttaaatcaatttatttgaattttccgcgctgcatgttccctggtttttggccaagcgggaagcaagcgtccccaataacataacaggttaaggtgtaacctgtgaagaacccactaaaaccacataaaaagaccccacacaataaatcaaacacggtattaacaccactaacaaatattcgtaacaggtgggttgtgtgtggatgctggcgtgtgtggttaaaacagggtaaaaaacagaaaaatggccgggccttacttaatttgggagctcccttaacagccggatccgggtaccttaatactgtatagtatacagtcttgtcgacgcggccgcgaatttagtagtagtaggc

SEQ ID NO: 700607 - DNA, 1024 bp, Homo sapiens
  misc_feature (1024)..(1024): n is a, c, g, or t
tggtggagccccctgtttttttttatggccccccacccgaaaaggggaccgcccgggggtggggggggtcccccaaaatcccggggggtcttttggttttccccccgggactggggggggggggggaaactcttgtggggtgcaccccatgggagaacacacctagaatattgatatgagacaaagcgagcactcgcacaaggaataaggaggcagccaaatcggggggcaccgggatgaaagacgtggacattcagaagaaggaaggaaggacatgccacagggggacaccgcatagagtgaatgggagcgctagtggaggattccctgactacacacccaccttgggccgcagcgctatattctccaccagtgaaggaagatgagcgcgaaaaaaaggggggaaatagcacagcgcaggcgaataaaccggaagaaaagacgcccggcacggcggagacagagagaaccaggaggggtggcgccacaacaaagcgataggagtaatcaagacacgacgaggaacaaataaacaaataatcaccaaccaacccaccaaaaatgacgatacatcgattcctcacccgaaagaaaacccatcaatcacaaaacgaacatggagacagcaacatatttcaaccagaaaaagggagcaaaaaacaatgccagcccacaaaaagatgtaagaacactccaaaaagtaaaagaaaagcacctactcatcagaacacaaagagaaacacagcaataaccaaggacatcagaagcggagcgaaagcaaaccagcgtcacacacacaaccaattccaaaacaaaaaaagagatggatgtaagtgaaactacaagaagacatcaatactggtataatcatataaaacaggggatgataaatcaagaaaacatagcaacaccaacccagactaagagacacgaagcgatacagacaagagtgacagaccttacctcattatgatctatgacaaggaacaaaaagaagactacaaaacatcagacgtataaacan

SEQ ID NO: 700608 - DNA, 1217 bp, Homo sapiens
ggcctgtctccgggccatggctgttcactgcagggctggtggtgcgtgcaccgctcccctgtgactgcatcctgcctccctgtgggacctgcctgtggcagtgaatggaatggtgtgtgtgccccatgccccatgtgccgtggaatggatgccagcgtgcctgacaaatgcatgaaacaccctgctgctccactgtagccccttgctcgctgtccttgctctcagaagtcccggtcccatgtagatagaggggggcgcatcttaccaaagcatttcctcctggaggctacgcctgatgtgctcccagtcaggctggctggtagggagctttgcctgccccggggataccctctgccagccgctggaacgtgggaatgctggcgacagactgtgtccatctttcccaccttcatagcacggactcacccggacccgactggctgggcattcgctgctagccgagcggttctggccggtggcgtctcggtgatcttgtcctatgcgtgagtctgcacctggctctacagccacatcctatgtactcctgcgatctctcaggcagccaatgctagaagtcctgggagtttgcgactggtcactatagcgcgcatcagtccatttccaggccctggcgctccacgggaacacacggtcccacacccaacaaccccgcaaagtccatcatgtacacgccacgctgcacacgccgctgctccgtcaaccccggatgccccaacggccccccacgatccccccagacctacagatttcccttggcgatgaagcttggcggttgcaccctcccacctatgcgctgccacctaacgcctaccgtggttcccgcgcaagccgacaagtcctcgccgcctctagtccatcctggctggcgagtccgtatgcatgttcgcctcttggcaaacacctgcagcacccgctctgcacgtcgccattcatgcgcgcggcgaacgagcacacgacactaccaacaccacaccacagcagctgccactcaccccacccgctcgccacacaactaatcaaccacacgcaaccacaaccaactcccacaccaacacaccataccacttcaacaccaccccccaccgctattacgacacgtcaatacacccaaaccctcaacaccacctcaactacccaccccctactccccttctctacgctctctccagcagtcattatctcccccctctacacct

SEQ ID NO: 700609 - DNA, 129 bp, Homo sapiens
acatttcacttctctgctaagaagtgttcacgacccctcatgacacgaattcaaaagatgtagtaatgtttttttaaatagaaaatgaagcctaacctttcctttaccatggatattaaagccctttac

SEQ ID NO: 700610 - DNA, 1335 bp, Homo sapiens
ggtacttgtacatctgctcatgttctagacaagtccgggagtctcggtgcgaacccttcatctactcacgtgctgatttccgttcgacgaatgaacatatgagctcttagtagaacagatctttcctaaacccgtcagctgcgtggctgcgacctgagttggttcctattcctacggtgctggcatatgctgtcaggatttccactatctgttctcgtgtaactaggttcatgtcgggccttccttcatgccagtcctgttgcctagtcgtctggattcccccttcaggtgatcgactacagtttgctgctagctccagatcaccatgtctcgaaatgcaactaggaagtcagtatgtacagctagagttgtaaagatgtgtttactatccatcgaggtgcagagctctgtgtgggcggcttcccgattgctgaggtggcaataggagcatggaccgttaggtaggaggggatgctactggaagatgactaataatactggatgtcactgtcgaattcgatggcctctgccgtctacggggcccaagtttctagatccaagctgttacgaccagagctatcacaggagttcttccttcacctgtgtggggccccaaccgaggtctagcgaagccctgagtgaaaggtactaaccgtacattggttaggagcgtagagatcggaagtttccatccactacgagtagagcatgtttgggcgttcagaggttagcacttcacaccatgtcagcttgaccccatcttggggcataagttgggggagggtcccttgcaaggatctgatgaggacggtcctacacgcacatgggatcgcttgaccctggcccttcctttcattgaactcgaccaagatgaataagagtctcgaggcattccttgtgccgctttccgtcatcttaagagcatacgcttgtcaaattggtcctaacccacaatgtaacaaatcacacagcggctcatacaccccaaacgccagtacaattcctacattccgggccatggaacggaccattatacagtttcctacactgaagcactgcatgggctgctcgtttcagtgccgaccgctaacggagtcctaaacaccacatggtggcgcacagacctgaagggccaagaagagccgaaccattaaccattacacaagagccacacgccccgtaacaacattactttcatggaagtcattactctgtacgactaaagattgggcacctttccatagtacgaaaggtcatgaagtcaattcaccaatctggcttgaatatctgagatcacacattcttatccacgttaaaccttggtagagacaacgc

SEQ ID NO: 700611 - DNA, 955 bp, Homo sapiens
ggtactggtccggaatttagggatcctgaagctgacaccccacctacggggacttcagcatctggtgtcggccaccatgaggggggtcaccacctgcctgcgcttcccgggccagctgaacgcagacctgctcaagcgggcggtgaacatggtgcccttccctcgggctgcacttcttcatgcccggctttctgcagcccctgaaccatgccggggcagctcagctagtaccgggcgctcacggtgggctcggagctcacctcagcagatgttcgactccaagaacatgatggccgcgtgcgagccgggccacggtcgcatacctgatcggtgggtgcctatcttcctggggccagcatgctccatgaatggaggtggacgagacagatgcatcaatcgtgctagaacaatgaactagcaagcgtacttcgatgggcagtggatccccaacgaacgtgaaggactggtccgatgctgcgacatcccgaccccgcggcctggaatatgtcggtcaccttcatcggtaagagccacggctcatccaggagctgttcaagcgcgtctccgagcagttcacggccatgtgccgtgcgcaaggccttccgtgcactgtgtacactgggctgagggcatggcacgagatggagttcaccgaggtcgagagctacatggaacgagctggtgtcctgaggtaccagcagtaccaaggacgcccacggcgaccgaacaaggggagtccgcagcggaggacggcgaagacgagggtttaagaccttctcagagtcactcgggcatccttagatggaagtgcctggttgtcctcaagccatggtcttgctacttggtaacgtatgggggctcaggtttgcctctggttacaaatttccactggttgatgttatgaatgtggaactctctaatattcccgtattgctgtgagagtatcaatctatta

SEQ ID NO: 700612 - DNA, 189 bp, Homo sapiens
ggagccgcagagactcagcacagaaacacgccccgaggaacctgattaaccacttggtgctgagggcggctggagggcctgtcagcacagccagagccccatgagcgccggagcctgacccctctcaaatcactgcagccccgcagcctccagggctgcgacgggaggacttctctcagggtgactggg

SEQ ID NO: 700613 - DNA, 292 bp, Homo sapiens
ccaaacaaaactctttgacaatatttaggtgtgagtaggggagttgataaatgatgttttctctatactttgtctctgtgtctttttcttttccaagtctctcgttccaccttatgagaaacacccacaggtgtggaggggcaacccaccccttcaatgagacagattcctttctagctctgcaaccctccatagctctcatgtcctccaaatcctgctttgtaagcattgagatgtttatgtgtatgcatatctaaaagcacagcacttgattctttaccttgtctatgat

SEQ ID NO: 700614 - DNA, 425 bp, Homo sapiens
tagatcttcgcgatcccactctgaggttactatgcttgtgagttcccgcagcctctcaccagagttcctatacgagaccacatcttcatctgagacggcccaaccttgagccccaactcagaggtctgaggctccatttgtaccgaacaccctgtaggctgaagctcctatgtcctgaggtaactttcccagcacggtggttggtacccaggcctggtcagaacagggacatgcagggtgacacaggacagagggtcccagctgcaacctcacccacgcaatcatatagtagcagcacagggcagtccggcacgggattctcaggcctaatgccgagcctcgagggctgagagcggaagacaggcaggctacgggagttgcagcaggatgttcgaaagggtacgagcatgaatcgtactcatggt

SEQ ID NO: 700615 - DNA, 694 bp, Homo sapiens
cgaggcgctgggcacagttgctgtcccctttgacgatgatgaccagattgttgggggctacacctgtgaggagcaattctctcccctaccaagtgtccctgccattctggactcccaacttctgcgcgtggctcccttcatccagtcgaaacagtggggttggataattcagccaggctcacgttgctaccacgaccccgcatcccagtgtggaaagctggggagagcaacaacagttacataaggtccctggggaggggggaaattgaggcaaggtttcaattcaaaatcggccggggcccaaaaaatcccatcgcggcccaaccccttaaaaatttaccaaccaacggggaacagcatccttgggaaccaaattggaaccattcattggcctgaatccaaaaaccttcttcccttcaacccttgccctgtgcaattcaaattgccccccggctgttgtacccagcccagtcctccttcttgacccccaacacggccccccgtcccgaggcctagctttggccaacgtggaagttagccctccaatccttcccgggccttggggggcaaaacatcctccatgaaggcatttggggaatgccttgaacttatccccagggaacgaaggcctgacagcttggccttggaattgcttccccggctgcgtgaaccccaagggctttggatgtggtgc

SEQ ID NO: 700616 - DNA, 1127 bp, Homo sapiens
  misc_feature (90)..(90): n is a, c, g, or t
cagtctctttccttttttgctgatgtgtgctctctctctctctttctctctctctctctctctctctctctctctctctctctctgtcgngtcgtgtctcgtctctcgtctgtctctctctctgtgagggcatgtgtgttggaaaaaacgtcggagagatgcccaagaaccctgggatatttctatattttttgggaaaatagagaggagagaggaaatagcagcactcttagtcagttgtttgctgctgtaatctgcttcaattactaaagatggttgttgttttataaagacgatgttgctggatgggagaaggtagtatgttgctgatgctggtggagcagtgtgtggcagtcagttcggctcggcatgacgtgctggtgtgatgtagagtaatgtatgctcctaccatatgcacgtagaggcgtactaaataagcacggtacatatgtaggtcatacgttgtattatcatataattatttattagctgataccaaaaaaagaagagaaaacaacaaagtgcatttagacagaagaaagagagcagtgtggatggaagtcaggtttgctgcagaaaaggagaaacacaacgaagcaattagttcgcgtgagagagtaaatgactgagtgagcacagagtgggttcccccccagtaaggtgtggaggggggtgagtgataaattctgttgcgtgagaaagtaagttacaggatagatagtgagctggtgacaatcccttttgttgtatatctagagagagatacttgaaagtttgtagacagagaggcagggcaaatagcgagggatggaaggaaaaaaaaagcgagagtagttagggaagtacttaggaaccaagtgattgacacgcagggtgttggttgtattacacgcgtgacagcaagtttttctctttaggtacacggggcaattatgtctccgcggtccgcagggaggaaatgactgtggggggcactgtgggggggaattggacggagaaccaacaaaggggggggggatacaacgacagtggggggtgacttctcgcagggggcgagaaggagaagcactgggagggcacattaatgacaggatacaaggcacggggcagtgaagtgaacaagatgc

SEQ ID NO: 700617 - DNA, 264 bp, Homo sapiens
aagtcatgaccagttttaagtgttctttttcgttttttaaattgagacaggtttcgctctgttgcccagggtggagtgcagtggcacgataacagctcactatcacctcaaactcaagtgatgcacctgcttcagtctcccgggtagctaggactacaggcgtgtagcaccacacccagctaatttttaaaataatttgaagagacgaggtgagatctcgctatgttgcctaggctggtctcaaactcctggcctcaagctatc

SEQ ID NO: 700618 - DNA, 605 bp, Homo sapiens
ggtacccgcccgcagcgtgcgtccccctacgtgttctttacacgggcgctcggcatgtcagcattctcccttgatcacttcgggggtcaacacgccgcagagcgatgtttgtgtcgtcacgccacgccaggcatttcttatggtgactccggacaacatttgggacagcgcccttctcctgtctcagtcgggcagcccccatctctctcgggtcctagcacacagcatctcccacacttgcggggggaccttgatattctcccccaaaggccccctgggggttcttctggccacaacaaccccgacaatgtcgacactcccgagcagcaattactcccatgaactttgttgcacccacgagtcgcgaggtgatgacccctgagcccaatctcggcgtcctcctcataatcatgcgcacgactcggccacaacccccaagcactttcgaaccgtccttggcccccttacggaaaatgataggaggtcttccttcttcacatcgcctttcaccgagggattcttgctttcgaaggccccccgggacccggagatcccaccggggggaggggaacccaaggggattttaataaaactctaacataaca

SEQ ID NO: 700619 - DNA, 893 bp, Homo sapiens
gagtcgatgctcaagttccacatgtgtgtcacctagaggttataggcgctgtgtctgaggagtacatgtggtttatcacccagagtgtatgccagatcactccgcattggaacggatgaggaacttgagcctgccgctcaatcaattatactaggacaattataggcagtgctttccttgtcagttctctcataactagggtaattattctagcggctgtaaaataactggttggtctagcggagtccttttggcctatttcctttggacaatggcaagacgtccctatcagtcctggctgagctgtgggcgcagactaaaagatataggttatgtatgacggtgtatgaatgggtatctatcatctcatttgaaggcacatgaatgaattagaagaaatggagacagggttatgggttattattagtggtggcgattttgcaggagtatacttttaaaattgtaatgatcaatcatgtgttggggtcataatagcatggaagatctggatgcttacctatgccagtggcagtgagcaaaacaaatagtagttagcaaaactgtcgtaagaagcacattagaaaaattggatacgactctacattggtcgcactcattgggatttgcataattgcccccaaccatctcagtcccgagtcgataaagcatccaacgctgaatcaagggacctggaaaacactcccttttgtgagcagtctaaggggggagttccacttagccaactgaagcccaccgcggatcgacatagagcgcttaatcgaaacgggccttggttacctagaaaggaacaaggcacacgcctcgtcacaggtgacaatgaaccccaggcaagtgctccttgcttttgggccagcgctcgcggtgggtcaccg

SEQ ID NO: 700620 - DNA, 147 bp, Homo sapiens
cagtcttattctgcaccacagcctccgagtagtatggatatacaggtgccaccatgacgcccagctaattttcttatttttagtagtgatggggtttcaccatgctggccaggatgatctcgatctcctgacctcgtgatacaactg

SEQ ID NO: 700621 - DNA, 268 bp, Homo sapiens
ttgtgaagaaccacgtgagattgctgctataccatggtggactttaaaaacactgtatacttatgctacagtgaaatttctgaaaacatatacttctatcttcaaaaatcaattaaccttagcttcctgtaacttatttacttacactactgaattatttataacttatcgactcttgtactaacatttggcttaaaacacaagcaaggctgcccacggtggctcacacccataatatgcagcactttgggaagccggacaagaggat

SEQ ID NO: 700622 - DNA, 873 bp, Homo sapiens
agcggggggtgcttggtagtctgagacttcccggtgtgacgtgacggagatccagcagaacgctcctgagttccctgcccaaggactcgggccgtgagaacctgcgaatgttatcgtcagaagactcctatgaagggacgcgggccgtcctttttgagggcctgagtgtgccggggtcgcgatcactgacaggagatgtaggattgatccggatccgcatatatttccctgaacacgcttgttgtgacctccgtagttgatccttcgtcgatgcactaagatagtcaccaatctgggacggtgcagactggccttgacatgcgctctagaaccagagtgcgcagagacatctatttacatttcagaagccccagagaccaaatctttgtatcattgcgacccacgccactcagttacattggtttacctcgaaaaccactaagcaaggattgtcatccatctatcaaaggcatgtagggcccccgtcaagccaaagaaggggcacctcagtgaaggtcatctaatctttgcgataaaagccgtatcaaacgatgtattaacatgattcttaagatctatcattaaatctccatccactgaatagtttaaaatatcaagaccacgccccctcgtgaacgattatgaattatactctcggctttttaaaaaacttccccaagttgtgcactatcatttcccacaatcacaagattcgccgttttgaaacacagctattacaaattgcgattatgtccaaagccaatacaaaaccggtgatctcactgaagccaagctggctctcgcacactaatggcaattaatcgcaccactttacagctctcccattgaatggcgcgacccaagggctcggag

SEQ ID NO: 700623 - DNA, 258 bp, Homo sapiens
tttttaataatacctttgcaatttctattttcagagagagctatgtgcatacatattcaaggtcagtctagttaccctgatgttataaaacagctgatattttagattctagtagaaaataaaatcttctgaatttgattagcaattgattagcaccttactccggtttggatctttgaacatatacagaaagcctttgggaattatggtaactgaatttattaggaaagatcatggtaagaaagagtgtcgacgcgg

SEQ ID NO: 700624 - DNA, 174 bp, Homo sapiens
ccatgcaaatatagcatctggttttgaccatggatgcattacaatgctcaaacatgcatcactatattctagtctaagggaaaatcttacccatggccttatctcgcaatttagagggaaagcccacgatgaatttcacatacagtattcctttcttctaaattaactctcaaa

SEQ ID NO: 700625 - DNA, 826 bp, Homo sapiens
ccaggttctgcagtcagcaggcagatgatgcatatggagcgtagactgagtcgtcctccaggcgatgcaagttgagggagaaagggcgggcccgggaacagggctgaggctgaggtgggctccttgaaccgtaggatccagctgtttgaagcaagatgcgtggaccgtgctcaggagcgcctggtcactggcctgctaaaagctggaagcatagctgaaaaagctgctgatgagagtgagagaggtatgaaggttattgaaaaccgggccttaaaagatgacgaaaagatggcactccaggaaatccaactcaaagaagctaagcacattgcacgccgcaggcacgatcggacgtcatgaagaggtggctcgtaagtaggtgatcattgaaggcgacttggaacgcacagaggaacgagctgagcctggcaggagtccgtatgccgagagatggatgagcagcattcgcactgatggaccagaacctgaagtgtctgagtgctgctgcaagcaacagtaactcttcacacaagcagatacaactctgagggaagcaaactccacgcacttcttactgattacaactcaacggacgccgaaacccgtgctgagtatgctgagagatcgggcgccaagcggcacaagcaccaatgatggacagtgaagaataacctggaacatccaccagagcagtaggcacctcgtgacacaaaggatgctggaccaaaacgctgattgaccctgaactgtaatgtgaacggcccacaccaaactgactagtgatcctcacatgacacaaaacgccgatgtcgcgtgcgaacaatgc

SEQ ID NO: 700626 - DNA, 203 bp, Homo sapiens
ctgcagcctctgagaaccagtgttctggagactgagacatccaaggttggcggggggcacatctgggaaactgggaaactgacacttcctgccttatattgttgcagttgcaaagatcaaataccaaggttatgggaagatgttttgaagccccatataaatatgtaatttaatttattccaataaagactcattgcacaggc

SEQ ID NO: 700627 - DNA, 181 bp, Homo sapiens
gctcgactaaaaacaaacaaacaacagaaaaaacactcactgagcgctgggtgcagtggcatgcacctggtaatcctagctacttgggaggctgaggcaggagaattgcttgaaccgaggagttggagaccagcctgggcaacataatgagatcccatctaaaaaaaagaaaaagtcgacg

SEQ ID NO: 700628 - DNA, 1048 bp, Homo sapiens
ctagcattcaccatctcacttctaggaatactagtatagttcgctcacacctcatatcctccctactatgcctaaaaggaataatactatcgctgttcattatagctactctcataaccctcaagcacccacgtccctcttagccaatattgtgcctattgccatactagtcttcggccgcctgacgaagcacggtgggcctagccctacatagtctcaatctccaacacatatgggctagacatacgtacattaccctaaacctactccaatgctaagaactaatcgtcccaaccagattatatttactaccactgacagtgacttgccaagaagcacataatttgaatcaacacaaccacccacagaccattaattattagcatcatccccctacgtagttttttaaccaaatcaacaacaacctatgttagctggttgcccaatccttttcgcttccggagtcgccctaacaagcccgcgcctccataagtactaagactatactgacatctggtacccccctcaacaaatcaatggcacaggccactcgccggcattattccaggttgagaccactatgtacgcaaagaaagatctcctacctctctatacgaatctgcctacgaaatctcctttaatgaataaccattgcacgggcaccagaactaatcagtatcttatagtcttccttgcgaaaatgcgcacacgttattccacgagctggagcctatcatcttcgccgaggagggcacccgccaggaaaaggccctgaagggctaggagacaatccttcttagttgtagaccactatgtaggctccggtgcgctatccatcggacgtagttacctacccgcacgctagggtacgtaagcatgcaaattacaatatcgtgcacagaacaatcaagtcggacagaaagattaatgtcacagcggaatagagagtagcagctcgagcatgagcctgcagtcgaccagaggtaagatcggcacaacaaggaagatagggaatcgcgaaaacgcgacaggaaaaacacatggataa

SEQ ID NO: 700629 - DNA, 353 bp, Homo sapiens
  misc_feature (50)..(50): n is a, c, g, or t
  misc_feature (103)..(103): n is a, c, g, or t
  misc_feature (135)..(135): n is a, c, g, or t
  misc_feature (240)..(240): n is a, c, g, or t
  misc_feature (243)..(243): n is a, c, g, or t
  misc_feature (256)..(256): n is a, c, g, or t
ggaattagaccgtctccactggtgccatcaatgcctcaattcaactgatngcttcctagaggtgcactgtccccaggtgtgagtggatctttctagacccttngctgtgccattattctacattcattatgtctnggaggttgctgtatgtttaacagataaatctatttgcatcttcttacatactacatagaattctaggctgggcccagtggcccacacctgtaatctgagcacttnggnaggcagaggcggncggatcacaaggtcgggagttggagaccagcctggccagggtggtgaagcctcatctttactggaaatacaaacacaaaaaaaacattaagcgggtg

SEQ ID NO: 700630 - DNA, 1133 bp, Homo sapiens
ggaagaggcgagaacgacccctcggtaccgagcaaagcccgcgctgcgcatgcatccgcgacgtccagcagctacgtcccgctggcgtcgcgcgcctgccatcatgcccgaagtagaaatggctgaaggtggctgctaagggcgagatcagagcacaagtgtgaacgtgacgacaccacacgagaagatccagcgaggtttgtcttgctaaacctgctcctccatatgccagagccgcagagcctaagaataggcccctgcgacagaagggagatacaggtacccaaagggaacatgagggatagaatgctgatgctggctatggacgggcactcagcctgcagaaaattggagatgccagggagacagaccaggcacgagaaacgctgcaatggtgctgggagcatgccaatgtgaacgtgtgtaggcattattggaataaactgtggtactgtctgggtgagcatgtagcaggatttgacaagtactatttgtttatcagggattgtgactaacaaagtgcaggaagttatggtacttacgtttataaatataattattataaagaaggatattgtgggtaaagacaacacagctgcaagacacctctccacagagatgcagttactacggcggcggccaacggggggcgcactattgctcacgccataacataaagccaaacaggttcctacccacaacggacgaggacacttgagagatgttgggcagcaaacatacagaagacgttgttacccccttgcataaggacttagcagacgacacgaacatacacctacgtggggaattccccaccaaggaggaaggaaaaagggggacctacccgcacgtagaacgtgatgaggcaaccaggccagacaagtgggggacacacacaccgaggtgagcagacaacagcaaacagagaccccgatggggggggcaaaaaacacgacacgatacaacacgaacaaccagctgagggggcgagacgaaagaggaaccccagacggataggatacacccacagatgatgcacaagttcaccttgtaccgaacggacacaatagagacaccgatatagagaagctcccgcgtcgaaagaccaccagaggaaacacaacatcgggagg

SEQ ID NO: 700631 - DNA, 1432 bp, Homo sapiens
  misc_feature (179)..(180): n is a, c, g, or t
  misc_feature (184)..(184): n is a, c, g, or t
  misc_feature (187)..(188): n is a, c, g, or t
  misc_feature (190)..(191): n is a, c, g, or t
  misc_feature (193)..(193): n is a, c, g, or t
  misc_feature (195)..(195): n is a, c, g, or t
  misc_feature (208)..(208): n is a, c, g, or t
  misc_feature (452)..(452): n is a, c, g, or t
  misc_feature (499)..(499): n is a, c, g, or t
tttaggtttacactaaggtacctgatgacatgtgtctaccattgtctgtctatagttagtaatttgtattgtatgacccggctggtgtgtgctttttggttcctgccattcaacatgtttggagtgtatactttgcccttttccccttgtactcccttaggttttgttagttgtttttnncctnccnnanntntngtcccaaaacgcnttagccacatgccaagcttatattaaagtttgatgctttctcccagttccaacacatcatagaaaagagctttcccgagacccttgatgcagctttattatttagtcttgctttatttggcattttgagctccttcttttgtttacatctgtactataaagtgaaacctgaacctggggccccctatgaatatataagtgtcttagtgattttgagtttatataaactgattatattgttttcnaagtttaatgagatcttccacttctatctagttagtgcagatgtccnaattaaaatatttccctcttatactaaaatgccgcattaattttaggccattgaaagctgtaccttatcagaggtaactccccttaaccaggataactggtttgaagaaagttaagcttaatttttgtaatcacagattaacttaatttgtgataccattttaactttgagctcttaagtaaaaagtagcagcattcctaagttgtggggtgaagcatctgtttcataacacaggtctatcataattgggttctgtaaatgtaatggttctctaaacattttaatgcccaggcttgatattgtacacaatgcaagatgtctaaaatcttcatttagaattcaagggtattgcttgctatttcacattatatactttttaaatactattgctctttgtatatgaggcatttcactaaccttggatcattggatcttaaacatgataatatagaatatctgaacattgggacttgttctttagagtatatggcctttagttcttgtggaactaaatacagtgattctaagatcaaaagtcttagtgtttggggtttttttttcctctttttggatatggggtgtctactcttggttactggtattcttttttaaagcataatgctgtaacaacctgtccaagcttatgtttggcgggccgatgggtttaacacctgattttcatgtttccaaatgctagcataatcttagattggactatccgggtgactgtagctacgttaaggtaccacatttggtctaaagtcacagttcatatagtatttaacctatttcagatgaacgttacattcttgaaaaccagttattcctttcgtccattaaggccgtgtgttttaacgccaaattcacgagttccttcacataagggttcaccattctttctaaaaaacaacacacgacaaacacaacacaaaa

SEQ ID NO: 700632 - DNA, 357 bp, Homo sapiens
  misc_feature (75)..(75): n is a, c, g, or t
  misc_feature (275)..(275): n is a, c, g, or t
  misc_feature (329)..(329): n is a, c, g, or t
  misc_feature (333)..(333): n is a, c, g, or t
  misc_feature (336)..(336): n is a, c, g, or t
gacatattcttttgactaattagaccacttatggctgggattacaggcatgagccaccacacccggcctctgctntgttttttaaaaagaaatgcaagagagggagggaggcagcctcctgaccattgtctccaaggctggagtgcagtggcatggtctcagctcactgcagcctccgtttcctgggttcaagtgattgtcctgccttggccgctgagtagctaggattactggcacccgccacaaggcccagctaatttttgtatttttagtanagacagggtttgattatgttggacaggctggtctcctcctgacttgtgatccanccgnctnggcctcccgtgatgggactat

SEQ ID NO: 700633 - DNA, 869 bp, Homo sapiens
  misc_feature (213)..(213): n is a, c, g, or t
  misc_feature (306)..(306): n is a, c, g, or t
agcgggggcggacccgtcccccctgcccctggatcgctcttataaagctcccctgagccagtgtgctgcagctccttctacattgtgactccgcagccggggctatttcttggacgctggcgccaggctccatacgaagggtattccgcattatcgctacccagggcgtgactggcgcgacaggacagagagtcactaggacacggtactctncaagacggcccatgtcaacccgtccggcttcactccgggcaatgcgcctggatgaccgcgctagccagaagtgactcgtggcgggcacgacgncttcagtgcatctccatgtcactatggcactctttctcaccatgctcctttacgaagaacgcgagaactgatgagtcgagtccgatgcctcgaccagtcctaggtccatgcgccgttgtgcgcatcctagaggtcgaccgtgaatagagggaccgagcaacttgacgtaaacgccgtggagccaggcggccaggagcgcgctgcataagtcagaccgtctcggatcgagctcctcgttggaccagtcggcctggtgtcagtggatgctcgagacatggtagcccaggcggaaggtgcacaacaaccgtaaagatgacccctcagcggcggcccggacccgagaaggggaaaggcaaaacaagcagaagggttgcctgacccaaacgaaccccggacaaaaacgcagcccagcaaacgtccccagggaacacggacacactccacagggtggtcgaggacccgcagttaacaaacctgggaagacatgcggacggaaagaagcgcaggggccatctacgcccacggaagtcctccgcgagcgcagggcagccaggccaccccac

SEQ ID NO: 700634 - DNA, 1109 bp, Homo sapiens
  misc_feature (129)..(129): n is a, c, g, or t
  misc_feature (176)..(176): n is a, c, g, or t
ctaaaattaatgcggcattttagtataagagggaaatattttaatgtgaaacctgaacctggggccccctatgaatatataagtgtcttagtgattttgagtttatataaactgattatattgttttcnaagtttaatgagatcttccacttctatctagttagtgcagatgtccnaattaaaatatttccctcttatactaaaatgccgcattaattttaggccattgaaagctgtaccttatcagaggtaactccccttaaccaggataactggtttgaagaaagttaagcttaatttttgtaatcacagattaacttaatttgtgataccattttaactttgagctcttaagtaaaaagtagcagcattcctaagttgtggggtgaagcatctgtttcataacacaggtctatcataattgggttctgtaaatgtaatggttctctaaacattttaatgcccaggcttgatattgtacacaatgcaagatgtctaaaatcttcatttagaattcaagggtattgcttgctatttcacattatatactttttaaatactattgctctttgtatatgaggcatttcactaaccttggatcattggatcttaaacatgataatatagaatatctgaacattgggacttgttctttagagtatatggcctttagttcttgtggaactaaatacagtgattctaagatcaaaagtcttagtgtttggggtttttttttcctctttttggatatggggtgtctactcttggttactggtattcttttttaaagcataatgctgtaacaacctgtccaagcttatgtttggcgggccgatgggtttaacacctgattttcatgtttccaaatgctagcataatcttagattggactatccgggtgactgtagctacgttaaggtaccacatttggtctaaagtcacagttcatatagtatttaacctatttcagatgaacgttacattcttgaaaaccagttattcctttcgtccattaaggccgtgtgttttaacgccaaattcacgagttccttcacataagggttcaccattctttctaaaaaacaacacacgacaaacacaacacaaaa

SEQ ID NO: 700635 - DNA, 242 bp, Homo sapiens
  misc_feature (42)..(42): n is a, c, g, or t
  misc_feature (57)..(57): n is a, c, g, or t
  misc_feature (178)..(178): n is a, c, g, or t
  misc_feature (203)..(203): n is a, c, g, or t
gctgagttggtactttttttggtcctatttcacaagggttangatagattaaccaanaaaggacaagtgacagactgaaaggggctggaaaaacaaagaggaaaaggcctgtcacttctgtatagttgatggttcctgtcacaagcccaggtcacaaacagattaatttgttttatantgtttatatgctatttagaatgttnacaaaggaacgtggataaaatacagtttctactgcctcc

SEQ ID NO: 700636 - DNA, 800 bp, Homo sapiens
aaatggctggacatggtggcgggcaccatgtaattccagctacttgggaggctgaggtgggagaatctcttgaacctggggggctgctgtgagccgagatagttccatgtcacttcagcctggggtgacagagtaagactctgtctcagaaaagaaagaagtacggcagaaaaaaaacacgaactccttgggacgaatcaaacacacggtctccgaggaaaatgttgggtccatggggctacctagaattcggacgaccattcgggtctgggtacgcataccactttgtccattaatatacttacgtcctatcgacgtcgtttctatagttttatgaagttcacataagtagacacatggtatcgccggggagtcactgggtagacccttattagaaatgcagcttctgatacagggagctgggggtgggcgcctgagagatctggcattatctcccaggcatccctggttgctagccagatcgggtgctgctcctgcagtaacaaaggtggggtgggagaaatcgatatggagccgctcccatcatttatagtccccatctgtggacaaaattgacgctcacaagaagcgcccataggggttacattgaagagctgggggctccaaaggccgggaagtccaggaaaggcatgaggcaccgcaagggcaacaaaacactttaaccggccacagctggcgaagcaacgggtacattaatgaaaggagccctgaaaactcgggcagggaaacgcggtggaatggagccacaagaaggctacggggggcccacgaaaccccgg

SEQ ID NO: 700637 - DNA, 175 bp, Homo sapiens
aggggtgcacccacaagaaggatgacccttcctcgtctggaagatgatgagaacaacgaacagcgaacagatgatatccggtggcggggaccaagaattcctgaaagtcgaccaaggaacactataggacctcatgcgggctgcaaggctacttagacatcaaacggttggctgg

SEQ ID NO: 700638 - DNA, 102 bp, Homo sapiens
  misc_feature (38)..(39): n is a, c, g, or t
gggcagtttttgcttttattggtcaagaattctttcannaacccacacacacacatccacacacacacacacacatgatgcctgcccttctgtcgtcttctc

SEQ ID NO: 700639 - DNA, 563 bp, Homo sapiens
agaaacaagcaggagtcgtcaggtaaaaggtggcgagagccacttcagaaagatgggcattaccttgagaagccaaatgtactcatcaactatgaccagccattctgttcctagctccagactctagcgaaagtcttgctcacgccccaggtgaaatgtatcagaaggtaatcccacgcccgtcatcccagcactccaggtgaaatgtatcagaaggtaatcccacgcctgtcatcccagcactccaggtgaaatgtatcagaaggaatccatgcctgtaatcccaacacttggggaggcagaggcgggcggatcacttgaggtcaggagttccaagaccagcctgacagacatggtgaaaccctgtctctactaaaaatacaaaaaggttagccaggtgtggtggcaggagcctgtaatcccagctgggatttgggaggctgaggcaggagaatcgcctgaattcaggatgcagaggttgtagtgagccaagattatgccactgcactccagcctggacgacagagcgagagtgtctcaaaagaccaagagcgagtgacagg

SEQ ID NO: 700640 - DNA, 328 bp, Homo sapiens
tctagagtatccccgcatgtcacgcgcaaacgtgggtgggcaacccacgcttccttcacacacaggcggcagctcctcagccacagagcagccagcgcattccagctcttcccactgagacgcgggttagagctccagagccgctctggccacgacagtggtgttagacctgcgcagcttcctcccgggagaccctggtgattctaggactagactaccaggtgggccaagatgaaggcggcatgtatcgtgaaagacaagggctctgctagagagtgggcaggtcattcctctggccaccagttgacactccccacggttttgcggc

SEQ ID NO: 700641 - DNA, 346 bp, Homo sapiens
cttacttggaaaacccctgcgggagggtaccaggggctgtaatggggaggtaatggagagttattgcttgatggttagtttctgtttggatgatgaacaagttttggacataggcaacagtaatagttgcacaacagcgtgaatgtaattaatgccagtgaattaaccacttaaaaatggttgcaatggccaatttcattatatatattttaccatatttttttgcatttttttggagagtgagtctcactatttggcccaggcgggtcttaaaccccggggctcaagtgatcctccggcctgggcctcccaaagtgcgggggtaataggtgtgagccccacccct

SEQ ID NO: 700642 - DNA, 241 bp, Homo sapiens
cttgacttacaggatcccggtgcagtggtactgtgtgggtgtagtggtgactgtgggccagagaaaggaggtgctgagcccagaaaagacccaggccctcagcagcgtcgtgactgggcacaacaagcgacttgggcacccagacctacatctgcaacgtgaatcacaagcccagcaacaccaaggtggacaagagagttgagcccaaatcttgtgacaaaactcacacatgcccaccgtg

SEQ ID NO: 700643 - DNA, 475 bp, Homo sapiens
  misc_feature (35)..(35): n is a, c, g, or t
  misc_feature (182)..(182): n is a, c, g, or t
  misc_feature (334)..(334): n is a, c, g, or t
  misc_feature (441)..(441): n is a, c, g, or t
  misc_feature (447)..(447): n is a, c, g, or t
  misc_feature (463)..(463): n is a, c, g, or t
  misc_feature (469)..(469): n is a, c, g, or t
gtaatgggaacttagtttttcctgaactccaaccngaatccaaattggttagatgaggccaggcgccgggttgtcacgcctgtaatcccagcactttgggaggccgaggtgggtggatcacctgaggtcaggagttcaagaccagcctggccaacatggtgaaaccccatctctactaaaantacaaaaattagccaggtgtggtggcgcctggttgaggcatgagaatcgcttgaacccaggaggtggaggttgcagtgagccaagatcatgcctactgcactccagcctgggcaacaaagtgggactctgtcttaaaaaaaaaaaaaaaaanaaaatcggttagatgagaaagcatgtatattttctatatacaaaaacaagaaaggcgttttgagcccctgtgctcaggcccactcccacactgtggagtgtactttnattttnaataaatccccttatnccttcnttacaa

SEQ ID NO: 700644 - DNA, 307 bp, Homo sapiens
tagagtatcaggttcactaatctattgtcatgctgtagcctatgtaacgactttggacttgatgaatttcaaagaatactttatctattgctatgagcctgtcagaataaaggccaatatataatgtagtgacatcatatctgataaccagaggtctggtatctacactcctggtgccccgtcagtggtagtctccataagtcatcttgcgtgattaaaaaaaaaaatgaattcctgttgttgacattctaggacactgctttctccacagaaggatgctgatatcaaaaacttgaagatacaggga

SEQ ID NO: 700645 - DNA, 203 bp, Homo sapiens
caccctgaagcgagcattcagtaaaaggcactgttgggatgttgtacaggggaggagagtgagctcgcagcatggagccggtccaggacacctaccgcccgccactggagtacgtgaagggggtccctctcatcaagtactttgcagaggcactggggccactggagagtttccaagcttggcccgatgacgtgctgatcagc

SEQ ID NO: 700646 - DNA, 529 bp, Homo sapiens
tacgacaaagcaatcagaaatagatcatgagagagatgatccgtctcctggcatcagggttttaaacatcccagagaaaggggaagtgctgacttgtgggaagcccctgatgtccgtcatgtggttcagggagtgggtactacgatagtatcataggagatatgctgactgtggcacaaatttcgcgtcacgcccatgacattctgggtcatcatggaatattggagcgaatatgcaggaagtgtgaaagtgactatctgcttcagataccccatgatcccactgggcagctctctggtctattccccatgactcgtgcgctccttagccaggctagtagatgcacgctggtcgtccccagcctggcaggaggtggctgggttaggatccaaagggcaagtgccttgcagctgctccagggcaattgccccagaaccacactccagttggcccactgattgtggctgtcacagccctgtgccagggctcctaatgggaggacaccctgggacaaagaggaaaaccagaa

SEQ ID NO: 700647 - DNA, 219 bp, Homo sapiens
ggccctcccttgcagacatcaacagtttccaaaaaattgggttcaattccttcccccggggccccccaaccaaggaggtggcaaaaccccctaaccaaccaggagaacacaaacccggtttgtttttttacaaccaagtggaactgacggggccggggcctgccctgggggtcccctcccttggttgaaaaaaaaaccaaataacccttggcccgccca

SEQ ID NO: 700648 - DNA, 151 bp, Homo sapiens
gcagcagtctcgagcatttccggcatcccaggtcctacccagtgctttgaggagacgcttccttgtcccatacacagtgtgacgtgtactaagatatggagttcgttaacaaattagatgagctgtgtgccttttacaaccttcacgtcct

SEQ ID NO: 700649 - DNA, 526 bp, Homo sapiens
tgtgactgctaagacgtatgccatgactaaacttctgctgccttctttgttccaccaagtaatacccctactctgagacttgcaaataactattctcttcataagaattctctcctcagtcgggcgcagtggctcactttgggaggccaaggcaagcagactgcctgaggtcaggagttcgagaccagcctggccttaggcaggtgctgaaaccccgtctctactaaaaatacaaaaattagccaggcagccaggcacagtgcctcaagcctgtaatcccagcactttcggaggccgaggcaggcggatcacctgaggtcaggagttcgagaccagcctgaccaacacggaaaaacactgtctctactaaaaatacaaaattagttgggtgtggtggcacatgcctgtaatcccagctactcaggaggctggggtgggaggatggcttgaacccaggaggtcaaggttgtaaggttgtagtgagccgaggtcacaccactgcactccagcctgggcaatcaagctt

SEQ ID NO: 700650 - DNA, 921 bp, Homo sapiens
caaagaaggacggacttcggtgttgcacacgcgtgattgtgaagatcactggatttactctcgcttgttggctcgtctcactgttgttactttttctctctgtgttatgtcggatagactagtgtggcggggtagacggaccaagttgtttctgctgctgcaacgtattacgactttttggtgcttcccggggcgcatgattattacacgatatgttgtttgagcacaccagccagtttcgcctcggtgaatgtggtcagatctgcccccatgggcccgtgtggtgcgcggccagttcggcccgagcccgccctcggttttccccgcgggcccgtatatttttcatttttggccccgccggggggtacacgtcgactggatggtgcggcgctgtgccgagtctcgtagctgtgtgggggcttgtctccccggtgtcggctgtattggtctcctcgtctctccagaagtggtcccaatgggtttttctactctcccccgtaatatgggctctgtttggtaggaggcgcttcttcagccacggcgcgctttgcgttgataccgctctgcgtggtatcccccgctcctcgtgtttactcatgcttggggggaggacatcctcttcgtggtaatggtggaactccccgcttctcctcggggcctcccaacaaggcagtcttgctgggacttgtctagggcgtcctacgacaacatagtgttccccgccctatattcttcccgttacaaaattgtttcgcccgccacaccacagggggtccaccctccccccccacctgtggtcccagactcagtcactccctcttgcctccccaccagggccccccccttttttaacacccttcccccctttttccccattcccccacccccccaaccttccgggggtttcctttttaaaaaaaa

SEQ ID NO: 700651 - DNA, 609 bp, Homo sapiens
gtatcacttatctgtataattcttgacaatcaccctacctgactccctgtttgctcttgataaggacccttgtgattagatcaggtctaccagagataatccaggataatcttccgatctcgaagttcagctgattagcaagtcttaagttccatctgacaagcttaatgtcttccttctcatgtaacataacatattcagcaggtaccaggcacgtaggatatggacatctgtgtgagggagtgcatcatttttatggaacttgatggcccagcatatgattgatgttgggaaatgttcgtatgtacatgtgaaaagagcactgaactctgtccttgtcggatgcagtgctaggatttatatatatatcacttagggcccatgtttgtcaaagtctgtagttgaggtcttatatatctttagctgctcttttgtctggtctatcagatggttttcaaaagataagttaaaatcgccagtatgactatggaggttgagtatcttccttatcaatttggtcgattgttccctgtgtatatggggaagctgtgtatgagatgcgaacaagttgagcatggtgatatcttgcctttttgagtcgctttagca

SEQ ID NO: 700652 - DNA, 372 bp, Homo sapiens
  misc_feature (36)..(36): n is a, c, g, or t
  misc_feature (69)..(69): n is a, c, g, or t
  misc_feature (80)..(80): n is a, c, g, or t
  misc_feature (118)..(118): n is a, c, g, or t
  misc_feature (125)..(125): n is a, c, g, or t
  misc_feature (176)..(176): n is a, c, g, or t
  misc_feature (179)..(179): n is a, c, g, or t
  misc_feature (188)..(188): n is a, c, g, or t
  misc_feature (190)..(190): n is a, c, g, or t
  misc_feature (207)..(207): n is a, c, g, or t
  misc_feature (209)..(209): n is a, c, g, or t
  misc_feature (225)..(225): n is a, c, g, or t
  misc_feature (254)..(254): n is a, c, g, or t
  misc_feature (270)..(270): n is a, c, g, or t
  misc_feature (277)..(277): n is a, c, g, or t
  misc_feature (279)..(279): n is a, c, g, or t
  misc_feature (287)..(287): n is a, c, g, or t
  misc_feature (304)..(304): n is a, c, g, or t
  misc_feature (343)..(343): n is a, c, g, or t
gggcggggggggccggggtgggggggggggtcgcgngtcccgtccccgggcgtttttggcccatacccntgagtatttgnctaaaacatgtcttctttgtagcagctaggccctgccnccactgngcttggctgagttcccaaatctgttgtaccctggagcttccctgtcacttntcnggctccccncncctgctaagctttgttncntaattaaaatcttctnccactgccatagctactgctgctgctggnaccgccatagcccccntggcttncntggttttncaaagtattggcccccnccgccataggggccagagcttctgcctccaaaatttccncccttcatgggtccaaaatttgaagcctg

SEQ ID NO: 700653 - DNA, 388 bp, Homo sapiens
  misc_feature (146)..(146): n is a, c, g, or t
  misc_feature (195)..(195): n is a, c, g, or t
cccaaggggcatccccaaatccctgaggagtaccagctgcaaactggtcaagttctcagtgagggccagttcactaaagttttgttgtaagaccctgttgtggtggcatttctgggtgcccattacaacttgtgaaccaaaaaagntggcatggcgctaacccttgggccgaaacttggtctcttggctccctcnttggccacccaccacctctcgcacagcccctctgtttttacaccaataacaagaattaagggggaagccctggcagctatacgttttcaaccagactcctttgccgggacccagcccgccaccctgctcgcctccgtcaaacccccggccaatgcagtgagcaccatgtagctcccttgatttaaaaaaaata

SEQ ID NO: 700654 - DNA, 1065 bp, Homo sapiens
  misc_feature (57)..(57): n is a, c, g, or t
  misc_feature (66)..(66): n is a, c, g, or t
  misc_feature (77)..(78): n is a, c, g, or t
  misc_feature (365)..(365): n is a, c, g, or t
  misc_feature (472)..(472): n is a, c, g, or t
  misc_feature (477)..(477): n is a, c, g, or t
  misc_feature (547)..(547): n is a, c, g, or t
  misc_feature (559)..(559): n is a, c, g, or t
  misc_feature (572)..(572): n is a, c, g, or t
  misc_feature (609)..(609): n is a, c, g, or t
  misc_feature (777)..(777): n is a, c, g, or t
  misc_feature (795)..(795): n is a, c, g, or t
  misc_feature (799)..(799): n is a, c, g, or t
  misc_feature (801)..(801): n is a, c, g, or t
  misc_feature (807)..(807): n is a, c, g, or t
  misc_feature (813)..(813): n is a, c, g, or t
  misc_feature (836)..(836): n is a, c, g, or t
  misc_feature (858)..(858): n is a, c, g, or t
  misc_feature (878)..(878): n is a, c, g, or t
  misc_feature (884)..(884): n is a, c, g, or t
  misc_feature (891)..(891): n is a, c, g, or t
  misc_feature (894)..(894): n is a, c, g, or t
  misc_feature (901)..(901): n is a, c, g, or t
  misc_feature (904)..(904): n is a, c, g, or t
  misc_feature (912)..(913): n is a, c, g, or t
  misc_feature (919)..(919): n is a, c, g, or t
  misc_feature (924)..(924): n is a, c, g, or t
  misc_feature (937)..(937): n is a, c, g, or t
  misc_feature (951)..(951): n is a, c, g, or t
  misc_feature (955)..(955): n is a, c, g, or t
  misc_feature (960)..(960): n is a, c, g, or t
  misc_feature (962)..(962): n is a, c, g, or t
  misc_feature (966)..(966): n is a, c, g, or t
  misc_feature (972)..(972): n is a, c, g, or t
  misc_feature (975)..(975): n is a, c, g, or t
  misc_feature (1034)..(1034): n is a, c, g, or t
agggagagccctagtcttaagtttgtttctttttttcttctagtatggaagttgaanagctgtgtnttaataggatnnccttaggataagaggactgcttttaaagatacgagatcccgctgccttggcaattctgttatcagaaagatagtgattttgatacaaaacagtaagaaactgtagaattgcaggacccataatcctcacaaggaagatttagagagtgctgtgtgtcaatcactcatcagcacctcacagatattatctcaattcgtcctggcaaccatcactgcccctacttagcagtctcagagaggagactcaactcacacaggggccaagagctggaccacggccaaccaggnctccccacccccaccccagccatgcctctccccaccacaacagcacccggcctgaccctagtgtccaggtctgtcccggtggcctccaaggaaatgggacaaaacanccttnctgccaactgcaggggcagcagaacgccacagtggttgagcatgggctctggtgaaggatggcgggggtncaaatcccagtnctccacctctctncttcgctccgattcctgggcctctgagctggtctccnccgccgtggagtaacagtgtgactgctcatctgcacagattccttctgtgctggacacggttccaactttccaactactcccgcaggagctcatttagtggagacaagatcttgctcagtgtcatagtgaggaagaaatggaaatatctgtgcagggcacaagcccgncctggtgcgggagaggcnttantnaacgcngcatgngttacgacgccggaggactgtanctcccacagcctggcttcctgntggagtctccaccgtaatgngctacnattcctngcncgccccncantcccgacnntgacantaccngtggtacccccgngccccgcagcggcncctncggcngnttcngcggtngcngcactgcgttcctgccctcgggggcatggccccctcctgttctgggggtccgggcctantgaacctcttgttcccagtacgcccccggtt

SEQ ID NO: 700655 - DNA, 1328 bp, Homo sapiens
  misc_feature (272)..(272): n is a, c, g, or t
  misc_feature (447)..(447): n is a, c, g, or t
  misc_feature (453)..(453): n is a, c, g, or t
ggtaagaggaactatatagtcgagtgagagtgagagcatcatgttgtaagcgggtaaagtgtcgactatcatctctcaactcgtggatcctccgacaaatggtgcagctgagtgatctactgtgtgtggtcctgaatgcaatccgcatcagatgcgatgtcgatgatccaggagagcgcgcaatgagacaacggtattgctggacacggaagtatgctgatcacctctctattaaagtgcctctggtggatcagagatgctgctatagggcnatcgaccgctttacctgatcggattcaagaagtgagcttgatgagcttgaagtagtctctaagtatctcaaacatcccacaactctatgggatctcgcattgtgttctcattgatagattgagcgcatggagcaacatgtgcgtaagatcgctctcacacggtcgatagcattgngtgcanaggcgtgggaattggggacgagcctagggggggctttgtgctatcaaacgataaggtaacatggatagacgagccgaagtccgaagtcataaggcattgcccttctataagggatacaccattgaaatatacttatcaataatagacacgtacacgagtaccataatatacactgggaactggtcgcaggaaaacgcggttaggaaacaggagtgatgcacggcgaacggctaccgtctgtggcgccctataaagttgaaactccgcgtgtgtagttcccccccgaattattaatgtgtgctgtgtcacaggaatacgttgtgggttgtggacatctcacacccagtttaaagatatgtcagcgttccaatgtatataatataacttattgagaagaggattgggggaggttacgcagaggggctattctaaggaacaagagacggaatcacagacatgaaaagacgaagaaagcaaagaaaaattattgttggaaggagcagtgattttgggcgaagaaatctccacattactggaggagacaaagtacgataatttgtcaaacgaggtgttatgggtggcagaatagagtcgacagacgaaaacacggtggtgggtgggaagaaacacgtgtgacccccaaaggaaataaatacatttggtttaaaggaggcagttaataaaggtggtatacgttggataatataacgggggctatgtatacataccggtggcgtctaatacagaaaggatgttggaagggaacacggaaggacgtacgcaaaataatagcagaatataggatatagacggtttatcacgataatgaaattgttggcgagacaaggactgggcgagataaatatagatgtaag

SEQ ID NO: 700656 - DNA, 95 bp, Homo sapiens
cttattgataacctcagacgttcccaccactgaagatgaggttgaaaaacctgacttttatcatcatattgataatctcaggagaactctatgca

SEQ ID NO: 700657 - DNA, 1127 bp, Homo sapiens
tcgtccttgctgttcgttccccgttccctctcgctttttatttttcttccagttccgtttgtcttggttcttccatggttttttctcttttgctcggtggtcttttttgtcgtgtgtccagggcctgtgtgttttgttgtatcttcttttctccttggtggggttttcgtccttctttttcgttgcgggccctttggtggcgccttttacctctttgactggcttggttccctgggtcctatgccggccggtagcttgtgggatgtagtgggttcgggtgtgtttggcgtccgggccttgggtttctctgtctcgtctgtttgtgtcgccccttccttgtaacgggtttcgggtaccctggtttggtatctggtcgtccttggcacttctggtttttttctcctgttctggtctatctgtgtgctaggtcatgagcttggtttggcatctctgtttctggcttctggtcctccctttgctgggccccttctggtcctcttttgctctttatgtttttcctgctcacatcagtgggatacagtattctagtttctcccttgcctggtcctctgggtatggttgatcccctgctctctgctagtagtccttttgtgtagttctgctataggtagctctcacacacctcggtctctggggttgatacctgagcctgcatatagagccctgattatctatagagcatggcttgagtgtgtgaatatgatgtgtgcacatgcttaatgagcttgcaagtgtgcacacgttttgtggagaggagggtgttctggcctgagtataggtaaagaagtaggcatgtccagtatgctttgcagggtgtgtttgctcgttttccatgcccatgctatccctgacttggggtggagcatggaaggagctcttttctgttcccaagcctcagaactcttgagctgtggcttacattgcatgtcttcaccaggttcagctccgtgggccacactgctgctgtgccaaagaaggtgtacagcctccccaggatggggccatcatacaacccattcatctgcacatctacatttaaatcgtgtccattgctgtcttttatatattttccatttttgaactggaagacgatgacctctatacag

SEQ ID NO: 700658 - DNA, 334 bp, Homo sapiens
acagacctaagcgcgaagcctctagcctccgtgctcctgttgcctgcacatcggcctgtggcctgccttgcccggagccgagcttctctcttggcttccaggagcctcagctcctctccgcttgctcactgagccaacagacgcggtcaccaagaccggggcagctccacacccatgaccccccacccccgcggcccggctcaccaaaactgggaacatcactttgcctcccgacccctctggaccttgatgagctgagtgcatccgcggccgactcgggagccgcactgactctgtggcccgcatgtgcacggcagcgacagcctgagcgctc

SEQ ID NO: 700659 - DNA, 390 bp, Homo sapiens
agagtaggagcaggagggaaaaagaaaggtgctacactcttttaaaaacaaccagatctcatgagaactcactcactgtcacgagcacagcaccaagaggatggtgctaaatgattcatgagaaatcacccccatgatccaatcacctcccaccaggcctcacttcccacactggggattacagttctacataagatttgggtagtgacacagattgaaaccatatcaccattccatatttttttctgtttgtggctgtacatatatatgtgtgtatgtattgttttttacagaaatgagataactttgcatacattttttgtaacctgcttttttcactcatctatatattgtaaatataatttcatgttagtaaaatcttctataagc

SEQ ID NO: 700660 - DNA, 927 bp, Homo sapiens
  misc_feature (207)..(207): n is a, c, g, or t
  misc_feature (378)..(378): n is a, c, g, or t
ttgagttctcttaaatgagaaataactgggacagattctcacttttctccggtagcaaccatggtatctttttggaacaatgggagggtataaacttatttttttaaacaaatgggaagggagagcacgccttctggttggccaagcatagcattaatttccaaacacaccatcatttaaggtggccggggcccttttggtcacagnagattctggataaccaacagcaaagcaacacagcatttggcaggtaaaaagcagaaactggggttcccaattcccatctctggtactcctaatggagttgcagagggttctgggggtgcagatctacttaaccctctttggaattggcagcttcccttggctgggtaaaanaggggatggtcacaccattttggccgggatggaatcattagcaattcaaatccacctggaaggtatggcctaagcaactccaaccatgggcagcagaagaccccaaggggaagccactgggggaacaaggcgtagactccctggacaaattaacccgtcgaaccaaaacttcccagggccctttcctggaaggcacctatgcagcaaatatttcctggttccttaaaatgggccgcagattattactggacgctttctaaccaccaattcttcctttaggctccccattgggttctcccttaagagtattcttcctttttccagccatattcccattaacttttaataagaattggtctccttaattagcggggtggttaacccttgactggtgccaattctggaatcctcccgagcaataccccaggcattattaagctgtttggtacctccagggctacaatctctccgactcgccctatacgtgggtggttctccccaactttgtgtggtctggtgttaccctaagagagcccctttttgggcgac

SEQ ID NO: 700661 - DNA, 175 bp, Homo sapiens
  misc_feature (13)..(13): n is a, c, g, or t
  misc_feature (131)..(131): n is a, c, g, or t
gatccgtcatggncaacgagaagcacagcaagaacatcacccagcgcggcatacgtcgccaagacctcgagaaatgcccccgaagagaaggcgtctgtaggccctggttattggctctcttcacttttgtngtctgtggttctgcaattttccagattattcaaagtatcaggat

SEQ ID NO: 700662 - DNA, 197 bp, Homo sapiens
ttgctctggtggtctcctccgccggcgccgtgcgcgtgcttgtagtcccagctactcgggaggctgaggctggaggctcgcttgagtccaggagttctgggctgtagtgcgctatgccggatcgtgttgtccgcactacagttcggcatcaatcatggtgacctcccgggagcgggggaccaccagtgttgcctaac

SEQ ID NO: 700663 - DNA, 185 bp, Homo sapiens
tcgataagggccaagttacattcccaccaacaatgtacaagaggttctcttttctccacaccctcaccaacactaatcttctgactttttgaaaaagccttccttacatctgtgaggtgatatctcattgtggggttggggtttgtttatctctttttttatttcaatcgtcggccccttatgag

SEQ ID NO: 700664 - DNA, 1081 bp, Homo sapiens
agcggatgcgacatcatcttcgtcaatgcacaaagatggcgccctacaggcgctactggtgactctgctgccgaaagctctgggtgtgcgggagataccattgtggccgtcagatcctggtgccaacgggccaaggatggatagttgaccggccaacgtcttgatgcccagatggatgctatcgagtccagtatatgaccatggcatagtagcaaagatatcacttgagaagattgattcgacacaacagacgtgtagatcctggtccgcatgatcctcgtcttcggatcaagctttgttgtagttggcacccatcctggagtcaacccacgactagacgcatggataaatatgaatgcagaagcgtcgaatgtgctccgtagccttgccggtgcgagcgtgctctgggaaccagatgttggtcccagtgcaggtgattgtcgcaaaggctcgcgaagaatgcgactcattgcatccaatgttacaataccgggccatacggggggcatgtctcgagaagggtagggctttgttggcacttatcgcgagcgcagagtcacgaactctcgatgggaaaccaatctcgccatttggaagcacccgatggcttgggaggggggcccgatcaaaaagcaacgtgtggcccccgtggcctgacaggagacagattcagagacctgacaggacagtcttcatgaatttgtctcctgggcccaaacgtagcaatggctgcctgagacaaatttttgagcgctgtgggcttttccatggggaacgactcgttgggcattcactgggaaaggtccactttgcgacccgacagaatttacttgcctaggcaaagacatgttattgccgctaacctcgttgcgctaggttgtgcctctcccttggaatcttgtggcgatcgtggaaacgttccgcgcgacatgccccccccctaacttacgttgtggtcggagctcctattggcgtagggagccagagtacgttgtgaactctcggagaaaggtttcaggcgagtggtgccctgacgaagcaatacatgattgcacattgttcccatgttgcatagagggat

SEQ ID NO: 700665 - DNA, 1024 bp, Homo sapiens
gaatggataattggatgagctagggctctgggggtctgcctggtccactctggtggagccagggccccagcaccctccaggacaggagatctgagatgcctggctgctggagtacatgtgtgcacaagggttactcctcagaatcccccagttctcactcatgtccccaatcagggctagaaaacagcaagatggacgcaaataactgttctgcatgcgatccccaccgatgacctgccctggcctcccctgtctcagggagcaaggtcacaggtcaccactggggagaaattgtatacctcccactggggggatgttacaacaccatgctgagttataagagcggctgtagttagtagggagggaatggtagtgtgtgcacgtgtcgaagtgtgatgtagtagacgtgtggggatcgttctgagatctcctagtccccgtgagtacaggtcactacgctgtacccagacttgtatatcctgaccagatgtacagagatgtctcctcgcacgtgactcttgtggggaaggaggcctcgagagtaccagatcttgctagtctgatgggctgagaggacattttattgatacctttatcaactgttgggatgtcacattgacttgtatactctaatgaaggtttcatggaccataagatattcaaaaaggcaagatattctaatacaatatgtgttatatgtataatataatcattatgtgcagccactacaagctgatacaatgccgacagggggggcctaccacaccgcgggtatccatgtgacctggacgcacagaccctgacaggttgacgggcaacagtgcaccacgacggactcaacaagacctggggcagaacgacgaacacaaacgcgataaaacacccaccgtgggcggaacgggagccagcaccagaaaacgagcgagcaacacacgagcggggggacaaccagcacggggaagacgcacacatatacaattaagccaatcacacgcacacacgccaacagacacgccacgacaca

SEQ ID NO: 700666 - DNA, 134 bp, Homo sapiens
agcatacgcctctaagacagggttgggcccagctgccctgtcagctaggactggcaggcgggctaccctgggaagacaggaggggtgggctaggggcctagtttgggacccctccaagggcatcctggccacat

SEQ ID NO: 700667 - DNA, 171 bp, Homo sapiens
tgtgcttcgacggtgctggcagacactcgctgctaagatcaaatgatggcaatgagtacgtcttaccaagccaaagacgatgaggaaatgaacacatggatccagggtatctcttccgcacatctcctctgatacaacacgagagtgtcagccagacacccaagagacacg

SEQ ID NO: 700668 - DNA, 123 bp, Homo sapiens
tgagataagcggattaataattacacaatttccagacggacgggcatttaaggctcattaggtaaaatacaagaattagataatataattaagaaatattaagggtccatcaaattaggtaaa

SEQ ID NO: 700669 - DNA, 83 bp, Homo sapiens
ctttcccccttttttatttttaatttcctttcaaccaaatattccccctatgtgctatatgtaataataaaaagttgccccca

SEQ ID NO: 700670 - DNA, 411 bp, Homo sapiens
  misc_feature (6)..(6): n is a, c, g, or t
  misc_feature (53)..(53): n is a, c, g, or t
  misc_feature (58)..(58): n is a, c, g, or t
atattnaaatggccttccattccttttaaacttttaagttcctccttcccccnattanaatcacaaacttcggaaaatgttataccctttcaacttacagtcgctatcaaaaatcaaataccttagggcagggtgtgatggctcatgccctgtaatctcaacactttgggaggtcgaggtgagcagataacttgagcccggggcttcaagacaagactgggcaacatggcgaaagccagtgtctacaaaaaaaaatacaaaaaaattagccaggcatggtggcacacacctgtggtcccagctactcaggaggccaaggtgggttgatcatctaaacctggggaggtcgaggctgcagtgagtgagtcatgattggccactgcactccagcctggctgacagagtgacacc

SEQ ID NO: 700671 - DNA, 155 bp, Homo sapiens
cggtatacacgcgcgaggtggtcacgacggcgacgcccacctgcgccgcatgggcgcctcgcacaactggcatccgacctacgtgcgcttcggccccgactcgcagtcgccggcggtgcagcctaccgacttccagcgccggctgcgcgacgatg

SEQ ID NO: 700672 - DNA, 608 bp, Homo sapiens
  misc_feature (172)..(173): n is a, c, g, or t
  misc_feature (321)..(321): n is a, c, g, or t
  misc_feature (346)..(346): n is a, c, g, or t
  misc_feature (431)..(431): n is a, c, g, or t
ctcggaggtgtaagtgcatgctcaagcgcttttcttgtcttgcaactgctgcagttcgtagacgccttcgcgaatacggccagtcaaagtagtgagtacgggcataggtgtccttttaatggtgagtatgtgcctctaccatatagaaaggcaactaccgtgcactgtttannaaatagcatggctaaggcggaacgctatacaaggcaggacaatccataaaggaacataatcatgcaagacgctacccaaaaactccgcatcgaagcactgctgaaactgcacggcgcaaacacagcccaagtgtgggagtctatcgancgcaacaagggttcggtgcagcatntgccgttcttatcgacggtggagcgcgcctgctataaaacgcgggacgagctcaatcctctactggccctcaaggctatcgagancaaagacatcgacaggcagctcatggcaatgcgctatctgttgctcggcctgatgcaagactgcccagaatacaaagttgcattgcaggtgctggaggaagctgcgccatcggttgtagcactctcgaatgtgcagcacgcgatatggacctgtttggctacaaggcccgtgtctga

SEQ ID NO: 700673 - DNA, 257 bp, Homo sapiens
ataacagtgaggatggagtgaaaaacaaggataaatttgagaggtatattttgaaagccaaattcatggaatatagaggttgattgtgaccaagacatccttaatattcccctaagcttcactaaattttataaatgtttcttcctgaccataagcgctagacctcccttatcttagagcattcactttaaaaacttaacattgcgaattcttaccctgaccccttcgtgaaatgtatacatattgtcttgaaagcc

SEQ ID NO: 700674 - DNA, 180 bp, Homo sapiens
  misc_feature (4)..(4): n is a, c, g, or t
  misc_feature (10)..(10): n is a, c, g, or t
  misc_feature (17)..(17): n is a, c, g, or t
cggnggcgtngactacngtgttgaggatgaataggttgggtataacacctgcagtttccagctctatgaaacaggagagagagagaaatagcagtttgacttgactgtggaagatgatggttgcatgcttctcatttgtacgtttccatctttgtgataaaccgctttaataaagctcat

SEQ ID NO: 700675 - DNA, 217 bp, Homo sapiens
tttatagtttctctcttgcgatactttctctactaactccttcctgtaatcattaaactgcattgatattttcatccctttaaaaaaaacctcatctcaaagtcttgaagttttcactttcttctaccttccacacaataaccaaacttcttgaacacagttgtccacttttgtctccatttcctcactttctttctttctttttttttttttttgg

SEQ ID NO: 700676 - DNA, 393 bp, Homo sapiens
gtaaagcttaccctgagtcttattattttgccacattttcttactgagtgtgaacacttatacctgtgagctatccgagttaggtgcacactttgtgcttgcttaccccttgcttagtacttcggcatatgcttcaagttctagaacatgtcatataactagagtttgtgccaagatccttggtagcttgatttagatccacacgtatagagtacaggaccatcgaatctagtggatctcagtggtctctaatgtggaacagctccttagcctgtatgtgttccatgacctctatgtcttttggagtacatggtagtgattctatgagattgccactcatttcgcattatggatgctgattgcttaacgcccttctcggatactctactctgc

SEQ ID NO: 700677 - DNA, 155 bp, Homo sapiens
tcttcagattccttcctgtgcttgttcttagtcactgccgccgtgatacgcgacccaacatggcgtccagcccctctgccttggcgacttctccccgaccctgagcgggttcatcaccctgacgcctttgctgctctttgcctttctcggttttg

SEQ ID NO: 700678 - DNA, 1235 bp, Homo sapiens
  misc_feature (267)..(267): n is a, c, g, or t
  misc_feature (630)..(630): n is a, c, g, or t
  misc_feature (635)..(635): n is a, c, g, or t
  misc_feature (751)..(751): n is a, c, g, or t
cagacgttggttgccccttcgatgtgcgcgtgaagtggctgaccccgtgagtgtgtctgcgcccgttctttctgtgcgctcttttgaccttgtgcggccgtgggcacaaatgggtggcgcgcacccgagcctttggggcctctcttttgcgcttgtcaaggccgcccccccctccccggtctccgagggtgagagcccccccccgttgtgccccgtgcccccgtgcaaatggtcagacaccctcattcccgtccccttgtcagcccnttgggaaggggagccttgtacccctgcaaagttcccaggggttgagccttgcccccaagaccccttgggaacccccgcctcttgtgtatcaggcgttaaccctggatgagaagacactgggatataaaggaagactccattttggggagactcttaaaaattgtccccgctgggatttttggactttgcaatgggccgcctgtgaacccccccttggttttgcccacgagttctgtcccaactttggaaatggcctgtgattaccctgatacgcctgggaccccctccaattgtaatcttaggcaaatatacctatacacttgcgctctttggaatttttaaatagggcgctctcatataggntgganaagggacacttgccctctgttctctccaagaatgaagaccttttgggagcctcgttggacactcttttgggttataatgccctgaagaaatgaagttatatgaactcttgtggggnaccccacattgtggagaaggcacataagttgggttttttgagaaatgttgaggagacacaccgagaatttcgtgagaggggcccccgcgggaatgtgagaatgacacacatgggtttttgtctggtgccccccacctcacaatcttcacaacttgagaattgtagttcttcccccgagaattcccaccacatgttgttgggaagggagaccccgcgggaaggtataattgagaattcctcgggaggccccgctctttcccacatatactaattcttcactgaatatgtgaaataagtctcactgagagtctgaatgcactttatcacggggtttccgcttttgctttttcctcacatttctcttgctgctgccacatgttaaagtagtgcctttcacccaccccacatcacatcacatttctgagggcctctcccgccatatggagctataagtcccattaaacctcttttttttccccgtcca

SEQ ID NO: 700679 - DNA, 428 bp, Homo sapiens
aggagatcatacgtggaggagatcaccgtggtttggtctccatttttcaatgtcacaaaccacggagcactcatctaacagtctctggatgtcgcttttcttcgactgttaatccgaattcatcctttggacctgcctaagtccccatgaactgtgtccccaccgaagctcctggagtgttctcattccttttaacccactacttgcatagtacgcccctgtgtggctgagaactccagatttctggcaccttgagttcattcttctactggagacccatcttctttccttttcttatccccctttcttttatactttaagaaatgttcttatggtattccattttggctaggggcgttcccattaggccacaaggcatccaataagatttgctggattttaaacgtgtaaatttgtattggcccgta

SEQ ID NO: 700680 - DNA, 749 bp, Homo sapiens
cgcggtggctcacccctgtaatcccagcagttgggaggccgaggcgggtgcatcatctaaggtcaagagttcgagacaagtctggccaagatggtgaaacccccgtctctacgaaaaatacaaaaattagccgggcgtggtggctcatgcctgtaatctcagctactcgggaggctgagacaggagaatgcttgaacccgggaggcggaggttgcagtgagccgagatctcgccaccgcactccagcctgggcgacagagcgggactccacctcaaaaaaaaaaaaaaaacagggggaaagtggagctctattctggtggtttgccaagacaggatggggagttcccttggtacacaattttctctcatttttactctaaaaggctacttggaaaaggtctggcctggggggcactcaatcaagtcctttaagccattacaaggtatcggggggacagaacgctggggtgtccaggcctggacaatgggcgcggggaatctcgtgggcaaagcttggtggtcaccttggaaaggggacctccaaaggtcttgcaggtgaacggtcagcactccaagggcgttccaaaggggagccaaccgcacggggaggttcatcacggaggcgcaacgtgcggggaaaattggaaccagtggttgagtttggtacgggaacgccttgaagccagacaccgggaaaaggcctcgggcaggtaccggggcggtcggggaccacccacagttggccatga

SEQ ID NO: 700681 - DNA, 224 bp, Homo sapiens
ttcggccaaccttcaacagcaagccgcaggacctggaccgtctgtttgacgcggtcggcgaagtgctgaacaagatcgactgatttctccttctatatagaacaatttttcaggagccctgcatgagccttatccagcatttgatcaacggtgaactggtcaacgacagcggtcgtagtgccgacgtctataacccgtctaccgggcaggtgattcaccaggtg

SEQ ID NO: 700682 - DNA, 886 bp, Homo sapiens
gtagccactgaacttcagtggagggtggtgagcagtgtccttatccaccctaatctcatactccctcattgtccagctgaactacctgtcccctgggagtcaggaccctctgcctgctctctttcctctttagaaatggcagttactggctgggcgcagtggctcacgcttgtaatcccagcactttgggaggccgaggtgggcggatcacctgaggtcgggagttcaagaccagcctgaccaacatggagaaaccccgttgtctactaaaaattccggattaaggcaagggattgttggcgcgtatgcctggtagtcccagttatcttagagagcgctagaggcagagagaatctctgtgaaacccgggaggcggaggtcgagcgtgagccgagagtgcaccatggcactccagcctgggcaataagagcgaaactccatctcaaaaaacaaagcgaacagaaaggcaagaacggaaaatggcagtaaccatcggttgtactatcgtgctgtgagaccatgcggcagctctaacgtggaagtcctctccgttccctaattaagagtgttaccaacgtctaacaaacggaagaaaaagcgaagaactacctgcgcgggccctcccaatgtgcagggaggagcggaacacacgagagagcaaaaacgggagaaatgtgccaccacacatgtcgttgccaacaactctgatctttgccagtagaagcccccgaagctatcttccgtgaggagctacacactgtggtggacagaacagtgactgggcccgctttttctccacataatataagtgcgaaactcccgttatataacacttcgccagaactagctgcgcgtgtgtgtaataacccgggtactctaaatgacg

SEQ ID NO: 700683 - DNA, 458 bp, Homo sapiens
  misc_feature (366)..(366): n is a, c, g, or t
  misc_feature (391)..(391): n is a, c, g, or t
  misc_feature (428)..(428): n is a, c, g, or t
tagagtgacagtgggatgggaactaggactctttgtcattgccaggggttgccttgaaggactggagtctgagagtaagcaaactttatgacccacaaaaaaaaaaccagcttcaggaaagcttaatggagttcctggtgtgaacttagaagcaaggtttgataattaattctgacctggctatttgtgaataaacaaagattaatacagtgatttccattttgctgagtatttttcggcctctgaacaggacggtcacatggttttgctcttgtttgcatgaagcgaaattctggggtcctctcaataaacccacaagagttttctatcctcattaatgaggagctgggcttcttgtgtttttgnagggcagaattttgacagtgtttcntgtggcattcttcaccatcattgggagccaccacctnggcaacgtctgtagacaagggggtaaggga

SEQ ID NO: 700684 - DNA, 1051 bp, Homo sapiens
  misc_feature (210)..(210): n is a, c, g, or t
gcgaagcagcggctaggtctaaccctactagtctcaagtctccaacacatatggcctagactatgttagcatacctaaacctactccaagtgcttatactaatcgtaccaaagaatttcatatttacttactcacctgtactatgtactctcacataaaatacacgagcataaatttggaatcatacagcaatcacactccacagtcctnacttgattcatatatacataccccctgagctatcttattgagatccaatactcaaatcgaagcaaccactcattttaatcttgtctcgctcacaaacactattatccttaccaaaccaccgcataaacttattctccacccttccctgaaactactaataaattacactcggattactcctcacccaccctgcgacgatactacaaatgtgatatataaccatagagctcagtttaatacctacgctagagagacaagcctaattaatcgaaaaatagaatcttgctaagcctgctgctaactagataactctacgcgcatatcaattctcttcctttaacttactgaaacagttgcagccggcacattggaatctgatatttcaatagttatatactacttcttctatcagaaaatccatacatattaatgaccaagctttgagctatttgatttcaccccgattgacaggtaatgcaagtaatgaaatgcccgtggacacggtctgtgtcgaccaataccattacgcgtagtgtctaccattccatatgttattgctcccccttttcccttagtcctatcagccacataaattttaaacttacagacaacacattacgagctccacgtaatcatacttacatacgttccaattacttctacttagcctctaataacctatcaaaaacttcttttagccacatataccttgtgaattatagactgaaactttaacaactcaataagcttcccataaagtggaaataaataccctctttgaagtgactcctaaactatatttaatccttaaaaagacctttttttaaaacccccatttttt

SEQ ID NO: 700685 - DNA, 378 bp, Homo sapiens
ctttctagctcttctctctgcctttcactgtgttgatctaatgttaagatgagtgcctttgtagtcacgagatgacggctcacagtaatggaggcagcatacttaaatcaacaggcgattggcttttctttcccagaagcatctccttatctctctttagtccaaagatggttttccctgtgtgtccctgagtcagtcactgtgagaggggatgaacgtgccgtgattttcatagaatgatcatgtgtgagtagaaaggatgctgtgaagccactcagtattcaccacgatattgcttttaccagtggcgaagaattacagggatacttggcaggacattttccttataggctaatcaccggacaatagaggcctatt

SEQ ID NO: 700686 - DNA, 636 bp, Homo sapiens
gtgatctttgcgcccagtcgttgggtggccgagccatctgagggggaggcaccagcaccgacagggcagccgttggtgcttgagcaaggggtgctctatctgcgtcgctatcgtgagtatgagcggcgtttagcgattggtttgcgtcggattgccgctgcacggttgcccccggctgaatcggccgcggtggcgaccgtgtttgcggcgttgtttccacaggcacgcgctgggcaggatcggcaggcatcggcggcggcgttggcgttgcagcgtgcgttattgctggtcacgggggggcctgggaccggcaagacaacgacgattgcgcgcctgttattgctgcgtgtcgcccaggcgcggcaacaggggcaggcgtcgttacgtattgcgctggccgcgccgacgggccgtgcggccgagcgaatggctgaaagtttgcgtgcggcggcagggtatgtgtctgcggcggggggggatgcggcgttgtttgccgcgttgccgtcgggagcgagtacggtgcatcgtttgcttggggtgatccccgatacgccgcgctttcgtcattgtgaggacaatccgttgccttatgacgtgatcgtggtggatgaggcttcaatgatgtttacctcaagg

SEQ ID NO: 700687 - DNA, 515 bp, Homo sapiens
  misc_feature (281)..(281): n is a, c, g, or t
  misc_feature (308)..(308): n is a, c, g, or t
gggaagaacctagcgttcgaccgtgcagtcgtcaggtatgcgtactatccgatcggatcacaacgtcttaagtgcgacagattgcttgacgccccaggcagtgacggcacagccgggcatcgtctttgatacagctgtaccaccggcaattttgccccgtttgaccccagaacagccgcacagcgtcccccccgcacggaccgcacagcgtgccctgctttcggattggtgggtgtacagctttacccaattggcgcatgccaaagcggagcctgctcctnatgcgggtcgccgtattgccgagccantcaccggagggcaggacgaaccagcctggccacaggatgccatccaacagtccctgcctgggagcgaagtgcccgccgacccccgttttatcggcatccgttttggtgtggcactgcatgaagtgttcgagcgtaccgacttcctagcctggagcacttggcgcgccaatgcccccgtgcctgcgacggaacgtgccgtgttgctcc

SEQ ID NO: 700688 - DNA, 168 bp, Homo sapiens
aataagctcctagtccagacgccatggtgcatatcacagaggaggacaaagactactatcactaagcctctgggcaaggtgatgtagagatgctggagtagaaccctagagactctgattgtctaccatgaaccagagattcttgacagctttgcacctgtctctgcc

SEQ ID NO: 700689 - DNA, 512 bp, Homo sapiens
gccaaacagtgcactgtggctcgctaccggcaccttctatcagacggaacgcaccgccttatggccactgctgggtgatccccaggcagtgacggcacagccgggcatcgtctttgatacagctgtaccaccggcaattttgccccgtttgaccccagaacagccgcacagcgtcccccccgcacggaccgcacagcgtgccctgctttcggattggtgggtgtacagctttacccaattggcgcatgccaaagcggagcctgctcccgctggccgcgccgacgggccgtgcggccgagcgaatggctgaaagtttgcgtgcggcggcagggtatgtgtctgcggcggggggggatgcggcgttgtttgccgcgttgccgtcgggagcgagtacggtgcatcgtttgcttggggtgatccccgatacgccgcgctttcgtcattgtgaggacaatccgttgccttatgacgtgatcgtggtggatgaggcttcaatgatgtttacctcaagg

SEQ ID NO: 700690 - DNA, 571 bp, Homo sapiens
  misc_feature (18)..(18): n is a, c, g, or t
tatgtgtaccccgagtancaatgcgaccggcctcgaggtatcgagcacacaagatgtaacaggatgtacaggatcaacctaaatgtttaaggtccaaattgagcagctaaagcaacaaaactaccaacaggcatcttcttttccccctcatgaagaattattataagtaatttcagaaatgagagaaagaaataagtggtctctggaatgagtgagattcttgaaggatgcagtgaacaccagaggaagaaaaacaatgaaaggcagcaacaggtggaagctgttgagttggatggctaaagaagttctcaaaaaatcatttccacaggtgtctgtcccttctaatttgacgttatggtgaatggttgcatggatttgaaacaaaggcgacaagaatgtatggctggaacttcaggctccgaggaggttaacgttctagagcacaagttgaaacgaagctgatgaaaatgcaccacattgttacagctagagtgtgaaaaactacaaatccgtccttgcagaaacagaaggaatttacagaagctacaggagaagtgttgagcaagacgaa

SEQ ID NO: 700691 - DNA, 372 bp, Homo sapiens
cacaaagtcagcctcagtctctcctgcctggatcactatggggggcttcagcccagggtcactgaggacactctcaccagcatcaatgagttatttgagacatttgaggatgtccaaagcagactggggtcagtctgacaagaaagtctaattctggttccatttcagagaaagagaaatgacttatcaagggtttgttcctcccctcacagaaagaatctcattggttcataaccagataagagttgttccagttttctggttctggagactcaaactgattaataagctaattgcttctattttatatggtcattagaacatgaataaatggttgaattcagcatcatgtgttcagtacagagacagaaa

SEQ ID NO: 700692 - DNA, 503 bp, Homo sapiens
  misc_feature (269)..(269): n is a, c, g, or t
  misc_feature (296)..(296): n is a, c, g, or t
gccaaacagtgcactgtggctcgctaccggcaccttctatcagacggaacgcaccgccttatggccactgctgggtgatccccaggcagtgacggcacagccgggcatcgtctttgatacagctgtaccaccggcaattttgccccgtttgaccccagaacagccgcacagcgtcccccccgcacggaccgcacagcgtgccctgctttcggattggtgggtgtacagctttacccaattggcgcatgccaaagcggagcctgctcctnatgcgggtcgccgtattgccgagccantcaccggagggcaggacgaaccagcctggccacaggatgccatccaacagtccctgcctgggagcgaagtgcccgccgacccccgttttatcggcatccgttttggtgtggcactgcatgaagtgttcgagcgtaccgacttcctagcctggagcacttggcgcgccaatgcccccgtgcctgcgacggaacgtgccgtgttgctcc

SEQ ID NO: 700693 - DNA, 324 bp, Homo sapiens
gccaaacagtgcactgtggctcgctaccggcaccttctatcagacggaacgcaccgccttatggccactgctgggtgatcgctggccgcgccgacgggccgtgcggccgagcgaatggctgaaagtttgcgtgcggcggcagggtatgtgtctgcggcggggggggatgcggcgttgtttgccgcgttgccgtcgggagcgagtacggtgcatcgtttgcttggggtgatccccgatacgccgcgctttcgtcattgtgaggacaatccgttgccttatgacgtgatcgtggtggatgaggcttcaatgatgtttacctcaagg

SEQ ID NO: 700694 - DNA, 177 bp, Homo sapiens
cacttcaggtttagccatcccgccccacaatcatcatgcctgttacgcggataatcttgccggtacctatcaggtttgatcagccacaactgtcgatccgagtgccgaccgagttgtgcttgattgccaatgcatccgcgcagcacgatagctatctgctggcgatgcaacaatgcg

SEQ ID NO: 700695 - DNA, 697 bp, Homo sapiens
gccaaacagtgcactgtggctcgctaccggcaccttctatcagacggaacgcaccgccttatggccactgctgggtgatccccaggcagtgacggcacagccgggcatcgtctttgatacagctgtaccaccggcaattttgccccgtttgaccccagaacagccgcacagcgtcccccccgcacggaccgcacagcgtgccctgctttcggattggtgggtgtggttgcccccggctgaatcggccgcggtggcgaccgtgtttgcggcgttgtttccacaggcacgcgctgggcaggatcggcaggcatcggcggcggcgttggcgttgcagcgtgcgttattgctggtcacgggggggcctgggaccggcaagacaacgacgattgcgcgcctgttattgctgcgtgtcgcccaggcgcggcaacaggggcaggcgtcgttacgtattgcgctggccgcgccgacgggccgtgcggccgagcgaatggctgaaagtttgcgtgcggcggcagggtatgtgtctgcggcggggggggatgcggcgttgtttgccgcgttgccgtcgggagcgagtacggtgcatcgtttgcttggggtgatccccgatacgccgcgctttcgtcattgtgaggacaatccgttgccttatgacgtgatcgtggtggatgaggcttcaatgatgtttacctcaagg

SEQ ID NO: 700696 - DNA, 645 bp, Homo sapiens
  misc_feature (96)..(96): n is a, c, g, or t
ttcatattctagaagaaaaggatgtatggattaaaaacattgactttttttttaataaaacaaacaaaagagtgtggaataagaaaacagagcatnctatatatcccaaaagcaatatatccaaaagttttccttgagaaaaaaaaaaaccagcttgctcaggaaagagaatacagattgttttctctttgtaagtatatttgaattttttatgatcaaacatgactctcaatttactgcaaaatacgactgcagaatgtgtgagtcatgtatctaatctgctttgaaatattgttcctaaagaacataggtacttataatcctgtacaatccacagttggagtccacaccttgtgacaacaaaagacaactcaaatcagcttcaagcatggatcataactaaccgcggggctattttttccatctgtaataaagaatgttccaacatctttaataatcgaagataatcctctgtcgtcatcttgagcatctaggttataaaaatacatacagtgctttgaagaaaggttctggtccactggtgtcacgtgaaggtcagattatggaaaactggcattgttacaacaagaaatgaaggctgctcatgttttctctgggtatttggaataaagtatctcatagtta

SEQ ID NO: 700697 - DNA, 142 bp, Homo sapiens
acgtacgttttggaggtcctgtggggcagcgccacatggtgaagtgaaccaccgacgaatagaaaaagctaccttgtgagttgtgcccttcgccttgcccatactgctacgagtatcccgaggtcgatatctcgtaaatctc

SEQ ID NO: 700698 - DNA, 797 bp, Homo sapiens
tgagggccaaacattccttccagtgagaagattcaagactagctgtgacttgaatatatgtttcaaggtattataagatgtgatgtgttgtcagtataagaaaaggtcgacaggaaacaatctgatatgccatttatagaaaaagccatacgacttgagcattgctaattcggcgaagcttctgcacctgaattagagcacattaacctagttgctgtatataaaccaaatcactgtctattccttctctgaaatcatctctcctcttttaaaccttaacttatagctagaataaatcactatttaatgggcctctaataacttataaaaactacgggatggttaggcctggtttaactaatttatggagagctatttgcaaacttaagtggtgtaaatgtaatttctacttgtgaatctgagctgtagcagcccagagggagctaggcaaactattccagaacacaatgataagtgatcagatgctttgtaatgtaggatttttaacctgttgattatgggtggcgaccttaaatgtaataatgttcacctcgattttcctggagtaacaaccaagcgtgggtagtagcccacctgcatgaaggacggcagtgtaacaaatatttgtgcctggatttctcccatttgtgttaaggaaggggagattaacggcggatggggcttttatttaatatatcctattctttagccagtgactgggaagagggctgtaaataagacaaaagtcgggaataaaggcaaagctgggtttaagaaagcccggaagttgggttaaa

SEQ ID NO: 700699 - DNA, 472 bp, Homo sapiens
ccgccttccccgacagccctagtgttacactggttctggagtgtctctgcggtacaaagatgcacttttcttcatggggcaaagtctgcctcttctgccaggcagttcccatttgcccctgtccagactgtttcttttggcttagaccataatcctctgctgcccggggattggagccctgtgctaggaagctgtcagttttgagtatcattggcctttcagcacatgggtgagaaaacaggccacgacttgtcactcagcactaacccccagttcttgaacagcctcctccagccctgctttaggatgacacaatgaataacacctaggcatagaaaccagtctctttggtttgtttgtattatgttctacaatattaaagatctaaatacaaaggatataatacagtcttgaatctaaagtaatttgctaactattttgattcttcagagaactactaataaaaatctaa

SEQ ID NO: 700700 - DNA, 203 bp, Homo sapiens
tagaggatcccaatgatggcgtcagctcccaaatgggtaccctgcctatctgcgcttagtgcctcagaactttggtgtcattggtctcagagagcactttgccatccactatcctggcgggtggtggtctttttggattggtttgcctggatgttgcttgcttgtccaatggcatcaccaatgattaaacgtcctacgccatc

SEQ ID NO: 700701 - DNA, 430 bp, Homo sapiens
atatcacgcaccacacacactccttttgaggcatctccagctcagtcactgccacctatacactcatcttcaactatgagaacctcggtacatctagtaatcctccagccacaccacaaacatgtccactctaccttcaaaatggagccaaaatccctctccagacccatcgcccttcaccaagtctgttatcagctccccagtgcaagccagcactcccctcacctggactaatgtcacagctggcagttccccagtactaccctcctcctagctcttgcaccacctagcagtctgtatctcaacccaaatagccacagccatcttttaaaaatatacatcaaggtatggcactttttagttcaaaacctaacaaattctcattagatcaaaattaccatagactaaaaagctgtagaacatctggctg

SEQ ID NO: 700702 - DNA, 753 bp, Homo sapiens
taaaaccaggaaggagaggatgcagtccagttggctaacagggttaagtctgctatggctatacaaggaggcctgactgaacttcccggggatggaggactaaagagagcaccaggtgaaggacatctttaaggaagagcagcagaaaaattacgcaagatgatggtgggcaagggatctctcagctaagaggacggatgacagcctttagatctagaactagcccttagaaatggaagggctttttaggttatggtgtacggtatcaatggtttggtttcttattatggtcaaatcttttctacacgaatgatgcgtctcctacctctttatgccagaggcagaacctaacaggtgcccttatgggcttcgtcgcgtgttgtcaacatttagcccccatggattgtaacgggcggtttacctggcgttaaacacagattccggatttggaaacacgcggcatcactgggcgctgatgacactttggtcttggaacgaagctgctggacaggctgttggaatcaccgaggggatattccaaaaggccaaggtccttcggagtagctggccttctagcacataaggagatacctcggtgcgagcccatggcgccacgcgagcgacgaagggcgtgctcaacagggactgaccgctgaaacacaggtcagaccagggaaaatacgctgacaactagggctgccaacaccaggctgtgtatcccaggactgagagacactcctcaagttgtcgggc

SEQ ID NO: 700703 - DNA, 177 bp, Homo sapiens
ggctgggagagcggtcggcggggtttcattcgcttgcatgcctgagaggagcggagtctgccagtgtggtgtccatcatgtctctttcaagcatgttcgacacctcgtattcccaggggtcgttccaaaaccgcttctccacacagtaaccggtgcttctctggtgtccatgcatag

SEQ ID NO: 700704 - DNA, 642 bp, Homo sapiens
agcgggcgctcgcgcacggaccctgcactggggtacagctcggaagtcatcaggttccatggtcgagatgctgcctggtgccgagatgtctgctgctagtccgacggtctctcctcgctgctggtatgcctcgtggacgtgcgcgctgctggtattctagtcataggatgggatactgccccactactggaggcatcgctcacaacaccaataacccgttaagaccgttaacacagtcagtatcaaccacacgatatgtagtcacgaaggatcagcatacctcacgatcggcccaaatgtaaagcgctatatgacaggcagatcagacacacatgcatatcaacacataccgtcaactccctacatcgcaaacccgcacaactccctaagcctcacctcccatacctacacataaccacccacagcaattacatgccacacaactgacacagctcctcgaccatacctacaactcattctactatctcacatcactcgcccacagtacgcccttcactctatcctcctaacaacccactcatccacacgcaaactacatcaattatatactcagacacataccccacacctctactacgacattacacgccaccaaaacacattaactaactacaacaccta

SEQ ID NO: 700705 - DNA, 449 bp, Homo sapiens
agtaaaagtagagacgaggttagcaaatatgctcaatatcatgagtcatgatgaatgaaggatgctaaggtagaagcgccatgaacaagtcgcaaagagacgggatcgtgcctctgctgcgaacttctatctttatatcttaatgcctcatgctcgtatttgtaccccaatagcggtaatgcagaatgtaactcgactggtacatcacatattgtttcttccaacaaactggacatcgacaacctaatcatctcgtatttgaacgtatacatcatgatttaatacccatctctatatctctaaaaggtgtatgagttctatatgcaccccggggctccacttcattccatctctgtctctttctgctctttttatgcgtgtgctaatatgccaacgtggcactgaattaatttttgcaatgcccatttctataagtctaaatgcaatca

SEQ ID NO: 700706 - DNA, 750 bp, Homo sapiens
cgccctcaccaggttagacggtacgatgacggttgctccagatggccggtcgacccgtcggcaaggggcggtggctcccggggtggccggggccggcccggttcttctgctcccggtgtggccgctgtaggtaatacttagcgagcccggactgggtgccggggtagtcgcagtgcggacactgtagggcagctcgcctgtgtgcactcgcagatgcactttgaggtgatgtgctgagcggaaagattttccgcagaaaggacaatccttgcgggtggcgccccggcccccttcaggcggggtccctccaaccaacagcccattctcttcctgcgtggcggtcgatcttgcctgggccccagcagcagaggcagagtgccccggtccctcacccgggcgcgggtgcagggaagccagagagcccagcgacctgccccgggcccaggtttcctcctcggcctccaccacctcctcttcttcctcaggctcctccgcacggtgccggcgagcccgggccgggagagcagaggacagcgggcgaagccctccgaagctggcgcccgggccgggtcagcacctgcgttggccggcctgccagtgcaggtcaggtagccaaaggtggggctccgggtcgccgggtggacggggccaaagagcgctgggcccacggtatagccacaggccaggtcagaggtgggggcgcgggcaggcccgaggcaggccccggggcacgcagtgggcccagcttgt

SEQ ID NO: 700707 - DNA, 273 bp, Homo sapiens
ccgatgaccactagtcatctactgtgatctaaaaacacgtcaaggctggagcacgctgactcatgcctgtaatcccagcacttaagagaggccaagacaggcagatcgcttgagcccctggagttcaagttcagcctggagcaacaaagtgagaccccaatctctacaaaaagacttttaaaacgtggacacataaatataaataaatcacacaacacattcatatcatttggtatgtaggaaaagcagttagctgtagagtcctcaaacttg

SEQ ID NO: 700708 - DNA, 166 bp, Homo sapiens
tatgagtctgcacccagattgtctgatctgttcaatggaatgacgcgagcggattacgacagagagcgacctgggcagtgctcctgtgctgcgtatccacgatctgtttcagcaaaaccctgttcctgactggccaaccaactcgttcagcaaacaggtctctcag

SEQ ID NO: 700709 - DNA, 606 bp, Homo sapiens
  misc_feature (1)..(1): n is a, c, g, or t
  misc_feature (248)..(248): n is a, c, g, or t
  misc_feature (346)..(346): n is a, c, g, or t
  misc_feature (390)..(390): n is a, c, g, or t
  misc_feature (442)..(442): n is a, c, g, or t
  misc_feature (449)..(449): n is a, c, g, or t
  misc_feature (602)..(602): n is a, c, g, or t
ngacatatgattatgagattaaggaaccattattattaatctcatgggtcattttagtttcaggagcctcatggtaggaaaagttagaataataaataacaaagcatcattttagtgccgtttccagaaatttgtagtggtaagctatgcattaataaaattaatcctctggatgcagaaagacattttataggtagatgtctgtcatcccaggttgagtggtgattgatgtgttggtgtaaccatcntcctgttttgcagtgagaaatggttttagatgaagataatgataatgttgggcaacccaattgagtatgacctgaacgacagctttctagatgatganggaagaaagactatgagcccaaccagatggaaggattctgactngggaaccggaaaaggaagatgaagagaaggaagatgtggaagagcttttganagaagcnaaaaggtttatgaaaagaaaatagtaactaacttctgtagtcatatctgccctacatttactttttctttgtgggaaaacatttatgacctaaggaggtacttaagtgacagttatttccctcctttgatagttaatgacctttactactgcncctt

SEQ ID NO: 700710 - DNA, 715 bp, Homo sapiens
cgccacccgctggtctgcccagcactgcctgggacgctgcgtggccatccatgctccccgtgggtgcgttggtggggctccgcgtggcctgggcctcggtgattctgccctgcctgcttccccgtgggatgcctgctgctgcaaatgccagtgttgggtgctgcctgggcccggccagctgccactctagtgcatgctgtgaatgtgcagcttgctttacatcctgtcctcccctgcctcagcagagttggtgatgaatgtgcagtggtgtgggtggtgtggaaaaataaacagtgaaaagtccttgcaccatgtatgatcaggcgtcccccacctttgtgcatcccaggcccggccatggggacctcccatgtactgctgtgccatagaactgctgagcatgcgatggtgcgacgagcttcgacgggctcggtgcaaattccaaggtggcacaacggtgctggtggaagctgactccctgacatccatatcttgcggcatctgcaagcagcagtttaacaacctaggatagccttttgtagctacacaagcaaagtggcttgccagctgacatggcacatccgcagcagcccccagcactggtccagtttgtaatcggaggaaacatgtgcctgcagccagactcagaccagcaccagaaacatcacctcggagacccagacaatcacagttcagctccagaatttgttttgac

SEQ ID NO: 700711 - DNA, 1577 bp, Homo sapiens
  misc_feature (118)..(118): n is a, c, g, or t
  misc_feature (261)..(261): n is a, c, g, or t
  misc_feature (321)..(321): n is a, c, g, or t
gttcgtgtgccatgatgcgtacgctctgctttcgcagcatggggtcgctgggggcatcccacgggaagggccgctgctctagcggtagcacacaagtggccgccgtaagattgccagnacacatgggccaatgtggagcggttcatcttaggcagtagtgtctgcacacgcgctctaggcgtgtgagacagtggaatgacacgtgaacgagtacccagaaagcacctgctgtatctgcgtcatcatgaagtgatctggagncatgcctcccagctgagcgatgtgagaatctgagtgaaacgactatggatgagcacgctnttgatagacacaaagtcgagcatgcgagcaattccaagaaattgtcgtggattgtgaagagttggaagtgcttcggagaatatagctggaccatgaacattggactgcatagaatttgagagaacaggctggcgtgacacggcgatcacagagggaggcatctcgcgcaagggttccagagtataacatagcgtaggcttggggcacgcggccacaggaatccactcgcgacggcactggttgggccacccgtaagattacgtagcatggcgaactccactggatgcagtaagtaagacatctcttcgtcgaagaccgcgcgaacggagcgtgcataaacgaatatcctcccggcgcatggatgcggagacaccagttggggcccagcctggggtcaaaacgtagcgcagggttccgcacaagccatgaactctttcctaggccggcacgtcctgctgagcacttcgacacagaggtttcccgagagagcctcggctgtagacaggcggcactcggcaacccactgactattgcttgcttgtcccaattacaaggcattgagcgctctagtaggtggtggcttcccccgtcgtgctcccggaactacggggacgactgctggcctcaagctgaacttcagcacctacttctgcggtgtgcaaagcatgcgcgtacttcattgacaccccgagcggggcgggaccaccctagaggcgcgcacacggcccgcggccgaacgaccgagtgagcctacggagcaaggtggtactgccccatccgtggagccaacccgctggaccgaggccacggcggacgaccagctagcacgccacatcggcccgtgcacagcccagagacacaagcccagactcggcacccctggccacacacgaagcgcggcggaacccaccccagtgacacaccgccacaggcgacaaaacccccgtcggcgaccccaacgagcttgcccgtacgaacgcgcacccgacagccccgcaaacgaggcccggcacaaaacaccagccccgtgggccacacaccgccttagccacaagcaactaggaccgatcctcacacgcgcacaccacgcagaacacccaccaacaccccaacccaccgacgacacgccccccgcgccgcaccccgaccccccgcagcatccacacccccacacaaccaccagtcgtccctcgatcaccccgtcccctacccacccccccgctgccgctcctccgaccacgaaccgcacaccaccc

SEQ ID NO: 700712 - DNA, 100 bp, Homo sapiens
ttggttgcagcgccgtgtactcttcgccgagcaagaccacgtacagatagccttcgacccggccgtcgaccttcagcggcgcgacgctgaacaccttgcg

SEQ ID NO: 700713 - DNA, 119 bp, Homo sapiens
aagcagtaatacagactcaggttgtgattgatgcaggagccttcgccgtctttcccagcctgctcaccaaccggaaaactaacatccagaaggaagctacgtggacaatgtcaaacatc

SEQ ID NO: 700714 - DNA, 132 bp, Homo sapiens
tgaccccgcccgcgagaacccccccgcggggccgctccccacgtgccccccccgggcccccgcggcttgtttaaaaactgttgtggaaaatgagggcgtttgtccggaatgataaacttttatttattccca

SEQ ID NO: 700715 - DNA, 454 bp, Homo sapiens
  misc_feature (3)..(3): n is a, c, g, or t
gcntgtgatctccgctcgccgcaacctccgcctcccgggttcaggcaattttcctgcctcggctcctgagtggctgggattgcaggcatgtgcaccatgcccggctaattttgtgttcttggtcgagatggggtttctccatgttgatcaggctggtctcggactcccaacctcaggtgatccgcccccctcttggcctcccagagtgctgggattacaggtgtgagccactgcgcccagctctttttttttgttgttgttaagactgggtgttgcactgttgtttaggctggagttaagtgatgtgatcatggctcattgcagcctcaactttctggactcaggtgaccctcctgcctcagtctcctaaagtagctgggaactaacagctgtgcgcccaccagattctttgcttggtggttttgccccaaggggccttccggtttcctttttg

SEQ ID NO: 700716 - DNA, 560 bp, Homo sapiens
  misc_feature (441)..(441): n is a, c, g, or t
cagcagacggctacataatgtacatgggtcaattaaacattgcttctggtcctcttcgtggctcttaattaagaaaataatagcaccacaagcagaaggttactaggagtgatgcatatatcgtcatagtcctggacagtgaccatatgaagtttgatggccctcctttccttttcttctcttgattttctcatccatggccacgaagatcgcagcattctgatcatcagctcattatgcagaggctgtgaggaaggctgggaacagaaagatccaattggccagagagaggaagtctttgaacatctctcccaccatgcagctgctcaggctaacacatcattacaggtcgtgatgtttaggacaggactggaacgatggtctgcttcacgacatacaaagggatggtgaccagcagaatcagcagccatattgccaggnagatgccaatggcaatgtttgccttcttcctggagtgccccatgggggttcacgatgacccaatacctctgcacactgaggcaggtcatgaagagaatggaacagtacatgttgccata

SEQ ID NO: 700717 - DNA, 161 bp, Homo sapiens
aaaattttcccccaccccagggggggttttcaggcctgggggggggccccggggggggggggggggaattcaacctgggggttggaaaggacaaaacttcctcttgaaaaggggggggggggaaaaaaatttgaaaactattcccaaaaaagttttgttta

SEQ ID NO: 700718 - DNA, 604 bp, Homo sapiens
tcagggataggctgaggggtgactggatctaatcttcattcatgtgatttaaatgaaatacacagggttacctggacaccacactttttcccttgggaaaggattatagaatattccagcataatctatttggatatcatcttgttctatcctaaataacagaagagggaagtgacaattggcataccagtgcgaaacagggcatgcatgttaatgtttacatagtatttgtcttttcctaggataaggtttaacacttaccttgctggagggtacttcttcaaagcaatcaagtggtttatagttttccattaatgagaggagaataaattttgacttattatgtttatccacaatccaaacaaccagagggttcaaattaatacacttggggagtttcattgtgcatttgacggttttaagaacaagaacaagagtgagattacaggtcagcttcttaatgtattcaaagaataaaataagatttattttaatagacatcttttagattattacatgggctcaaacatagtttttcctaccgtctagttctgctctgagtcagggctatcaaaattaaatcatgtttaacctgtggaaaagt

SEQ ID NO: 700719 - DNA, 137 bp, Homo sapiens
tactgaagacaccttaaagcggactccaggaatatcaccatacagcatgacgctttgcggaccaacatccacgcagaccaggaacttcatcataattcctacaagtaagagttcatagcgagccgtcattagggtac

SEQ ID NO: 700720 - DNA, 277 bp, Homo sapiens
  misc_feature (35)..(36): n is a, c, g, or t
  misc_feature (38)..(38): n is a, c, g, or t
  misc_feature (51)..(51): n is a, c, g, or t
acgagatgtcaagagaaccgacgagttatacaagnnanagacgagatgggnaagttgctgagacaggaaagcctagggaaactttagagctagatacaaaattcacacagggaaaggcacggactctgggtgagactgggaagtgtcctcagaccattcatgcaccatgcgtgacgagctccgcccctatgggccctgtcacccctgacaggatatgcctcacacaacgcttcatagattgatacaaccattgctagtcctcatgccctgccaccag

SEQ ID NO: 700721 - DNA, 217 bp, Homo sapiens
  misc_feature (35)..(36): n is a, c, g, or t
  misc_feature (38)..(38): n is a, c, g, or t
  misc_feature (51)..(51): n is a, c, g, or t
acgagatgtcaagagaaccgacgagttatacaagnnanagacgagatgggnaagttgctgagacaggaaagcctagggaaactttagagctagatacaaaattcacacagggaaaggcacgagagaagagacgagatgatttcaaatactttactatcagctccacaatagagctgccagtcactctatctgcatttcatctactaacaccagtctt

SEQ ID NO: 700722 - DNA, 918 bp, Homo sapiens
ctggaagggaggcctggagctctgctatcaccaatccttcccttccctctactccacatccttctaaggagcatgatttgaaaactactttcctaggttaatgggcatgtgcatcaatggagagaatagtataagcaagtgagatgtagactaacgcaacaatttagatggagaagcacattttataaaattaataacttaaaagtctcaagttattaattgttgttgttcttcgctaactcaattggaagtaagactatgaacatatttcatgtgtgtttccacattcccacgttgaatgcgggtgtttcaggaagtttcaggtattctcttaagatcctcggaaaacactggtgctgtcaagtccagagttcctcgtacacggaattctatatctctgggctgtacatctaacaagaaagcacattatgaatacaattatactagaaggccttgtggtaaaatgccactgttgtaagcttctctttatctatccatctgtacctaaccgtgaagtcagcaatttatggcaagaatactctcattgcgagagagaggcagaaggcttccaacaattaagattgacttattgtctttagcagagctcacgtatcagttcccgagagagacatttctcttgagttgcacagtgtgccttcctccctcctgggtgtcaccattgatcgacattgtgaagtggcttggcataaacctgctggaccctggaatgtgaacacctgttctgtgggaactgccggaaagggctgaaaatacctttgggaaacccataatattgcccgcgaattaaaaaaacggggtaacgggaaatgtaaccaaaactgggtctggagagaaccccctcttagtgtatataggaaacccaaaatggggcgaatcacaacgagggacatttacaaa

SEQ ID NO: 700723 - DNA, 120 bp, Homo sapiens
cctctgaagaccgtggcttgggttgagaaatattatggcacttaagacagtgctttggatggaggaatatcatggaactttagttttcccgctttattgagctttggctgcgtaaaagtg

SEQ ID NO: 700724 - DNA, 200 bp, Homo sapiens
ataatggagctgaaaaattttttctgcctccttgcagtcccaaccatgatagtgtcatagtgccaccccttactcatgtgtttgtggtgatgctggtgtaaacaaacctgtgctacccgtcgtgtaaaattttagcccccccggttatgtatagttcataacccttgatccttataataaatgattatgtccctggtcca

SEQ ID NO: 700725 - DNA, 514 bp, Homo sapiens
  misc_feature (48)..(48): n is a, c, g, or t
  misc_feature (51)..(51): n is a, c, g, or t
  misc_feature (58)..(58): n is a, c, g, or t
  misc_feature (60)..(60): n is a, c, g, or t
  misc_feature (69)..(69): n is a, c, g, or t
  misc_feature (82)..(82): n is a, c, g, or t
  misc_feature (85)..(86): n is a, c, g, or t
  misc_feature (92)..(92): n is a, c, g, or t
  misc_feature (284)..(284): n is a, c, g, or t
  misc_feature (286)..(286): n is a, c, g, or t
  misc_feature (323)..(324): n is a, c, g, or t
  misc_feature (374)..(374): n is a, c, g, or t
  misc_feature (381)..(381): n is a, c, g, or t
  misc_feature (395)..(395): n is a, c, g, or t
  misc_feature (417)..(417): n is a, c, g, or t
  misc_feature (445)..(445): n is a, c, g, or t
catgaatcatcagtaaggagctcgaaacgtcgttacgttgaaacgatnatngatcatncncacaagganccaagctactggntgnntcgagnagaggggtgaagggtctgtgctagatcataaggcacggggtggcgatgtggcagagaagttgcttgtggggagaccttgcttttaacaggcttctggaaaagctagggaaaagtggttgcccgctttccccctttccctccccttcaagcaccgctgagattgggctttattattaagagctgctataaaancngcttgcttaaatgttaagagaagcccaggggtacttnnagcattccttcggatgcttcactccagaaagagggagttgaggcaagtcntcattantaataaaaatcagntgaggctgacacttctcttgancttaggataatagcgctttgttgtctcncctgccacaggaaggctccatggttgtcctactttaagccttcggtgcctttagtgggggttaataggg

SEQ ID NO: 700726 - DNA, 136 bp, Homo sapiens
  misc_feature (20)..(20): n is a, c, g, or t
gtagggaatttcccccaaanacctgacttcccaccatcagcctacctgagtagctgggactacaaatgcgcaccagcacaccaagtaaatttttgtatgttttcgtaggacggtctatgccgtgttgcccatggct

SEQ ID NO: 700727 - DNA, 132 bp, Homo sapiens
cacgaggggtcaatatggtctctctatcaaatgaaacatcggtttcttcacatctggatcagttttggtctgttacttgcatctgcacagggacacatcttcacacctgtgcttgatgctgcgtttaaaatg

SEQ ID NO: 700728 - DNA, 273 bp, Homo sapiens
cctgaacctcatccgcgcgttcacgcagggaggattcgccgacctgcgcgaggtgcactcgtggaacaagggcttcgcgcagaacccggcgaaccagcgctacgagggtctcgccgccgagatcgaccgcgcgatcaagttcatggaggcggccggtgccgacttcgacgagctgcgccgcgtcgagttctacacgggtcacgagggtctgctcatggactacgagcgccgtatgacccgcatcgacttccgcacgggcacgccgtacagcgc

SEQ ID NO: 700729 - DNA, 1352 bp, Homo sapiens
ggaggacacggctccagggcggcgcggcccaggcgcaggcgcgggtgtcggtcccaccgcgcgtcgtcctcgccccggccccggccaatcccttcgaatttggccgaggccgggaaatactagctaatcacggcgcgcgctgttgacgccggccaatgggagctccggaaggctgcgtggagacgccagcggcgggcggtggacagtcatggcggcccggcgcggggctctcatagtgctggagggcgtggaccgcgccgggaagagcacgcagagccgcaagctggtggaagcgctgtgcgccgcgggccaccgcgccgaactgctccggttcccggaaagatcaactgaaatcggcaaacttctgagttcctacttgcaaaagaaaagtgacgtggaggatcactcggtgcacctgcttttttctgcaaatcgctgggaacaagtggggagacagtctctcattctgtcacccaggctggagtgtagtggcacgatctcagctcattgcaacctctgcctcctgagttcaagcgattatcctgcctcagtctcccgagtatctgggatgccgttaattaaggaaaagttgagccagggcgtgaccctcgtcgtggacagatacgcattttctggtgtggccttcaccggtgccaaggagaatttttccctagactggtgtaaacagccagacgtgggccttcccaaacccgacctggtcctgttcctccagttacagctggcggatgctgccaagcggggagcgtttggccatgagcgctatgagaacggggctttccaggagcgggcgctccggtgtttccaccagctcatgaaagacacgactttgaactggaagatggtggatgcttccaaaagcatcgaagctgtccatgaggacatccgcgtgctctctgaggacgccatccgcactgccacagagaagccgctgggggagctatggaagtgacccaaggctgcccactggagacgcctctccctgcagtcccccgagaggtgggagactcgcggaaggccccgtccccagcggagtccagaccccacaacttcaggagctctttcccggcagcagagatctgcaggctgcctcttctgccccggagctggggtgcactggggacccccgtggtggggaccttggcagtgtggacatgagcagagcgatggagcagtctcctgccctctcccctgtcctgatggcactctgttgtattttcttactgaagttcagtgataactctgagcagtttcattgtgatcactgtaaatggtaatcagttggaattctcctaaatgtcttccagacactagtaaaaaacgacctgaaaatt

SEQ ID NO: 700730 - DNA, 1140 bp, Homo sapiens
ggaggacacggctccagggcggcgcggcccaggcgcaggcgcgggtgtcggtcccaccgcgcgtcgtcctcgccccggccccggccaatcccttcgaatttggccgaggccgggaaatactagctaatcacggcgcgcgctgttgacgccggccaatgggagctccggaaggctgcgtggagacgccagcggcgggcggtggacagtcatggcggcccggcgcggggctctcatagtgctggagggcgtggaccgcgccgggaagagcacgcagagccgcaagctggtggaagcgctgtgcgccgcgggccaccgcgccgaactgctccggttcccggaaagatcaactgaaatcggcaaacttctgagttcctacttgcaaaagaaaagtgacgtggaggatcactcggtgcacctgcttttttctgcaaatcgctgggaacaagtagaatttttccctagactggtgtaaacagccagacgtgggccttcccaaacccgacctggtcctgttcctccagttacagctggcggatgctgccaagcggggagcgtttggccatgagcgctatgagaacggggctttccaggagcgggcgctccggtgtttccaccagctcatgaaagacacgactttgaactggaagatggtggatgcttccaaaagcatcgaagctgtccatgaggacatccgcgtgctctctgaggacgccatccgcactgccacagagaagccgctgggggagctatggaagtgacccaaggctgcccactggagacgcctctccctgcagtcccccgagaggtgggagactcgcggaaggccccgtccccagcggagtccagaccccacaacttcaggagctctttcccggcagcagagatctgcaggctgcctcttctgccccggagctggggtgcactggggacccccgtggtggggaccttggcagtgtggacatgagcagagcgatggagcagtctcctgccctctcccctgtcctgatggcactctgttgtattttcttactgaagttcagtgataactctgagcagtttcattgtgatcactgtaaatggtaatcagttggaattctcctaaatgtcttccagacactagtaaaaaacgacctgaaaatt

SEQ ID NO: 700731 - DNA, 364 bp, Homo sapiens
tggcagaggcatgcatgtgctgtcctagttccagcacaggtgagaagcgccaggaagtactggtagcttgactagctggtaagatagttatcattctgtcgtaactgggttgaaactctgacttttggcacagtaattcctggggttctggctttgggtagcatcaccagggctatttgggtggggcagacagaagacacacagctggctgtcctctctctcctcgtcatgatgggtgcaccagatgatgctgttgtccatcgagatagggggagtgtaccccttctcagaatgggccatttacaggggagcttgggagaaccaaaagattggggagccccttagagatgagcgcctactcctt

SEQ ID NO: 700732 - DNA, 324 bp, Homo sapiens
  misc_feature (197)..(197): n is a, c, g, or t
gcaaaactgacctgtgttggttgaaagcagtgtattaagggcaaaagaggtcacctgggtataaagatggcaagaaactgaaggaaaatgggcatttcagtttcattattcagcagatgggtacctattagctcaaaatcaataacctcactgaatctgatcaaggggaatatgtttgtgagatttctggtgaaggnggacgtctaaaaccaacttacaatttatggggcaagctttaagagtatccatgagaaggtatcaaaaatttccagtaactcaggaatccagttcaggaaacccctgagtcaacaagtaacccagaaa

SEQ ID NO: 700733 - DNA, 1554 bp, Homo sapiens
ggaggacacggctccagggcggcgcggcccaggcgcaggcgcgggtgtcggtcccaccgcgcgtcgtcctcgccccggccccggccaatcccttcgaatttggccgaggccgggaaatactagctaatcacggcgcgcgctgttgacgccggccaatgggagctccggaaggctgcgtggagacgccagcggcgggcggtggacagtcatggcggcccggcgcggggctctcatagtgctggagggcgtggaccgcgccgggaagagcacgcagagccgcaagctggtggaagcgctgtgcgccgcgggccaccgcgccgaactgctccggttcccggaaagatcaactgaaatcggcaaacttctgagttcctacttgcaaaagaaaagtgacgtggaggatcactcggtgcacctgcttttttctgcaaatcgctgggaacaagtacagggtctctgtgtcatgcaggctgagtgcagtgcgcaatcacagcttactgcagcctcgacctcccgggttcaagtgatcttcccacctcagcctcccaagtagctgcaactataggcacgttaacacacctggctaatttttgtaaaattttttgtagcgatggagtcttcactattgttgcccaggctggtcttgaactcctggacccaagcagtcctcctgccttggtttcccaaagtgctgtgattagaggcatgagccaccctgcctggccttatttttttttaggagaaatgtcttgctctgttgcccaggctggaatgttgtggcatgatcacagcttactgcagccttaaactcctgggttcaagtgatcctcctgcctcagcctctggagtagctaggactacagaatttttccctagactggtgtaaacagccagacgtgggccttcccaaacccgacctggtcctgttcctccagttacagctggcggatgctgccaagcggggagcgtttggccatgagcgctatgagaacggggctttccaggagcgggcgctccggtgtttccaccagctcatgaaagacacgactttgaactggaagatggtggatgcttccaaaagcatcgaagctgtccatgaggacatccgcgtgctctctgaggacgccatccgcactgccacagagaagccgctgggggagctatggaagtgacccaaggctgcccactggagacgcctctccctgcagtcccccgagaggtgggagactcgcggaaggccccgtccccagcggagtccagaccccacaacttcaggagctctttcccggcagcagagatctgcaggctgcctcttctgccccggagctggggtgcactggggacccccgtggtggggaccttggcagtgtggacatgagcagagcgatggagcagtctcctgccctctcccctgtcctgatggcactctgttgtattttcttactgaagttcagtgataactctgagcagtttcattgtgatcactgtaaatggtaatcagttggaattctcctaaatgtcttccagacactagtaaaaaacgacctgaaaatt

SEQ ID NO: 700734 - DNA, 1517 bp, Homo sapiens
ggaggacacggctccagggcggcgcggcccaggcgcaggcgcgggtgtcggtcccaccgcgcgtcgtcctcgccccggccccggccaatcccttcgaatttggccgaggccgggaaatactagctaatcacggcgcgcgctgttgacgccggccaatgggagctccggaaggctgcgtggagacgccagcggcgggcggtggacagtcatggcggcccggcgcggggctctcatagtgctggagggcgtggaccgcgccgggaagagcacgcagagccgcaagctggtggaagcgctgtgcgccgcgggccaccgcgccgaactgctccggttcccggaaagatcaactgaaatcggcaaacttctgagttcctacttgcaaaagaaaagtgacgtggaggatcactcggacagggtctctgtgtcatgcaggctgagtgcagtgcgcaatcacagcttactgcagcctcgacctcccgggttcaagtgatcttcccacctcagcctcccaagtagctgcaactataggcacgttaacacacctggctaatttttgtaaaattttttgtagcgatggagtcttcactattgttgcccaggctggtcttgaactcctggacccaagcagtcctcctgccttggtttcccaaagtgctgtgattagaggcatgagccaccctgcctggccttatttttttttaggagaaatgtcttgctctgttgcccaggctggaatgttgtggcatgatcacagcttactgcagccttaaactcctgggttcaagtgatcctcctgcctcagcctctggagtagctaggactacagaatttttccctagactggtgtaaacagccagacgtgggccttcccaaacccgacctggtcctgttcctccagttacagctggcggatgctgccaagcggggagcgtttggccatgagcgctatgagaacggggctttccaggagcgggcgctccggtgtttccaccagctcatgaaagacacgactttgaactggaagatggtggatgcttccaaaagcatcgaagctgtccatgaggacatccgcgtgctctctgaggacgccatccgcactgccacagagaagccgctgggggagctatggaagtgacccaaggctgcccactggagacgcctctccctgcagtcccccgagaggtgggagactcgcggaaggccccgtccccagcggagtccagaccccacaacttcaggagctctttcccggcagcagagatctgcaggctgcctcttctgccccggagctggggtgcactggggacccccgtggtggggaccttggcagtgtggacatgagcagagcgatggagcagtctcctgccctctcccctgtcctgatggcactctgttgtattttcttactgaagttcagtgataactctgagcagtttcattgtgatcactgtaaatggtaatcagttggaattctcctaaatgtcttccagacactagtaaaaaacgacctgaaaatt

SEQ ID NO: 700735 - DNA, 171 bp, Homo sapiens
  misc_feature (80)..(80): n is a, c, g, or t
  misc_feature (87)..(87): n is a, c, g, or t
  misc_feature (96)..(96): n is a, c, g, or t
  misc_feature (143)..(143): n is a, c, g, or t
  misc_feature (153)..(153): n is a, c, g, or t
ccgcgccgggagtccccttggtttaaaacccggctttaagggccctggcctagttccccacttgtttttcaggggggaancaacttnttgggcctnggctttgagttggaaaaggttttaaaaaaagtgaaaagctggaatgngggggaaaanaaaaagcttttttgccca

SEQ ID NO: 700736 - DNA, 239 bp, Homo sapiens
cctccagagaggctgggagtacaggcgccacctccatgctcagctacacttgtttgtatttaatcgtaaaaacagggttcaccatgttggcaggtgggtctcgaactcctgacctcaggtgatccacccacctcggtctcccaaagtcctgggattacagtcatgagccaacgtgaccagccaatgaaaaagcaggacgaggacttgaaggaacggatgagcacgctgggatcccaggg

SEQ ID NO: 700737 - DNA, 433 bp, Homo sapiens
acagagcacagtttattccacaatcccattgtttatgtacctgtcatgctgtttaacaaattgaagagagagagagagccagaaggagagatagataaagaagagagagagagaacaaaagaaagagcttgattctaagtaatatcttgtcactagggtattggattgttcaataaagatgctatgttttagggatttatttagattacatcaatgctgttggtctgattgactaagagtaagctagtcataaagtagtcataaagatgcatgatggttcttacttggagaggaataacctcttccctgatcttcaccctctccttgtgcttcttcttccttgttctcttggctttcagtaggaagtcttccatcttctcctcctcttcctcacccttgacttgcaggtctggtcgacgcggccgcgaattta

SEQ ID NO: 700738 - DNA, 1228 bp, Homo sapiens
  misc_feature (1045)..(1046): n is a, c, g, or t
  misc_feature (1049)..(1050): n is a, c, g, or t
  misc_feature (1055)..(1055): n is a, c, g, or t
  misc_feature (1064)..(1064): n is a, c, g, or t
  misc_feature (1068)..(1068): n is a, c, g, or t
  misc_feature (1070)..(1070): n is a, c, g, or t
ggaggacacggctccagggcggcgcggcccaggcgcaggcgcgggtgtcggtcccaccgcgcgtcgtcctcgccccggccccggccaatcccttcgaatttggccgaggccgggaaatactagctaatcacggcgcgcgctgttgacgccggccaatgggagctccggaaggctgcgtggagacgccagcggcgggcggtggacagtcatggcggcccggcgcggggctctcatagtgctggagggcgtggaccgcgccgggaagagcacgcagagccgcaagctggtggaagcgctgtgcgccgcgggccaccgcgccgaactgctccggttcccggaaagatcaactgaaatcggcaaacttctgagttcctacttgcaaaagaaaagtgacgtggaggatcactcggtgcacctgcttttttctgcaaatcgctgggaacaagtgccgttaattaaggaaaagttgagccagggcgtgaccctcgtcgtggacagatacgcattttctggtgtggccttcaccggtgccaaggagaatttttccctagactggtgtaaacagccagacgtgggccttcccaaacccgacctggtcctgttcctccagttacagctggcggatgctgccaagcggggagcgtttggccatgagcgctatgagaacggggctttccaggagcgggcgctccggtgtttccaccagctcatgaaagacacgactttgaactggaagatggtggatgcttccaaaagcatcgaagctgtccatgaggacatccgcgtgctctctgaggacgccatccgcactgccacagagaagccgctgggggagctatggaagtgacatgagcagagcgatggagcagtctcctgccctctcccctgtcctgatggcactctgttgtattttcttactgaagttcagtgataactctgagcagtttcattgtgatcactgtaaatggtaatcagttggaattctcctaaatgtcttccagacactagtaaaaaacgacctgaaaattgaaaaaaaaacccgggnnttnnggggnggaaaaagnaagngntggccttgggaagtcttccctgcccccttctgaacgggggaatccggcccctagggggggaaattccagccggcatctgcacgagaatcaacagaagtatgaacgagctaacaaccgcacagggggggcccattagccccgaatcacatataagcacg

SEQ ID NO: 700739 - DNA, 154 bp, Homo sapiens
  misc_feature (63)..(63): n is a, c, g, or t
  misc_feature (70)..(70): n is a, c, g, or t
  misc_feature (79)..(79): n is a, c, g, or t
  misc_feature (126)..(126): n is a, c, g, or t
  misc_feature (136)..(136): n is a, c, g, or t
cattgtgattttaagactcataactagttcccatccaagcatttgggtaacaatggtgtgaancaacttnttgggcctnggctttgagttggaaaaggttttaaaaaaagtgaaaagctggaatgngggggaaaanaaaaagcttttttgccca

SEQ ID NO: 700740 - DNA, 552 bp, Homo sapiens
catgaactgggtctttcctcaattttccaacaaaacaaaacacttagcggtggagtaaaagaaacttaactggaaggttggggagaagacacagggaaatgactatccaaaagtaagtatcagctctcaccacacccagaatccatgcaacatcacagcatgttctttcggccatatccggagctctgagacttcaccaggtggcagaggccagggccctccctctttcaacaacagtcctctctttctatgaattcacttctcccttcccaccccatgaagaaggggtcttagagggtaacaacccaaaggagtctatcggcctggggataataatctagtcggggcggctggccatccatgagcctacattcattcattcattcatgcaggaactatcacttagttggtatcaggcatggtactaggggaggaggttatagcaacaaataagacggacaggaccctccttcataaagaagacaaacaataagctagtaaactaaaaactatacctgacaattacaagtggggaggctttctatgaaatac

SEQ ID NO: 700741 - DNA, 315 bp, Homo sapiens
agttgttttacgtcaccatagatcaactaaaaaaaccacagcttgtgtccactcaccaggaccctggatctcacaggtgtctcagaattccttctcctgggactctcagaggatccagaactgcagcctgtcctcgcttggctgtccttgtccatttacctggtcacagtgctggggaacctgctcatcatcctggctgtcagctctgactcccacctccacacccccatatacttcttcctcttcaacctgtccttggctgacattggattcacctcggccatgtatcccaagatgattgtggacatgcaatcg

SEQ ID NO: 700742 - DNA, 1171 bp, Homo sapiens
  misc_feature (988)..(989): n is a, c, g, or t
  misc_feature (992)..(993): n is a, c, g, or t
  misc_feature (998)..(998): n is a, c, g, or t
  misc_feature (1007)..(1007): n is a, c, g, or t
  misc_feature (1011)..(1011): n is a, c, g, or t
  misc_feature (1013)..(1013): n is a, c, g, or t
ggaggacacggctccagggcggcgcggcccaggcgcaggcgcgggtgtcggtcccaccgcgcgtcgtcctcgccccggccccggccaatcccttcgaatttggccgaggccgggaaatactagctaatcacggcgcgcgctgttgacgccggccaatgggagctccggaaggctgcgtggagacgccagcggcgggcggtggacagtcatggcggcccggcgcggggctctcatagtgctggagggcgtggaccgcgccgggaagagcacgcagagccgcaagctggtggaagcgctgtgcgccgcgggccaccgcgccgaactgctccggttcccggaaagatcaactgaaatcggcaaacttctgagttcctacttgcaaaagaaaagtgacgtggaggatcactcggtgcacctgcttttttctgcaaatcgctgggaacaagttaggtttcctcttcattcaacacttaatgttgagaatttttccctagactggtgtaaacagccagacgtgggccttcccaaacccgacctggtcctgttcctccagttacagctggcggatgctgccaagcggggagcgtttggccatgagcgctatgagaacggggctttccaggagcgggcgctccggtgtttccaccagctcatgaaagacacgactttgaactggaagatggtggatgcttccaaaagcatcgaagctgtccatgaggacatccgcgtgctctctgaggacgccatccgcactgccacagagaagccgctgggggagctatggaagtgacatgagcagagcgatggagcagtctcctgccctctcccctgtcctgatggcactctgttgtattttcttactgaagttcagtgataactctgagcagtttcattgtgatcactgtaaatggtaatcagttggaattctcctaaatgtcttccagacactagtaaaaaacgacctgaaaattgaaaaaaaaacccgggnnttnnggggnggaaaaagnaagngntggccttgggaagtcttccctgcccccttctgaacgggggaatccggcccctagggggggaaattccagccggcatctgcacgagaatcaacagaagtatgaacgagctaacaaccgcacagggggggcccattagccccgaatcacatataagcacg

SEQ ID NO: 700743 - DNA, 148 bp, Homo sapiens
tctaacttgtgttgaggagatgtataagaaagctcatgctgctaaacgagagatcagtctataaaatgagcgcagaagaagttacaagaagaggtggaccgtcccaaaatgttccttgctcagaaagaagggatggggtagcgtccaa

SEQ ID NO: 700744 - DNA, 984 bp, Homo sapiens
atgatgtgctagaatgattttattaacatcatgagctgggggagggggggagaagaaaggtgtgcttttgtgttgttgtgtaaagaaatatggcaggtataatgtgtcaccgttggtattataagaaagggtgagtataatatatcacagggcagatattatatctgtggtagagatgatatatatgatatctgttgtgtgtggggttgtatatatagggtgtttttagaaaaaatattgtgtgtttttagagagaaaaccacacactgtgggatatagtagagaagcaatatttgtaaagaagcgctctctcacaatatgtgtgaaaacacatgtgggtggctctgtgagattatgtagagagagagagaaaaaaatatatatagggccacatattataattggtaagtagctgcacgaggtttttttctcttgtatatcagagacacttctcccacaaatagagctgtccgctgtgggagagagcgcacgagaagtgggggaaaatactattgtgagaagcgcgctgtctcacagagagagcgcacacagaggatatatccacactatgagaggaggagataatacctcgttgtgctctttaaaacattccctcctcgcgcagaggagagaatattaagatacgctcacatttttaagagaaatatttttgttatataaaatatttaccggtctcttaagaatatgaataaggcatattgtgaagaaaactccccagacttctataggataacatcaggggatagaccatttaaagaggtggaaggacacacaataggatccctttctacaacacatattgcccttgacacaaacattttttctacatccacaatttttttctcacatgacatattttttgtggggggcggggccgcgggggaatttgggatttaaatttttaaagattctcctataaatttaatccccagtccaaaaaagtgggccaacaattttacttta

SEQ ID NO: 700745 - DNA, 215 bp, Homo sapiens
tcgctctagaggatccgcgtcaggcgaggactgtggactgccacccttagtacgagcaagtcaaagatgccctcggtttacttctcgttccttctcgtccgttaatgacattaacactattctcagcagagctcctaggggagccagagaattataccctagccaatggcttacacacccctccccacagtcttcgtctgatgggtaccgagctc

SEQ ID NO: 700746 - DNA, 232 bp, Homo sapiens
gcgactctagaggaccccaacaccgtctgagaactcgggtcttactttcggctctcctctcaagtatactagttaatcattactgcaaaagtatagagggttattccttgctatattatgcttggttataatttttcatctttcccttgcggtactatatctattgcgccaggtttcaattctctatcgcctatactttattttgggtatatggtttggcttaggttgtctg

SEQ ID NO: 700747 - DNA, 92 bp, Homo sapiens
  misc_feature (45)..(45): n is a, c, g, or t
  misc_feature (47)..(47): n is a, c, g, or t
ggtcagcccagctcacagcccaactccaacgtcagctctggcccngncccatctcccagtagcttcctgcccagcccctcaccgcagccctc

SEQ ID NO: 700748 - DNA, 366 bp, Homo sapiens
acttttccccggcaggtttgcctccctaagtttgtgaagccgcagccctgccctgtcctgtcctgtcctgacttcatttttccttttggccaagtttgtgtcccatcagacttgcagcctttcagcttaacagttggccggtcctgctggccccttttcctttggcccccctttttttaaacaggatgtgcacacatgggccatagccctaaggactcctgccagaccccccagcccacacctgggcctgtttacgggtgttccccccccccctttttattttggagcatatcagggaaaaaaaagtttatgatagattgccttccccctcccagggcccaaattaaggttcgatgcccactttta

SEQ ID NO: 700749 - DNA, 334 bp, Homo sapiens
ccgcggcgtgttcatgcaaaataaattgaaaactttctggaaaagctttatcattctagatgccattaagaacatttatagccaggtatggtgtctcatgcctgtaatcccaactcttttggaggtggaggtgggagggttacttaaggcctagagttcaagaccagcttagacaacagagtgagacccaatcgctacaaaaaaaaattccaaaaaaaaaagtgggccttggggccacatgcttgtggcccaaacaactgggggggttggggcgggggacctgcatgaccacaccaggggggacccgggctggatttcgaaaccatggccatgg

SEQ ID NO: 700750 - DNA, 421 bp, Homo sapiens
gacgacttttaaacaggaaacagtatactactctgttgtcagtcgaaaaccctctgtgacttgacagtcaaacatccttttctgtttggtgggcaacctatcagatgtcagtatctggtcagtactttatctattctagcattacctggcacatcgcgaggcctccgtaagtcctgtcgttgggactcaggtaagtcctgaggttgaatgaaggcataagcgtccccttaaatatacttagagaatcttaacttagttcgaacttatttcatccccttctcagatttcaaatgtgaaaggtcagtgtactttagtcatctgtctgccacgtaaagccaagaatatcaaatatactcaaatggagaaaagtatgttcttatctctttcattttaaaggagatatttgaagtatcagtactca

SEQ ID NO: 700751 - DNA, 394 bp, Homo sapiens
tcttatcagggcagacaggcaggacaggtagcacagggcagaagggtcaggatgggaccagagcaggacagggccgagagtccaggtaacagtagagcaggtatagggcaaggcagggcagtacagggccagatccatggcaggcgcagggcaaagccaggcccattgccaatgcaccagccctccctacaaggctcctaccacctggccactgctgcagcccgtccatcgctgtaagcctgaaccccaaccctggctgcagccacctgccttcctagtgcggccgctctcctaccgctctggcgcactgcaatctccgtcactgccacccacccgcagcaaggcaagccgtggtgtcgcaggctcaaggtgtctccacatccgtactggccca

SEQ ID NO: 700752 - DNA, 245 bp, Homo sapiens
  misc_feature (226)..(226): n is a, c, g, or t
gatccaaatcagagcgtagtgccggtctgcacactagagactagacagataacgacgctactatagaactacgtgcagcgcatccttgaagcaggctgttgtcgtgatggctgtgagaaccagccattggtgattacattgtggcagagccagggcttgtcatgatatttgcgccttgtgtgtgagagatataagagaactcgactgggtatcaggaagagatggnaatcagagaaatcccatca

SEQ ID NO: 700753 - DNA, 250 bp, Homo sapiens
atcacactgacctggcagtgggatggggaggaccaaactcaggacaccgagctttttggagaccaggccagcaggagatggaaccttccagaagttggcaacttttgtggtgccttcttggagaagagcagaggatacacagttccatatttcacacacagagagggctctcccgagacccctcacaccttagatatgaagccctgtttccagacccaccatacccatagtgggcatatctttctctgcc

SEQ ID NO: 700754 - DNA, 80 bp, Homo sapiens
ctggtggtctacccttggacccagacgttctttgactcctttggggatctgtcctctcctgatgctgttatgggcaaccc

SEQ ID NO: 700755 - DNA, 261 bp, Homo sapiens
caccagcaggttcctaagggtttcagccataaaatgtaaaacctggataatcagtgtatgttgcaccagaatcaacattttttttaactgcgaaaaatgatgttctcatctggaatttattttctcattcttttggcatctatagctaatatattttatgttgtaaattgttctatctagcatgttaaacaaagataatatactttcgatgaaagtaattataggaaaaaattactgttttaaaaagaacttgattatgtt

SEQ ID NO: 700756 - DNA, 131 bp, Homo sapiens
gcagcaacatttgttacaagagacatctgaaccttatcccaggctggacagaaggcctcagctgctttttcgcgttttggctcagtcatcaccaaaaagctggaggatgtaaaaacctccccaccttttaa

SEQ ID NO: 700757 - DNA, 1204 bp, Homo sapiens
  misc_feature (400)..(400): n is a, c, g, or t
gtcaagactctactggttccgataaactgtgggtcaccagcagtcatatctcatgaactggagccatcagtggtttggtgtcctgggtcgataatggaatggggcaatgatattctgcgctgtcacgtgaggcgtccttggcaaaatacgtgggaacattatcgctcgattatactcgtctacatcacctccaagaggcatcgccatttggatggatcgtaatctatgtgacatgtgtagtgattggaactaattacgaacgagtgcttatgaatcctatacctcgggcctgattctccaaaccaggcggggagaacacaccgatctcgaacatatcaggagcactcgttgtagatggataggttgacgctcactagatagagggacagcttggtacttngtggaactattgctcatagaggaacttgtgctggaggttgaaggagtgaccattccggagcagatgcgaatcacaatgtcgacgttcaagtcttatgaggcaacttatcccatgcgttatctatgaagatggatgcctaagggacatgtggaacgtggattctccggttggcccgcgcaaactctgtgatcatatcactacgcttgtggtgtgtagggaaacaccgcttggagtccctaatggattccctgcggtcgtgcatcctagcggctggggttacccggtgctctggctaaaggggcaataagacttacacgccccagcgaagggcatttcgccctgtacttattggaacgcgtgttagatacatttgcccacgcacgtgtagaaaatacgcatgccattggcattcgtacttccaccaatatggtgcacttttccccgaagacagacacatgcggcacaatccttcttttatggcacccggatgggacttagcctacgcccaagatacgtgcgagttggttccaaagggcctttccccttccgcaagcggaatgcccgccgttaacgttctcaaccgctacccacagtgtcatgcctcaggcctatccgttgcacacggaaagctggaacacaaattggtaatgcgtgtcccgtgggggatggacacacatgtgcaagccccaggaaggggccttgatgcgggaaggtgcggcccttcccgaacccattaaacctcggtcatacctgagatagaattcaacccccaggacgaccttggtacatacagtacggatccac

SEQ ID NO: 700758 - DNA, 82 bp, Homo sapiens
gcagcggcagcgggagctgtccggaggccggcgtcgagggtttgccgctgtctctgctattcccatcctccccataggggct

SEQ ID NO: 700759 - DNA, 571 bp, Homo sapiens
gctgcctcacttctgcttaggaaagcggctgttgctccataactctaaccagcacagggctgaggcctgcaggtgcacacctggcagggtaggcccttcccaaggtgtggtgactgtgccttactgcaggtgcacacctgcagggaggcccttcccaaggtgtggtgactgtgccttactgtacatgctcggaggcctggccatataggagggtgggtgatgctgaaatcaccccccatcttaagtaattactttctggagtaatcaggtggaaatccatagacaaatgagaaaaaaaaaaaaaaaaaaaaaaaaataagaaaagagaaaaaaaaaagaaaaaaaaagaaaaaaaaagagcaggacagagaccgagaacaagacgataacggaatgaccagtctcgaagaagagacgaaaacaagacaacaatagagtaaaagcatcacgaaaacaaaagccacacacgcgcgcagaacacgccccaactgccagggagagaaacgccacaagaggagaagcagacgctcacgggtcagacgaagacatgaagcagccagcccaccaaacg

SEQ ID NO: 700760 - DNA, 372 bp, Homo sapiens
  misc_feature (366)..(366): n is a, c, g, or t
  misc_feature (370)..(370): n is a, c, g, or t
  misc_feature (372)..(372): n is a, c, g, or t
gaacaacaaagcctagatgaccagccaccacctgtttaagggccatgatttattgaaatattttgaggcccactgttgagaccctcttgcctcacaaaaaaagatttccttttaaaatatccactgtcccattgacaatgaaccctagacaccctgagagcctctgatggaaatgtacaaggagattaatgttttcatacctgcccaacacagcatctgttctgcagcctgtggatcaagaagtcatttcaacttatgagtcttattatttaagaaatatatttagttatttagtaaagctatagctgacatactttcttgagatggaatctactcctggtgaagatgctgtgaacatttgaaatntttngn

SEQ ID NO: 700761 - DNA, 120 bp, Homo sapiens
ggaacaagcacgttggtggatggtcttggctgtacataagctttttcacttcatgtaatcctattggttcactttggctagtgtgcctagcaaaagtgatgtgttccccgctgggtaccg

SEQ ID NO: 700762 - DNA, 372 bp, Homo sapiens
  misc_feature (259)..(259): n is a, c, g, or t
  misc_feature (266)..(266): n is a, c, g, or t
  misc_feature (326)..(326): n is a, c, g, or t
  misc_feature (371)..(371): n is a, c, g, or t
aggggcacgagattccttgaaacccaagaagttgaggctaatgttgagctgagatcacacccactgtactccagcctggatgacagagttggagactctgtttcaaaaaagcagaaaagaaaatatagtttgattctcattttttaaatttgcaaatctcaggataagtttgctaagtaaattagtaatgtactatagatatactgtacaaaaatgttcaacctaaaacaatctgtattgcttatgttttatgtatacncttgtcntttaagactcccaatagcctttgtaactgatggcttacttaataaatcggccattcttcnatcttgccacaaccatctattccaggcaccattataaccatccgng

SEQ ID NO: 700763 - DNA, 194 bp, Homo sapiens
tccataagttgaggctcagtagagccatgattgtgccactctaccctagcttgggtacacagtgagacccggtctctgggacaaaaaaaagggcaggaagtttatggtggcctaaacagtgttccaatcctagtaagtactttggtactagacacaaaattttactttgaacaagccgcagaccgcggcccgtt

SEQ ID NO: 700764 - DNA, 403 bp, Homo sapiens
gacatgtgtatagcggtggacatagtagaatgagtgccgatatagccattatatggattggctatttggataatgcaaaagtatatgacttggtttataatgtgatacgccataaatattaaagtgttgaatactaacagtgctgactacaagaaggatgtagtattttggctttctgcattacaacgtcttctggaggaagggagcaggatgggtttcattggtatctagtgtgtgtcttaccatctttctaaatcggcagtgtaactgcatagtttaacttcctgtctgtctccctcatttaactcttccctccttgtcttatgtatgggctttggtgtatcagagcatctttcttggcagcatcctagtcttacggtttcaagtggtcgggtaccgagct

SEQ ID NO: 700765 - DNA, 370 bp, Homo sapiens
ctgacctcactttgcgagtcagtccggtgaggacttcaatctctgtctcttctagctgccttcctcgaccgcactctcagggctggccagtgaggatgaggagggtatgagagtggatatgcgttcctcccggtaccttctcatatgtcaaatggtcatcgttggctcagtgtgtgcacagcttggagagagcaggatccaagcagtacagtgcagccattgccttcaccctggccctcttttcccacctcgtcaatcatgtcaacatacggctgcaggctgagctggaagagggcgagaatcccgtcccggcattccagagtgatggcacagatgaaccagagtccaaggaacctgtggagcaaagagg

SEQ ID NO: 700766 - DNA, 310 bp, Homo sapiens
ggtcggacaggatgggtccccaggttggggagagcccaagtgagacaataatgaacaattactgtatgaacaattgttagaaacagctaatcacaaacaacctgcgggcacaatgacctcattccacacgtagcacccttcagcaggaccctataaaactttcctccagcccttgcctctttgcaggtagccccttctctgctgagctgcccactgcaacatattttcacaatttctctaataaatctgcccttctttacctacaactatcttggtaaatggctttaccacctgcaaagcggaccctagg

SEQ ID NO: 700767 - DNA, 160 bp, Homo sapiens
tcgagctcggtaccagtgaaaagcagctgatacacatttcgccccctttgttcccccaaagtacagtgcttgtattactgggatattctaagtaatcttttctgtttctttgcagctgtgtgatttattgttcatttaatggggaaaagaccctgatgat

SEQ ID NO: 700768 - DNA, 254 bp, Homo sapiens
ctctggggaggagggtgcttttctgagacactttctttttctcacacctgttcctctccagcaggccttggctctcttgaacttttggccgccatgtgcttcccgaaggtcctctctgatgacatgaataagcttaaggcccgaatgcaccaagccattgaaagattttatgataaaatgcacaatgcataatcaggacgtggacaggtgatgtctagcctgacagatcttgaggacgactttcaagagggctt

SEQ ID NO: 700769 - DNA, 119 bp, Homo sapiens
gaattgtatattccggtcggttccaggccagtaatagtagcctttgtgacaccagtgcggggccgagggaccacttctctgggaggagacccagttcctcatccttgggacggggtacc

SEQ ID NO: 700770 - DNA, 645 bp, Homo sapiens
gtggtaacctaggggtggcagatggctgtgatcctggcaccaaagaggcccgcggatgcggtgcggagactccatgaggccctggacatgaacaagctgagtggaggcggctgtggcgcaggactctggtgtgtgaacgtgtgtgtgccatgcttgggaggcgagtgaatgtggaccctgccactgggagcttatgtcaataagcccatgcggggctggctgcatcccaactgacaaagtcatggtgacccgttggtttcctacttggttcggtacatgggttgtgtggaggtcctccagtcaatgcgtgccctggacttcaacagccggactcaggatcaccaggaggccatcagtctggtgtgtgaggcttgtgccgggtgctaagggggcgacaaaggacggagaaagcccatgtagcctggccgctcagctctatcctggggaggagtaaactgaaatatgctggaatgccaaatcactctcaccgtgtccaccagacaggcctcaacgtcatgggcggagaagtgccagaccagaatcatcggcaagcaagcagcatgcaaatctatactcatagtgcgatccggacgggggatccggagcaaagagcgagtatgtcggcgtatgttggcaaaagaccct

SEQ ID NO: 700771 - DNA, 1096 bp, Homo sapiens
agcggcggaggttgcagtgagccgagattgtgccactgtactccagcctggcgacagagtgaaaaaaaaaaaaaaagaacatcttatatatatgtaaagattatagactacggggccgggcacagtgggctcatacctgtaatcccaatacttgggggaggcagaggcaggaggatcacttgagcgccaggagtttgagaccagcttggacacacatggaccccattctctaaacaacttgggcaaaatttgggccaacgtgcacggggtgtacaacaataagattccagggtactcgggaggctgcagggacgcgaacgtgactagcttgcgctccacggaagttcacggccttgtacacgcctggccgactgtgtgcacaccacgggcacccctccacagcacagtgcgagcccacaaggcgagcgaaaacgatcaccatacataaccaacaagcaatacgcccaggtacccgccgaccaacacccccgacagcgccccacagacacgaccaccacagacaccaaacaacaacaacacgaacgaagcacaaccaacacagacaagtgcaaggactacacattaatacacaacaaaaagtagagttcataaccatcagaaaacagaaaggagcaagatctacctccatcagagaagctcgaaccacaagtgccaagacgcacaacgtaaccagagacgacgtaagacttcgcgaacacagagcagacaccaagtaccactacacccacacaaagtgatcagcagacagcaccactgtgcaccactttaaccacgccaccccccagcgcaggacgaagcggcgcacacttagcaagtctgcgatcaagcgcaaacaggggcgcgctatgtcgaataacctaacacatagaatgcgcctctctcggcctcgcaaaccatacggccgagcctcacacgcaccaatggagacagaatcacagaggcggcgacaatcataacccaccgcacatcaatatgaacgacccacgtcgggccctcacccaaaccaccacacaacaagcgcacatacagcacaacgggacaggagcattacccaagacgagacaccgatgcaaaa

SEQ ID NO: 700772 - DNA, 519 bp, Homo sapiens
cccgggcgttgtgaaaagaggaaggaatcgggacacaggattgggtcctcggctaggtgtggttgctcaggttgcatctagagctgaagcctcctcgcgaggcccccagtagcgagtgggcgaacgagctgggggttcacagcagcgccccaggcgcgggcgcaggagcgggcgggggcccggcgggcgcgcggggaggtgcaggcttcaggctagggcggcgccttcgtctccggctgctgtaggaccgcggagccaccgctccatcggcgacatcttggtggaggacgcgcaaggagaaacgctgttcgcgctatagctgctgcgccacgatctcagctgacctccggagagcggaggatagaacaggcaggaggcggcagcgcggagcaggcagtcggcggcgcgcggcaccatgtccccgggcagcggggtgaagagcgagtatatgaagcgctatcgggagccgcgctgggacgaatacgcgccgtgctaccgcgagctgctgcgctaccgcct

SEQ ID NO: 700773 - DNA, 141 bp, Homo sapiens
cgcaaaatatttgaattgtcaaaatatgtgttcccagctgaggctgaacaaggtgacacacaaatctcttgtatcagctctcatactgtaaacaagcgtccttacttgtggtactactatagtgccagtgtttctagtatt

SEQ ID NO: 700774 - DNA, 407 bp, Homo sapiens
  misc_feature (8)..(8): n is a, c, g, or t
  misc_feature (17)..(17): n is a, c, g, or t
  misc_feature (39)..(39): n is a, c, g, or t
  misc_feature (47)..(47): n is a, c, g, or t
  misc_feature (53)..(53): n is a, c, g, or t
  misc_feature (57)..(57): n is a, c, g, or t
  misc_feature (70)..(70): n is a, c, g, or t
  misc_feature (105)..(105): n is a, c, g, or t
  misc_feature (142)..(143): n is a, c, g, or t
  misc_feature (156)..(156): n is a, c, g, or t
  misc_feature (182)..(182): n is a, c, g, or t
  misc_feature (203)..(203): n is a, c, g, or t
  misc_feature (217)..(217): n is a, c, g, or t
  misc_feature (220)..(220): n is a, c, g, or t
  misc_feature (237)..(237): n is a, c, g, or t
  misc_feature (242)..(242): n is a, c, g, or t
  misc_feature (245)..(245): n is a, c, g, or t
  misc_feature (263)..(263): n is a, c, g, or t
  misc_feature (287)..(287): n is a, c, g, or t
  misc_feature (295)..(295): n is a, c, g, or t
  misc_feature (300)..(300): n is a, c, g, or t
  misc_feature (307)..(307): n is a, c, g, or t
  misc_feature (333)..(333): n is a, c, g, or t
  misc_feature (375)..(375): n is a, c, g, or t
taaggggngcccttttnttcaactgggctcaagtcagtntccagggnagcccnggcngcctccccccccncccagggggaccaaaagccttcatacatctcaagngggggggcaaaaaagggggggggggggggccgggggnnccccattcaaaanaaaacaaaaaaaaaaagtttttaggngaagattaaaaaaattttgcntttcataatttacncgnaagccatgctatccccnccccngtntgggcttgggggggggcngggcccttctcctttggggggggngggggggnttttngggtggnaaggggcttcctgttacaatgcctcncatatttgggatgacttttaaaaaaacaacaatgtgccatcnaagtcctcggcccccttgtgaactttgggggg

SEQ ID NO: 700775 - DNA, 132 bp, Homo sapiens
tcgcaccgcttcgtgagactcacctgcaagaagggaacttgagaagagctgccatagtagcgggggctttggcttaggaatctgggaccccaaggagaaagtagatgagccatcttgtcaagttcctgtgcc

SEQ ID NO: 700776 - DNA, 641 bp, Homo sapiens
taggccgtgcagttgtccggtaccaccctttcctctcgttgcggccgagcttgggtgtttggattcctggaccgtttctccctccacgtccgatgtttccaaggggttccgttagggcgactctccgttggtccctcggttggatcttctgctcggcgtgcccgcgcgtcgctgtagctgttggagtcgctgtcccgctgacaggatggtgtgtgtggtggtcgtgaccttgcgtcgtgtgtgaggactgtgccttattcaggcctcccgcgacccctcgctttcctgtttgctgatgagcggcagcacgccagtgtcgtctgttcgtcctctttgcgctcgcgtcgctgcgggcgcggtgaagcgcgatacatcttatttctctctctcttccttcctctcctctctctccctctcctctctccctctctctctctctcttctctcttgtcgacgcacgccctcccctcccctctctccacttgatcagacgatccatgtaaataaatatatcaaataataaaaaaataaaaaaaaaataatacatcaaataacaaaaaaaatacaaatcatacaaataattaaacaaaaacacacaaccacaacaaaacaaacaaataaacaaacacaacatagtcaaa

SEQ ID NO: 700777 - DNA, 285 bp, Homo sapiens
  misc_feature (215)..(215): n is a, c, g, or t
  misc_feature (265)..(265): n is a, c, g, or t
ttcggcctgacgccggtggagcgcagcgagacccggctcatctgccgcggtgtcggttcggcgcccgtgatccacgtcacggaaaagggagagcccggcttcgccgccatcggcttccgcgccgagagcctcgccgatctgggacgcatggccgaagctgaaaagctggctgtagaagacctcgactggcccggcggcggcaaggtcgtgcgtcncaccgaccccgacgggcacttgattgaagtggtggccggccagaccccgncgccagccctgcccctcccg

SEQ ID NO: 700778 - DNA, 500 bp, Homo sapiens
accgcccattaaaaaaaaaattaaaaagaagtgttttttgcctttttcatgatcctgaggccttcccagcctggtggggctgttagtgcaattaaacctctttttcctcccagtctcaggtatgtctttatcagcagcatgaaaacagactaatatacctcttctaatgaaggaagcagagatatggaccataccctgtgttcttcctataatatacgggatgtgtactgccagtaccacaatttgctaaacctcacaaattgttgggtgttgtaaggaggtgaagaaagttccaatttataatcatctactgtatttggcctgcttgagttgttgctctccaagcattgttcctaggtagattttcaggaatgaagatgaattatatattacaaactgttgccgatggcagtccagatgaatttatatggacaactggctacctggccatataccaagccagcttgacccagtctttttcaggccacttcagagagaga

SEQ ID NO: 700779 - DNA, 113 bp, Homo sapiens
  misc_feature (17)..(17): n is a, c, g, or t
  misc_feature (39)..(39): n is a, c, g, or t
  misc_feature (97)..(97): n is a, c, g, or t
tacatatagacttgagntagtaccctcggataaggggcnagccaagacaggagcatgtgtgccctcattttgtttctacttttaatttctgtgtgtnggccttatcgaggagt

SEQ ID NO: 700780 - DNA, 354 bp, Homo sapiens
gtcccttttccccttttggggcccccgatagaccagttgtagctcattccagcctgtcccttggatgaggggtagcctccccctgcatcccctcctgaatttcctttgcacctccccaagggggcttttttaagggttaatccttttaagagaactgcggcgttttattgtggttctccccctgccccttgccggcttggggggcccccctcctcccgccccaaaggaaaggggggccgctccggggcccccagagggggctgttttcctgggggttcccttggcggggggggggtttactggccggcctggcaaggttgcatttgttataaaggcccagctgtttaaaaccca

SEQ ID NO: 700781 - DNA, 366 bp, Homo sapiens
caggaattcggcacgaggttgaataaatttttttacttatataaaaaaggtcagctggacacggtgcctcacgcctgtaatcccagcacttcgagaggccaaggtgggcggatcacgagctcaggagatcgagaccatcccggttaacatggtgaaaccccgtctctactgaaaatatgaaaaattagccgggtgtggtgacaggcgcctgtagtctcacctactcgggaggctaaggcaaaagaatggggtgaacctgggaggcggagcttgcagtgagctgagatggcacccctgcactccagcctaggcaacagaacgagactctgtctcaaaaaataaataaataaaaaacaaaaaatataa

SEQ ID NO: 700782 - DNA, 945 bp, Homo sapiens
ctcttgcttcaagtcagagcggtatgtgtgataacctctcaataatgttgggtttacgatgcccagtaattaatttacttcaacatgaaattgagtatgatgaagtgggcatctatccaagtatttgggttgtggtcaagtttgtatagttattattgagattggagatctccagcctggggcagacagagtgagactcataagagatggaaacagaaggaatacacggaaagaaaagttggcttcgggagccataaggggggacttaattcatagcggggtagtgtaagaaaagttcctactgtgaatgatgagttgaattctcagggcaggaacttttgagaaatacaatttagtagattaggcctgcaatgggagtagaagatgggagatgatgtcaggcagaagacgataagtacataaatgcgactgaggaacaagaagaagaagcttatggtgattgtacagggaagtgggggatgtgccaatagaaaaggctatggcgatggttgtcgatctgtattcgacgccgcttttgggcttcgccaaggtggctgggtttgacaagagggttgatggaattgggactctggcacacgaaagttgaggttttgtatgatggtcctttcatattttcagataaaacataatgattatggagagaacttatgataaagggcataaggccaatatcttgggcatggaaaaattttactagaggtgggaaaactttacgggcctttaactttgtgccaaggacaaccaaattcatcttggtaagctgaggtttgaacattgcatattagtcatcgacatatatatgggtgtcgtcccgaaatttctgggttactatgaaatcgcttgatgtgacttggccacccgtgaatgtcgttctttgaaaaaagtattggggaaatataggactcagttgagatgaccaattag

SEQ ID NO: 700783 - DNA, 475 bp, Homo sapiens
gtagggcagatgcgacccacggcgctcgggaggaggaagaactacgtcggaactccagcgccggcggcggcggcggcggcggcggaggaggagaaaggaaagaggaagggggagcggcgagaggcggagacggagcccgacaggggcggcaccacggcacgagccccgcacagtccagtgtcagggagagcggctgctaagagcatggctgactgcctgcctgtctgccactcgacacctgccatagatacatctctcaatcctacgtggccacgcctggtccttgcttgccaggaacgcttcggccccgcagcttcggctttgctgcgtgtctcgaggtttctttaccttccaggaacagacggaatatttgggccccttttaaatttctgggaagttcactttgcacacgaagtcgtgacacacttacggggacctttatttcaacatttgcgaccatggccttaggtcggag

SEQ ID NO: 700784 - DNA, 790 bp, Homo sapiens
acctacagtggaactctgtcaaacgagctatctagcagacatggagctgaaagaccgtagccctttgatgagcttcctgtgtctcagcatcatccaggcccaggtggtctctgagacttgcccgctccgtgtcctgtacatggtacctgatctggtgtccttactatgctgctgagctgggagcctctgcacagtggctccctggggatggggcccatggccgacggatgctggtagcccctgtgtcgctccggcttggtcacctggttctccctcgtcgtgccgctgtcttacgcgtcttcgcttcgtcctgctacgcttaccccgaggcttgactccttccccatgcgtgtgcagtgtgctccactcgtcctgggtcttgcttgctagctaattgagtccttccgtctgacttcgcctcaggcttcacaccgtgcgtgctggcccgtgtgtagggggcagggaagggggaggcaagccggcacccaacagtgccactgccgacctggtgcttcccccgacaggagaacacacactctttccctagaagggttcctgtacacctaggggaggacccttatctagtgcgtgacacacaccaggctgtgtcccctcccggccttggacagcatccatgtgtggccctcaagtcctaactcctccggactatgtgcaacacgcttggagcgagctacgtacccagatgctccacagagcggcgggactacaacctgtgagccagcatggcagaccactactctctcatagacagtcaacagacacccaaggt

SEQ ID NO: 700785 - DNA, 623 bp, Homo sapiens
  misc_feature (623)..(623): n is a, c, g, or t
agagagagagagagagagagagagagagagagagagagagagagagagagagagagagagagagagagagagagagagagagagagagagagagagagagagagagagagagagggacagagagagaaaatataaagaatggagcaagatgaaaaaagattaaattgaaaggggagaaaactggaggagggcgaaacagaagaccacaaaatggccaataagaaagcgaaaaagtgtgagaagggagggatcctaaaggaactgcagaggaaaacgacaaggggctgggaatatagacagcacaaagatgaagaaatttaaatgacaataagaaggctgactacagaggcctgaccacaaagaaggaggaaaagggagcgaggggaaggatatggcaattagctagacataatccaggcagatagaatacaggtatgagaacataacatggacctgcatcaatggaacacaaggaatgttggacaattaaattttaatggaatcatcagagaaagcgcgtctttaaaaacttgcttataaagatggggcagaagatgaaggctggggcacatgatatcgtaaccgaagggagaggtggtttttggcggcctactgggggggcn

SEQ ID NO: 700786 - DNA, 789 bp, Homo sapiens
  misc_feature (764)..(764): n is a, c, g, or t
tggggggggggggaaaaggggcggagaaaaccttgggcgggaaacccaaaaaagggggttgggcccctttttccccccccccgggggatttccatatttaggaattgccgcaatcttcaagaaaaacagcctttcatacccggcgcggggtgctccccccccgcttttataactgcccggcccccgcttccttctctcggtgtcctcccccgccgccgtgaaaataccctgccccacctttggtgtgcgcacgccaaaacggcaatctaccatcattatgtggcgacaggagaaaaatacgtggcgtcttgaagaacacaatattcccacgaaacacatgtgtgtcccttgcgggggttagctctgcacaaaaatatgtttcttgcgaacaactatcaaccgtgtcgttgcgaaccccaaacctactcgccaaaataagaaaaatattcgggctcgtgtcccatctatctaactcaccacacagaggtggcggaaatagagcaggagaaaaagtgtggctcctctgcagtcattcttgttattggggggtctcccccacggatgtgtaaacactctctggccacacaagagcaaccaaatttcttttcttttctcactcaatgcttgcgcctgttaactacacacccagcgtctgtgtgttctcaacaaaaacctgcgggtctccctgtctgtgtgtgtctcttgtgggccccccaatgatatcccaccgcccctccccgcggggggtcccggccaaattttanagaggggcggggacaacaatcacca

SEQ ID NO: 700787 - DNA, 274 bp, Homo sapiens
cccccggggcccgttaaaattttaggccggagggcttttaaaaagccaagaacccgggcctaaataccccccatggttttccagggggggtttccccccccctttttccccaaggccacccccttttcctttaaacccccttttcggggatttttttgggggggggggttttccttttggcccaaacccccataaaaggggggggggccttggtttcttggggttccccctgggggctaggctttaaaataaccccgggccttttggaccccta

SEQ ID NO: 700788 - DNA, 439 bp, Homo sapiens
  misc_feature (12)..(12): n is a, c, g, or t
  misc_feature (69)..(69): n is a, c, g, or t
  misc_feature (87)..(87): n is a, c, g, or t
  misc_feature (100)..(100): n is a, c, g, or t
  misc_feature (297)..(297): n is a, c, g, or t
  misc_feature (300)..(300): n is a, c, g, or t
gaagggaagggncggtggagccagtgggaacacaccaacatttatggattaaatttgccatcttctaangggcacagttcatggcangtcttcacttctngttttccctgtctcatctttttattgttctattccttctttactgttttctttttcactgagtgaatattttctaatgtagtattttaattttattaatgattctttcactgtattttttgagatttgtttttaatggtagctttagcgtttcatgtatatatatataacttaccagcatcaacttcagatttaatnctngcttaattccagtaatatatagaactattactcctttatagctctattcccttccccctttttgtgtggtatgattgttatgcatattatacttatcaatgttataaagccagcagcacattagtaaaatgattactct

SEQ ID NO: 700789 - DNA, 362 bp, Homo sapiens
tagaaggattgcaggtatcagtatatggcatcagcgatctactggagaggatgggtgacgcaggtagtggagagctcgatcctcagagacgaatctgagtgatgcgcacgtgcttgatgggaaatgggatagggataaggaggtaacctacgcagagcttcgtgtataatttaaatcatctctagatttcttataataccaaatacaatataaaggctatgtaaatatgctacaccatattgttaagggaataatgtgcaagaaaaaaaggtctgtacgtgttcagtaccagtgcaatttcttttgtcaaatatttcctatccaaggctggttggatctaaatgtggagaccacagttacag

SEQ ID NO: 700790 - DNA, 749 bp, Homo sapiens
cacggaggctcacgtctgtaatcccaacactttgggaggccgaggcgggcggatcacaaggtcaggagatagagaccatcctggctaacacagtgaaactccatctctactaaaaatacaaacaaattagctgggcgtggtggcaggtgcctgtactctcagctactcaggaggctgaggcagctgaatggcatgaacccaggaggcagagattgcagtgagccgagatggcaccactgccctccagcctgggcgacagagctggactccgtctctaaaacataaataaataaaaatatttaaagagtattgtcactttaaagaatacaatggctgggcgcggtggctcacgcctgtaataccagcgctttgggaggctgaggcaggagaagcgctcgaaccagggaggcggaggttgcggtgagccgagatcatgccattgcactccagcctgggcaacaagagcaaaacttccatctcaaaaaaacgaatacacaatttacacacgtaaataacataatacattacacttttaacatgccatactccaaaataatctgaaaatctacaagtatgacaagttattctcaaatattctttttattgaacaccacttgaatattaccctaaaaattgagcaactgggaggagcaatctattattctgagcaccaaccatgtcccaggcactaaggaacattcgctaagcattttaccaaaaaatctcatttattctccaaaaaatcctga

SEQ ID NO: 700791 - DNA, 365 bp, Homo sapiens
ggatactagagatacccaatgcagctggatcggctagggtgacgccatagtcccagcactctgggaggctgaggtgagtggatcacctgaggtcagcagttcgagaccagctgggccaacatggcaaagccccatctctactaaaaatataaaactagccaggtgtggtggtacatgcctgtggtcccagctactcgggaggctgaggcacgaggactgcttggacccgggaggtggaagttgcggtgagccgagatcgcgctactgcacttcagcctgggtgacagagtgagactccatctcaaaaaataataataataataattaacagtttattaaattcttcctgccgagtccgctgcatt

SEQ ID NO: 700792 - DNA, 405 bp, Homo sapiens
ttaaagtcccatgaacacacctcccagcaaagtccagcatctcggaacggtcggcaggccccacagcacccacagcttatgcgttatgagtctgagacacgcttatatgctgacttcccccatctaagggggccagaagcagactcttgggcagctgtgtttatcctgccggtcgcacatatttgctgcgttccttattctcatcgtcatgtcctaccttgttgggactgagctcctccagcggtgtgtgagttccaggtgtaagcgtccccgtgtccgctaaggtaatgtaccctaacaaggttaaaaagcccccagttagccgcgtgcggtggctcatgcccgtactctcagcaccttggcagacctagacggtctgatcacctaagctcaacagcttaagtc

SEQ ID NO: 700793 - DNA, 229 bp, Homo sapiens
  misc_feature (182)..(182): n is a, c, g, or t
caagctgggggatatcagaggatctggcgtggatccgtaccagtcatgctgcctgaacgccccggatggtgcccatctgtaaccgatcacgtacttgccctcttgcagctgtttatccgagaagttccgaggattctccttggattgcttagggaaccagttgggatccccagagaacttancttcatctcgggctactgccagcccagcacgagcacgagcaccagca

SEQ ID NO: 700794 - DNA, 1102 bp, Homo sapiens
  misc_feature (42)..(42): n is a, c, g, or t
  misc_feature (151)..(151): n is a, c, g, or t
  misc_feature (198)..(198): n is a, c, g, or t
  misc_feature (221)..(221): n is a, c, g, or t
  misc_feature (226)..(226): n is a, c, g, or t
  misc_feature (774)..(774): n is a, c, g, or t
  misc_feature (778)..(778): n is a, c, g, or t
  misc_feature (784)..(784): n is a, c, g, or t
  misc_feature (831)..(831): n is a, c, g, or t
  misc_feature (849)..(849): n is a, c, g, or t
  misc_feature (854)..(856): n is a, c, g, or t
  misc_feature (867)..(873): n is a, c, g, or t
  misc_feature (875)..(875): n is a, c, g, or t
  misc_feature (877)..(878): n is a, c, g, or t
  misc_feature (880)..(880): n is a, c, g, or t
  misc_feature (882)..(886): n is a, c, g, or t
  misc_feature (888)..(891): n is a, c, g, or t
  misc_feature (894)..(894): n is a, c, g, or t
  misc_feature (955)..(955): n is a, c, g, or t
  misc_feature (966)..(966): n is a, c, g, or t
  misc_feature (970)..(970): n is a, c, g, or t
  misc_feature (979)..(979): n is a, c, g, or t
  misc_feature (982)..(982): n is a, c, g, or t
  misc_feature (1049)..(1049): n is a, c, g, or t
  misc_feature (1080)..(1080): n is a, c, g, or t
gagaaagactggcagggttaacaatatctgaaaacacaagtnagagaaaataaaagcgcgtcaattgacatccagcaaacagaaaggaataaaatgccaaaagcagtgtcttggcacactccccacatcattctccaacttgggccttccnagaatcatccagcccctcatcccagccccataagccccagatgtccncaccgaaaccaaggcagaaaccnaaaancacacttgtaggagagaccacaggcaccagagctgccactggtgctggcaccagctccaccaaggccagcgaagagcccaaatgtgagagtggcggtcaggctggcaccagcactgaagccaccactggtgctggcactggcactggcactgttattggtactggtactggcaccagtgctggcactgccactctcttgggctttggctttagcttctgctcccgcctggatccgggctttggcccagggtccgatatcagcttcgtcccagttgcagggcccggcagcattctccgagccgagcccaatgcccaattcgagctctaatctcggccctagccttggcttcagctgcagcctcagctgcagccttcaaatccgcttccatcgcctctcggtactgagctgcccattccttgggatccttcttttgtaccttgcaggcaaacttgaggactttcatcttgctggtctcatagtaagagcgcaggccccagaagaactcatattcagggggattgctattggggactctggcatagtccangtanttctanttcacaaactcatcagtgatgagcttcttcacgtccccaaagagtgnatgatgtatcccagggcncaccnnnacttgcgccannnnnnnanannanannnnnannnnacngatttccattcatgaagatgatgctaagaagcaccatgagcagacccagcttgggtgagtncttagtcgttnccantatgcctgnatnagtgggctctaaggtgctgagagaatgtacaagtggtcattcttatcaatttccttcattgaatccnaataccttctcaaggaatagctgctcgttcnatggattcggggtacacatcat

SEQ ID NO: 700795 - DNA, 451 bp, Homo sapiens
  misc_feature (14)..(14): n is a, c, g, or t
  misc_feature (62)..(62): n is a, c, g, or t
  misc_feature (72)..(72): n is a, c, g, or t
  misc_feature (121)..(121): n is a, c, g, or t
  misc_feature (143)..(143): n is a, c, g, or t
  misc_feature (157)..(157): n is a, c, g, or t
  misc_feature (168)..(168): n is a, c, g, or t
  misc_feature (180)..(180): n is a, c, g, or t
  misc_feature (212)..(212): n is a, c, g, or t
  misc_feature (215)..(215): n is a, c, g, or t
  misc_feature (221)..(221): n is a, c, g, or t
  misc_feature (246)..(246): n is a, c, g, or t
  misc_feature (259)..(259): n is a, c, g, or t
ctcgccgtcaaagnccattcacgattaatgataagctactgcaacccaccagtcttctcatnaacgaatcgnttcaggtgacagaacgaggacaggagggagtttttccagagtcactctncgacttatctcaacctctggtntggttttggtggtntaaccttgganagattctcttgncaccaagctctccagtgcatcctggactgtgngtntcttgnctgactggatatccaactgcaacgngaaaaatggctgnaaagtggaagattctttggaactctgctggtaaaccacagacctgatgtgtccaccaaaaatgccggtgattggagtcttgaacaaaatccgctggcggggtgacggaagtcttggttcccgggggccacttgttcccattcatcctcggttcctcaactggtcttcctgtcttcttcaatcgaccagtggt

SEQ ID NO: 700796 - DNA, 759 bp, Homo sapiens
tgatagtcaggcagtggtaaccacagcccttgggtgagaccccagtaccatactagtttcaggtctgacccagcacagtcctaatagtggtgacaacaggagtatttgtgtcacctctcttctagcctagttagctcagcacagagctgagctgttgggagaacgtaaggaaagagaacatgagtcttttcctggtaatccagacaattcttccagatctgatccaagaccaccaagaagtatctctataagtctgcaagaaccatattgttactgggcttggggtgctccctaatacagatggggctgcagtgaccagaaacttagagcacaacacccaagtgcctttgaatgcttggaaagccttccaaagaaggacaggtggaaacaacaacaagactgtgaagactacaataaatacccaactcttcaatgcccagacactgacaaacatccacaagcatcagattatccaggaaaatatgacctcaccaaatgaattaaataagggagcagcaattaatcctagagagacagagatatgtgatcttttcatccagagacttcaaaataggctgtctggggactcgcatgaaattcagataacccagagaggatttcagaatggcatcagatacgttacaaggatcacatatttaaagatttgcgaattctgagtgaaatgcatgaattctgagatggtcaaggtctatagggaaaaaacgggagaaaatagggtgaggagaatggaatcggcgc

SEQ ID NO: 700797 - DNA, 124 bp, Homo sapiens
atgagagtgcctgatgtagtcaggactttcactcactttaaacgaacacagacataggagtattgtgttaaaaccatatagtgtggacataaaaaatgatgcttatgtttactacacagtgaga

SEQ ID NO: 700798 - DNA, 326 bp, Homo sapiens
agattggggaacgacacccctcagccctcgccatcataggtcaaatgcgcaaggtactggccctggtatgccagtatctgccagacagaatggcagtagtgccatcgtggagcctgagatcctccctgatggggaccatgacttgaagcgctgacagtatgtgacgcgagaaggtgctggaagctgtctacaagggctctgagtgaccaccacatctacctggaaggcaccttgctgaagcccaacatggtcaccccaggccatgcttgcactcagaagttttctcatgaggagattgccatggcgaccgtcacagcgctgcgccg

SEQ ID NO: 700799 - DNA, 333 bp, Homo sapiens
attgtagtgtgtcggtgagggtatttccagaagagatggatatatgactgaaggggctaagagggaaccatccgccctcaaggtgcagtgggtgggaacaaaaacggaagaaaggcaaatgggtcttactctctgggagctggaatacacgcttccattccggccctgggatttcaggatcccaggcggtggggtctcaggacgccaggacctacaccagcctttccgtcaccgcgggggttctaaggccttggggctaagaattatatcatcagctttccggattctgagacttggggactgggacggagccaggccaccagtatcccgggg

SEQ ID NO: 700800 - DNA, 818 bp, Homo sapiens
gcacggcccggcgtggtaaccatgcccatcagcacacggactcccacggagcatctcagaagataagggccagctctcctccatcttctggcgaaggacagaggcgaggggacagcccagcgccatcctgaggatcggagtgggggtggacgtggcgggcttccaggtggacccttctcgggcacatcattccagttacgtagagcccgaggtcctgtcccctgaggctcagcgtcgttaagcgcctactcaaagagacagccgcgtcagacgctgcaaggggggtaccagtggagccctcgatggatcccttcgatgcgtctcctggcatattcggacgtgtgcatgcgtgcggccagtgccgctagttcgtatgacaacgcacacacgtggaagaatacccgtgatgcacagggtacaacgcactggggaagtgccgagtagcgactgactgtagacccctatcgtacgggccatttggcaacgaaaagtcccttggagcggacgggttagcgtaccaaacttgtatccgcggacgttacctctggcgtagccaaaagaacaactgggggacgcacttgtaggacgaggactggcttccccacggtcggtgcattcgtacgccacctgtggaggtcaacttgaacagctcttttgcccacctacgggtcccggatcgcgtaagagaagcacccacctcgtggacccaagaggaacagtcacccgagcacgcggaagcgttccctgacggaaaccccttttgtagtgtacggtccttacctatctgtgcacacacgcttgaggcaaatttcgacccg

SEQ ID NO: 700801 - DNA, 106 bp, Homo sapiens
tgattttacccgggccctatattttgggtcccattggcatggacattatgaccgaactgggccccaaccaatttaacgctttaaaattgggcctggctactattgg

SEQ ID NO: 700802 - DNA, 189 bp, Homo sapiens
tcgctaaagtacattttttagtaaagaccctttggacatcagctgtgtcaaatgtactaagaagtgggggaaaggagatatgtgaagaattttcagaactgacgttcaaagtgatacaggggaaatcaaaatgaaatgcacaaaaagaaaggagaagggccgggcgcagtggctcatgcctgtaatccc

SEQ ID NO: 700803 - DNA, 170 bp, Homo sapiens
taagcaacacatgctgcgtatgacggatggtatgtaagcatctttgttatcagcacggacataacgccgtaaggtctggagaatgcgatgaggccgtggcgtgtcagactgcaaggcagccaggtagttctccagcagccatccgacgagcggtcattcacgcatacatg

SEQ ID NO: 700804 - DNA, 325 bp, Homo sapiens
cgggtctgaactgctccaacaacgaagataaagattcaggagagtaagaggtgagagagcggtgaagcagcgaccaaatggcccggtggatgagccgcggaagcaggcccctccgtgaggcacagccgcccgggggttccctaggggaagcaggggctgcggcagacgcctctcgggcaggtcagggtatgcaccctcccgcaggggctcccaaggccgggcgtgcgtgaggccaggtccacgggcacaccactgtgaacactgattaaacgtggcctccacggcttccaacccccaggacaggaccaaccctctgcccccggct

SEQ ID NO: 700805 - DNA, 641 bp, Homo sapiens
agagctaattgggtttccaaattaattccgcttttaaaggcccaggggccggtttatccaatccctcaaggaaaacttattctgtgctccacaacctctaaactcccccgataaaacttctgtaggcttccgaaaggcaatgttatttcaacggccaggcataaatgacctcagaccgttgtggtcagtgtttcccctaaactggtttagtctgtccagactttactcctgcaagagcattgtccatcacctcctcagctatgcagcatcgcccatcgaacagtctttcatcataatctctcctcttgctagacgagcacaaatccctcattccgtaaactatctataatatgttctacatttttggtgtgaatatgatgtcgttcaagaagtccgctgtaactagagcctttcaatgcaagcagctgcttcaggtcctcctcgaagagctccgcgtatcggttccgctcttgctcgaactcgtccggggtggttttggccaccacctccacccggaaggggcgaaagccgccgtccgcgggcttgccacagccggccagctcgtgcgcctgcctttgccccaggtgccgccgcccgccccggcactgccaacctgggcccccgcctcgtcctgaattctt

SEQ ID NO: 700806 - DNA, 584 bp, Homo sapiens
  misc_feature (1)..(1): n is a, c, g, or t
  misc_feature (584)..(584): n is a, c, g, or t
ntgctgctttagttgttatattacatgggcgttggccgaccactacacaagatcggcgcggagacgtgcacgacacatgcggagatggatcgacacacggtttgaagctcggcgcgagctctgttggcttacagcttctcagtgtcaccagccagcagaaaataagactttccgatttgtaggcacccactctcagagacagatcaaagaagtgataacctttcgggagaagaaccagaggcagcaagtatgtttaatcacctgtcagctgtcagcgacagtatccaggccctgggctagggtaggctataggctcccaagcctggccctatatgtgaacagacaatgacatgatgccgccatgttttatacacaaccgagtcctcaaagagtacaacagatagtaggataagaagcatgtagactgggtcaaagctatatattaacgtatatggacagagctagcaggcttaccttaaggagttccataccaccggcactggcctggcagcacaacggggcctgtggcaacaagaactgagcggactgacatactaggacctctgccggcatcaagtccgccn

SEQ ID NO: 700807 - DNA, 377 bp, Homo sapiens
gcaacttcaccagttgcagtaaacacttgggccacacagtattaccagataacatcagtttatcaaactctaatttcccatgatttgcctggcgtggtggctcatgccgtgtaatcccagcactttgggaggcagagcggagcggatgacctgaggtcgggtgttggagaccagcctgaccaacatggagaaaccccgtctgtactaaaaatacgaaattagcacggtgtgctggcgcatgcctgtaatcccagctacttgggaggctgaggcgggagaattgcttgaacccgggaggcagaggttgcagtgagccaagatcgtgccactgcagtccgcagatctggcctgggcgacagagcgagactccgtctcac

SEQ ID NO: 700808 - DNA, 334 bp, Homo sapiens
  misc_feature (58)..(58): n is a, c, g, or t
  misc_feature (81)..(81): n is a, c, g, or t
  misc_feature (84)..(84): n is a, c, g, or t
  misc_feature (88)..(88): n is a, c, g, or t
aggtagagtttccctgggttatgataccccccagtttctccccccgcattttcgagcnactgccattcctcacccttccanaanacanaaagaaaagaaaataagcaaaaaacaacagagataaaagaagctccctggtttttctctgagaatttcactggggatctaattttaaagaaggggacatgaagattgaagaatgaacacataatttcaaccattttgttaaatgaaatttgttggctctataaaaacgcttctgttttggttatgtcctctagttttccccggttttccttacaaagaataataactctgctctgtcctcttcaag

SEQ ID NO: 700809 - DNA, 109 bp, Homo sapiens
taactcggcagtgcgccttatggttttatactctcttcacagactcaaatgactccaaaaagctatctgcctgtagtgaatctatgatatgccactgtccccgctgcat

SEQ ID NO: 700810 - DNA, 194 bp, Homo sapiens
  misc_feature (14)..(14): n is a, c, g, or t
  misc_feature (188)..(188): n is a, c, g, or t
gtagctggaccacnccacggagaaggacgcggtattgatccaatcggcatacgatttcttccgttgccgccatgctacggcatcggccgtcgtaccgggaaccggggcggaagaaagcggcctgctcatgcgccgatggaatggggcgggagcaggccgtaaatgggggtaggggccttctccggtgncgtggt

SEQ ID NO: 700811 - DNA, 114 bp, Homo sapiens
aaatctgggctaagtgctggcaagagcgatgtctactactcagtccaagtggtaagaaggtcagaagcaagcctcagttggcaaggtacctgggaaatactgcttgatctccag

SEQ ID NO: 700812 - DNA, 477 bp, Homo sapiens
  misc_feature (82)..(82): n is a, c, g, or t
  misc_feature (87)..(87): n is a, c, g, or t
  misc_feature (421)..(421): n is a, c, g, or t
  misc_feature (440)..(440): n is a, c, g, or t
  misc_feature (442)..(443): n is a, c, g, or t
  misc_feature (445)..(445): n is a, c, g, or t
tttggaacaacaagcaccatgtttccaagaagagcacgggggttggggggtaaaggttaataagattaaacaagcatccccnaaggnagaaagaattttccttaagtaacaagaaaaatggagtctccctatgtcctacttctttcctacacaagacacaagtaacaatctgatctctctttcttttcccccacatttcccccttttcttttcgacaaaaccgccatcgtcatcatggcccgttctcgatggtcgctgtctcttcacagctgttggatacacctgcagaaaggctgtcacttcacacttggaagattgcacagcggccaggcagaggcactcctcacttcccagacgggcggtggccaggcagagacgctcctcacttcccagacggggcagccgggcagaggcgctcctnacttcctagatagggtggncnntnggcagaggcgctcctcacctcccagacgatgg

SEQ ID NO: 700813 - DNA, 163 bp, Homo sapiens
gggctcggtaccaaagcctttacgaggggcgctgggcgtcgctgatgctgggcgaacaggtggacgccgatctgatcgcacaggatgtgcgcctgtaccaccggcggcgagccgaccttcgtcgcggtcgacgacccgcaggcgggcgaatggaatggcgatg

SEQ ID NO: 700814 - DNA, 204 bp, Homo sapiens
cccagatatgaacattataaaccttaaaggcgtttgagtaaacaggcttatctaaaaaacacgtttgttagttaccaaacaagagacgtctttaggtaaaataagtaaaaaccccatgctgcatagatatgcagatagttctatttatctggtcgacgggcaaaacgcaagcactttaggtcttcagctccaatcggtcaatca

SEQ ID NO: 700815 - DNA, 413 bp, Homo sapiens
gagacggagtctcactgtgtcgcccaggctggagcgcagtggcgcgatctcggctcactgcaagctccatctcccaatttgtgcatggcctcatacatcatagagtggttttgactttatcccgaaggtaatggagtgtcattaaaatagaaaattccctattttccctttcctttgcctcatttttttgctcacgttttgtagacacacacacaagtgactttaaatcctttcttgaacaaagtggttcacaccattctcctgcctcagcctccccagtagctgggactacaggcgcccgccaccacaccaggctaattttttgtatttttagtggagacggggtttcaccgtgttagccaggatggtctcaatctcctgaccttgtgatccgccccttctgtcgtcttctc

SEQ ID NO: 700816 - DNA, 125 bp, Homo sapiens
caggatccggcgggcatttatgccgcttaccatcttaacaagctttgagtgcaagagactgaagacgttcaatctgaccaagatgttgatgttggataagagaattctctgtgtccccacctcta

SEQ ID NO: 700817 - DNA, 160 bp, Homo sapiens
tacggtgagcaagtggtagcagcagatgccgagttcgggatattattgtgtcaaaaacaacttcttcagctctgtgtaagttcatatgaacatcaagtgatcgacctgtagtagttctgacttgattatattcagatgacattttttctattatttttgt

SEQ ID NO: 700818 - DNA, 461 bp, Homo sapiens
  misc_feature (68)..(68): n is a, c, g, or t
  misc_feature (77)..(77): n is a, c, g, or t
  misc_feature (129)..(129): n is a, c, g, or t
cctgtgactctaaggatccttgtgaatacaccagcgtttgacatacctgacgtagtgctttcctacanatacagcgnctctaacaaaactatggctgtccctgaacccctgtgtattatgaattgtttnacctttataccaaggaaggttgggaaagggcaccaaaattctgcatgtggtgctgtgcccatggcagacttcgaggtggttcgtgctgtaaggacctaaagtttcttattgagatttgtcccaaaacaaatgaaacattgtcatgcagggcctaatggttggttccattgtgtgctaaattggtgttcgtgacagggatcaagcgtgctttccttatcgaggagcagaaaatcgttgtgaaaggtgttgaaggcacaagcccagagtcagaaagctaaataaaaaaattgaaacttttttgagtaattcaaaatgacaagacgctgtgtatt

SEQ ID NO: 700819 - DNA, 468 bp, Homo sapiens
aaggtatctctacaacgctgcatgaatcacagcattcctgggcttggggtgccccataaagcagaaactgcttagttcacaacacccaagttctttcaaatatctagaaagttttcccaagaagaacagctacaaataatatgaggcggtaaagactacgataaatacctaactcttcaatatccagacactgaagaacatctactagaattaacatcatccatgaaacatgacctcaccaaatctactaaataaggcaccaaggaccaatcctggagaaacagagatatgtgacctttcagacagagaattcaaaatagttgtgttgaggaaagttgaagacattcaagacaacacagagaagaaattcagaattctatccgataaattaaacgaagatattgaaataattaaaaagaatgaagcagcaattctgaaccagtgtatttgaaaataatatgtcagagg

SEQ ID NO: 700820 - DNA, 357 bp, Homo sapiens
  misc_feature (22)..(22): n is a, c, g, or t
  misc_feature (146)..(146): n is a, c, g, or t
  misc_feature (153)..(153): n is a, c, g, or t
  misc_feature (202)..(203): n is a, c, g, or t
  misc_feature (213)..(214): n is a, c, g, or t
  misc_feature (219)..(219): n is a, c, g, or t
  misc_feature (260)..(260): n is a, c, g, or t
  misc_feature (293)..(293): n is a, c, g, or t
cccccccccccccccccccccnaaaaaatagggtggccccaaacccaccaaagaaagggggcccccaaaaaaaggtttttttccaaaaaagagggcccctttccctttccccccccaaaaaagaagaagaagttgttggtaaaggncccagancccctttgtgggccccccccccttgttccttggttttcggagaaaaacnnctttgtagcnnctccncgtgggtctccccccaagcccctgtttaaaaataaatggtnataagaacccgtggtttttgttctatttttttnaaaataaaaagatcaagatttctggtgtgcccctggatctttggaggggaaggggaggccaaga

SEQ ID NO: 700821 - DNA, 1318 bp, Homo sapiens
  misc_feature (72)..(72): n is a, c, g, or t
  misc_feature (355)..(355): n is a, c, g, or t
  misc_feature (955)..(955): n is a, c, g, or t
ttttagcattggagtaggcttaggttatgtacgtagtctaggcctactccaatgctaaaactaatcgtcccnacaattatattactaccactgacatgatctttccacaaaacacataatttgaatcaacacaaccacccacagtcctatattattaggcattcatccgctctactattttttaaccaaatcaacaactaacctatttagctgttccccaaccttttcctccgactcctcgtaactaagccgccgcctcctaactgactaactactctgtagctctcgtaccgcctcactaattcgatggcaaggccatagcggcctagttattcgcagttgataccaacttatncatcgagaagagaaaactcatatcctcgtcgtaatagcttaattcttacccctactgaaagtcatccgtataattctactagatcatctcatctaggcctatcatggagaactaagtccattaattttctatgtactcatgtcgtctcgtgaatagccgagccacgttatgtctccgcagcacctatggagcttagtcgagtcagaccccgtagtgattgtgacaaatctcatgtccaaggataacagacgcgtgtaaacagtccacggaccatcgaattacggttcacctaaatctcttagaagccaccttaggatatggggctcccctattcaccccatatcttcaggtgcgtactactacaggttttaaccaccttcatcaatgagcctctaagtgccttcaagctatagatcaagttacataccgtagccttcaacttcgttcaacttgtctcccaaggaaacctgtatcgaaaaaactcccttgcaggcccgaaaccaaagtctttacacttgttgcaaccttaggcgttttaccagcgaaaatgaagacgtttaattaattgaggttaacaacaggcatttaagcgtccatctngtaacagggaaacttcccaaaccgggttaattgtaagcttccgcttatataggcccccagttgattccgaaaaaagcgcccggccccaaatttcgcccttgggagggtttcgaacattaaaggttacacacttttgacacccggccaaaagataaacttcccttataaagaaagatttaagcgcccgagggattcattgagaggacatctcagatatatcagcgcaccgtctcatgacgagcgtatccaaatgtatctctcagagtgaccccaccgttgtcgtagaagatcaacaacgaattatcgtctcctaaaaccacgccattcatacgctcagtttctaatcatagtagcccgtcattg

SEQ ID NO: 700822 - DNA, 710 bp, Homo sapiens
gaaagggggggggtttaaaccttggattttccccaaaacccccccccaaaaaacccccccccaaaggggggttgatccaacgggggggttgggggcccccaacccaacccgggccccaaggcccagggccccccccaaaagccaaggccaagtccccccccccctaaaaggcccggttccccaaaaggggccaagttttttggcgggccccaaaattccccttttaaggggtttgccccaaaaattgaacaggggggaccttgggaaaggcgggatcctaaaaaccaggtggggggggccagggccacccccgggaaaaaggtccccccggggggagagaaaagagccccccttttttttaaaaaaggttgggggggttttgggaatccccccaccggctttttttaaaagggagtgttccccccccacccccaaaaaagcaaaaccgggggccatggcatataaggggccccaaaatttttaaaggggttttttttccagagaaccccccggacaaatattgggggaaaaaaaggttttttaagggggaaaagtggccaaaaatcctcaaaaaaagggaaatttttacccccaaaaaaaagcgcccccccccctatttgtgggggttacccccccaaaatggtgggtaaaaggggttctgaaacccaaaaaatttcacaaaaaaaaaataaaacttttcgctttttgaa

SEQ ID NO: 700823 - DNA, 336 bp, Homo sapiens
cgtaatgcctgtcgatgggttctgagtatgcgcacgaggggtggaaattgcttagtcctaccatcaagagtcctctgtcactgatgtagactgacatgtggtatcgtcacacggaggtgggaggaaatcgattccattctgcctatttgcaaacttctgcccgattggcactgctcctctcacatcaatgcacttctcctgatgctcatgaccagccttcggccatactctctgatagtccacgggcttcacgtccatcacagctggccttcattcgagactcgtcgtagtaggtctccactttgaccctgactctgaatatgaaagatcggaagt

SEQ ID NO: 700824 - DNA, 151 bp, Homo sapiens
agcacaagaatttcataagaggtaagatgactggcaaagatgtgttgttatgatgtaaatttagaagagctttgatactatgggaaacacaggtggttaagggagataccatgataatttctttggtggctttgactcagtacggcagtgg

SEQ ID NO: 700825 - DNA, 796 bp, Homo sapiens
taaagaggaaatatgtagaactggaacatgtggtcggaaggccaagctaccaattacggggaagatctcagcaaaaaatcatgatgagctttgatgagacgactcaccagaatatggtagacggtgttatagagcagttctgttgatgtgtctgggattgtatgcatacatatgtgtcgtaagtttacgagcagttggtgatgcgtcgagcataaagagacaagtatgatgaccatctagattggggtataaatagattgtttattcgaatcagtatttactggaaaatggactagtcacttagtctttcatgtaagatttcttctcaagagacgtgaaaatcttgggaaattgttaatttcgtgtctggggattatagttgggtacaacaatgactgtaaagacttgtatagttattcatattaaaccttatggggaactaaatacttgaaaaatgcccggctcctttcagcaaggtgaggtgggttgagggaggcagttaatactgaaggtgactgtgagctagtttaactaccagaattttgtgatattggccagtgttaaatagtgggaaaggggaaatctgattaagcgaaaggggtatgcatcctaggtaagctattgagaacaagtctactattgcagatgctttcgttcgagggtgtactcgtgagtgatacttactgtaggggtggttgaaactccatgctgtcaaaatgggttgcaatttgcaaggcatcagttcgtgtttgcgttaaaagccaaagaggtatgggaaaaggtttggcggcaagga

SEQ ID NO: 700826 - DNA, 177 bp, Homo sapiens
acgaccactcatcaatgatcagcatgatagcattctggatagctagtatctgtgatagtttgatgactaatttaaagaaaaacacctaaaatatgaaaaatgattgtaggatcaaaaaaggcggatgaaattacttaatactcagtgtttcggagagtattccttttagtttgttgg

SEQ ID NO: 700827 - DNA, 1058 bp, Homo sapiens
  misc_feature (304)..(304): n is a, c, g, or t
  misc_feature (538)..(538): n is a, c, g, or t
acctggagtccatcaccaggctgggaaacatagatcacatcttatgtgtacggtagtaattgggaagaatttagtctggtgccctgattggctgtccccgtatatgtcttcccaaggcttacagcagagatggctggagtgtaggaggacatttacttgagagagtcctcggacgtttctcgaggtcttggcatgtgtaagcgcagtggagttgtccacgaggcgactcctcgatcttggggcaacaagagcatgtgagcccgtggtactcacaagatagaagaaggccatataggagaaaagnaaaccaaacgaacatcaaacgaaaattttgccctctattctagtacacaccatagaaggcttatatgtccgtagggaaactcgctacatcacgacaccccaagaaatctatagtcatcaaaccatgactctgtttaacagttcgacctctcaagcctatatcgcatcgtattccccagcaccataagaccaatcttgagtatcacaaggcaaactgaaaatggacacggacctnagttgtgagaacgtcaattccttgtagagcataaaacttgagtaaaagagggcgttcttgcgaaaatgccttttgagatatgccttgacacgaagaattttggtctgaccccttatatgaggtatccttaaggctgtctccccactgggatttcactaacggtgtattcagacttggagagtagactctctttcgaaatttcccttatagaggagatcttttagattttcggttttccaagttttaacaggttgtctttaacgcaaggataattgcctaataatgactagttagaagaaaggagtccaccatggttaggttttctgacctcactgagagagttgtagttccctccggagggttttattcttgtgggagacataccatttgggtgcacttttgatattccctttgtacccgcggtgagggtactttctttgtggaaaattttttcaccttcacaagagcgttttaaactctattgctctcttggaacattgaccgttgttgtaggcttctc

SEQ ID NO: 700828 - DNA, 812 bp, Homo sapiens
  misc_feature (226)..(226): n is a, c, g, or t
ccaaattaattctttaaaaaagaatgataatcacagggtttactcagtgaaagtcatattaattattttcccaaaatctaaaagctgagccggagagccccatggcccacgagggaccagccaattaattaggatcacactttttctccaggggttccccatgcaaggcaacattaccttgtctttcaaaaagacactggccttatgcaagggggaaacctgtganagctgcactcagagggaggagtttttcttacatattttgcaatttcaggaatttaatttataggcagatctttaaatacagtcaacgtacggtgcacagtaatatgaaagccaccctttgaaggtaataaatacacagcatgcagactgggagttgctagcaaacgaatggcttacctacccaaaccagcttttagttcagacttagtttttataaaatgggaattctgacttgcttaagcaggggtgggatggagatggtggcggtcagctttttgtatcagcaaagtagctggttctgtgtgtgtctccaggtaactttgcttgattagacaggagagccatattctaagtgcactgttgaagcctggtgccagtccaaattgtctgtctgctggtgtgttgggaccatattgctcttaaaaatcttggtttggtacagttcataattcaccaaaagttcatataatttaaagaaacactaaattagtttaaaatgaagcaatttatatctttatgcaaaaacatatgtctgtctttgcaaaggactgtaagcagattccaataaatcctttactttaaaaaaa

SEQ ID NO: 700829 - DNA, 128 bp, Homo sapiens
tcattccagccaataaagaattaagatgcgggttgaacacagcgcacctcataatactaaagaaaacatatcacgattcgctgctgtgcagcgatcttgcagacctacagaacaccgctcctgagaca

SEQ ID NO: 700830 - DNA, 520 bp, Homo sapiens
ggtgacgcgtgggtcgtaagggaagaggagaggaacggggagccggaccgacatacccagtacagagccgtgtgaatgggtttgtggtgaccccggtgttaccaggtcaggcaggattgtaaaaggatcgggaagttggcgtagcataattgattagcgagatcacgtaataggagaagcaatattgataccaaaggaagaggatggaggtacggacggataaacggatatggtgtgtcaaatagaagtgagactaggatcatagagagcggtgcggagagaatggatattataggagttagtattgtatatagtgagaaaaagataagttcaagtggagtggccattgcaaattaaagagtaaaggagacgataggaagagatatacagggaatgaaagatgatgaaaattaggaagaaatgaggtagaaggaagtagtaaaaacgcacacatagtgattaaatagaagtcggagagaaagaaaggggagagaaggtagataaaaatagagatattaat

SEQ ID NO: 700831 - DNA, 446 bp, Homo sapiens
  misc_feature (295)..(295): n is a, c, g, or t
  misc_feature (309)..(309): n is a, c, g, or t
ctcaaactttagtcgggcttctgagccttcccctaggtccatcttagagagacatcgtaaaatccagttttagcaaagagccctgctgggtcagtttagcaagaacttctgagacttaacttgctcgctctcctcctccactgaccactgagtaaaatgcagcaaaataatcaggaggtgatgagccttcagcgttcattgcatttactttaaatacaatccgttcaattgtaatcttatgtgcattaaataaattgtatccaaaataaatgcaacaaacaccaaaaactcttcncctcctaatcattntgccacattccacgctggggtcagtggaggaggagagccaggaaagaaacaaataataatgtaaggaaataattttagaacatttacaccacaaaaatcttcaaatgccacatatcagggctatcccccgacaaaga

SEQ ID NO: 700832 - DNA, 180 bp, Homo sapiens
  misc_feature (35)..(35): n is a, c, g, or t
cagttttcagcaaggtttccaatcagccagcactnttttgcatgacagccactcaaacaccaacacatagcatccacatttttttcaaaacacatgcagctcaacactccaccctcattcaacagtcaccacacctccccagcacatcaacatcacaccaacacacacacacatcccaac

SEQ ID NO: 700833 - DNA, 717 bp, Homo sapiens
ggctggtacggcccggaagttagggatgtaatgttgggtgggagtgcgggacgcctcaaaatgtcttccaggtggcaccctcagcaactactactgtggactcgacttatagtgccatgagggcgacagaggtgttcgcggcgcgacttcggagccgctcggtggcacaggcagacgacagtggccggcctgcaggtgtggctgatggaccggccgacaccgcgccgagttcgcctcgtgtagtatgctccccaagatcggcccgttgttcgtcctgcattctgtaggtaccagccggggcctcctcgagcgtcgcgcgagtgtccgtggggtgcataagtcgtggtttcgttaccgacctcgtcacaatgttccgcacagaacggccccatgggtcagacgaacattgtgtccagtaaccctgggctgttaactagtgccgctccgtggattgtgaactcgttcgtccggattcacccggagcagtaagtacaagagtgttgcgccgtgccagagataggatagaaaagagcagaacaagacacagaggacaagaaaggacaacaaaagacaatagggcgcgcgacgcggggcaccaagaacaaactccgcgcagcacaacggaaccgcggattaaacgccgttgaaaaaccccagaagcgggttccacaaggacaccgcggcccaccaggtacggactcacaaccatctatcctg

SEQ ID NO: 700834 - DNA, 206 bp, Homo sapiens
ctattcgtggtgttaatgacccgacggaagggctagttctcgggaaatattgggctcagcaaggtatctcagaaactatacatacgaatgacactgcaaccttcattagctgttttacctttaatcacgacagtctaaaccagtttcgcctctacggaaaagaggatgggcaggaggcaacaggtgttagcttagtcttcaagaaa

SEQ ID NO: 700835 - DNA, 525 bp, Homo sapiens
aaacaccacccccccccccccctccctttttttttaagggggtggggaattttttttaccaccccccccaacaaaaaacacaaaaaggttttttttttttttaaaaaaaaatttttttttctcttcggggggaaaacaccaaaaaatttttttttttttttttttttctcccccccccccccctttttttttttaaaaaaaaaacaccattttttttttctctcccccccaaaaaaaaaaaaaaaaacgcgcccccccccccccctggggggggggtgtgggaaaaaaaaaacccgccgcgggggagtacccccccccccttgggggggggggtgagaaaaaaattatacccggcggcccccgccaaaaaaacacattctcttttcccccccggggggaaaaaaaaaaggaggggttttttacccaccccccccccccatttttttggggaaaaaaaaagggctttccttaagggctctttaaaaaaaccaaaggtttggattgaagaaaaagtttaccggcttt

SEQ ID NO: 700836 - DNA, 909 bp, Homo sapiens
ggctctttccctgccgccgcgagtcgggcgaggggaggttgggtgcgtcaagattcaattcacccgtaacccaccgccatgcgaggaaggcatgctgctggaggtgtaatggaccgtaatacttgctttacaagagcgttcttgaagactgccctcatccaggattggcctagcacggtgaaattcgcgaagtgtggcaaagccttagaaaaagcgcaaaggcccacaatctttgggtggttggctgggctttccaaaggtgtgaatggaggcctttatgtatggtcaaggtgggggtggggagggcccctttttggtggctggaaacaccaaaatacaaacttaatttaaggtgttgggggttgacaaccaagaaaactaaggagaaagtgggataagggcctttgttgtaacatttgggacaggacgaaggggaaaacccccggtaaagagggtgtttgtggttgccagtgtgtgtaggtacgtttaagcggacttactgggcaaagggacgttctcaagggccaaggggattgttcctttgaacggaggttattttcaatgttgccacgaatagtgacgacactaaatcttgtgggttcacatttggaaaaaacaacaaacaccacaaaacacaacaaacaccttgttcgcgcggcgcgggccaccagagaaaaagttttcacaacacactctgtgtgggggacgccgcggcccccagatgatatcggtcagcccagtgccaaccggtggtcgcaaaggacaactggtggccacgaacagctgtgcggcttctcacaaaaaaaacaccgcggcgacaccgggcggttgtgaccaacccaggtgggtcggcggctaccggggctttcacaggcgcccagggcgtgatacccgaccgacggggggtgt

SEQ ID NO: 700837 - DNA, 127 bp, Homo sapiens
  misc_feature (73)..(73): n is a, c, g, or t
cattcaccattatttgttaattttattttgattttttaaaggcattattcagtgtacaattaacaaagaaatnagttttctactctactgtacttaggatgctttaaaaacatcaggtgaaatgatc

SEQ ID NO: 700838 - DNA, 236 bp, Homo sapiens
  misc_feature (67)..(67): n is a, c, g, or t
  misc_feature (71)..(71): n is a, c, g, or t
aaaacgaaaacaaaattttcggccgcatcagtttttatttttagtgtttagctgctgagatcacggngtanttgatggaccacgagtgaaacttcaggagtaccacatactgtcttcctgctatcataggctgctgcagatttttcatggactttttgcttggccccatccgggacgtgtggagagaactgactatatacttgcttttatttgacagtcaccaaggcactgtttct

SEQ ID NO: 700839 - DNA, 306 bp, Homo sapiens
cttaaaatgaatctccatccatccagccagccagcctcaaagcatattggttctgtttctctggagaataatgactcatacatctaggatctagttttgtttagaattcaaatgatcatactatgcactaaaaattaggggcagaaatatcagagataaattaaatccagaagtgtatcttccagagcctccagcatgacagatactgacttacaaattatatatatttccaaaagtcactttttggcctgctgcctggaacttaaaaggctatccctaataatactggagcttcaggcggggcgt

SEQ ID NO: 700840 - DNA, 97 bp, Homo sapiens
ggaaaactccatctcaaaacacacacacacacacacacacacccctagagggaaactccatctcacacacacacacacacacacacacacaaccccc

SEQ ID NO: 700841 - DNA, 452 bp, Homo sapiens
ttcctatccatttgacacgcgttcgcgcgcatgatgattgcagtcaggtcgcaaaggaactgacatcatgtacacaggcacgcttgactgctggcggaagattgctcgtgattaaggaagccctgctgttttcaagggtgcatggtccaatgttctcagaggcatgggtggtgcttttgtgcttgtcttgtatgatgaaatcaagaagtacacataagttatttcctaggatttttccccctgtgaacaggcatgttgtattatataacatatcttgagcattcttgacagactcctggctgtcagtttctcagtggcaactatttactggttgaaaatgggaagcaataatattcatctgaccagttttctcttaaagccatttccatgatgatgatgatgggactcaattgtattttttatttcagtcactcctgataaataacaaattt

SEQ ID NO: 700842 - DNA, 187 bp, Homo sapiens
tgtaaggtacctagagtcccatctgtctcaggatgtctcaatcttgactcgtgatctgcgctctgctccaaagtgtggatacaggcgtagcactgtgctgccggattcttttagagatcatcatactgactgtgcccattcctcctcactgtctgactgcatcccttttcgggagacagaagtgggg

SEQ ID NO: 700843 - DNA, 546 bp, Homo sapiens
atttgtgattgtgttttatgtgtctgtcactgctgggcattttgctggtgctctgtaagtagtactgactgtggagggatgatcattggcaccttcgttatcaccaggtgatagattgcttccagctcacctcatatctgctcattttctgtgcagagtatcacaaacctaacttggagcacactgcaagtgtaaaggcataaatgctttgcttttttgttcgttgtttcttactctgatgcttttttgttcagtgttctgtaaaggaccaaaaagtaggcatatacattagaaagtaggaaaataatcattaaaacttgcatgtatttcctttatctatcatttataaggattgctgtaccacatgaaaatgaatttatgttgtttgtaagtttataaaatagaagtatttcatccaattgcaacctttttgaaatagtttatcaaaagtattggatatagtcttaaacattgctaaattttagagacattggaaataaaaaatacatgtaggtatatagcccaataagacatcttacatagagg

SEQ ID NO: 700844 - DNA, 194 bp, Homo sapiens
cattgagccccttgatgccaaaatctgtcatcaaattgattattattttggcgacttcaatttgctcacggtgacaagtttctaaaggaactgataaaactggatgaaggctgtgtacctttggagatcatgattaaattcaacaggttgaaccgtctaacaatagagctttaagtgtaagttgtggaaagcag

SEQ ID NO: 700845 - DNA, 292 bp, Homo sapiens
  misc_feature (42)..(42): n is a, c, g, or t
  misc_feature (94)..(94): n is a, c, g, or t
  misc_feature (96)..(96): n is a, c, g, or t
  misc_feature (98)..(98): n is a, c, g, or t
  misc_feature (111)..(111): n is a, c, g, or t
  misc_feature (143)..(143): n is a, c, g, or t
  misc_feature (145)..(147): n is a, c, g, or t
  misc_feature (166)..(166): n is a, c, g, or t
  misc_feature (171)..(172): n is a, c, g, or t
  misc_feature (181)..(181): n is a, c, g, or t
  misc_feature (190)..(190): n is a, c, g, or t
  misc_feature (263)..(264): n is a, c, g, or t
agcatggatgcaccactttattgtctgagaaatgcaactggnataaagaatatttccttaccacaaataatttccagaactatgtacatatttntntnagaaatacttgtntaaacaaatctccctccactttttagtataanannnaccgttccatgtgattttnaaaannccggcacgngctcgtgcntggcattactgcacagttttaagatgatgcagattttttacaagttgtattgtggtgcagaactggatttttnntaacttaaaaaaaatccacagttttaaa

SEQ ID NO: 700846 - DNA, 842 bp, Homo sapiens
cacctatccttctttaattaattagagctctttttatagacatcacccagacaacacatatataactacacagacaggcagaagaaaatccagtaaccacaagatttttcatttgccaacctccgggttgagcccataaagagacaggattaggaaaacatgaagcttctaaggcctaataaacagttataactgggaggcaaaaacagattttgagagggatctattcacttttaatttctggggtttcatgaggaaaacagaggtctctcccctctcatgcaagaattaagggtggcaaggcaaaatggagaaaaataattcagttgactagaaaaagcccttttccagcaaaacaagacccaggaagagaaaaacataaaggccttttaaatatacctataatttggatatccacttttaattaagctgagtgctctttaagaaaattcttttaaattctttgttatccgactttagctgcgcgaagtggtcagtgtttctggctttcaaactttactaaaggctcagagaaaggaaaacccaaggcagttggtggggaggaagagaataaacaaatagcaaaagtcacatagatatcaaaccagaaaggactctgcctgagctaggattgagcctgggccaccatttgtaaaatggcggaggctaaacaaagcattgccacatggttaccaggtcacaccttccaaggacgttaaacaagatggaggcctgcagcaaagttgctactgaccatacagaaggacatgcaaggacaccagattgtttaaagttaaggccaaacctcaaaatcctttttctaataaacttcgagaaggaac

SEQ ID NO: 700847 - DNA, 441 bp, Homo sapiens
  misc_feature (1)..(2): n is a, c, g, or t
  misc_feature (272)..(272): n is a, c, g, or t
  misc_feature (367)..(367): n is a, c, g, or t
  misc_feature (398)..(398): n is a, c, g, or t
  misc_feature (417)..(417): n is a, c, g, or t
  misc_feature (430)..(430): n is a, c, g, or t
nnccagcacgctaccattgctaagcgcgtgaaagaaacaccaaacgcaacctggccggtacatgctgtaattaccaactctacctatgatggtctgctgtacaacaccgacttcatcaagaaaacactggatgtgaaatccatccactttgactccgcgtgggtgccttacaccaacttctcaccgatttacgaaggtaaatgcggtatgagcggtggccgtgtagaagggaaagtgatttacgaaacccagtccactcacaaactgctggnggggttctctcaggcttccatgatccacgttaaaggtgacgtaaacgaagaaacctttaacgaagcctacatgatgcacaccaccacttctccgnactacggtatcgtggggtccactgaaaccgntggggggatgatgaaaggnaatgcaggtaagngtctgatcaag

SEQ ID NO: 700848 - DNA, 109 bp, Homo sapiens
acttagaggatcctgatgtatccccaacacaacaggataggaggagatgactaatgcctccagtgctacttataaatggtagtttcccttctttctttcagggactttc

SEQ ID NO: 700849 - DNA, 127 bp, Homo sapiens
gtgagggtgtgagcagcggaacaggtatgccatagcacaggctcgttgctgttggaaggcgggttggcgacttccttcctctgtccggaggaggcacaggtgtcaccagttccagccaataggctcc

SEQ ID NO: 700850 - DNA, 104 bp, Homo sapiens
gaaggtatacattatttaaaataacaaaagttaacagaggcactaataatgtataccttcctttcttgttctagtaattaaagtctttgactataaaaaaaaaa

SEQ ID NO: 700851 - DNA, 308 bp, Homo sapiens
  misc_feature (264)..(264): n is a, c, g, or t
taactacctttcattcaatatcagctctcctctgccacaaggtagtccacattgcaatgcagtagtgatcttcaatattttccctgtgcctagtcttatttatgtacatagatgcatacttgtatacagatatatagggcctggatttttgtccatatattgttttacctaaattgaatcataccataaatactttctgaatcttgctttccactcacctatatctcacagaaaccctgagtcaactggtatagcttaaatccnttcttttttaacggttgggttatattctagatgtgagtttgcta

SEQ ID NO: 700852 - DNA, 896 bp, Homo sapiens
  misc_feature (724)..(724): n is a, c, g, or t
  misc_feature (750)..(750): n is a, c, g, or t
ggattccaaataactcttatttggagagaaaacgatctgcacttcgcattttcggcgttgacattatatacctttatagggtcctttagtataggtaagggagagtaggtaaactgattttttttaaacaggggagggtatgacaatctttggtcacgcagttgggagcaaaagattgaggtgcgattgcatgcctccttatgagagtctggctctgtcgtcccgaggctgtcagtgcagttggacgcaaatcttggactgcaaccctcagcgctcccaagtagtctagggattgacaaacagtaatgctcactcacgcccagccctcgatacctcttttagaagtcgacctgtctggcacgaaagtctgctgtttgtactaaaggctgggaatttggcctttagctaggaattgcatccattctttcagcctgcattcatactttaagaaccacagaagtgactctgtcttgggccatgaaaggcacactgtgttggtggactatatgaagagacgtccttgagtatgtttgcttttcatgaatctgggtcactgccaccttccgtctcccaggttcaggcgagactcctgactcagactcccgagtagctgcgactaccggcgtgtagcaccgcagcctggctaatttctggtattgcagtacaagatgaggttcgcatattgggcaggggtggtctgcaactcctgaactcgtgatccggnccagctcagactccctaaagtgctgngagttacaagctgtgagccaccctggccggggcactttggttgtggaactacagacttgggaatttcccctacaagatgcgcgaaccggtacttgtgaggttttttcactctaaaaaatttccactggcggtttgacacacaaaaa

SEQ ID NO: 700853 - DNA, 715 bp, Homo sapiens
  misc_feature (261)..(261): n is a, c, g, or t
acattatcgtggcagctttgcctgttgtgtcacactccctaggtacttcacgtgtcgtgaaaagccatggctccggtcgctgtgagtcgagacttggtctcccgatgctgtcagagatgctccaatgatagcgctggtccgctcctgtgctcggattgcccttctgtagaggggggacacaggctcccaagcatcttgaggtgtgaggtgctagatcgctcactatggggtatagcctaggatgcacaactagggaacaantctgatggtctcctcatgatggtctcctctgatggttgtcctcacgttcttctcaggggatactttctgtcgccaacagacgcgtgaaggcgagtcgtgcatcacttaactgccccagttggccttggctatgagtaggttccaaagactacaagacagtctggccctagtggattctgcggccagctccctttgtgcccatccatgtgtcctgttgtgcagtgaagggttcctacggggtgggttctttggcctgttcccagtaagtcgccacctgcattgaccttaggcccatagagagggcctgtcccggtgctgccccagccaggatctggtcgctggcccaggggactgatgggcagagtcgcccctgtggtggactgtgaccatctctgatggggcctgaccgcgggagctgagaagcgccgtccacgtctggcctccgagggcccag

SEQ ID NO: 700854 - DNA, 374 bp, Homo sapiens
tcgaattccgggcctgggatgcaggtgtgccgtggtgccacctaaggcaaagcgcttatactcagtgagctgtcaccaggcctaatatctgggttccaggctgggctttcctgctgtgcctgcactgagaaagcttccttttcctagacttgtcatgcaggatttgtgtcacttggtgttctccgtaggcaggtctggccctcactctccacaggagtctggattctgtcaccacaaagacccatctaggcttctgatctagaagtcctctctcgtagaacttcacctctctcctcacctcctccttgttgtcaattcattttcctcttcacccctgggctccttcacctccccagctccattctctatcccat

SEQ ID NO: 700855 - DNA, 115 bp, Homo sapiens
tactcaatacgaacaaggccacagcacaccacttagggctagcttaaggctcgtcttgctaagcttcgtcgagaactcattactaccaaagggtaggatggtggtaggaggtcca

SEQ ID NO: 700856 - DNA, 185 bp, Homo sapiens
  misc_feature (15)..(15): n is a, c, g, or t
  misc_feature (37)..(37): n is a, c, g, or t
  misc_feature (185)..(185): n is a, c, g, or t
aatgcagtgattagnatggggataaggcagatttagnaaatgaatcttgccgggcacaagtgcttatgccagtagtcccagcactttgggaggctgaagggggagggtcaattgagcccagggatttgaggttacagtgagctgtaatcacaccactatactccagcctgggttacacagtgagn

SEQ ID NO: 700857 - DNA, 282 bp, Homo sapiens
  misc_feature (204)..(204): n is a, c, g, or t
  misc_feature (273)..(273): n is a, c, g, or t
  misc_feature (279)..(279): n is a, c, g, or t
cttgaatcccagggccctggtggcataggcacccaagagaatctccttgtctgtaggttgtaaagaccatggaaaaagtgtagtatctgggccggagtgcaccgttcctcagggcacagtctctcacgacttcccttggctaggggagggatttctctgatcccttgtgcttcccggatgtggcaaagctcaccttgcttcagnttgccccccacagtctgcacccactgtctaaccagtccagtgaagatgaagctggggacctcagtttgnaaatgncga

SEQ ID NO: 700858 - DNA, 455 bp, Homo sapiens
agcgggggtgtctgcaccttagaaaaaaaaagaaaaatcaaaaaaaacaaaaaaacaaaacaaaaaaaagaaggaaaatcttgagagggtgggcgtgggaactcaggactccagagatggcgagtggtgtggcggagggagagcctactactacccacttagtacatgtgtgataggaactcaaacgtgtctggtgcagctataaactgtgccatgtgtcaagtagactagtaatacacgcatacgacacagtagcgtcaattcggataaccgcagtagggtataaaagacctgatgataacttgacagcaaggtactaaccacgaaccacaactattacagcttaaaccattagaaataacaaaaaaaagtacatggccattggtcctggagggaaccttactgtgccttaagccatttatatacggttaaggacctgcagatacctggataac

SEQ ID NO: 700859 - DNA, 348 bp, Homo sapiens
aatagctttagcgacttgctaggaagacacaacagtgagctccaggaatgtacaggccagcgggagcccagtatcagctcaacttccatgacatcaaactgctcttcctgcgctacgcccatggagcagtcgttcagcgcggacactggcgggggccggccgagagagcaacatccacctgatcccgaactttgtaatgatttcaactgagcatgaactttcctgagcagaatctggggagggggcacatgacacactgcagacacaagcacagaactgcagctgaaggtgcacacaggtggggaggcaaggcgtgagaaaccctgcttgcgtacaacctgccggtgg

SEQ ID NO: 700860 - DNA, 140 bp, Homo sapiens
ctataatctatcaattggctaataaaaatatctatcatctgaaggataactatgagacagtgcgtgaaatggtttaagataaaaagctcttggtatggggggtagcaaatggtaaagaatactattattttttaactggt

SEQ ID NO: 700861 - DNA, 462 bp, Homo sapiens
  misc_feature (111)..(111): n is a, c, g, or t
ggggagaaaggggccctctccccccctggggtccaccaaaaaatttttaaaattgggccgggggcccctttcaaggggggggaggtggtcaaaaacaaagccccccccggntttttccctttttcacaaaggccccaccccctgggggggtttggcccctatggggaaggggcccaaaactttttcctttttaaagggtgggggggggggacccaaaaagggggggtcccccccccccaggcccttttgggggcaaaaaaaagggggggtttggggaaaattttcccttaggtttttttcccccccccccaggttgggccggggcggtttccccccctgggggggaaaaaaggctttttggggccccctaaaaaaagccccatttccaagggaaaagggggtttattcccgggaccaatttttcgggggggggggggtccaaaaaaggtttttttcccctga

SEQ ID NO: 700862 - DNA, 378 bp, Homo sapiens
aggaataactggatacgaccgcggttctattattgtgggttcctcgggaagctgagcgccatgattaatgagggatcggcgcggggcgcattcgtattgcgccgtctataagtgacattcttggaccggcgcctgatggacctacagcgatcgcatttgccgatgcaatgttttcattaatcatgaacgaaagtcggaggctgtcgatgactcatcagtataccgtcgtcattccgaccatcatcctgatgccgaccggcgattcggcggcgttcttcccttgacccgccgggctagcttccgggaaaccaaagtctttgggttccgggaggagtccagctattcccgaagctcctcgaagttccggatgtcgagatt

SEQ ID NO: 700863 - DNA, 607 bp, Homo sapiens
acctatttatttagggaaccttaaaaacaagccaaatccgtacccaaacctggaacagggggacaaatggatacacacccctaacgccgtattggcccgcaccaacacaaggggagcgcctccctttaaaaaaaaaaaacccgcccccaaacccgggatcgggctaacaaaggaaaaaaatgcctcctgcggccaaaagttcccgcccccacacctctcaaagctcttcctattacaggggccaggccccatcccccggtcccacctgtttttttcttccagggacccccgccaaatcctacaacggggggaacattcgacaataaccccccgatttcttttcctctatcctgacacccttttctttgcccacaccagccccttggggtatccacttggaaaacaaatacaattgtggcactttgtaaaagccaatgcccgccaaaaagggtttccttaaaaaactaacaaattcgggtttttcaaaaccgcaaaacaaagcgccccaatacctggccccagcccctcaaaagggcggcttcgcgaccacaccaaagggggacttcccggaaaaaaaaaattgtctccaccccctgcggggggggcg

SEQ ID NO: 700864 - DNA, 715 bp, Homo sapiens
gctccggaggagcccaggtgccacttccttccggtcctctcccgatcccggggtctatctccgaccacccagcccgcctcccccccatgcccgcccgagagttctggaccccccaacgagatccaagtctgtataccctgaggtgcacccggaggtgaaatcgggtgcccacttcttgccctggcgcccccagatctcggcccccctgggtcttgtcttccccaaaaaaagttggtgatgaccaattgcccaaggccaccggggtgactgtgaaagggccctgaggaattaccacgtgagaactgacccattctcaggacacgacacggcccaccgatttgaaggtgggtgcctctctgcctgctggccctgagtcactccaagcccctcacagggaccccccaacgagacacgagaagagaaccaagtgaaaacacattaaaacacccagtgggagataatcaccttttgaatgaagaattgtcaaccacattgctcgacacgaatgcggcacgccgagtccttaaggcccgagagactctctggagacccttataagagatcctggggactgccccctccgtgggctgtaatgttgatggcccccctcctcatgacatcatcgatgacatccaccgtggtgctgtggatgccccgcccagttaagccccaagggaaacctttccattaaggatcaatttgaccactggtggga

SEQ ID NO: 700865 - DNA, 1252 bp, Homo sapiens
gatccattcgctatatgacatgatatttgttgttacactctttgtggggtagaggagcgtttcatgtgaagtttacaaggcatttgatctaacagagcagagaatacgttgcttgtgagaattcaccagtttaatagaaactggagcagatgagaagcaaggagaattaccatcaacgcatgcagtgtagcggaataccgtgcattactataatagtagctggatcatccccatgaatagtttggctgtatgattacttttcagctggattactgactcgtttatgtacagtattaagaaatagctgtgcacggtgatcactgagtctcgggactctctaccctgacacacagtcactacacagttatactgtcgagagtaatagatggctcgctggctcgcagtgtcatcactgcgacgtactctagtagcaagtggccattgtcagacaggttagctcttataagtggcaaagttacacacagccgtcccacattgctagtaccaacgtgagttgtacccctctaagagcccaagggttaaattacttcgttctcatatctcagacaattgcgataagcatgccgttgatgcgaagaggatcacatagtagatttatcacagaaggtctcttggcgtcttttgccgacaaagacttcacataaggatttgaccttgagtaccggcgtacacagactttgacatcgctagcgaagtcgtgccaatagggaagccttaaaggcaggttcaacaaacagagtggggcttcagggttagccttttattttgagcgtatttttgaaaaccaacacttagggaaggtgcttttgaatagaattagggcctttgtgcgctgcaaaaataccgcaaacagtcacaatgctgcgacataggttaattcttgcctaacaaaatttataaaccgagtttcgcacactgggttatgtcggggtgtcagcgcgcctggtgcggtgttggcatggcaaaatacgtttgttcgttgaagttccaacgcctgtggttccattcttttcccatgttgggaagaggcgggcatagttcccctcatttagtttggcgttggcctcgaacttcaacacccccgaagtgtctctttacaagtaacactgcgaaacccaattacttatttaaactatatggtaagcatatattcctctgaagttccccatattcacacaagggccataaaccttgggcacaaggtatgtgccacaagatttaccacaccaca

SEQ ID NO: 700866 - DNA, 167 bp, Homo sapiens
  misc_feature (14)..(14): n is a, c, g, or t
  misc_feature (113)..(113): n is a, c, g, or t
  misc_feature (164)..(164): n is a, c, g, or t
ccatctcccaggtncccccctctccatcccctccctcgtggcagcccgctggttttgtagatctgggttggtcacagtattttttcttgtaatttaagaggccacattctggnctattaatggacatgagatatgttaagttttaaatgataactcaacttcanccg

SEQ ID NO: 700867 - DNA, 1029 bp, Homo sapiens
tgactcgtggcaataccagacccgtgctatgagagcttcctctgtgtcttcggacatcctgttctacaagtccactactgtaccaacgcgtccccgtatgatattatctctgtccctgccatacgactcctgcgctgaggaatgaaaattgcgtactctctattgtgtgattgatactgcctgtgaacatctgactgtgttaataatgctttctatctctcacatcaataaagtgacatggaatccaacgtgtgagtaatctgtatcttcatgaatagtggcttggtctcgctatgtgtccaatgcgaccctccaaaggcacgggtactaccctctatatcatgtcgcctccccactagttctcgtgcacgctccttgggagagtgcagacgtatcggtggataagccaatcgcgagttttaatttcatctatactatcagacccatacctgttacagacgagaagatgtgagtgcttgcccttgtgttccacttcttgcttgaattctgttatttgcgcaaaggacgcatacaactgttactcctcatatctccttgaactgatgtgcttcttgatgctgatctggcccatgtgaagtccatctcgctgtccctgtcctcagagcgtggcgtgtctccccgttgttagactttggcgttacgttagtgtagtatccttcgtagtcctaagattgaactggtggcccgccgtcgggtgtctccttccgattttccctggatcgagtctgagacgcaagaatggggggggggcgtccctaaatatgctgaacagatggcccccatcatttcccctagccactttcaatggagtaagcttgccccttttgtcgcaagcagtctaagaggaaaggcgttggcggagcctttgaaagaacgtccattgccaagcccctgcttcgatccatgtgcaagcccactcttggtctgggcccagggactcaaaaaataacgcagccagtaaactgcggtccggcacacaaccgtttcttaatggccatcgggttcgaa

SEQ ID NO: 700868 - DNA, 217 bp, Homo sapiens
cctgcagaatctgacttgatctggggcagctgcgatctgcatagttgttctttttacattttttgtagagtcggggtctcgccatgtagcccaggctggtctcaaacttctgggctcaagcggtcctcctgcctcggccctcaaagtgctgggattataggcatgagccacagtgcccggccggcatttttttttttttttttttggaaaacagacc

SEQ ID NO: 700869 - DNA, 121 bp, Homo sapiens
ctcataaacaaaacaaacaaataaaaaatttcttccttgacttgtaaacgattctgtaggtattgctaacctgctttctagaggaatttattaaaaaatgaaagtaggctggctgtggtgg

SEQ ID NO: 700870 - DNA, 161 bp, Homo sapiens
tcagcaggcatccccatcaggcgcaagcatgtgtgcacagcacagcacatctccttccttccaccatctgcttggccagtcctgcctctcaaggcagggcacttcccctcctccttgcagttccttcatcccaccagggtccctgcagctctgcaattctg

SEQ ID NO: 700871 - DNA, 338 bp, Homo sapiens
  misc_feature (33)..(33): n is a, c, g, or t
  misc_feature (40)..(40): n is a, c, g, or t
  misc_feature (90)..(90): n is a, c, g, or t
actctcaggatctacaaacgcagagaggacacngtcatgnttgccgacgtgcttgacttcgactctgaagacattgacggtatagacaangatgtgggagaagaacaggaaccaccacccacggggcactggacagccacctcttcgtatgatatatacatggtggacacccgcaaagaaaacaatggcgatgaggcaacagaagacaaccccttagggaagaaaccaaagcatgggcatcattggcactgctctaagccctgccatagaaataccggcacaggacaagaaaacaacccagatggtgccaaagaggaatacaatcctctctgcgtttg

SEQ ID NO: 700872 - DNA, 268 bp, Homo sapiens
ttgtatgcagacagggtacgaccatcttccagctgtttttcggcaaagatcaacctctgctggtcaggagggatgccttgcttgtgtcggatctttgccttgacattctcaatggtgtcactcgggtccacttcgagggtgatggtcttaccagtcacgacctttactaaaatctgcatcccacctatgagacggagcaccaggtgcagggtccactttttctggacgtggtagacaaactgggagcgccgatccaaaacaacggcag

SEQ ID NO: 700873 - DNA, 378 bp, Homo sapiens
gtgattctcatgcctcaactgcttgagtatcaggattacacatgtgggcgcactacacccagctcatccttgcatatgtagacgacacgcggtatcatcatattggcctatctgacctcaaactcctgacctctaatgattcaccaccctcggtcttccaaacatgctggcattacctgtgtgaatcaccatgctatggctgtattgacgtaattacatactcgacatttactacaatacgtgattcctatcctctgatcttctgaccttcgtaacttctcatgcactgctatacaagtgtcacaatagagattcagaccctgccttctgttgttacttgacatgtatgtcattagcatgcacgatgcctattcttcg

SEQ ID NO: 700874 - DNA, 93 bp, Homo sapiens
ttatagcaggaaaaaaaaacttttgagggaaatagaagggctgcgttaccccaaataaacaatggcattgtcataggccttccttttactagt

SEQ ID NO: 700875 - DNA, 821 bp, Homo sapiens
gcaacgtcacctcaagcccctcatcatctccaggaaagtttctgccaaagctgtggcatagccagacttgttgatttggttcatttgccaatggttttatgtccctaaacctcatttggatccttggggtatagtttgtatcttctctgcttcaggtgatttactgtaacttttcaagagtattggattactttctgctaccatttaagctatagcttgatatatgtgagcgcaaaaaaaggtttcagcatggctggtgagggagaaagaggaggcttagaatatcccagttggtcacagcctgggcaagtcgcctagcgtccccatcaggtctaacggtcactgttcacacagtgggatcctcatgaatcatgaggacacctgcctccaacttctgcctggagggcatgggagctgttgtatgaacctatgtgtagctaaatgtatatgtatgatgttcgtattctgtagtggtgggtggtagcacagaagaaagaccgtgtgtccgtagagagtaggccaaggtgatctggccgtcttctatggggagaaattctaattttctttcccacttatctcagagcaagcccaatattccctccaagttcttcttggtgctgagggctgtaggaattgattgaaagcttctgcctcacttagtatcgtctggggcccagagacccaggaagtaactctaatactgtttcttaatggtatagcctcctgagcattcagatggtaaaatcgaagaacattaggacatcttggagtggagtcctcaaagtggtattgctttgctgtgctgtttcggaagaacggga

SEQ ID NO: 700876 - DNA, 154 bp, Homo sapiens
  misc_feature (142)..(142): n is a, c, g, or t
tccgccggtccggatgtatcccaacactattaaaaataaagaatatgaagaaataaaaaagaaagaataaataaataataaatgaatgagtgagtgacttcgttcctggaggtgagttgaagccttgggagaatttaggtgntgggcgataaca

SEQ ID NO: 700877 - DNA, 527 bp, Homo sapiens
gaaagagagatcagactgtaactgtgtctgtggtagaaaggagaagacataagagcacccatttggttctgtactaagcaaaattatcctgccttgagatgctgttaatctgtaaccctacccccaaccctgtgctcactgaagcatgtgctgtgtcaactcatgtttcactggattacggcctttgcaggatgtgctttgttaaccacatgctttaaggcagcatgctccttaagattcatcaccactccctaatctcaattacccagagacacaccacactacagaaggccgcagggccctctgcctaggaaagccaggtatttgtccaaggtttctccccatgtgatcgtctgaaatctggccccgcggccagggaaagcccctgaccgtcccccagtccgacacccgtacagggtctgtgctgaggcggctcagtaaaaaaaggaagacctctttgcagttaagaaaagaacaaggcatctgtctcctgctcttcccttggcaatgcaatgtctccgtgtaaa

SEQ ID NO: 700878 - DNA, 687 bp, Homo sapiens
  misc_feature (44)..(44): n is a, c, g, or t
  misc_feature (67)..(67): n is a, c, g, or t
  misc_feature (74)..(74): n is a, c, g, or t
  misc_feature (76)..(76): n is a, c, g, or t
  misc_feature (85)..(85): n is a, c, g, or t
  misc_feature (90)..(90): n is a, c, g, or t
  misc_feature (92)..(92): n is a, c, g, or t
  misc_feature (99)..(99): n is a, c, g, or t
  misc_feature (105)..(106): n is a, c, g, or t
  misc_feature (123)..(123): n is a, c, g, or t
  misc_feature (173)..(173): n is a, c, g, or t
  misc_feature (185)..(185): n is a, c, g, or t
  misc_feature (198)..(198): n is a, c, g, or t
  misc_feature (251)..(251): n is a, c, g, or t
  misc_feature (254)..(254): n is a, c, g, or t
  misc_feature (260)..(260): n is a, c, g, or t
  misc_feature (281)..(281): n is a, c, g, or t
  misc_feature (317)..(317): n is a, c, g, or t
  misc_feature (358)..(358): n is a, c, g, or t
  misc_feature (399)..(399): n is a, c, g, or t
  misc_feature (429)..(430): n is a, c, g, or t
  misc_feature (462)..(462): n is a, c, g, or t
  misc_feature (551)..(551): n is a, c, g, or t
  misc_feature (556)..(556): n is a, c, g, or t
  misc_feature (572)..(572): n is a, c, g, or t
  misc_feature (575)..(575): n is a, c, g, or t
  misc_feature (597)..(597): n is a, c, g, or t
  misc_feature (685)..(685): n is a, c, g, or t
cacttaccaagtgaataattttattaaggtcctgaaggtgagtntccggaagtgctgggtaaaacanatcacangnaagaaatgnaaaancnacctcancatttnnaaaaggaacaatctatngaagggaaacctagcgtaataaaaccctcactggatgtacatggaaaggngtatggtgagcnatttcctttttcnaggctgagcccttcataaattggcccctcggcttctggtgattcccgccgcangcncaaatnctccagtgtgttatgaaaatntttgtttatctgctctgtttcttcactggttttttntttttggtggtcttctcgattcttttggttaagctggtttnttacctgatttgttaccgcatcattttccttttcataaaantagatatatctgttcagaatttctataaanngctgcacttgtggagaggggtccatgcactgntttgctattttttgagctttttttaggcactccattaccctcttgcctccgtgaagctcctccccatttttgaccgtgtttctgccagncccgnagagatgtgcacaagngcncacagctcggccctgatcaggnttctttaaaagtatggatacaacaagggcacactgagtcctcagaggtacatgattctcatcactgaagcaaaaaatactttcaaaantg

SEQ ID NO: 700879 - DNA, 104 bp, Homo sapiens
cttactaccagacaaacttagccaaacgatttacccaaataaagtattagcgttagaaattgaaacctgcagcattagatatagtaccgcacggaaagatgaaa

SEQ ID NO: 700880 - DNA, 115 bp, Homo sapiens
ggcatgcttctcattgtgctgcttgtctgggcatgctcctccgtcacgcagcttggctccctccgagcgcgacctagctgccgctacgttgtccccatttgccatttgatctcct

SEQ ID NO: 700881 - DNA, 150 bp, Homo sapiens
acctagaggttcccacgtacagcttctatggctgagggtgagtcagctgctatagacctaacttgggctgatttgctgtagtgtaggaggagcctagtagtggggtgaggcttggattagcgtgaagcaagggctatcggttagagaggc

SEQ ID NO: 700882 - DNA, 682 bp, Homo sapiens
  misc_feature (32)..(32): n is a, c, g, or t
  misc_feature (62)..(62): n is a, c, g, or t
  misc_feature (66)..(66): n is a, c, g, or t
  misc_feature (80)..(80): n is a, c, g, or t
  misc_feature (96)..(96): n is a, c, g, or t
  misc_feature (102)..(102): n is a, c, g, or t
  misc_feature (108)..(108): n is a, c, g, or t
  misc_feature (110)..(110): n is a, c, g, or t
  misc_feature (168)..(168): n is a, c, g, or t
  misc_feature (175)..(175): n is a, c, g, or t
  misc_feature (177)..(177): n is a, c, g, or t
  misc_feature (179)..(179): n is a, c, g, or t
  misc_feature (182)..(182): n is a, c, g, or t
  misc_feature (184)..(184): n is a, c, g, or t
  misc_feature (189)..(189): n is a, c, g, or t
  misc_feature (193)..(193): n is a, c, g, or t
  misc_feature (213)..(213): n is a, c, g, or t
  misc_feature (215)..(215): n is a, c, g, or t
  misc_feature (218)..(219): n is a, c, g, or t
  misc_feature (238)..(238): n is a, c, g, or t
  misc_feature (251)..(251): n is a, c, g, or t
  misc_feature (254)..(255): n is a, c, g, or t
  misc_feature (274)..(274): n is a, c, g, or t
  misc_feature (277)..(277): n is a, c, g, or t
  misc_feature (280)..(281): n is a, c, g, or t
  misc_feature (293)..(293): n is a, c, g, or t
  misc_feature (299)..(299): n is a, c, g, or t
  misc_feature (305)..(305): n is a, c, g, or t
  misc_feature (307)..(308): n is a, c, g, or t
  misc_feature (310)..(310): n is a, c, g, or t
  misc_feature (332)..(332): n is a, c, g, or t
  misc_feature (334)..(334): n is a, c, g, or t
  misc_feature (350)..(350): n is a, c, g, or t
  misc_feature (367)..(367): n is a, c, g, or t
  misc_feature (373)..(373): n is a, c, g, or t
  misc_feature (401)..(401): n is a, c, g, or t
  misc_feature (407)..(407): n is a, c, g, or t
  misc_feature (410)..(410): n is a, c, g, or t
  misc_feature (414)..(414): n is a, c, g, or t
  misc_feature (416)..(417): n is a, c, g, or t
  misc_feature (419)..(419): n is a, c, g, or t
  misc_feature (425)..(425): n is a, c, g, or t
  misc_feature (482)..(482): n is a, c, g, or t
  misc_feature (488)..(488): n is a, c, g, or t
  misc_feature (490)..(490): n is a, c, g, or t
  misc_feature (492)..(492): n is a, c, g, or t
  misc_feature (544)..(544): n is a, c, g, or t
  misc_feature (547)..(547): n is a, c, g, or t
  misc_feature (553)..(553): n is a, c, g, or t
  misc_feature (595)..(595): n is a, c, g, or t
  misc_feature (604)..(604): n is a, c, g, or t
  misc_feature (607)..(607): n is a, c, g, or t
  misc_feature (621)..(621): n is a, c, g, or t
  misc_feature (642)..(642): n is a, c, g, or t
gtactagggttgttcttttgctctgtttccanattctggagctgcacgtgagcacttttgtntaanagatctaaaaaaanaaaaacatgaaaatgnaaattnaaaaananaaaaaaaaagaggtggagtcgaggacttcccgcccattgcacaccgttggcacatacntgcttgnanangantnaaaanaagnagacccaattccactgaaantnaanntgttgaagtgcagtctgtntgtgaaaaaattnttnnggggttgaaaaaagatgangtnaannttgggtgcaaanaaacancccaanannanaaaaccactcaggctgacaganangcacatggttgtcgtntgcactctgtagtcacntgatgngacataaaatacagggaggaaggccaancagatnatncacntnntntacatngtaaaacctatgaacttagcttcgttgaaattttctgggcacttccgcgttttgaangcgtanananagcataagatcaccaggatcacatcgtaggtaagagagatcaacatgctggnatntttganattgcattttaggatgactgtttcccgcttctctgcaagggnatacctccnggngcctggggctccangatgagccacacagacaccancacaatttgcaccaggatcagacccaggcagatgaaaacc

SEQ ID NO: 700883 - DNA, 171 bp, Homo sapiens
aattagtgaagtctgattttcctcctcctttaatattccttcatttcatttggagcactacttaagaacatcagacatgaccctatcctaagaaatttttttttttaattggccaggtgtggtggctcacacctgtaatctcaacactttgggaggccaaggtgggcggat

SEQ ID NO: 700884 - DNA, 932 bp, Homo sapiens
tgggttatcagttctaaggccctggcaagggtggtgtggaacaggtcccacataactgcccatgtcgagagctctaagcctaaattgggagggacaccaggacaagactcctgggttcatagcctaggggcctaaggtcgcagcatagagcttccttagatccctttggagatactaatacttgggagaggaagtgaaagtctgaagcattagtatctaggaggcagggatcagaggaagtagattcagaggtaaggagaattttggggctacactttcaagaaagttgtggtcaggacccaggaggtatgggtcagaaggaaaggtagaggcacacgcacgggtgactgttgagtagggacttctggctgcgccatgatctcaaccggctaatgccgagagtttgggatgacagctttctgcctctagtcggcccccggcttccccagggaaattgaaagtggaagctggttccaggtagaccagcgcttccaacccagaagcgttgggggttgttagaaagccattccccagacagcctcacacttgagtcttaagtctggtggccgcctatcgtttttaaccgtccgacaggtgcctggtattttcctccaattctaaggaaggtagaacagaatagcagcgaaagtgcttggaggtccttcatgatggcaagatgttacagggagtctggttcttagagctccagattgatgggggcgctccctgatgggggaacctcttgtgctctgccctggggtcttggggcccggtcctaggaaggggctctcgccggctggggtgttacttctccgcttgggggcccggcttatccgcgggaaggggcctccgcggggggggagcgcttggataagagacccgcccccaagtggtgagtcttgcagcgggggggtccgcaccacaccgggtta

SEQ ID NO: 700885 - DNA, 109 bp, Homo sapiens
gagtgcatccacgccgtctgactgcatacaacgccgcctgactgcatacaacgccgcctgaatagcatacaacgccagctgattagcatccaatgccgctaactagcat

SEQ ID NO: 700886 - DNA, 951 bp, Homo sapiens
accaggagactctcaagataccagtttgatgccttctatggcggagaggagtactcatcaggatcatctatgcaggttcagtgtcatgcccactctctagaggcacttgtctggaagggcagaaatgcgcacgatgtgcttgcctatggatcccacagggagctggtgcaagacgcacactaattgcctaggtgctaggcccgatgagctagaccttgtgtgagtgtagtccccgccgcgagctcgtccatgcgcacctccatgccaggcctcactaaggcgcagtgagtgggtgccggagggccaggcgcatgggactcctttgtcatgtctacgcgatgatctctacctcagcaggatcgtacccatgggaagaatacgtaatcttagtaccctcctttgggtacacccgtagcattacgcggggagggaacacctagggtagactccccagcatgtaaaagaaacgttgtcccaggtgtgtgtatagtaatacgcattgcactttgcacagtgggttgcatgccattcgcacaaaggaaaggacccgccattcctatggataaagacgtatgttgaccttgaatattgtggaaggactgaggcaaacactttccccctggctccacgacaccaagtttccggaaaattcagtgaacttgatagcgcaagtctccatcccctggtgtcttttcgacaccgcacaggcaggcttttcgccgatactccccagcgaatgtatccatgttgcattggttagacatcgcacattggtctcaaatcgtggtagggaaccccatagacggtgaggcatacagggtttattcgtggcgcccccaattgtcttcttgcccagtaccgaatcgaagagggtagaagcaatttgattaacacctttgacttttagaccatttggggcatgggggctacaacgaggggaccataccctgg

SEQ ID NO: 700887 - DNA, 578 bp, Homo sapiens
  misc_feature (526)..(526): n is a, c, g, or t
cacagggccttttcccctcaaaactaggcctctttctgtcaagtgtaattccttctaccagcagccagcaaactatggcctataagggggcagctcatattttgtaaatcaggttttactaaaacgtagccacgcccattcatttaagtattgtctatggctgcttttgttctccaatggcagaggtgagtagttacaaccacatggtctgcaaagcctaaaatatttactactggggtctaaacagaaacaataacttgcctaagcacagtgactcacacctgtaatcccagtgccttgggaggctgaaggtggtggactgcttgctgtttgagcccaggagttcgagaccaacctgggcaacatggcgagattccatctctacaaaaattagaaaaatagccagttgtggaggcatgcacctgtaatcccagctactcaggacgctgtggtgtgaggatcccttgagcccaggaggtcaaggctgcagtgagctgtaactgcacctctgcactgtccagcctgngcgacagagcaagaacctgtctcaaaaaataaaaaattaattaattaattaa

SEQ ID NO: 700888 - DNA, 847 bp, Homo sapiens
ctcttaacaggaacaatcttcgtggtcggtggacccgccgtggcagagcaacatgtgcggggttataacttgcaaagagttttcgtctccgtggtgtatcacgccggcgcccctcttgtttggtctgggtccacccctccgggcataatatcttccggcaatatttcttctttgcgggcgtcccccccaggcgatagatcccctgtctacaccctcttaggttgaaaaacaaaagcgtgccaagccccacaagtctgcgtctttaaaggtgtttccacccccaagatcctacgtcctctgcgcttatgagcgttctagaggtggttacacaaaataaacgcgccctccctctttggccacccaatagtgcgttccaccctacatagaggagtcgtttgaccaaataaagacagatgcttctaaaggggcgcaccccccggcgtcacgcgccctcaaaacttttatgtatgtaaaattcaattgccgtcccaagaggagaattattcatgaacacagcttttgtgtgtgtcgtcttctcccactgatgtatcttgtccgcggatagatgttcgccactgtgggagttaccaccagtttgtgagtcttgggagccgaaaatgtagtcgctgaccccctccaccgggggttatgttgttcccaacaagtacaacacgcatcctcaatgaagatgggtccccagatcatgtgccccccccccggcttatggtgaagactatcttcctattcaagctgggtctccacttcgtcgatcccctaactattcactaagggtcagggtaaacaagcccaagcacgcaaaaagttccccacaacaacccacataaca

SEQ ID NO: 700889 - DNA, 256 bp, Homo sapiens
acattcgttagctctaggtgaacgcccccgtatttgtttgaaacggtactaagagtgctactcgcctaggacaatgtagtcaaggtgacaggggctcacataaatagagagacgccgcttttttttactttgaacatgctggaagaatgacggcgtatacacagtatacgtcgtcagcgatcgttatgcaaagtttatcttacatagctctgagaacacgctgcgttgtgtaaagtgtatgagctgtgctgtactt

SEQ ID NO: 700890 - DNA, 117 bp, Homo sapiens
ccggctatagcggctagtggagtcccgttgtggcgcagtggtacgaatccgactaagaaccatgaggttgcgggttcggtccctgcctttgttcagtgggttaaggatctggtattg

SEQ ID NO: 700891 - DNA, 413 bp, Homo sapiens
  misc_feature (306)..(306): n is a, c, g, or t
atactgttccgcgcgctttcgagtgtccagttcaccttctaacagcgcaagcctctcggctgctctcactggcggggacccccctctcaggcgaccactctgcctagtctcgttcattacaattcctcgtgctcgcaggagggcgtgcacttgaccctcatcgccgacctgattaatgctgccatcagcgtcatgcagctaaagcatatttgtgaccctttaactgcccctaccccgaaggttttcttggttccttagatcttactgaataagctgtaagcatcttgccacagggttcttgactcnccttggcatgtttccatcctctttccatgctgcctcccaggacatgttcacatatacctgtgccctcctgtgacctcttctgatccctaaacctgccctgctgctcc

SEQ ID NO: 700892 - DNA, 924 bp, Homo sapiens
gagccggctcgggtccccttccacaccattggaagcttgtgttctttcgctcttgtgcaataaatcttgctagtgttcactctgggtccacactgcctttatgagctgtaacacttaccgcgaaggtctgcagcttcactcaggaagccagtgagaccacgagccccagaagaacgaacaactccagacacaccgctttaagagctgtaacactcaccgggaaggtctgcagcttcactcctgagccagcgagaccacgaaccaaccagaaggaagaaactccgaatacatctgaacatcagaaggaacaaactccggacacgctgcctttaagcaactgtaacactcaccgcgagggtccgtggcttcattcttgaagtcagtgagaccaagaacccacaaattccggacacaatactagtacatgaaattgataggcttatcatggacttcgactatgggtcattttagcttcctcaagtaacctgttctagcccttaaatccttaatggtcagaacagtattcttttacctaacaaaattcaatggatttttgaccaatttaactttcatagattatagcaattactttttggcagagctttagaatcaggaaccaagtttctgatttacagcttaatgaagaaagcttacgagaggtaagggattctgaccacttacaggcacggccactcccgacgctgtgcttgcccaagctcctcaccaatgaccatagcggaggtcccacccggccaccacaccagatcggcggcgccaaggctacagcagcacacccatggtcgctgggccaacacgagaccaccgagaaacacatacccagggagtcgccaacgcacaagcagcgcgacaatactgcaagcagcaatgcagcgatgcaggccacccagccgggggccacgaaat

SEQ ID NO: 700893 - DNA, 976 bp, Homo sapiens
attttttttgtctttttttttagatagagtctcactctgtcgcccaagctgaagtgcagtggcgcgatctcggctcactgcagcctccgcctccggggttcaagcgattctcccacctcagcctccccagtagctgggattacaggcacacaccaccacgtccagctaatttttgtatttttgtagagacggggttttgccatgttggctaggctggtcttgaactcctgacctcaggtgatccgcccgcctcggcctccctgctgggattacaggcatccaaagcgctggaattacaggcatgagccaccgcacccggccttatcagttgattaagtgaaccttcagtgggcaaagttgttttaaaagtactgatacgagccttgcctgcagaggttgatgtcactgatttaaggtgggcccagccagtggttcagttttgcctgtcttcgagtgattggaatgtacagccaagagagtgtaattatggtgctggcagaagtattaacctatctggatgtcactgtcttcactttctgactaggctgcttccagggaatctttccacctcaatatttatgagatatctataattttataacaaacttttaaaggagcctcggtttccttaaacacaattgatgacaccagttttctggttttcttccatttttgtttatagagccagggtctcactgtgttgcccaggctggccttgaactcctgaactcaagggatcttcccacctcagccacctgagtagctgggactataagtggcacaccactgtgcctggtcagttttctggttttgataatctatggttgtgtgagatattatcattggggaaagttggaggaatacataggagtagtctatctttgcaacttccatgtcttatttccaaataaaaagtaaaaaccctcattgattatgtacttcattaaaacactggacttcaatgaaatcatcacct

SEQ ID NO: 700894 - DNA, 925 bp, Homo sapiens
attttttttgtctttttttttagatagagtctcactctgtcgcccaagctgaagtgcagtggcgcgatctcggctcactgcagcctccgcctccggggttcaagcgattctcccacctcagcctccccagtagctgggattacaggcacacaccaccacgtccagctaatttttgtatttttgtagagacggggttttgccatgttggctaggctggtcttgaactcctgacctcaggtgatccgcccgcctcggcctccctgctgggattacaggcatccaaagcgctggaattacaggcatgagccaccgcacccggccttatcagttgattaagtgaaccttcagtgggcaaagttgttttgtgggcccagccagtggttcagttttgcctgtcttcgagtgattggaatgtacagccaagagagtgtaattatggtgctggcagaagtattaacctatctggatgtcactgtcttcactttctgactaggctgcttccagggaatctttccacctcaatatttatgagatatctataattttataacaaacttttaaaggagcctcggtttccttaaacacaattgatgacaccagttttctggttttcttccatttttgtttatagagccagggtctcactgtgttgcccaggctggccttgaactcctgaactcaagggatcttcccacctcagccacctgagtagctgggactataagtggcacaccactgtgcctggtcagttttctggttttgataatctatggttgtgtgagatattatcattggggaaagttggaggaatacataggagtagtctatctttgcaacttccatgtcttatttccaaataaaaagtaaaaaccctcattgattatgtacttcattaaaacactggacttcaatgaaatcatcacct

SEQ ID NO: 700895 - DNA, 209 bp, Homo sapiens
tttggggggggcccttttttcccccccccccttttttttttttccaaagggccggggggggggggtttttttcccccttcccccccccgggggggggggggggggggttttttgggcccgggggggcttttttttaaaccccccccccccccccccccttttttttcccggggggttttttttttttttttaggggggggcgggttcca

SEQ ID NO: 700896 - DNA, 899 bp, Homo sapiens
tcgccggggcctgggtggtggccccgggggcgtttgaccctgtgtgcctcgtggtggtaggaggccgcccggtgggagggcccgcagctgttttggtgggggcgagggcggtgtccggggttgggactcaggcttcggaggtatgttttgagtgcgagcggcgccgcgtggggcctgtggccccttgggggtcgtcgcgtatccggtgtcaccctagggattgtggcgcgcgtgtcgcgcgtgccccccgttgtgctctcgggcgagactcggagtgcccgggtggtggaaaccccccaggtcagtcttcggggcggggcgagcgtggcgcgtattcgcgtggttggtaggcgccgcgggtacggatgcccgggcctcggttgggacttgttgggtgttcgtcggtcgccaacttcgggggagtcagcctgtgtgcacttccccccttgcccgctgctacccgctggaggggtgtggagagagggagccttgggatcaccccgtgctgatcttgcgcggagctggcagcggggagcccgggagtgtcaggcctcgctcgctcgatgaggttgattcgcgaaccccggggagagtctcagaggctgcgtacctggcagacgttggtttgctcgccctcgctgcctcccggccctacctcagcacagcggcatggtctcgtcaccggcatgtcctcgagttccaagttatcttttccccgcccctagtttttttcccggggctctttccataggtggttttttctcttctatcacattggggccatgggcatggtatggggaggggagggggtttttcccgacctcaggtcccagctgtttcacgttgtcttatttgcagtccccttttcccaatgccaccacccgttgggcgtggttata

SEQ ID NO: 700897 - DNA, 288 bp, Homo sapiens
agatgaggacagcaggtcgcaggaggagccagtgtttggctatgaggacagcagttcacaggaggagcgagggattaacaatgatgacagcagttcacatgaggagccagggtttgatgatgattacagtaggtcacaggaggttacaggtattagttatgtggtcagcaacccacagtaggagccatacttagctgatgatgcacagtagttcgcatagctagccacgattagatgatgaggacagcagatgtcagtgaggagccacgtgattagcgatgatgacag

SEQ ID NO: 700898 - DNA, 675 bp, Homo sapiens
ccgacagcttgggtcgagcccccccggatgctccctttctgttattgatcccccccccgcggtctgtaattttttcgtgaccgcgtggtctatttgcctccgtcaccaagtggggtacccccgctctgtctcttgtggcagacccactctctgcggtgctaactccccgcgccgtcttgatttagtggagtgtgggggttgccaaagtagtgtgtggtagctccgacccctcgctttggatgggccgtcatcatattcgcggcgctctcccccctcacgctgtaagataggctcgtttctatgcctttgacaacccactccgccgttacacgttcgcttatatctccccccctcacactgtccataccttagatgtgctctcctctcaccacccccactttgcgtgcccccactattctatcctcctctctcttcactaagagatcaccatatattatctactagaaacagatacctcacacgcttgctaaaccacgttctctcgctcctcgcgccaaaaaccactttgtcacgagagtttcttaaacacctcttggatttaccacattgacacctcgcgcccataattttctccgatccttacccacgcctctcctctctttttccgcctctccgtttcttcaaaccccacacaccacaacagtaaccaacaaa

SEQ ID NO: 700899 - DNA, 1083 bp, Homo sapiens
ggcgtacggtgatcctctatcaaatccgaagaccagcctgtcccggtactctttctgactttctgtccgactgcgacggctccgggcggaaccacaaggcttcattgctggtttggctgggcagagacagagctaacgttggtagccgtggagtcgttgcctgcgttgagaacgatgtgcgacgagcagtattggtgcattgttggtgatgtaaaacctcgcgcaacctgggtgacaggtgccctgtcgcataccatgcgagacgaccccgctgagaacactaaagtagacttttggtgtccggcgtacaaccgcccccgttggtgactggtgactcgagatccagccgtcacggttgcttggtccatcattctgcttttctgaaggtgacacgctgctgcgtctccgtgtctttactgcctggcgttcacttatccaaagcacacgagtatccgggtagaaaggaaccgcatgaggcgcaaaggtgactccaatctggatgtgtgcacactatccggctgatgttcggaggacagtccgtatgttccttctctgtacgaggcgttgcgtcccgcatgtcaacagctttgcttgtccttgcgacagattggattcggcaccagaaaccgaagcaagatcagttgcttctcgtcgaaatccgaacgaaggaccttccgtcaagagtcgacctcctaaaatcatggtatacacagctccaacgggcccttcctgctttcgggagacgagatcgggagggggggaaattccgaagggctcgagttcattcactcggaacgtaactcttggcaagaccttcagcatcgggtcttttacaaggagagactgccttagcttggtggtctattgacctgtctggttggagtctggacgggcacattcccgtgcccattgttcgtgatttccccggtccggggcgttgacgtttcacggggtcgggctgcctgagttccgcgccacactctgcgtccgcgcgttcctctgtggtcccaccagtgcgcccaacggtgtgtgcaccctcgtcacccatattggagcgctctctccttcttcctctttcttggc

SEQ ID NO: 700900 - DNA, 302 bp, Homo sapiens
ggttttataaacctcctttataagttgccagagtactccagatacatcaaggggccagattagcctgcttcagaagtgaggaaacatgaattttcttcccaggtttttctgctggagggaggctggattatgatcagatgtatgatattgttttctcccaggctgtgccttggaagcctttcaagtagggacagttcttagggacctgttcagttgctgaagttaaagacactcactgtattgtttgctgctggctagatctatttggaatgacaatgcaaaactaggtcaagtgtcgacgc

SEQ ID NO: 700901 - DNA, 482 bp, Homo sapiens
  misc_feature (482)..(482): n is a, c, g, or t
cggcttatggtgcagacatgggcaagtccaagaaccaagcagagacaaacaggtccgaaaatgtgccagaaatggtatcaagaaaacccgatcacaaagatacgaatctcttacggggggtggaccccaaggttctgagggaacatgcgcttttggccagaaagccacaaccaaaaggggctaaagaagatgccggtgcaacaatggcaagggcctggagtgcacgtggccgaggcctatccagggcctcggtaaaggccccaaggagggttaaagccccaagaattcccaaaggggtgtcacggccggaaggcccgaatcgagcttgggctacattggccaaccccaaagcttggggaaagcgtgcacagtaggcccggatatggccaagggggtcaaggctgtagcagggcaaatgggcaaagggcaaagggcgcaggggccaagatccaacccacgggccagggctgcaggcccacagn

SEQ ID NO: 700902 - DNA, 1494 bp, Homo sapiens
gagacaacaaagagggagaagatcgcagtgttatccactacgatgataaggccattgaactattcaaggatgaagccactgatggaggaggagacaacaaagagggagaagatagcagtgttatccactacgatgatccaggccattgcaacggctgctcagcacccgtaaccaggcatgcagcactgcaagcacaccagacattgccagggccatgcacatgcaatcatttgcagctctattcgaaagtggccccagtcatgtgcgtacgcggcaagcaagcaccatgggcggcaggcaccgcgcgcgcgtcaccacacgcggcgcaaaatccacttaacaccaggaaaacgacaagcgctgcgaactccctgaccctaccctggcgcatgaaaactcggcctgcaggccacccgaccttcatgaacgcccgcacacgccacagcaccgcactcttcgcgcaccgacacaactcctggggcccacaccgaggacgaccacgcaggacactcccggctcaccacagcggatcaccacattacccaacagcgcatcggccatcccccacctgtcagtggcaccccaggacctacccgtggggccaacggcgcaacggacagcccacagggcccggaaccaaaccccacgggccccggacagtaacacacttgccaccacgtgccccataccacgccacaggcacacgaggccgacacgcaacaggcacactaggggccactgaaccacgagcccgccaagaaaaacgccaaccacccgacgccaccagcgaccccccagaccggcagtcacagggcggcacactggcacaacacccgagcccacacacgacgacacgcacccaacaggacccactcccccactaggcacagcgaccccgcaacagaccggcaggcggcgacagcctacaccggcacacggacaacaccgcacgaacctcgacacaccaggcccacgcaccacagcctgacacccgacagcaccaccgacccacacaccagctgcacgcacctcacctcacgcccacacacctgggaaccaaaggcgacagacccgcacacgagccacacacccacgacacagcccagcacgacacagctgtccacctatctcaacacacagaaccaacacgcctcccacccaaggcgacgacaccacccactacacgagccaacatacaggcatatacaagaggagaacacacacagactgacactcacacaaatacccaaatccgacagcagcaactaccaacgccacccaccaagaccgagacacacactcagtaaggacatagacaacccctaaccggacacgacagcagcgtagacacgcacacagcacaaaaacaagcactagagcagtcagcgcgaccgaatcgatcatgcaagagagccaaccgaagatcgcaatacacacactacgccactcccagaagaccaccggcacaacaagcagatatgacagaacagctca

SEQ ID NO: 700903 - DNA, 330 bp, Homo sapiens
aggactcccagttgagcatactgtaccgagctcaacattctttacaggaaagaaatccaccccagaatttcatatctgtgcaaaactaatctttatagagaagaagaaacaggatcattctcgagacaagcaaaatgctgacgggaattgtcaccatcagacctgttcttataatgagtccctgtaaggacagcactatattatagataaggtaaacaccagttaccagtccaccacggataacacactgttagtacactgaccatgtgacactaccatagcagccacttaatcgagtctgccaaaagaaatcaaagttagggtaccgag

SEQ ID NO: 700904 - DNA, 833 bp, Homo sapiens
agcggaggtgggcttcagaaggtgggtagtagcaaacttcactgagctaaaggagtacgctctaacccaacatattggaacgaatcccagaacttaaagattggttctctaaaataagacagacaaaaataaaaaagaataaaacggaaggaagaaaacctccaataagtatggggttatatatagaggccaattctacaaatcactggcatccctgaaagggaggtggagaaatcaatgcattgggttagaacatgctcatttagctctgtgaaatttgttattacccaccttctgaaccctacttctgtcagcaaagaagctaagaaccatgttaaaagattacagaagatgctaactagaataaccagtttagagaggaacataaatgaccagagccagctgtaaagcacataaggggaactttgtgatgcaaacacaagtatcaacagctgaattgatcaagcagaaaaaagaatatcagagcttgaagactgtcttgccaaaataaggcaggcagagaagattagagaacaaaagaatgaacaaggaatgaacaaaacctcaaagaactgtggaactatgtaaaagaccaaacatatgactgattggactacctgaaagagacaaggagaatggagccacgttgggaaaacacacttcaagatatcatccaggaagaacttcccccaacctagcaagacaggccaacattcaaattcaggaaatcccgaagaaccccaggtaagatactccacaagaagatccaaccctcaggaacacctaagtcatccagaattctcccaagatccaaattggaggggaaacactgg

SEQ ID NO: 700905 - DNA, 580 bp, Homo sapiens
atacagcagtgcagctgcatcctgtaggtgactctgtagaggatcccggtctgagcaagcttggcagtatgtggatgcgatcctggcacgtactgtaggagatgtgcgtcgtgactggcagctactgcaggatgcacggcgggcaaggagctgggctgaggatgagaaacagaaggcagagacagtacaggcagcactggaggaggcccagcgggcacagggtatcgcccagggtgccatccggggggcagtggctgacacacgggacacagagcagaccctgtaccaggtacaggagaggatggcaggtgcagagcgggcactgagctctgcaggtgaaagggctcggcagttggatgctctcctggaggctctgaaattgaaacgggcaggaaatagtctggcagcctctacagcagaagaaacggcaggcagtgcccagggtcgtgcccaggaggctgagcagctgctacgcggtcctctgggtgatcagtaccagacggtgaaggccctagctgagcgcaaggcccaaggtgtgctggctgcacaggcaagggcagaacaactgcgggatgaggcc

SEQ ID NO: 700906 - DNA, 864 bp, Homo sapiens
gaataagaatgggatctagtgtactgtgttaaatgagattggcttcagcaatccattacagttaccttacatagcacattgatacgtgtgaaatgaacatatgaatgtaatttatatattcctagaaatttaagttactttgtgagatttgggcctgtccgctcaatgccagtttaggattgcttggattctatagctggaaatgattataaaatagattttcatgggaatcttaaaaactctgatctcaagagacattgtgttggagcagttttaacagccccagtacacagaatgtatacgaagagctacacaaaacactccaagtttcagcagttttagcgccaccattagtccacttggctagtctcatgaagagaatcttagtgtaaagttggtacacaggtaatcaaaaagttagtttagaagatatatagaggggtgtaagctaatcgtggtgtctagtaagtagcataatgcagatgtgaggagttggaacttagcgtgtgatgcggtattattcatctgcattcaggttcttaactctgggtttgtacgtcgaggtgtatagcgtttacaaatgcccttgtaattaccactctgaagtctgctgagtgtgtctctgtgaacatactttaggatattctgcaccatgatggaaaaaggtaacttttagaagtgtctggtctaataacgtggtggatgtgcatgagtctgggaagttatctaatttttgataaagcaccctggggtgcattggtcgtctcaaattcacagtttgttatgaagtactgggtaacagggaagggagaatcctatgatagcagttcagtttgaactcttagccatttgtgaatttaaaag

SEQ ID NO: 700907 - DNA, 404 bp, Homo sapiens
atttttggggggggggggggggggggggggtttttgggccccttgggccctttttcccgttttttcccccccccccccttggggcagttttttgttaaaaacggccccccctttttaaaatgtttgctttttttttccccccggggaaaaaaagggggagggttttgtggggggaatttttcttttggggaaaaagccccccggttttgatttttcttttctgcttttccccgaattttttccccgatttttttttgccggggtttttttttcaagttctccaaaaaaaaaaatttttttttttttttttgctggaaattattcccggtttttgcccccccttgggggaatttttttaaaattttttttgcccccccccccctttttaaggctagggtgggcca

SEQ ID NO: 700908 - DNA, 1159 bp, Homo sapiens
gtgcaacactttatggggaaagatttacacaggggtgaccggtcataggccaagcgatgaaaagagggcgccaggagtgtgcttggggctcccgaggtgtggcctcagatgtggaagccatgtgggacggccgtccccaggcccgcgcacccgcaccttcagttttcccctttggtgaaatgtgggaagcttatgcttcctttccaagttcgtgcaaatatggggtgcgagtgagcctaaagaggtgggagcgaaagaacacagaggaaagaaggctctcccactctcccgaggaccgtgcccccaagcctccgaaccccacatgtggtggcagtgcaagagaaagagggaaaatttgtgccacaaaacccagtgtgcccgagggtgccccccttctccgtttgtggggagcgaaagtgtgcgagtgtggctctctctctgtgggaatatacccgcaagaaaagctgtggaacgccagggggcccagtgtgcactctcttgtggctctgtgggaccaatatcactttgtgcacttgtggataagagacgtgtggcacgggtgcgcctctcgtggggcccacacagtggggccatgtgtgcagtgaacacccccccgggggtctcgttgactcaccaagtttggccagggccaggggatcatttaaacggctggggcgggcaccgcagggggaaacacttctttcttcccaggagaaccccttctctccccaagtgtcacgggagaccttctattctgggggggcagggacgcactacggcacggctcgttgggctttcaacaaggaaatttccccgggaggaccccaatgttgtggccaacaagggtgaaccgtgtttctttgaaccaggttatatattcccttccccggagagagcttatctccggggggacgaagtgctgggtctggtgggcctggcggaacatggctaggcgcaattccagacccgggggtgggggcgggctgccgcgcccaaactaaaaaaagaccaagccccgcagagacccccgaggggcttgtgcccaagtgcccccactaacacgggtgtttaacaaaaatatacaaaggagtcgccgccaaccaccagaggggtgttgtgcccaggtaagcatcgacaataacgccacctggccacacgt

SEQ ID NO: 700909 - DNA, 871 bp, Homo sapiens
  misc_feature (256)..(256): n is a, c, g, or t
agcggaggggacattcagaggcatcagccccgttcctcgctcaccgagctcccagagttcccatctccatcccgcaatcctaacacgaaggaaatcgactgccacggtcctcaaggagccctggggacccagtgctgccgctacatcgaagtatgtggccgcatcaattcccatgaccccggaggattgcccagacgaggccggaacaccagctaggatggcaggaggacaccatccccaaacatgaatgacaacnatctctgttgccatgtccagcgaagcgaatgaccaagccctaggggctgactcagtgcgatgctgggatagtagtgtcctgagttcacctgtattggcctgcatccactgtagaatctcatggcccatgcatggttctgtttaacaccgtgcagatgcaagctgctgtgcctagaagctcagtggagaacgacaggcattctgctccgtctgttgcttatcggattctggatgtttgcatattcacgttaccatcagaatagatgcaaagtctggctaggatgacagcataaatggtccactgcagagcgttgaggttgtaccaggagaaggtgcgacatcacagtggggaaatccaggacctccgaggtagcatgaaccagttcattgccaagctccaggagatggaagccagtgtccgatgagcacaaaatggcccagaaaattcgtgagagatgatacacggaggatgacatcgaaaaagccgagactttgccctgaagtctatagggggcagacattgactttgagcacacgtcagtcacctataaccatgaaaaagggccactcctactggaactgggatccagtgtggaactacgcacagccccaagag

SEQ ID NO: 700910 - DNA, 910 bp, Homo sapiens
ggttgggtggcctgagagcccatcgcgcgttgtggacggccgaccgcccggcggccgttttcagaccgcggggcccacggttgtgggggccgtgccagggggagggcccaagtgggcccgcttcccgcccgggtattgttcggggcgacccagtgtgcccggtgtccacgcgcccacgcggcgtttctcgggcggcctggtctcgagggcgtccccgggccccgtgcgggcgccggggtgcacgtgcgctcccggtcgagtgctccgccagctggtttgttcaagcgccttggtggggggaagacccgccccattgagaaccactgatcaagagactatgctggcttttcggggagtacccttctaacggtggcccatacaggcatcgaggcccagtgacgcatgacaggggccacagtgtgctgtggcccaggcctgcccagaccagaccctcaagggaccagggaattctgaggcctttgaggggcctccccggggcgcccaagacatctggcttttctcctcaagacattttattttttaaagactgtgaaatagtttgtcttttctgttttttaaatgatctatgaaaccccaaaagagactgatcatcccggcctctagcactcatcctcccccaggacccctgtcccaggatggagggtcccaatcctaggacagccattgttcctcacacccctagcatgaacttgtgggatggtggggttggctttcctggcatgatggaccaaggcctggcctcggcccgaggggctgctcccatgggccaggggtagctagcgtgtgcccggcagatcctctggacacgtaacctatgtccagacactacatgatgactcaaggcccaattattaagacattttctaccctgccaaaaaaataaaaataa

SEQ ID NO: 700911 - DNA, 304 bp, Homo sapiens
ctggtttagatcagaggatcccttagacagccgttccccctcacaagcaccttctcatacttcccatgcccggtggcacaaacttatacctcttcccagatggggtgctcttaactgttgatgaggtcttggagcctcccttctgctcccagaggcttttcttgctcatgtctccagccacaatatccttgcaggacggagtcttggccgcagactgagcctgtacctcacccgtctcccaccgactcttggtactggccacagccatgctgggcagctctgtggaggccttgcgggctagctt

SEQ ID NO: 700912 - DNA, 149 bp, Homo sapiens
tagtccgctgtattattgggtctgttaaattgtcattctcagtgtcttaatctgacgcagcatatgcgaggaaaatgtatcatgttactctatactaacattcgttctactatagggtgacagattgctcccattgggtgtgaggactt

SEQ ID NO: 700913 - DNA, 450 bp, Homo sapiens
gtgatcctcccacctcagcctccccaagtgttgggattacaggtgggggccaccccacctggctttcagtatgtttctgtactacaatgtcatgttccaggaagttaaagaaaacaacttcaacatccacattttcagaatatgtgtcaatggcttagaagaaaatgccacagatagtagtacagcctttctcatgaaatgttgcattaccacttcttgatggtgagaatgcagtgtcacgagactctaaagttgaaaatgtgatcttagaatgagttgtgacttcttgatctatgaagtctctaagacgtatccttacctctattatctttgccctatgtctattaactgcatcaggaacgatatatcgataaaaaatctgctatatgtaacgtttaaaaagtctctctacagtactatataaaaacatgtatgaataataaacgtatt

SEQ ID NO: 700914 - DNA, 345 bp, Homo sapiens
  misc_feature (31)..(31): n is a, c, g, or t
  misc_feature (152)..(152): n is a, c, g, or t
  misc_feature (165)..(165): n is a, c, g, or t
  misc_feature (173)..(173): n is a, c, g, or t
  misc_feature (175)..(175): n is a, c, g, or t
  misc_feature (178)..(178): n is a, c, g, or t
  misc_feature (231)..(231): n is a, c, g, or t
  misc_feature (248)..(248): n is a, c, g, or t
  misc_feature (315)..(315): n is a, c, g, or t
  misc_feature (336)..(336): n is a, c, g, or t
tcgtccttgtcacagtagcttgggatgactnccagtccacatggcatcagggagtgacaatccagcaagtcctcgctagtccacacctacgcaccgagcgtcggtgtgcaggcctgtgctggcagagtgtggatgcagggtggcggttaggnacagttcccctgnggactgcntnttnaaaggaatccagttcctccggaataacagcccatgttaacctgggctactggnaagttcacacagtaatntggcatgactcatggaaggatgaggaacgtttgttcacttctttcctttcagcaaggcagagttctngccaggggttagcacctggcnccttttggc

SEQ ID NO: 700915 - DNA, 740 bp, Homo sapiens
gagtgagtggttgtgtggtcgcgtctcggaacaccggtagcgcttgcagcatgggtgaccatctgactgtaatggagcagtatgacacgaatgtcaaagaaggcttgtttcacgtatctcagacgaaagagtgggtgactgggaagcatactacacgaacaaaggaatcgggaagcctgtaagtgagagtcgtctggggcagaaatcccacagaagcagagttacaggacatgagtttagtgaaggtagatgctgactgggtaatggcacaagtgacttccctgaagttctcgtgacgcaatgagtggcaagaaaatctgaagagacacagacagtgatgaagaaattagagaagcattccgtgtgttgataagggatggcgatggctatattcagtgctgttcagaacttcgcctgggtgatgatcgtaaacgttggatgagaagttgaacagatgaagaagtgatgagagtgatcagggaagcagatatagatggtgatggtcaagtgactatggaagagttgtgcaactgatgacggcgcagggaagagcttgtacagggtgtgttaaatttctctgttcaacttgttcattggcttttcgtggtggtacttatctgtaatggtgctcctactgtcagcaattgctgtttagtattagggcttcatcctcctgtttcttccctttctctggtcttggcctaaaaccttttttggaatgggccagtaccggtggtggg

SEQ ID NO: 700916 - DNA, 677 bp, Homo sapiens
  misc_feature (504)..(504): n is a, c, g, or t
  misc_feature (523)..(523): n is a, c, g, or t
  misc_feature (605)..(605): n is a, c, g, or t
  misc_feature (631)..(631): n is a, c, g, or t
  misc_feature (677)..(677): n is a, c, g, or t
tgcaggttttactttttgatttgtttggtctgatccagaactttgaattctttacatcaaatttccataattatttgattacttctttagatagattttggtactgctggtagtgttttggaatacagtagtttgtgacaaaaaaattcagaaagtaacatgtttaattacaagtaagaagtttactttattggtctgctttttaatttagtttttaaaaattacatctttagaaataaatttacttaaaatggtcagttaaataaagcacaaaggattttggtgtgatttcagggcagatacatagatagtaaaggctgaacttttctagaatataatttcaatggaggccgtgatattttttaaaaaattaattaaatatacccctctattcaggccccctgaaagtgtaagagaatggctacttaccttgtgtttcaatacttcccaaaggctcactgtattccatttgggattagatatcttgtctttgaacagtctggngggccttttcctctgatgntctttctttgagaagatctttctttatcatcttggcatgtcctcctcaaactttgattgaaggattcttgttttcaagcagngtagatagtctgcttcatacttctcnctgggcatattctactctcaggtcaattattattattcatttcgcn

SEQ ID NO: 700917 - DNA, 160 bp, Homo sapiens
gcgccgcccattctgtgtgtgcatggcggcgggtcgcctgtgtcggctctcttcgttctctgccctctgtcttccgcgtgccgtcgcgggtcggctgcgcctccctcgttctcgcttggtccgtgggctgctggtggtggcgttgtcgcacccagttgtc

SEQ ID NO: 700918 - DNA, 392 bp, Homo sapiens
  misc_feature (20)..(20): n is a, c, g, or t
agcattgaaaaactcccacntccgtgtgagaccaccacagtggtgcttcattagttgtttgcggattaaccaaacacgtattgagtgcctactgtgtgcccaaaccagtatttgaggtacaggggacactgtggcattcaagacagacagaagtctgccctcctggagttgacattccagagcaggaggcagataggaacaagcacacattgtaccatgttgagtagtgcctgcctgcaaaaataaattcaaaaattacatacacttcggttgggaccggtgctcaggcctgtactcccagcactttgggaggctgaggcgggtggatcacgaggtcaggagatcgagacaatcctggctaacacagtgaaaccccgtctctactaaaaata

SEQ ID NO: 700919 - DNA, 423 bp, Homo sapiens
  misc_feature (71)..(71): n is a, c, g, or t
gcaaaattttactactgggcttatgttccatttcctcctttgattagacctgtcacttggatggactcccntactgaagtttatacaaatggtagtatctggatgcctgggccgacttatgatagctgtcctgcatagcctgaggaggagggcatgttaatgaatgggataattgggtataaataccctccagtttgtttaggaattgctcctggatgtttgccattacaaatacaaagttggatggtctacgtacctcctcataatcgttctcaacctagttatcacgtagtgagtggaatgtcttttcaacccatcaggactgtaaaaacttaaggggatagttattatcagtcaaatataaaagtccaaaattgcaagcctaagggattggcttgccctaaaaggaatccagaatggtca

SEQ ID NO: 700920 - DNA, 896 bp, Homo sapiens
ccccgaacacggaaaacaaaggcgcagtggagggttctgctgtgtatgcaagtgagggtctgtgagtgcaacgtggcgcaaggcattaaggccagtgtgttagtgcagcgggcagtgctcgcagatggtgctggtggttgcttgtgtgagctggccctcgtggctcgggaggtgctgtgtttgcgcaggctgtgctgcccctggcgtacgggactgggactcctgtgattactagtggcgactgagtgcgctcttacctttgcgtcctgatctccaagcaagcacactgaccttcttcaggcaaatacgcacatgttcaattttccagaaagttctgtgagtaaggttaatacctctcgagtcatgccactagatgccgccaaatcccagcaaaggattggatagtaaggtccctggagattctggagataaaagaataccctcaccccctacccctttactgattaagctgaacggtaataatctataggcatcatggaatatacgatcataacctaggaaacaaaatacaatcaagttcatgtaaatagcactagctaggcagggcgactgttgacccaaagatccaaataatatagcgtacatttcataacctttaactcgcattgagagttaaaaaaaaaaaaaaaatgaggaccattatacaaataccacactataactctagagacaaatagaaatggaaacaacacaagaaagaattccaaacggcaaggtgatacgcaaaaagacacagtgaagtgccctgtaaaaattcagtaacacacacaataaggaagcatctcacagcatatattacaacatgatgctcccggcagatgacaaggaacaaaaacctaggacacaatatacagccaaaagtagatgaaccgcgc

SEQ ID NO: 700921 - DNA, 200 bp, Homo sapiens
atttcttacttgtcctatagattttatagatgcctaagctaaattttgttttactcttattggattaaaaattttataacagggagatcacaacttttaccttttttcatgtaattttgtaaaaggaaaatatgatttaaaaactattacaattaagtgctatttatacagtgcttctctagtatacactgaagtaagtt

SEQ ID NO: 700922 - DNA, 110 bp, Homo sapiens
  misc_feature (41)..(41): n is a, c, g, or t
ctccaaaataaacaacaggactgctcagtagtcagagtganttttgggtggggtttgaaagagttccagctttcctatgctaatggtgacataaaatgttaatttcatac

SEQ ID NO: 700923 - DNA, 104 bp, Homo sapiens
cgatggatcactacacactcctctttttttctgggggggagtgtgtgtggggtttgtttatttatgatcgttgtattttttaattcattaaccagatggttagc

SEQ ID NO: 700924 - DNA, 767 bp, Homo sapiens
agcggggaggctggaaagtccgggattgaggggccagcatctaccaaggtgccttcttgttacttcatcccatgatggaaggtggaagggtaaagagaggagaagaagcagtaccgggaatcttacatcagttgactaacctggacctcgacgatggactcagcgtggaaaaatcggtcgcgggccagcggtgagcagtgcgggcagcatgaaactacaagcgccgtgtcccgtcattccaccgccagccacagcagttcccacgactctcgggcattgaaggcagacgactcgaagccaccgggacactgagtggccgagaagacacgtcgtactccagcaggtgccatccatcgcaagctgaaaacctgcatgtcaatgaccagtcatgggctaggtcccgacacactcaggggttggagagtggcaggcaaacagaccgagctcggaaggaaggacttgaccaggacggatggacgattgttaggtttgattgacgcccacggtgatctatggagccagatcgaatcgaacgaagtctctaggacaagtcacgcgcctagactcatgtgtcatcttacattcactatgacggacattgctcagtgttccgcggaacgctgcatatggacgagctcgtggtggtatgattggctgataccgaaccattggagtcttccaaccatcgaagcctcttgcagaaaacagtatgtataacgctatcgatggccaagaagtacgtgatttctacttccacaagacgtata

SEQ ID NO: 700925 - DNA, 200 bp, Homo sapiens
gtatattttgtcctgctctgctgattccctgttccattgtgagcgacacttccttcattagtgagtttaatattatgtgttcgataacttcctaaacgtacctcctaacaagtcccttaatccttggacgtctgtcgatacatccccatctgcatttccttctcttgacaacatccttccctttagttactgagaagcca

SEQ ID NO: 700926 - DNA, 561 bp, Homo sapiens
aagatcatgagttcgtatgcagggtacatatgtatatatagttgttacgtgggtatatagcatgcatgaaaatgaggtttagggtacaaatgatcccatcacccaggtagtgagcatagtaccaataggtagtttttcagcccctacccccctacctatctttcccttctaatagtccgcagtgtctatagttcccatcttgatgtccatgtgttcccaatgcttagctgccacttttaagtgagaacatgtggtatttggttttctgttccttggtcaatttgcttaggataatggcctccagcttcatccatgttgctgcaaaatacttgacttgggttttttatgaatacacagtattccatgatgtatatgtggtaccacattttctttatccaatccaccatggttgggtaccttaggtagattcgatgtctttgctactttgaatagtgctgcgatgaacatatgaatgcatgtgtctttctggtaaaacaatttgttttgctttgtgtatatacccagtaatgggattgctgcattgaaatggtcgccaatccg

SEQ ID NO: 700927 - DNA, 697 bp, Homo sapiens
tgaaatctggacgggtaacggcttttccgagccacagattacgggctgcccagcgcttccttggaaagctgcggcgaaacgttcgactcccagtgttaatgcttgctccgcgacctcagctgcgcaccgttgcaccgtcgggtgagcgaggcatcactagcaggcgctaaatggactaccgtacgctctgcaattcgcccgatttagttcggtgtctgagctgaagctctcgccgtcgggcgggatctgatgaggaagccaaggaatgataaataagccaccgctaactgacgccatcgttgtagcgctcgcaaggctaatagatgattcgcagttgtccgaaaagcgtgagcccacacactacgacctcgacttgctattcgcccaagtcagcattactgcgggggatcaaccggggcctggaggacgtccagtcggaaaagcaaagcgcattcgaggtgcgttgaactgggcactaactaatcaccctaagggcggcgaagcatttatacccgcgttgatttcgacagtgcaggggtacggtggttttcgtcagcaatcaataaattactgcggcgctgaagcgatagcgaatttgatatctgcaattgcagctcaagggtgggagctgtcgatggacggaaatcttaccccaaatgttctagaggcgatgaaagggcggcagcttacacacgct

SEQ ID NO: 700928 - DNA, 1169 bp, Homo sapiens
ctgggccgttggcccgagcggattgcgggctctgtggctgcggggctcctggctgcgtggctgctggtgcctgcgatggctgcggagtcttgggatgctggagcccagtgcctgtgccgcgcggttgccatgaagggcaaggatggagaaggagggcggcgcacggttgggcgctgtgcggcagtgaagcccctgagaaagagccctgagctgcgcaggagctccaatggagctagggctaagtctgtcattgttcagtgggcctgaaagtaccctgtgaagtgcggtgtgtgcctttgcttacggcctgcgctgatcattgcatgcagcacgatgcaagtgcccttggccgagctgtccggcgacgcccattggaatgcttggaacggggacagatctttgtgaaaggggccgcacactatctttcctgggtgtgcaatgtgccaagcttgggaggaattggagacgcttatgcatgagtgcccaatcggccaaaatcttgcaagacgagctataccatggcccttggcccaaacgggaggcaagcagggattgaaaacttcagggggacggaaaattcccccagcgctcatatcgaacatcagcgaaagaacaagaaaggctgccttgtgaaacatggcaatttgacagtgatggcagggctgcaattccagacaagggaagaatgcgaaagcttgcaccttccttaaccttctccagggctcaatttgccggcgaggagccgttgaacgaagggtgagcctgggaaaggaagttgcccaagccgaaaacccacacaacgggcttgaatacgagcggacacggacaggcccaatctggtccgtgggcccccccaggcaagagaccccatgcaatttggacggggccaaaaaagcaacccggtaccacatagggtaaccacatttggtacggtgtacctatttgtggaacgcgaaaggcattaatataattccattccaaggtgtttgggaatttagaagaacacaggaagggaaaatggaacacggccgaaagtataacaatttcccccgcataaaaataacccaatggattgattgggcagaaaggtaactccagcgcctttattatgacagctttgactttgcccgagtgaaagcacccgtgtgtccattttaacagtgaccccc

SEQ ID NO: 700929 - DNA, 404 bp, Homo sapiens
tttatatgagacagagatcacgatctgatagacccagcctgaaagtgcataggcacaaactcggctcactgcaaactatgccacctaggttcatgacatacaccagcatcaaactcccaagtagttgggaatacaggcgcccaccaccacgacaaactaaatttttttggtaattttcgtagagacagggattcactatcttagccagaatggtctcgacatcctgaccttgtgatccgcccgcctcggcctcccaaagtgctgggattataggcatgagcactgccctgggcctaaatattcatattctttacagtacaatatactgctttcaatcacttttaaccatctgcacaattctaagaagtatagagaaggatggttacctgattttataacgtaaa

SEQ ID NO: 700930 - DNA, 132 bp, Homo sapiens
ttagtttcccttccacactgccctgcatgctggttgaatatgctccaccgcgagcgaggctccatgaccaagggcgcccgcgtgctgcgactggggcgtgggccgctctctgcttttcctttctgacccctg

SEQ ID NO: 700931 - DNA, 132 bp, Homo sapiens
cttttgagggggtcatagctcctccttatgacttataaatttatggtgtgcctgactgagaatttggatggcatccctaaaaccataatatccttttagggaattttgttttgccatgtccttagtataatt

SEQ ID NO: 700932 - DNA, 939 bp, Homo sapiens
gccacgaactgaagcactgaggcccggctgcagaactctcccgagaggggaataatccgtgccggccggttccgccatggatgccaggtgcaggtcagctcgacggtcaccgcgcggggagcccaagtcgcttcgtcatggctctagtgcgacgagagagcgcagttgatgtttccagtaaagaacgctggacgttgcgaccgtgatcaattattgtcccgtttggatggctgccgttacggtccatcgtccccgtctcgctgtcaatgtgacttgaggcctgtggtggagaaggacgtgccgtgccggtgggttctgagccgcgagtagtgtctggtgggttgcgtggattgcggaggctgaccttggagcgagcatcttgagacacgacactaatggaaggaatccctccattgttgtggagtcctgtgcacacgtattcgacaatggcacttaatctgggttgccggcggtgaccctgtcagatgatgcatgctggatgtgatatctgttcttagcccgagctaagcagcgtaagcttaactcgtctgacccctagcgtgatattcctgtggtgttgtctagaatcagataatgggaacatttatgatccagaaacggcgatggcatcacggtggcagtgcacaaaatggcctcttgatgctcatatctgttcttcagcaagcctgtcataggaactggatcctacctatgttagttaccttatagaactactaaatgttccagtagttaggccagttcatttcatgtgcattaggcacgtttcctgtttatttaagagtcaattgctttctacttgctctatggaccggatatcaagatattagtacgaactggctcctggtttgaacgcagcaggtccaggtcacttggtatataggaattttgctgtattccattaaatctgttgcacggacc

SEQ ID NO: 700933 - DNA, 162 bp, Homo sapiens
gtcatccggcaagagaagtggcacctgcctgaaatttggaacttggtgagcaacccagatgtgagcagataccaactgtaatcagatatttcctgatgctctttacgtgagcgggtttgcttatcacagtactcaggcaaatccatggtgtaaggtttttta

SEQ ID NO: 700934 - DNA, 426 bp, Homo sapiens
ttacaatccccactgatcacgatcttgtcatggcgcatgcgcacagaaagcactggcttggtgaacggtgaactccagcaccagcttctccttggtagtccttgccctcccgggcctcgtcccagatcagcacttggggtgcctgtgggaggccaggacatcctgagaaatctgcctctgtggtaccagatgtcgccccttctccatcaagggcgtccacgttgtaaatacgcacatctggtctccatagcgcatcacaagcagctcttggtctcggttgagacgcaagctggtcactcctcgaagtggcctgttgagtcattggtgcacgattgtacctcccagctggaataaggctgccaccgccttactcgcctagttcccgtgtctccggagatcgtcgggttctaagggtaccgagctcaa

SEQ ID NO: 700935 - DNA, 206 bp, Homo sapiens
tttccctggtatacccaccccttactaaaaatacacaaatttgccagcgtgtgataggtgggcgccctgtattccacgctactcgcggaggctagaggcgggtggatcatgaggtcaggagatctgagaccatcctggctaacaaggtgaaaacccgtctccactaaaaatatcacaaaaaattaggcgggtggggataccccggg

SEQ ID NO: 700936 - DNA, 615 bp, Homo sapiens
agcggagtcttcgggcgggcggggtctgctgcagcgtggacccggtgagcggggcccgtgtgccgccgtggcctgcaggggcgatgtgagccccagtgtgtatcccagagggatccgaggtgacttctctgcagactgtttgccatgacagcccaccaaggacggggggaataaagtggtgaaccgcttcacctcatgcccctcccacggtcagtctccccgatggtgctgggtgagggcaggctggtcgtgcgtctgtactaccatggggagctgctgcgagctgctctgaacagagacagcgttccagacaagcacccgcagacaagttcaaggtgacaaaatgtggatgatgaggcggcgtggacgctgggctctgggcgtgatggagctgacagcagagatgagcatggtgctgcaccatgcatcggcgtgaggccgtccgctggccttatctctgcttgcggcgctatggctacgactccagctcttctcctttgagagtggccgccgatgtcagacaggccagggaatatttgcatttaagtgttcccgggctgacgaaatcttcaacctccttcaggatctgatgcagtgcaacagcatcaatgtgat

SEQ ID NO: 700937 - DNA, 347 bp, Homo sapiens
gtaaaaaaaaggttttaggcaaggcgccgtggctcacggcccctgaatcaaacactttttagaggtgaggcgggcggatcacccttagtaggagttcgagaccaggctggccaacatggtgaaacctccccgctctattaaaaatacaaaaattagccgagagtggtggcatgcacctgtcatcccagctactcgggaggctgaggcaggagaatcgcttgaacccgggaggcagaggttgcagtgagccgagatcgcgccactgcactccaacctgggtgacagactctgtctccaaaacaaaacaaacaaacaaaaagattttattaaagatattttgttaactc

SEQ ID NO: 700938 - DNA, 363 bp, Homo sapiens
  misc_feature (293)..(293): n is a, c, g, or t
  misc_feature (300)..(300): n is a, c, g, or t
tctcttcgatgacaggctcatttggccaaaaagccgtttagcgcgggcaggccttctagggagaggagggtggctgtaattaagggtgctagtcatgttagcttgtttcacggggcgagatagtagcaacggtcgtgctgctgaagccctggcggagtagtaggaatgcggtagtagttaggataatataaatagttaaattaagaatggttatgttagggctgtacgtgagaactgctattattcatcctatgtgggtaattgaggagtatgctaggattttgcgtagctgngtttggnttaatccacctcaactgcctgctatgatggataagattgagagagtaaggagaaggcttacgt

SEQ ID NO: 700939 - DNA, 360 bp, Homo sapiens
taacagtctcgatgatagcccaccatctacctgcaagtcactccatggcccagttcatcttgtagtagttagccagtccccaagtcaatcatgatgtgcttgttcctgaagaacaaacatgacagtacatggatcgtataactcatacattttgttgaagtcaggcacttctgtaaatatccacaagataaataactgcaaaatttttaaccttctcggcgatgctgtacaggacctcgtccatcttcatgcacgtaggatcccagtcgtggccgacgcggatgacgaccacgcggtcctcctccgagaggatggcctggtccacctgccagccgttgtgcaggtgcggggccttgtacg

SEQ ID NO: 700940 - DNA, 112 bp, Homo sapiens
gtatcgttatggatagatcaccaactgttgtcaaccctccagcccacaactcaaggcactcctcatcatgtctcaccgctatctgagccatctccctttagggaaaatttcc

SEQ ID NO: 700941 - DNA, 102 bp, Homo sapiens
gagggcgctgcaatcccagctacttgtggaggctgaggcacaatgaatctcttgaacccagtgagatggatggttgctgtgggctaatggtcacaccactgc

SEQ ID NO: 700942 - DNA, 476 bp, Homo sapiens
tccccgagtatccgatcgcccgtgaatactaatggcttagtaaccatctgtgtattactcgatttaacactgctgtctcctgtgggggtatagatatgagcaaagtgtttatgagctgcatttgtgcatagcttagatacctgctccttttagatccgggtgatctagaagaacattttcactgtgggtagggttgtttgcatgtgtaatcttacaaagaactaataaaaaggtcaggaccaaacctatctataaggttttgtggacccatctagacttcttcagtgtcttgctttgagtggttaagctacattaactgtgtagaacacttaagtggaaaattaaagtatgagaaagcaaagaaagcaccgaaagaaagaactatagaattcgttgcttcacagttctggaaatccagggtctttaaagttggattggcagaggtttggctgagagggttattcataataaattta

SEQ ID NO: 700943 - DNA, 440 bp, Homo sapiens
  misc_feature (143)..(143): n is a, c, g, or t
  misc_feature (357)..(357): n is a, c, g, or t
  misc_feature (360)..(360): n is a, c, g, or t
ttcggcgggatctgcgggccgtaccgcggcatggccccatacccacggctgaccacctcgaacaggtagccgaccggagcctcccgcagcggcaccgccttgcggtacagggcgaacccgcgggacgcatcggcgtggaagtncggcggcttcacgtacccgcgttccgggatcgtgccgctgccggtcccgatcgggtcgtggcagacggcgcagaagatcgtgtaccgctcctgcccgcggtcgaggtcggcccgggtcagctcgagcgggaatgcgtccacgaacttccccggatcgctcggggcaccccgcggtggcgtggccgtggccttctcgcccgccggggccgggganccnccggctcccgctttcagcccggtcatcagcgggtcgtcgctccgcagccactcgcgtgcgatcgcgccctcgggcggccg

SEQ ID NO: 700944 - DNA, 258 bp, Homo sapiens
tactatgctggagggtgatatgagaggatgcttgatacctggaaggcggatgctgcagtgagccgagatcacaccactgcactgccagcctgggtgagagagtgagaccctgtctcaaacaacaaatttttttcaacgcaaaccacgtaatcagaaaggatttactctcagtcatgataaagggacatcatacaaaagaatctgtagtttctgtcgatacttacatagtaaagagagaaattgcctctctcccttaaa

SEQ ID NO: 700945 - DNA, 105 bp, Homo sapiens
ccagctagcaaagacagaaggtgaacgacatctagaaacattacaccacacacaccgttatcacattttcacatgctcaattgatatttcttagctggtgggaag

SEQ ID NO: 700946 - DNA, 149 bp, Homo sapiens
ggagttcacggctgcagtgagctatgttcttgccactggactttaccctggatgacagagtgagacccggtttcaaaaataaaaacaaagaactactacataatccaacaatttcacttctggctgtatgtccagtgaaattgacataa

SEQ ID NO: 700947 - DNA, 178 bp, Homo sapiens
aaggtagggatagaatcagaatttattgaacatcttgtatgtccgggtttggacactatggtctgcaggccaaatctagcttaccaactatttttgtaacacaagatgttattaggaacactatccataccttattatgtttacttacgtgtttctggactgctcatcacaactacaa

SEQ ID NO: 700948 - DNA, 225 bp, Homo sapiens
ctgctgcccagcatgaagacataccgggcttaattctgtggagtatgtaccgacggccgatggtgcacccctcacagaacaccaacttgccggaggagtacaaggtgccctgacggctaggtcatgaagaagacatgatgtcattaaagactgtgctaccattacatctgtcccggagacgatacatcttggtcggttgtctaccaggaagatgacggagacatg

SEQ ID NO: 700949 - DNA, 207 bp, Homo sapiens
acgcgggatccgtacagcctgggtgtcctcagcggacgtacccacggatgatgctgttacgggcacaggtggtacaggtgtgaatctcagctctgccactttatgtgtacccaccacgaagaccttgggcacagtgactccagtttctctactcagagccttcatctagctcatcctacaaacattgggccaatgctacctccgtat

SEQ ID NO: 700950 - DNA, 1504 bp, Homo sapiens
  misc_feature (605)..(605): n is a, c, g, or t
tggccctaacaaaacttgctttatttgataaaatatgtgcagttgtaaaggggagtagaaacaaggggggcagggcaaaagggtgtgcaggtgttgtggaggtgtgggggcgggggtctcttacattagctgtggaacctgtggcccttggggggtgtggacgttctttatctcaggaacggaggaaacaaaggttcaaaagttctccggaggtgtgggccagctcctttgtgtgttaacagaatctcatttgtgtttttctccagggggtgtgaaagaagagaggaagactctccagaagacacctgtgagagttaggcagtgtggtgggcaagctgtgtctcccagtgtgcacctctctataggggaaacgacccatagaccccccccaagtcagaggccaagcagccagagagaacacctcttgtgtgcgggacacagagtctctgtgtcgctgtgtgtgtgtgacaaaacacgacccacagtgcacacacagtctcaaaggtcagcagactctctcccgcccctatttgaggttctccccatataagcactgctgtgtgaacctgtgtgggcttttctcctatagaagagagtggcgcggncgatgtgacgtctaaaagatatcatctcgaagaaaatctctctctaaacaagtacatttctccccctctctttttgtgcgggctctctcaatctctgatctccccaaagggggggtgtgcacgacaaacgccagggaagagagaagcccctataaacgctgttgtacgagagtctctgtgagaagtctcccaaccaccctctgtgggggctctcgagggttttctctcacacatgtgcaagattttctacaaagataattatgtctctctccgagggctccaacagaaagacacaaacgaaaataagcgcgatgaagggagggggtctaagaaaatatacccaaaatagaaggggtctcaccaggaagaaacgccgaaattttcgtcacaaaagagggctgtgttttgtgggggcccaactgtggcgccaacttttcctgtgggaatgttggggcatctcctattaggcccgccccccaaggggggggaaaagtcgcccgccacacaattattccccccagctttacacgaagaggtttacgaacgcaagcggtataacacattcccatgtggcagaagccgggcgggattacccttcacagaaggtggggccccccgcccccgtaaaaaaaaaacaatgtggtgaccaagggggggcgccgcaagcatgtctgtcttgctgagaagaatacaaggcgggagaccccacaggtggactaatagtggggccggcatgaggggagacccccccctggtggagaaaaacccccccacaccgccgagaagaggaggggcaccaaaacgctttggctgaagcacacactagtgacgaaaacacagccccacagcaaaaaccgcacgagagacaacaacacaaaagagggcgcccgttgaaacaa

SEQ ID NO: 700951 - DNA, 415 bp, Homo sapiens
gaaagcttgcacgtgggaaacgtcgggccggactgcacatgtactgaggttgagtcgtgacggccacaggttccgaattttggcgtgaggaaccgctgatcggccacgggcgccgaacttgctggcctccgaatgtgcctgagcggcggcgaaaaaaccaccttaattgggcggagggttagttttaagagcaaagggcctttactaaaatggcgaggctttccgtcggcgttgttttaaaatgggaagcctcgaccctgtattgaaactaagctgttcgaaggcggcgtgtgtcaattcggattaatgaggggaagggtttgtgtggaaaacgccttgagtttaaattctcagaatcttaaaaccgattccgggacaatgcgtcttagtgcaaatgagcaccttagatcaagaa

SEQ ID NO: 700952 - DNA, 1754 bp, Homo sapiens
  misc_feature (245)..(245): n is a, c, g, or t
  misc_feature (398)..(398): n is a, c, g, or t
  misc_feature (868)..(868): n is a, c, g, or t
gtgttgcaggtgaggcaaagggatcgctacatagtggactacttgcgaggattttacatactccacatacaggaagagactaggcattgcctgtgtgtatgtagcttggaagaattggtggcggcgtcctaagccgaggcatgtgccctaggcgcgtgtgcttcgcacgcatggctaggctacaatgcaagagaacgggtggtctaccatcactagcgcatcacaacgtcgtggtcgttcgtagncttgtggtcgagcacacctcagaggacggacctaacagtgacagatatcggaggtccgagaaatgtagcatcgctgacacatgagcctgattcatgtcccaggagcacaaataccgggtgtgcatatactcatagactacagccacgtgacantgagcgcgagaggatgcggagcggcgtgggtgtgcccctgacgacatccaattccgggtgtttccatagttcgcatttgtcggggagagctctgagaggacgggggctgagggctacgttgcacttgtgtaccccttgggtggctttatggacttggaaacctctgcgcgcggctttcgggtggacccatatatgctccggtcagtgtggggaactttgatacccccagactgtcacagctgagtttggttgcgtccctaagcgcaccgtttgcgttagacgttcgcgaagatgtggcacgcgccctgggttggctagataagagtgcccggtgagtccaacgtgaacacgttcgtaaggcgtgtagggcatcgacgcttttgcgaccctcggtggcttcggatttcggcaccttttcgagcacgcaagtagaacgtcagaggagtaactctatgtccagcaagtttccncccccattctaggggcgataagtcccatgaatcggcgagcggattggtgaaacaagatactttttccaaagatggtttccggtggattcccgaggaagacccaatcttatagttctttgaggggcattgccctaaggtatgtcttaagggcctgttcctatatcaaaatttcaaggccctttgatttccttaggtgcattgggtttacccccgattatttcaggggccccctggagcaccgtttgataggcgtgttgcggagttccgttaagaaagggaagttggcgtgttgaatgagaccggaggctgtggattgtctgtgtgatgtgaggacggatgtccgaataggagccaatatgggcgaaatgttgggtgtcgccagtaactttatcccctggggcgccacacgtctatgtggtacgggtccccccaagtttgtagtggaagccttcggcatgggtcgtgaaacctcttgtgggaagatatccctggaactgtggtcaattgtgcgcaattgtttgtcccatggtctcatcacgcagggtggtttaaacccgtagatagtatgcacgggtggggtccccctacaacaacagtaggtggggaactacatggttttcacaaacggttgtgatatcatggaagatggcggcatccccaggtggagggggaactatgatattaacccaggcgtgtggtgtgatcagggacgtccaccatgtcaccaggcgacaagtttatagatcaatataaaggtggtaggtggtataagaccctcaatggtgaccttatacaaccatggctgtggacgatcaagtaatcgagagattacacatactacgacattctgttgtatagacaccgagtgagctactacaaccagact

SEQ ID NO: 700953 - DNA, 888 bp, Homo sapiens
  misc_feature (33)..(33): n is a, c, g, or t
  misc_feature (176)..(176): n is a, c, g, or t
  misc_feature (267)..(267): n is a, c, g, or t
  misc_feature (285)..(285): n is a, c, g, or t
  misc_feature (338)..(338): n is a, c, g, or t
  misc_feature (400)..(400): n is a, c, g, or t
  misc_feature (424)..(424): n is a, c, g, or t
  misc_feature (445)..(445): n is a, c, g, or t
  misc_feature (463)..(463): n is a, c, g, or t
  misc_feature (468)..(468): n is a, c, g, or t
  misc_feature (683)..(683): n is a, c, g, or t
  misc_feature (685)..(685): n is a, c, g, or t
  misc_feature (728)..(728): n is a, c, g, or t
  misc_feature (881)..(881): n is a, c, g, or t
gcgcgggggggcggggggggcggggggccgccncgccccgacgggacccccctgaagccaaggcagggggagggcaggcaggaggctgtcctggatcccaggcaaagccccgggccccttggagcagcaccaggggtcccgacacccccaccgacagggtcgaacgtgcacaggcngggaccacgccggagtccattgagcccccgtgggggagggcagtcccagggaccaggaagggattcccgtccagtgtcaggttatccaccncgggcagcccgtcaggcngcggcgccctgggcaggctgtggcagcggagagcgagcactctgagcttggcnggcagtcctttaggcacctgtgccagcccagcgaacgacagagtgagggagtgcagggcgcnggaccacatgcatctcggagcgcnagggtttacgggggcgcgcanaggtggtggctgaggtcnaggcngtggggctgcacacctgccgccgcgcagtgcgcgcacacgcctgtgggcgtctccattcctgtgttgcgcacgctagattctggatggccgggaacttgtggggacagagagccgccatcagtccgcgttcgcccagtccaggattgtcagacaggtctaggctggtaagggccgggaaggcgcgaacctgttcgcaggaaaaggcaggcgagtntncttgggcaatgctcagtaccttgaggcctggcttgagccactnctgcagctcggcgagccaagaacgccctgtcgcccacgacacgttgcgtaggcgcaaccgggaaagtgcaagttctgtggcttccagaggcagcggaggcatggtgccggttatctttaggtcctcgagcgtgagttccttgaggcgggagtncgctagc

SEQ ID NO: 700954 - DNA, 1434 bp, Homo sapiens
cctggacggtctgcgaaaggccgggacccggttcccgcgggccacagtggggggtgtgcgaacccgagagaactagggttgccacattcgggaagaatcagcatctatgtgtggtcacgctgagctattgggcagcctaggagaccgtggcgcatcgaggattgtttgcaggaacgacgagctggctgtttgatgcatgtctcggcaagggcatggaatcatacagacgctcaagaagaatagcgttatatttgcaccgaagtagagatagttcatggtacaccacagggagccacgtacgactgctcgatcacgtattggaatttcgtcgaaaatacctacacgtgggcactcgaacatcgtgcgggtggtagcaacacactggcttggccctcgtagtggtactcacgacgggacatatggcctcgacgccacgaatcccacagcagcaatcactatcttctgcgcgaaccctcttctctccttacgcgaagacaggccaacccatttgggcgggtacttccacattcccattttccactccaattttgctttgcaaggatttctctatctctcgcagagcttctcttctactactatctctcctctcatcacctcatctggcgaccacgaccaacctagtctccctgtgccgccgcgcctttctagtgcacccccgacggcgccgccgcgcgcagagcgcgacgttgacggctgccgcaaccacacaataatccagcacaccgcagcgcctcgtcatatagattgtgccacatcttacccctctactaatcgctccccccccggcgacggtggctctcttatcaagcgtgactacaatcattctccggcctccacacaacccgctactgcggcatctactgcgcgcgtctgcggcgacaacaccactacacacgacggcgcttcgtcaccgcgagcagcgccgccaccgccgcacccgcgtgggtgcctgttgtaaaacaccaccgtccttaatctttcgtatcactcgtccgctctcagctggatccaaacccgctcggggcgcatatccttcgctaactctccaatcatgctctcggagcgcgccacctatgcagtcgtgtggtgggctcctcatcatgttgacgtcgctcttccgctcgctggtgccggtccactcaccaaaacgatggactggatgtcctcccactatctcgcccgtcggagcccactcaactcgaccgtcgtctaattccctagcaagaaggagtggggaccacaccgcacagcgcaccacgcaactttgtatgtggcgatacaaccgcatcttacagtgtggcccagcactcgttgtggcccacttcttccgatgtttcgccctcccacaccatacacgagcagaaggtgtcgtctcacatttcgccaccctgtattctgcaacactcgtcgaat

SEQ ID NO: 700955 - DNA, 149 bp, Homo sapiens
  misc_feature (95)..(95): n is a, c, g, or t
  misc_feature (97)..(97): n is a, c, g, or t
ctaaactcgtaccgctccacccaaaagatatcagctcaatgttagtgcagtgagaatctgatagtaatagggcatatatgatttttgctctgagntntgccatgtctgtggtgtaagatcagtctgtagtgtggaggaacaacagtgtt

SEQ ID NO: 700956 - DNA, 435 bp, Homo sapiens
aacaggtggtgcgtgtatgtgctcgtccccgctaccctggcgatcctgcccactgggaaaggttatttcagatctctcataacgtagcgagatgagttagaggagggtaatacgtgacagtgcctgtgtgcatgcatcatgagctgggaaatcagtttctcatactccttctccactcctgggcatatcatgcacagccaggccaaccgcctccaaggctcccatgttgcacagttgattgacaccggtaagctcatggcttctgcccctagctaggacttctctgtccgtcactctgctttgactagatggagaatcctcgtgttggctgaagggccgattctggattcctggccatccagagagccccactctgctccccccggctgctgtgctgaggaggggctgcgggtgtccgggctggccccaacctag

SEQ ID NO: 700957 - DNA, 529 bp, Homo sapiens
  misc_feature (344)..(344): n is a, c, g, or t
aaccatctatattcatgagctttcaatttcagggcaggccatagttttcttatctgagaagcaaatccctgtggaggctataccccttttttttttgagattaatggactcttggagcccgcccccgtggttattgatccatttgtgtaaaccaaagccccgtggttgcccattaaaagggtccttgttccttttcccccaaatgaagggtgaacgggatgtttttggaagcaaacccagcccagggattccttttgggttttagttttaaaagcccccctttttttaaaacccccggttcccggccccatggtggggaagcccaaattgtttgggtttttttngagcaacttttcccttccaaaattggccggggggcaaaatgccaatttatatgtttttttgaaaaaattcctttagctgccctaccaggccaatgcttgttaatggttaatataggcagggggaatactcctttgtaacttttaaagttttaaacttttcaataaaattgggtggggcttttggg

SEQ ID NO: 700958 - DNA, 301 bp, Homo sapiens
tggtgtaacatactgtcgacaggttgcagtaagctgagagttgcacatgcaatccagcctgggtgacagagtgagactctgcctcaaaaaaaaaaagaaggggcaggtatggtggtcacggcttgtaatcccagcactttggaaggctgaggtaggcggatcgcaaggtcaggagatcaagaccatcctggctaacacagtgaaaccctgtctctactaaaaatacaaaaaattagctgggtgtggtggcaggcacgggtagtcccagctacttgggagactgaggcaggggaatggcgtg

SEQ ID NO: 700959 - DNA, 453 bp, Homo sapiens
cacagtgtctcaggcctgtaatcccaccattttgggaggctgatgagggaagatcgcttgggcccaggagttcatagaccagcctgggcaacatagtgagatccccatctctaaagaaaactaaacaaaacaaaacatgttctttttttttcttttttcttttttttagacaggctgtcactctgtcacccaggcgggagtacggaggcgcgatctcagaggtcacatgcaacctccagcctgggtgacagagtgacagcctgtcgaaaaaaaaaaaaaaaaaaaaaaaaaaaaagacgggaggcgcgccgggccggcggaagccacgcaggaacacaaacacgaggggcgcagaggggaccaaaaagcggaaaggaagaacaaggggaaagaacggagacacaaaagaaaaacgaggcaaggaaaaaaagagagaaaaaacacacaaaaaaa

SEQ ID NO: 700960 - DNA, 805 bp, Homo sapiens
ccttctaaaaacttgttgacaaatccgaatccaaggtttcccaaatcgcccgcacatccaaagcgctaccgaacgctacggggaatccggtatctaactctcccaagctccttactactaacttgctacccagtcgatccctaaagggcacctacctttaactctaccgacgctaataaaggcctacggagggtttagaccctaggcatctaccttatcctattatcctatactccgaaaggagcgaacacagtagtaagctccccattcctaagactataacgatccggaacgatatccgtcgaaagacgactaaagctcaaaagccaacccggcagctcctgttactgcggctcaaccgggggcgacgccatactccgaaaaatcgcctttaataacgtccccgctatcctactcgtgagcatcgactacttcctattcttggtcttaatattttctgttgtggaggaggagttctaaagctgtaaccacgttaccctaatatcgaggacgagcgacagatccgagtttcgagagttatcgtcagcttcctcctcgaatcggcggagctttaggggtagactaaagtactatccctaactagctaccgtcttccatctacgtagtagccgaggtcctaaggtaatataaaagaagcaccgtccgctgcctatccttcgagaacgcgtcgttcttcctattaataataatcgactttttatcctatatatgtcctacctatcggcctctcgaaaagcttctaaatggtagcctcctcgcccttatttgtattatgggtaaaacg

SEQ ID NO: 700961 - DNA, 755 bp, Homo sapiens
  misc_feature (1)..(1): n is a, c, g, or t
  misc_feature (153)..(153): n is a, c, g, or t
  misc_feature (156)..(156): n is a, c, g, or t
  misc_feature (203)..(203): n is a, c, g, or t
  misc_feature (277)..(277): n is a, c, g, or t
  misc_feature (283)..(283): n is a, c, g, or t
  misc_feature (298)..(298): n is a, c, g, or t
  misc_feature (300)..(301): n is a, c, g, or t
  misc_feature (316)..(316): n is a, c, g, or t
  misc_feature (363)..(363): n is a, c, g, or t
  misc_feature (372)..(372): n is a, c, g, or t
  misc_feature (539)..(539): n is a, c, g, or t
  misc_feature (556)..(556): n is a, c, g, or t
  misc_feature (593)..(593): n is a, c, g, or t
  misc_feature (628)..(628): n is a, c, g, or t
  misc_feature (636)..(636): n is a, c, g, or t
  misc_feature (661)..(661): n is a, c, g, or t
  misc_feature (665)..(665): n is a, c, g, or t
  misc_feature (680)..(680): n is a, c, g, or t
  misc_feature (726)..(726): n is a, c, g, or t
naacacaccacaccactgcctgcctcggcaatgacattaatgttcttgggagcccagaaactgaaataaatttccagcaaaaaccaaagcagacccactgcctggataaattcagaccaaacgttttccctaattgttccgggaacttttgcngcntgaagaatgcgtgaatggctatattgttcaccagaaagacagaggtnaatccccagagggaaatttcagatttttcttttggtttgctttttggtttttcatttttgtagaaatggggggngtggcnatgttgcccaggttngnnttgaactcctgactncaagcaatcccccagcctcagccttctaaagccctgggtttacaggnatgagtggnctaacccagcccccagaatttctactttaaacagccacactaagaactggaaaactgtgcgtggggctctgagagcaggggtggaaagcctgtttgtgtgtgagagtttaacagtttataagaggaagtgccgtgaaggcacagatgggcacacccatccctgcctnggcggattccttctganccttcccacagtttgtttttctccatccttccatccncacctctttctcttgaaaactttctcttcccaaancacaatanagcggactttttcattttccatggncccngaacttagttttgtnatctctttttggttaaaaagagagagaaagaaagagagaaaaaaanttcccacttgtgctgcgccatctccaaaa

SEQ ID NO: 700962 - DNA, 476 bp, Homo sapiens
tgagtggtaggaagatatgcagagaaggaggaagcctctatacatctacaggtggtgaatagtaaggatggtgcagccgctatggaaatggattgcagttcctcaataaactaaacacagaatgaccatgtgactcagcaattccacttctaggcatatatcttaaagaattgaacaaggtgttcaaacaaaagcttgtacataaatattcactgcagcactatttaaaacagctaaaagatggaaataacacaaatgtttaccatgatatgaataaacaaaatgtggttgatccatacaaggaaatagtcgaccataaaaaggaatgaagtactaatacatgctacaacatggatataccaagaaaacacactgtatcagctgggtttggtggctcacgcctgtaatcccagcactttgggaggccaaggtgggtggatcacttgaggtcaggagttcgagaccagcctggccaa

SEQ ID NO: 700963 - DNA, 328 bp, Homo sapiens
tggaagggcaatacaccctttaaagaacattacagcttaaagggaagggtaatacacaaaacatttccacaaacgcagtttccactctctttgcctacagggctgcccaaacggcaaaccttttaatggacatcatgttaaaataaaaggacttggcctgctttccccagggaaaccccctattccactgtaaacagttttcctcacaaattttttgaaaaaacccagggactcccctttttggaagccaaaacctgtgcattccttggtgacctccggtgaaagaacttggcccgacaatggggacaaagggccccgggactttgct

SEQ ID NO: 700964 - DNA, 117 bp, Homo sapiens
ggaacgcgcccgtacttgtgggatgaagactcgatgcctgtgcccatgatcaatccccctgcagagacaggcgcgttagcccagccgggctggagaagggcgcaaccaccacgacga

SEQ ID NO: 700965 - DNA, 481 bp, Homo sapiens
  misc_feature (11)..(11): n is a, c, g, or t
acctgacgaanctttggcgtcctccgtgcccgcgtgtaggatttggctagtctctctcaagtgaagtaccctctgctctgtggctgctgggaggctcagccctccattttactgctgttgtacataatctgtcgttcttattgctaatctcctctaagtcctgcttgttattccggtgagactcccagcctttcttcactctgcccttcgtgagagcagtattgtaatgggtcacaggccagccagcagacagtgtctgacaagacaaagtctggtatttttaaactgtccgtttattttttttttattgccactattctatggatattgaatatctcaacttcttaattttataagaggttttcttttagaagctatgggagtgtgggctgtcatcctacttttattgaagttttattgaaacttagactaaagtgaggctggtggcaactgcattcacaaaaggtgatgtgaaagaagg

SEQ ID NO: 700966 - DNA, 121 bp, Homo sapiens
ccgctggccaatggactaattagctacccctttctcacagagtgaacgttgtggttggaggaatgaggcatctgtgtgtggagaagtccaccctaagagccacagatgtgtgcctgggggt

SEQ ID NO: 700967 - DNA, 1060 bp, Homo sapiens
  misc_feature (1)..(1): n is a, c, g, or t
  misc_feature (100)..(100): n is a, c, g, or t
  misc_feature (329)..(329): n is a, c, g, or t
  misc_feature (340)..(340): n is a, c, g, or t
  misc_feature (509)..(509): n is a, c, g, or t
  misc_feature (603)..(603): n is a, c, g, or t
  misc_feature (1028)..(1030): n is a, c, g, or t
  misc_feature (1033)..(1033): n is a, c, g, or t
  misc_feature (1038)..(1038): n is a, c, g, or t
ngtatgcaattcgcaagaaatcgcagggaattgttgataataaggaatatgcggttaatgaagttgtggcaggaataaaagaataattcaatgtgatgtnggcactcagctgctctacaaatttgagaggccccagtatgctgaaatcctcttggctcaccctgatgctccaatgtcccaggtttatggagcaccacacctactgagattatttgtaagaattggagcaatgttggcctatacgccccttgatgagaaaagccttgcattattgttgggctatttgcatgatttcctaaaatatctggcaaagaattctgcatctctcnttaccgccagngattacaaagtggcttctgctgagtaccaccgcaaagccctgtgagcgtctacagacagctcaccatttttgtcctgtatcgtgtaaacagctttttgttcttagtctttttcttgtaaaattgatgttctttaaaatcgttaatgtataacagggcttatgtttcagnttgttttccgttctgttttaaacagaaaataaaaggagtgtaagctccttttctcatttcaaagttgctaccagtgtatgcagtaattagaacnaagaagaaacattcagtagaacattttattgcctagttgacaacattgcttgaatgctggtggttcctatccctttgacactacacaattttctaatatgtgttaatgctatgtgaccaaaacgccctgattcctagtgcccaaaggttcaacttaatgtatatacctgtaaacccatgcatttgtgctttttttttttttttatggtgcttgaagtaaaacagcccatcctctgcaagtccatctatgttgttcttaggcattctatctttgctcaaattgttgaaggatggtgatttgtttcatggtttttgtatttgagtctaatgcacgttctaacatgatagaggcaatgcattattgtgtagccacggttttctggaaaagttgatattttaggaattgtatttcagatcttaaataannnttntttcnaaatttccaagaaaaaaaaaaa

SEQ ID NO: 700968 - DNA, 1119 bp, Homo sapiens
  misc_feature (1)..(1): n is a, c, g, or t
  misc_feature (100)..(100): n is a, c, g, or t
  misc_feature (312)..(312): n is a, c, g, or t
  misc_feature (332)..(332): n is a, c, g, or t
  misc_feature (347)..(347): n is a, c, g, or t
  misc_feature (396)..(396): n is a, c, g, or t
  misc_feature (402)..(402): n is a, c, g, or t
  misc_feature (412)..(412): n is a, c, g, or t
  misc_feature (417)..(418): n is a, c, g, or t
  misc_feature (421)..(421): n is a, c, g, or t
  misc_feature (451)..(451): n is a, c, g, or t
  misc_feature (459)..(459): n is a, c, g, or t
  misc_feature (463)..(463): n is a, c, g, or t
  misc_feature (467)..(467): n is a, c, g, or t
  misc_feature (483)..(483): n is a, c, g, or t
  misc_feature (498)..(498): n is a, c, g, or t
  misc_feature (500)..(500): n is a, c, g, or t
  misc_feature (504)..(504): n is a, c, g, or t
  misc_feature (520)..(520): n is a, c, g, or t
  misc_feature (523)..(523): n is a, c, g, or t
  misc_feature (525)..(525): n is a, c, g, or t
  misc_feature (546)..(546): n is a, c, g, or t
  misc_feature (553)..(553): n is a, c, g, or t
  misc_feature (555)..(555): n is a, c, g, or t
  misc_feature (564)..(564): n is a, c, g, or t
  misc_feature (570)..(570): n is a, c, g, or t
  misc_feature (574)..(574): n is a, c, g, or t
  misc_feature (578)..(578): n is a, c, g, or t
  misc_feature (584)..(584): n is a, c, g, or t
  misc_feature (591)..(591): n is a, c, g, or t
  misc_feature (593)..(593): n is a, c, g, or t
  misc_feature (596)..(598): n is a, c, g, or t
  misc_feature (616)..(619): n is a, c, g, or t
  misc_feature (626)..(626): n is a, c, g, or t
  misc_feature (634)..(634): n is a, c, g, or t
  misc_feature (642)..(642): n is a, c, g, or t
  misc_feature (646)..(647): n is a, c, g, or t
  misc_feature (663)..(663): n is a, c, g, or t
  misc_feature (669)..(670): n is a, c, g, or t
  misc_feature (674)..(675): n is a, c, g, or t
  misc_feature (1087)..(1089): n is a, c, g, or t
  misc_feature (1092)..(1092): n is a, c, g, or t
  misc_feature (1097)..(1097): n is a, c, g, or t
ngtatgcaattcgcaagaaatcgcagggaattgttgataataaggaatatgcggttaatgaagttgtggcaggaataaaagaataattcaatgtgatgtnggcactcagctgctctacaaatttgagaggccccagtatgctgaaatcctcttggctcaccctgatgctccaatgtcccaggtttatggagcaccacacctactgagattatttgtaagaattggagcaatgttggcctatacgccccttgatgagaaaagccttgcattattgttgggctatttgcatgattttcccttaaaaattatctnggcgaaaagaaattcttgcnatcttcttcttttanctgcccagtggatttacaaaaggtgggctttcttgcttgaagtcacccncccgcnaaaagcgccntgtgnngcngtcttacaagaacgagcctccccccatttnttgtcccntgtnatcntgtaaaaccacttttncgctcctctcgcccntncccngctcacacacaccgcngtncnttaaaactcgttaatgtctcnccgggcntntgttcccgnttgttncccncccngttttnccccgcncntcnnnggggctgctcacgccccnnnnccccttnccaagttnccccccgngtcnnccgtaattcgcccccncgccgnncccnnccgtagaacattttattgcctagttgacaacattgcttgaatgctggtggttcctatccctttgacactacacaattttctaatatgtgttaatgctatgtgaccaaaacgccctgattcctagtgcccaaaggttcaacttaatgtatatacctgtaaacccatgcatttgtgctttttttttttttttatggtgcttgaagtaaaacagcccatcctctgcaagtccatctatgttgttcttaggcattctatctttgctcaaattgttgaaggatggtgatttgtttcatggtttttgtatttgagtctaatgcacgttctaacatgatagaggcaatgcattattgtgtagccacggttttctggaaaagttgatattttaggaattgtatttcagatcttaaataannnttntttcnaaatttccaagaaaaaaaaaaa

SEQ ID NO: 700969 - DNA, 274 bp, Homo sapiens
ataaagtcggagcaacgcgatttcgtcgcttagggcgccaggtcaacagggcatgcttttaactcatgttgaagatgtatatagtatttatcaatgagtcccttcattgatctcaaatacatagtttatatattccaatataattccacccatggcaaattccatggcaccgtctaggatgagaacggtaaacttgtcatcaatggaaatcgcatcaccatcttccaggagcgagatccctccataatcacgtggggcgatgcttgcgctgact

SEQ ID NO: 700970 - DNA, 157 bp, Homo sapiens
  misc_feature (46)..(46): n is a, c, g, or t
ctcagggtaatcgccccttccttcaatgcaggatggagcactgagnaagcaagatgttggctaccagaaatggagtttcaaaaatggggttgggggctctattggacaataaaaacatataatgctatctgccaaattaagaaaaagagagaaagac

SEQ ID NO: 700971 - DNA, 301 bp, Homo sapiens
ttagattcatatctggtctgtcatgactgctcagaaaacaaaataaatgaagtgctctacgaagatgggcattatctactctaagcagacacttctctatgcacaatcatttcacctatttcatatttaggataaccactgccttattttatttttaaatcaatttgaatggctacaaatgctattccttatatttaatgcaaaattctgactgccctgtgtgctattctcttctactaatatcaccttacagaatgacaaagagaaaaatttcactccctttacaccttttttttttttt

SEQ ID NO: 700972 - DNA, 357 bp, Homo sapiens
agtctgagatttcaggagactccaactacagaggtttagagataaattagcactaggtggctcatcacgcctgtaatcccagcactttgggaggccgaggcgggcggatcatgaggtcaggagatcgagcccaacatggtgaaaccccgtctctactaaaaatacaaaaaaaattagccgggcgtggtggcgggcacctgtagtcccagctacttgggaggctgaggcaggagaatggcgtgaacccgggaggcagagcttgcagtgagccgagatcggccactgcactccagcctgggcgacagagcaagactctgcctcaaaacaacaacaacaacaacaacaacaaaaaaaaaa

SEQ ID NO: 700973 - DNA, 654 bp, Homo sapiens
cccttgccaactctgcctcttcccccgtctgactggtggtatcagtttatgcgttgccctgcaggaagaccctcttgttcctgtgtggtgggaaggtatctggaatctcagtttgccctctctggagtttgagtgagacatagtgcttttggatggacaaggctttgcaggagtggttcatggatgtgagtgtggtgggatgatttctgacggtgctgtgtgcggtgaatggagcaaatcagaaccaccccttggacgttgatctcaatgcttggctccagaactgtgctttttgaagtgttggagccttctgacatgcagactgttggagcatgctgtgtcatgtggatgtgccattcgtggctcagacacagtcaaccgcaggcccgagactcgagacttggtgtgaatgcaagacatgggtgcttggacatgtgccatgtgatgagcctgtcggacagtgatcctgagatgtgggagttgctgcagagcggagaaggacagtgcaagtgtctgtggcctggagctcatttgcctcagagatactatgggggagcacgaggtgtgtggatgaaatttgagctgctgtgccagcgccgggccttggaagcctttggaccttggatccatgcacagtggggagtcaatgtccag

SEQ ID NO: 700974 - DNA, 591 bp, Homo sapiens
gacgctctctctggtggggagtgccctgtctgggctgggttaactccaaaaagcacctcacctgtgcaggccagggcgccttgggttctgcgcccccaccgctggggacccggtcctgtggatgggaggaggccgtgtatttatggaaacacttaatccctcaccagccccaaggaggctgaaagctcaccacctaatctcgtctccctggaagcgccttcgcgggccggtggggtgcaccccagacccacgtagagtgtatttccccagcccaaggtgcaggtcacctctggagacttgaaatgggagcgtgccgtcagtggacactgaagaagagcgcactgatagttcatgcttacggagcactcctcatgcaccagaccctgcgttttctgttttaatcccctgaccaactctccaaccaaatactgtcagccccattttaaagatgaggaaacagggccaggcacagtggctcacgcctgtggctgcaatactttgggatgccaaagcaggaggctgaggcaggagaatcacttgaacctgggagcggaggtgcagtgagacgaggatggtgccctgcatccagcc

SEQ ID NO: 700975 - DNA, 682 bp, Homo sapiens
  misc_feature (189)..(189): n is a, c, g, or t
ttgggaaaccgtttagcccggttctttttgtgttgaaggccccttccccccaggttaaaatgggctgggttttcgaggctttttttttagcctttgggggagaccctatcccattccctggggaaaaccccagcccttttgtccccagggggggtgttcctctttttttcaggcaggggcccccccccnccgggggggttttcctttccctggagaaaaaaagttcccccggggggggttttcccccgttttccccccccccccccaggggttggggtttgggggggggcccccccccaattttttttgggggggttttcctttttttaaaaagggtggggtttttttttccccccccctcccccctttggggttttttggggggggtgaaaaattccccccggggggctccaaaaaaaaaccccttccccccccccaattgggggccccccccttcccttttgggggggggggggttttttgggggggggtttaaaaccccccccccccctttttttgcgcggggaaaaccccttttgggcccgcccagggggtttttcccccgtttttttaacccttttttgggggttttcccccccccccgggggccggggtttttttggggaaactgggttttatccctttttcccccccggttttttaagggggggtggggccttta

SEQ ID NO: 700976 - DNA, 360 bp, Homo sapiens
tgagatggtgcactgtattctagcctagggagagagccagacgcgtttacaaaaaaaagaagcagcagcacgtctggatgtgtctccttactaggctcattccaagcctggggccacctgccttcactccccatgaagcctcgagtcccctcccactcatgctagcccttagggtctatggtttgggataaccaagggcttcactctagattcatagcctggctccaggttcacaacctgacactgccactttcaagctgtgtaactctgggcacgctgtttaacacctctgagcctcagcttgctcaaccactgtgaaggtgaacagtttatgggaaagtgccaccctctgcagcagtc

SEQ ID NO: 700977 - DNA, 406 bp, Homo sapiens
cacgaggcctcgtgccgtccatgaatttccgtagccatctcgcatccgttacgaagcgcgatcgcgccctcgtgctcacactcgcagccgccgagctgctggtcagaagtggcgaacgcgtgggccttctgggcctcacacagccgacttcgagccggcgcgccgcgacccgcatcgcggaagccatcgcctcgaattcggacgcaccgcaactcgcctccggcaaaccgtcgaacgcgcgcgtgagccgcttctcggggctcattctcgcgagcgatttccttgatccaatcgagaccatccgcgaaagcgtcgaggtactggccgcgaacggcgcgacgggtcacatgatccaggtgctcgatcccgccgaggagaccctgccttacgaaggacgcaccgagtt

SEQ ID NO: 700978 - DNA, 415 bp, Homo sapiens
ctacgacatcttcagctcttgggacattggccttctcaacaaacatggtcagaaacatggtcaaatttatggtccctgggccttcatccatcatgagcatcaaggtatgccctagtggcattctcccatatataagcatgcatatcacgcaaatgttccatgtcgataaatccatctctgttcgcatcagtcatgttgaaggcctatatgaactccggaacctgtgtctggtcaaacatggctatcacattggatgttgcccattcagaacgcatgatggaggtcttgatctacgcccttatgctcgacatggaggttgtttaattcccacgccaaacaacagaatcaaggtcgccctgcgcgaggtcacaaaccacagcaaagagcgttagactgtgcgagcacagtggcggcg

SEQ ID NO: 700979 - DNA, 439 bp, Homo sapiens
attcggtgagaagatacactcgagatctagattctattgactacgctctcttcaagctactgataacggtagtaatagatacacactaaaactaattcaagatttccactgtcttggcgatatagctgaaggtttcattgatgattacataaaactcttaaaacaatgctatgaagcaaacactgtaactgcaattttcagcatgaggaatcagaggctcagagaagttaagaatcttgtgcaagacatttataactgttaagtcttacattacaaaagaagaaacatctcaaatcaacaacctaatttgcaacttcatggtacaggagaaaaacaaactaaacccaaatatattgaatgaaggaagtaataaggattagagtggatattactgaaatggagaatggaccaacaatagaggaaatcaatgaaaccaaaa

SEQ ID NO: 700980 - DNA, 174 bp, Homo sapiens
gaagaatgcatgagactctggtccgcaagtgctcagatgtcatcctgcctgactgtggagccattaagaagcacgagtccagcaagtctgatgttactgtgaggtgtgtgaatcctgggtgaaggaggtgaccaagctgattgacaacaacaagactgagaaagaaatactcga

SEQ ID NO: 700981 - DNA, 350 bp, Homo sapiens
gtcgacctctcctctatacacagtatatatgcttaacacacagtttctagtcatgtgtgacgtggcttgtcaagagaaccaatgaattacatttgggttgtgcacgtaaagcaaggtgattgcagagctgggtgcttagttcccccagtgttgggctgctgatagttggactgccgatgttagatagtgaaatgtagtgatgtcaggtggaatgggtttaatgtttctctgttgccacaatagtaaatatgtatgacgtggtgttatgcaggacttgtttgtgaatcattttaacataatattcattcacataatactgtcctttttatgttttctgggttccttctatg

SEQ ID NO: 700982 - DNA, 803 bp, Homo sapiens
  misc_feature (14)..(14): n is a, c, g, or t
  misc_feature (83)..(83): n is a, c, g, or t
  misc_feature (86)..(86): n is a, c, g, or t
  misc_feature (132)..(132): n is a, c, g, or t
  misc_feature (147)..(147): n is a, c, g, or t
  misc_feature (150)..(150): n is a, c, g, or t
  misc_feature (159)..(159): n is a, c, g, or t
  misc_feature (163)..(164): n is a, c, g, or t
  misc_feature (170)..(171): n is a, c, g, or t
  misc_feature (173)..(173): n is a, c, g, or t
  misc_feature (176)..(176): n is a, c, g, or t
  misc_feature (180)..(180): n is a, c, g, or t
  misc_feature (189)..(189): n is a, c, g, or t
  misc_feature (196)..(197): n is a, c, g, or t
  misc_feature (199)..(199): n is a, c, g, or t
  misc_feature (202)..(202): n is a, c, g, or t
  misc_feature (208)..(209): n is a, c, g, or t
  misc_feature (215)..(215): n is a, c, g, or t
  misc_feature (259)..(259): n is a, c, g, or t
  misc_feature (261)..(261): n is a, c, g, or t
  misc_feature (274)..(274): n is a, c, g, or t
  misc_feature (286)..(286): n is a, c, g, or t
  misc_feature (296)..(296): n is a, c, g, or t
  misc_feature (312)..(312): n is a, c, g, or t
  misc_feature (318)..(319): n is a, c, g, or t
  misc_feature (326)..(327): n is a, c, g, or t
  misc_feature (334)..(334): n is a, c, g, or t
  misc_feature (400)..(400): n is a, c, g, or t
  misc_feature (409)..(409): n is a, c, g, or t
  misc_feature (416)..(416): n is a, c, g, or t
  misc_feature (425)..(425): n is a, c, g, or t
  misc_feature (434)..(434): n is a, c, g, or t
  misc_feature (469)..(469): n is a, c, g, or t
  misc_feature (486)..(486): n is a, c, g, or t
  misc_feature (711)..(711): n is a, c, g, or t
  misc_feature (743)..(743): n is a, c, g, or t
accaatcaaatggngatgcatcagatcccaattctcatgagtgttaacatattaagagagtacattatttacctaagactgantgnctgtgccttactttataaaaaaacaaagatagccacatcaatttanttccatatatatganacnacctattcncttnnctaaanntngtnatanacataatantcaaacnngngcnccagannggtgcngttcacatgggaggggccacagaagggggggtggtagggggggngngttggggtggggngtacaaattcgntctataaagntggggatatagaaggncaaatnnagttgtnnaaaaganaattcactgtacacattttatttacagttttgtacactgtcttaatatgaatgggactgcgtttcnacttgagcnatttttnaccaaagcnaaataaccnaagtgatacaaagtgttaaaatacagcataaaganacaaaaacagacatacnaattcgagttagggatgtgattatgagtgttacattttttataatccacaattatgtttaggaaatcacacaaacatagatcactgatttgaatgaaatgcataaatttgtagcaaagctttgtagttacaaaaaacaaaaaaaattaccaaagaatgcacaaaattaatgtttattccacctttgtgtcatattcctggatccttcaccaatgttacatgaggnaaaaaacaaaagcaaaacaaatgaaaaactgnaatcagaatcactaatattatcaagtaggggaacaaataaattaaaatctagcagccatc

SEQ ID NO: 700983 - DNA, 226 bp, Homo sapiens
tctctcaagatagtacagtgcaatctgtgggtcccttgagattcaatatgactataaagatgctatcaactactactgcatacaatcgctgcaggaataatgataggacgtgcatttaattcatagactctactttaaattgtatggacatttctacaattttaagtcttttattcatgagcatctggcctatctcttccatttctttgtgtcttgcatttctttg

SEQ ID NO: 700984 - DNA, 688 bp, Homo sapiens
ggagaacgacgctcgatcagagctgctggggcaatactccgcctgctgggtcgggcggctgtatcggcgagcgaccgagttcccgcgacttctcggtggcgctccccctatcctttcagttctccacggaactggcccctcgttcttctacttgaccgctcccgtcttctgccgccttctgtcgctctcccgttgggccgattcccgcccgtcttcctcctggcttcccatcgaaggctctagaaatgaatgtttccgtctcttcagagatgaaccagattatgatgcatcattatcacagaagaaatgcgtgtctatagcttttaaggaacttgattacatcattctctcaagcctgatagttttggcactcaccattagagcttaagacacacctgccttcatttcaatccacctgtcttcataccctgacgaagtgcaccttttaacactcctttgtccttggattacttaagagttcccagaaatacattgccacaacagagtagtcaaatttataccggaaaaatgattcccagtggctatttgatgtttgaggatgaaaattttattgagtctctgtgtgtcaaatttaatgcctgaggacaagtggcagttctgtgatgttcgacttcaggtctgtggcatgagatgttagcacacagagcagtgtagcttggtgcagtcc

SEQ ID NO: 700985 - DNA, 179 bp, Homo sapiens
catagtatacaacagacactagggcttagaaactctttatgcagatccacaggtattatgtaggtaatggcgatatgttctcttgaatctcctcagtagacaacctttcgatttcaactttatttttttttttttcccttaaaattgagtcgggctctgtggcccaggcgggattgcag

SEQ ID NO: 700986 - DNA, 625 bp, Homo sapiens
ggtttgttaagcatgtcaaggcttttgcgaaactagtcaatcttagcatctctaaacaactaatcccagttccaagcaaactatataagctgtccgattataaaggcacctccaacgattttgcaatgcaccaatatcctcactatacaacagctcactaatcattctatactataatctaactaccttcctgtgtctcctattctcataatcctacattccctgtcacacaacataccttatcaaacttctccaatgactattaatttcattacattcattacatataaatactaccaattcaaaacacttaaaccaaaacattttatacactattatactgttaactcaaatctactacatttacaccctttaccacattttatcactatcatatcatattgccatttaactccaatacatctacattaaacctcaacttttctacatcatcctatttatcataagacaatatcattttacaatatatttttaccctattatccaattattaacttacactatattcaatctttttaaacatatttctcctttattacatttttttaaactaactaatttattatcttcatttttatatatattatctaaagatctaatctct

SEQ ID NO: 700987 - DNA, 322 bp, Homo sapiens
gagatggagtctcactgtcacccaggctggagtacagtgttgcgatctcaactcactgcaacctccaccttctgagttcatgcgattctcctgccacagcctcctgagtagctgggactacagacacccgccaccacgccaggctaatttttgtatttttagtagagacagggtttcaccaccttggccaggctggtctcaaactcctgaccttgtgatccgcccacctcagcctcccaaagttctgggattacaggcgtgagccactgcgcccagcccaggcttaaaagtttttaaggtattagtcttcaatgccacaaag

SEQ ID NO: 700988 - DNA, 1174 bp, Homo sapiens
cgacggcctcacaggccgcacctgcgcgacactggactctcagcccagcgcctgggcataacgcctggcctaggagccgcgcaggtactcgagcagctgggcgccacagggatccgcagtgctcctgcgcccacgcgacacccgcaggagagcccaaggcccgctcgaggccggacgcatctcacagcctgcatcctctcgcaaacgcacgcctcaccggcccagaagcaacaccaagcgcccatgcgccagactcccatgccactagaccccacacggccacaacacgcgcctgggcccacccggaccaccgacgcgcccacgcacccgggcatcaacaccccgcctcgcgcacgacacccgccacgcccccacccctgcccacaacaacacccccgccgcacacactccacactccacccacaccacagcggcacaaacgcactgggaccccccaccacagccaccacaccaacaccggtagaccccagctcactcccgcgccccagcacatgccccacaccacgcgcacaccacccaccactcacccgccacaacccaccacaaactcccctgggacacccccaccagctggccacaccacggcccgacacatagccccactcgcccgccaccccgccacccacagcactcaccgcctccacagcacgcaacacacaccgcaaacaacacgacccaacacggacaatacccggcgcatgctacacaccccaaccaccttggcccccacccccacctagccccctcccgcgcaccccccagacagcacctccaggcagccacaactagcacccgccacaacctaaggtcgcgacccgacccagacacccggcgccacgcggaaccgacgaatcatccccaccaacaacaagggccacaccaacccccccgccgccaactcacaccacgacaggccaacccaaacaccccaaccaatacacgcctcagtcctcgcaaacccccggaacgccccccgacacccccgccgcccccagacaccgccgaccagggcactgcgccccgcaccccgcaaaccacccacacgccgaccgacccgattccccacacgccaccaccagcaccaacacaagacccaacaacaccgaaacaccatccacaccccgcccgcacaccacccccaccacgggacgta

SEQ ID NO: 700989 - DNA, 199 bp, Homo sapiens
ctgcatctttgctgaggtactcttcactgtttctgattcttatttctaagtaataagcatgtactgccatctctttttttttgagatgaactctcactctgttgtccaggctggagtgcagttgtacaatctcagctcactgcaacctctgtctcccaggttcaagtgattctcctgccctagcctccctaatagctgg

SEQ ID NO: 700990 - DNA, 250 bp, Homo sapiens
  misc_feature (21)..(21): n is a, c, g, or t
  misc_feature (150)..(151): n is a, c, g, or t
  misc_feature (173)..(173): n is a, c, g, or t
  misc_feature (178)..(178): n is a, c, g, or t
atcgacagtatccaaatgccnccagagacatccattacaatgagtacttaaatgtgtccatagatctggcaattaggaggtcattggaagccagagcccagtgggtagtaaagtaaaatgctgatgggcaaagtagagaagtttaagccnnaaaagtttggatttaaaggtanggaantggtaataaatgagcatgttatcatgggatcaaacttgaaagaggtcatgttatacagtggtgaacgacatg

SEQ ID NO: 700991 - DNA, 705 bp, Homo sapiens
  misc_feature (526)..(526): n is a, c, g, or t
  misc_feature (636)..(636): n is a, c, g, or t
  misc_feature (652)..(652): n is a, c, g, or t
atgtctacaagacgctacgtgtcccctatcatagaatgagcttgtcaccgttactactgatcacaagtcccgcataatcattgttgcacatgtatctggcttccatatgatcctgtgtatgcccttatgtccggagatgtgtctagaaaacaaaaacttagattatctaccattaatcactcctacgaggaacagcttgcaggcaacatagaaatccgcgttgtagaacctatccgtggtggccgcgctatgcatccgtaggtcgctcaattcgggccctcctcgatccctagcgctgtcctttacagtagacgagacgcacggtcaccgatcccatcccattaccagtcaaaatcaatttggcgcaccagatggggtactgaaccatacgaagtacaccaggactacgtgcgggagctaatcgttccaacgtccgtagcatagcttaccccgcgagttattccgtagtaaccagggcagactgcggactccgttggacgttgacggatcgagttagtactcccgnattgaagcccccattcgtataataattacatcacaagacgtcttgcactcatgagctgtccccacattaggcttaaaaacagatgcaattcccggacgtctaaaccaaanccagtttttcaccggntacacgaccgggggtatactacggtcaatgctctgaaatctgtggagcaaaca

SEQ ID NO: 700992 - DNA, 215 bp, Homo sapiens
agtttctgaagctggattgtaaagttggctgattggtgaacaatcgtggcacccatcctggcacctggtgaccctcattacctgctgcctggtgacccgctgggggaatgaaaacacatattactgtctacacagtgttgtcatgagtggtggggtgcccagaagccccccagagcctccagaactgtgataaatacttttctgttgtttcaaaa

SEQ ID NO: 700993 - DNA, 143 bp, Homo sapiens
  misc_feature (74)..(74): n is a, c, g, or t
  misc_feature (100)..(100): n is a, c, g, or t
gatcttattaacactgaagtacggggaggaggcatgatgctggacacactgtcaaagtcaatcttctccacaangttcttgggtttaatgctctcttctnggctacagatgaagatctgccccgactcgtcggcactccaccc

SEQ ID NO: 700994 - DNA, 413 bp, Homo sapiens
  misc_feature (359)..(359): n is a, c, g, or t
  misc_feature (364)..(364): n is a, c, g, or t
  misc_feature (389)..(389): n is a, c, g, or t
  misc_feature (400)..(400): n is a, c, g, or t
gcaacccgaaaacagaaatgctatataggaggagaaaaggctttcaacaaagcattgtcattagggttcggttaaatatgcatgcatttgaaatatacattgacttaaatgcaaatagtcaggctgaagctctgctgtaaagtaaaggtacacccacaaaaggacagagccttttctggagaccagcagaaatgtggttgtatttatattagtggggacagaaattatgatcgctctggggccgctgcagcctttctgctgacaagttgcatgccactgttccgtagtgactgttctttacctgggaacggcttctccatgggcaaccccaacccctttcacaggggcggcattcgttngcttnttctcttttttaaaatggaacacantggggaaggangtgggattatgtg

SEQ ID NO: 700995 - DNA, 890 bp, Homo sapiens
gtcgtgcccagtgctcagaggttccacggtcaatctgtgctctgggaaccacatcgccttcgggctgaacccccggtatttgatgagaatgctgtggtccgacaagcacccagagtcgcatgaactcctgggggtctgaggagcgaagatctgccccgaaaaatgcccgttcgctccgtgggccatggatgcttgctcagtgtagggatcttgtgtgaatgctcacgtgacctgcaaggatgggccgttgggatgtgtactagcgaccattgtttgataatacgtactcatacggcgcgtgatggaacctggcccgacgcattcagatcagactaggcaagatgaggaggtgcgacattccagctgacccagtgtgtcatgacctgtatggcggcattccatggtcccctgggcgctcgggggctggtggtgtggggcagctcggggtccgtctcattcatccccacttcgcaggcccatgccttgtccatatcctgcctgggatctgggcctttaatgcaagaggccatgtacctatgctacgttgggtccatggcttcctaggcctacgagcacagcactggtgaacggagcaaggcatgcatgatcggggcatttgccattccttcaggccgtaggcagcaccgtggggctccagcctgctggagatcctaccatccccagggaggccagggcacagccagggagaaggggaggaacgtagggccggagacagacgggaacggccccgatggcgtacagggccccttgcgcaaattagaacatacgcgagcttcgaaaccacagaccacagggcaaacccaacatagcatggaccaaggatacgaggagtgaaatccctcagaccctcggccaacgcacctaccaca

SEQ ID NO: 700996 - DNA, 155 bp, Homo sapiens
  misc_feature (143)..(143): n is a, c, g, or t
tcgagctcggtacctcccatcagtctgtggaatactggaacagaaagactggctaactacaccggaggcatctatgccgaataccaggacaccacatatataaaccatgtcgtttccgtggctgggtggggcatcactgatgngagcaagatgcg

SEQ ID NO: 700997 - DNA, 893 bp, Homo sapiens
  misc_feature (5)..(5): n is a, c, g, or t
  misc_feature (533)..(533): n is a, c, g, or t
  misc_feature (665)..(665): n is a, c, g, or t
cctcnaggtgactaatacagaggactgcccacgtggactgtggacatactacatggagcatggaggtgataagaccatttcttcaggaatgaccagaatagcataaaagatcaatggaagcattgccaaaaaaggaagactgaaatctcaacctttcagggagtaatttatcatttggatgagcctaatgagaaaagcagtgcagtgaatgatgtgacaatatgaaacaacataatagtgaatgattaacgagtgacaaattgagagggaaaaaaaaggataacgctttcattatggtacaaaagagaatttgacaaactcatccaagaaagcaaccactttttcctccgtcttagttgaacgccttgaaaaacgaacaatcatactgctttcaaggaatttcataagagtaaaatagttaaacttctatagaatttcaataattaagggttacaaatatatttaaaggattttgaagctttaataatcaaaactttataaaaattatgctgcgattattcagggcaaatcanaatgagaaaaaaccgtggcattctgataagtataaaagttataaaataaaacatattatttgttacaaatgacaatttaatgaaatatagttttgcattgaatctagctaggaaattctagatcatatgttntatgaaattgatttgattgcctgacatcaatttattagctgtcatgaattaaattcttgcactgctttttctactatgaagctgggaaatattctaagtttctaaggtcctaaattcatttgcctctattctactggactacaccttttctgccaaatattgggaaaatatgagctaatttggaacgaacaaaaataaagctagtcctggccagacccacttccctgg

SEQ ID NO: 700998 - DNA, 430 bp, Homo sapiens
ttctacaatgaatacaaatggttgtccaaatcaatgtatgaatggtaataccaaataaaatatgggtaaccatttcaaggcatggtattaacgctaacatgatgtccatctaacatccagtatctgaaaatctgaaatcagaacacaggaccttttcatttcgaatttacattaaagtttcagcgccctgattaaccatttccctcaataaaattacatttttcataccttaattgtgcaaaagctgcaaactggtaaaaaaccttgaatgcccatggcatgattattcacaaataactggtacaccctatacctgaaacctgagtgcctactataaacctaccaaaatgattacaatgacaacccatcatcttcatcacatgaatcactgcaatgtgaacagtattctgctgagcacaacacagtaatc

SEQ ID NO: 700999 - DNA, 200 bp, Homo sapiens
tgaactaccgcaggaacataccaggaaagccaagagaatccacagacctttgaaggaattggatcaccgccacaggctccccgagatggcaaaaaacttttgccgggaggactcatatcactctgtcgtctcatgtgccgcagtagttcttactcctatggaaccaatgatagtgaaggagaagaaccagtttcctggct

SEQ ID NO: 701000 - DNA, 1683 bp, Homo sapiens
  misc_feature (1233)..(1233): n is a, c, g, or t
gccggatctacggtatcacctacgagatgtctagcagcaccctccgagttacctactgcctaggcgatgagacccagaagggctaggaaggttcaccactgtctattctcgaagatccatgcgcagggcagatcgtttgacgtctcgcgtggaatccgcacgtgattgatggtatgatctctgtcacgcgtacacaaagggtactcgtgtcaggagccttgctagttgctccaagttaggatgcatatcacaacttgtgctatctaatgatgggctcctaggaagactcctggaggaacgaattgcataacagatcgtcggctcattattgtgtgggaatgtggtcgtcttgcgaaccagtgccttggtgggaaggcgaccaataccaacgtagaaccactccttactctggcgcccatagaccccttggggtatcacgcccaaatgaccacactggataccggtacaaccaggcaaccagcaggaggacacgcatgtgggtaacagaaaccgtgtgattgcaatacagcaggcagtcgaggcactcgcggaacaactcagcacaaaatagttacacaactccttaagagggctcttaggggcttgcgcggaaaacctgacacaattctcccttgtgtggggcgcttgctcccgcgtactgatcccgcgctgcctctgcgccgaccaggcctgggggctcggccccagtatagatggatcgatacaagggagatgagctttccacacggcggtagagtaaatcccgtggcgcccaatcggaggttctcggtaaatggaccactagtggtggccatatgcggctctaacacctacctattaggaaattagatacaaaataaccctattggttctcgtcatggtattcacacacggtgatgctcgaataatccaaaagttggggatatctcaacttccacacattgttggcggcacgccggctactacgataccaacctggggcggcttgggaccacataacgcacaacactggaccagtgcgggccccccaacactcggccaacgacgatgaagcgcctactcacgaagtggggagatcaccacgattacacccccaagaggaacaacggtgggagtgaccacagagccacgagaacaccgattctcccatgccgcgggaacgaccgaacccacaatgtgcacccgcccaacgtacggtggcgacaacgggccacaggacacaggggacacatncaaccgcacaacaacacacaaacccagatgccaacaccgacaacgacgtggccccgcacttcaccacacagagcgaacgggacaacacactaagttgcgggggcaacaacgggcaaatagaccccacacccaacaactggacaagcacaaacgaaacatgaacaacgtgaacggaagaccaacaacgggcctaccaccaacaaggacaaacccagtaggcacacaaacacataacacacaaacacagagccaaggggatacgacacagccgccgcgacaacacacacctggacccgacaacggcgcaacagaacacatgcacacaaacacccagcacacaacaagcgagctgacaacaacataggcacaacgtaggcacaggcataaaccagccgaccagcacctacgaacagacacaccactaacagccgcaaccttgatgcaaccaca

SEQ ID NO: 701001 - DNA, 328 bp, Homo sapiens
tgtgtggcgttctagaggatccctgcatggtcgcaggaggaggcatcttctccaatctgagagtccaggatgcatgccccagccaggtggcaaccggctcaatgggacacaggaaatggggcccgtgggtatgactgagaactgcaataggaaagattttctgacctgtcatcgggggaccaccattatgacacacggaaacttggctcaagaacccactgatgggaccacatcgaataccgagatgtgcgaggtggggcaggtgtgtcaggagacgctgctgctcctagatgtaggactcacatcaaccctgcctgcgaacctatga

SEQ ID NO: 701002 - DNA, 341 bp, Homo sapiens
tgccatactacatgttcttggcttctgcaatagaatctagtctgatcttcattggtgtctccctttcttatgacccaagtggcttttgcaggagtgcaggacttagtgctgatcatcacacagtataccactttctttatagaaccgctaccaaattctgagtggagatcgtggctttagcccgtttgtaactttttttgctcaaatcaataacactggcccattatctgtccagcagaacccattgtgaaatagtacacggtgaacagcccttcactgattacaggcaagtgttacagtagcctagccataaggaaggggagttacatcatagtacaaaa

SEQ ID NO: 701003 - DNA, 253 bp, Homo sapiens
  misc_feature (13)..(13): n is a, c, g, or t
  misc_feature (22)..(22): n is a, c, g, or t
  misc_feature (57)..(57): n is a, c, g, or t
  misc_feature (116)..(116): n is a, c, g, or t
  misc_feature (121)..(121): n is a, c, g, or t
  misc_feature (187)..(187): n is a, c, g, or t
  misc_feature (206)..(206): n is a, c, g, or t
  misc_feature (219)..(219): n is a, c, g, or t
gtaaaattaatanaaatgtcancaatattgtttcaaacccaaaaagcaattttctcntttttttttttgagacggagtcttgctctgtcatccaggctggagtgcagtggaatgancttgntcaccgcaacctctgcctcccaggttcaagtgactctcctgctgcagcctcctgagtagctgggantacagcatgcaccaccatncctggctaatttntgtattttagtagagacgggtttcaccatgttgt

SEQ ID NO: 701004 - DNA, 125 bp, Homo sapiens
gaagaggaggaaggattagaagatattgacgaagaacgggatgaggatgaaggtgaagaagatgaagatgattatgaaagggatgaaggagaggaagacgaacgaaaagatgacttaatagaaca

SEQ ID NO: 701005 - DNA, 270 bp, Homo sapiens
cagtagagctcattgaggaatagatgttatgaattacgtgttggcctaacgctatgcgtggctcacatctgtaatctcagcacttctgggaggctgagagtgggtcgatcacctgaggtcaggaacttcgagactagcctggccaacatggtgtatcttttgtattttctttttttttttggaaacgaaataaacctctaatagcccaggcggcagtacctctttttgcccaggctgtattatctcttatgcccagccagaattgggaac

SEQ ID NO: 701006 - DNA, 322 bp, Homo sapiens
cctggctcttccctatcttactaaaatatacacaagttagccagggcacggtgtgtgcacaccctgttatcccagctactcaggaggctgaggcgcgagaattgctcgagccctgggaggcggaggttgcagttagatgagatcacaccactgcactccagcctgggtgacagagctagactctgtcctataaggtggttgttattattagttccattttacaataaatatcataaatatcagagatatttagtacctctgtgagttcacagagctagtgggtggggtgaccagaactgggggttgtgtcctcgattgcctc

SEQ ID NO: 701007 - DNA, 552 bp, Homo sapiens
catcacagcaataagcagcaatccatttgtgtcaatgaactttttcgaggcgtatccgacttgcggaacgtgtgggttgtgctgggccttgacaaaccgttccagtgtagctgtcctttctcgaagacgcgatcgttctgtaccgtcaggcatggcactcaacacacggttctgtagaatccttcctctgtaagaaacaaggcggcatccaggaactgctgtattctggcccctggtctccgtgactaagcggggggaacctgctccgtgacgtttgaaccagtggggaagccatgtggtccacgccattcggcagttttgttccccgaagaacttcgtcactatagatgttgggagtttttagtctcagtaaatctgaagcaagagaaggcagcctccagggcactggtgttttctttgcagaaggtgataatccatgagtgtctgaggcccgtcccagtctgtgcggtgcggaggagagagcacctgcccctccacccgatgctttgtcctccttctcattcctgggaaggaaatcctgggagctactca

SEQ ID NO: 701008 - DNA, 247 bp, Homo sapiens
  misc_feature (72)..(72): n is a, c, g, or t
  misc_feature (213)..(213): n is a, c, g, or t
aaggatgggggtgataagagcatcctttgtcactagtcctcccaggaccccacgttagactttagacatctnctcactcacctcagaccttctcagggtaatttggagaaaatgtcttccgatctgagccccagtgagcctccctgtcaacttggtgacgagggactagaccagaaaaggtcaacccgagtgtccctgatcgatgaaatgatnggcataatggagtgcgttatctgggtgtggcttt

SEQ ID NO: 701009 - DNA, 187 bp, Homo sapiens
  misc_feature (159)..(160): n is a, c, g, or t
gcatgagatcgaatcgagctccggtacccggaatctcacagcagaagtacaaatcataggtacaagtatttatatcaatgaaaatttccatgggggatttctgggcagaatatgggtctgtgactctggtggaagtaaatcgacgaccgtaaacgtagnncgtgcacaggggctgttgccgtggtag

SEQ ID NO: 701010 - DNA, 570 bp, Homo sapiens
  misc_feature (547)..(547): n is a, c, g, or t
cactccagaggtcacttttcaggctggactttattggacccttcagcagcatttcacacagctgatgcttgaaagcccactacattttgctcccaatcacatgcccctggtcctcctcctacctctagcttctcattccagtctcctttaccggctctttctcatcttcccattctcaaactattggagctgcagggctcaattgttggacatttcgcatcaattccttttgtatctacacttgttgcctttgtgacttcatccagtctcgtgggtaagatttagtccctctataagttgacgactcttaatttccaatttatctccagtttaaacatctgccctgaaatccaggtttgtgtatactgtacactgaacttacatctctatctagaggtccaataagcattttaaacttaatgttccctgccgggcatggagactcacacctgtaatcccagcactttggaggccgaggtgagcagatcacttgaggtcaggagttcgagaccagcctggccaacacggcaaaaccccgtctctaatnaaaatacaaacttagcaggcatg

SEQ ID NO: 701011 - DNA, 756 bp, Homo sapiens
  misc_feature (309)..(309): n is a, c, g, or t
  misc_feature (382)..(382): n is a, c, g, or t
  misc_feature (385)..(385): n is a, c, g, or t
  misc_feature (388)..(388): n is a, c, g, or t
  misc_feature (390)..(390): n is a, c, g, or t
  misc_feature (401)..(401): n is a, c, g, or t
  misc_feature (410)..(410): n is a, c, g, or t
  misc_feature (412)..(412): n is a, c, g, or t
  misc_feature (424)..(424): n is a, c, g, or t
  misc_feature (433)..(433): n is a, c, g, or t
  misc_feature (515)..(515): n is a, c, g, or t
  misc_feature (589)..(589): n is a, c, g, or t
  misc_feature (593)..(593): n is a, c, g, or t
  misc_feature (598)..(598): n is a, c, g, or t
  misc_feature (602)..(602): n is a, c, g, or t
  misc_feature (604)..(604): n is a, c, g, or t
  misc_feature (616)..(616): n is a, c, g, or t
  misc_feature (621)..(621): n is a, c, g, or t
  misc_feature (629)..(629): n is a, c, g, or t
  misc_feature (635)..(635): n is a, c, g, or t
  misc_feature (638)..(638): n is a, c, g, or t
  misc_feature (643)..(643): n is a, c, g, or t
  misc_feature (646)..(646): n is a, c, g, or t
  misc_feature (679)..(679): n is a, c, g, or t
  misc_feature (753)..(753): n is a, c, g, or t
atagagtctttcacagacaaaggaagaggtcttgttactacagctataattcaaagaggaactttaagaaaaggctctgttctggttgctggaaaatgttgggcaaaagtacgcttaatgtttgatgaaaatggaaaaacaattgatgaggcctatcccagcatgccagtgggaattacaggctggagagaccttccttctgcaggagaagaaattcttgaagtagaatctgagccaagggcacgtgaagttgttgactggaggaaatatgaacaagaacaggagaaaggtcaggtggatctgaaaatnatagaagaaaagcgaaaggtacacaaagaagcacatcagaaagcccgtgagaagtatggccatctactgtggnagnagngnttcattttcangttttttgnangtcagatcaatnacccttaangccaaaagagaaaagggaaagagttacaaatagtactttctagtgattattaaaaggtgatgttgatggttctgtttgaggncattttgaacattatagatacctatgatgcttcacacgagtgtgaactagaattagtacattttggagtgggtnaaanatgtnaaantnatgttacctttnctaanaatttaangtgtanaanatgcnttnaatgtgaatcaggaaatgttatccacgagtaanctgcaaaaaaaggagtaaaaattaaacttcacaaaataatttaccgtcttgttgaagatttgcatgaggactgngca

SEQ ID NO: 701012 - DNA, 289 bp, Homo sapiens
tccgatgaccaatgtggtgcacgtggccgggcgggagccaacacccacttctcccacaaagggcccgccacacatgctccacacacactccatccctcccacacgcacacgctgtctcgaacacattcacatatcacacatgctcaatcacacacgctcacacacaggcccacgcattcacacatgcacacaatgtcacacatgctcaatcacacatgttcatactcattcacacgcgggcccagtcacacacgcaatgtcacacattcgtcacacaatcacacacacg

SEQ ID NO: 701013 - DNA, 161 bp, Homo sapiens
ccaatttgggttagctaataagttggtcagttcaaaaaaaatttatattacgcatctactctgagccaggcattgtctcttttttgctgtgaagtatagatgctggaacaaagaacagacagccttgcatgtcataagacgtaacattctcaggggtaaga

SEQ ID NO: 701014 - DNA, 318 bp, Homo sapiens
cagggtcctcctttggatacaaaatccacagatgttcaagtccctgatataaaatgacatagtattggcatataacctacacacatcctcctgtatacttatatctctatattacttataacacctaataatgatgtaaaagctatgcaagtagttgttatactgtattattagggaataatgacaagggaaaagagtctatacatgttcagtacagatgcagctctttttcaaatattttccactggtggttgattgcatccatggatgtggaactcacagatatggagggctgattgtacttcttccttgcttgag

SEQ ID NO: 701015 - DNA, 415 bp, Homo sapiens
aggctggtcgatagagcgagcctccgtctcaaaacaaaacaaaaaacacgaaaacttcccaaggaccccttttcctataacattatcccctgtggagatgccacactaactgttagggggttttgggcgatgactctttctggctacttcctgctgaaaaggggcgtggaatgggaaacagcagctagggctccttctggggttgatccaagggtcttcggaggaatggctggcctgtccatgtgtggttcagtttatggcaccatttggagtttgattgcttctaggcgagaagaaatatttcgagtgatagtattaactatacggggtccaaatattagtacaacacgtataagcaagagagtgcttagtaaaggggttaaccaattccataaagaagtgcaggaaaccaaga

SEQ ID NO: 701016 - DNA, 1197 bp, Homo sapiens
atgatgacatatcacgaaacgcgcgcgttggctcaaagcgacttacagcaactctatgcggcacttgaaacaactgaatttggcgcttactttgcgacacccgctgatgatactttacgttttggcattggcgcaatcgctacggcaaaaacggctcaggcattacaaggtgcggttgtttttggtgcgcagtcatttgatgaacaagagtacccgcagtctgaattgatggcgggtttttggtttgtccccgaagtgatggtgaccatcgcggcagataaaatcacgttcggatcagataccgtatctgattttacgacgtggctggcgcagttcgtgccaaaacagccaaatacggtgaccactagtcatgtgacagatgaagtggattggatcgaacggacagagaatttgattgataccttagccatcgatcaaaccttagccaaagtcgtttttggtcggcaacagaccctgcagttatccgacacgttacgactggcacaaattattcgtgcgttagctgagcaggcgaatacgtatcatgtggttttaaagcgacatgatgaattgtttatttcagcaacaccggaacggttagtggctatgtcaggtggtcagatcgctacggcggcggtcgctgggacaagccggcgcgggacggatggcgctgacgatatcgcgttaggcgaagcgttgttagccagtcagaaaaaccgcattgaacatcaatatgtcgtggcaagtatcacgacacgcttgcaagacgtgacgacgtcgctaaaggtgccggccatgccaagtttactcaaaaataagcaagttcagcatttgtacacaccaattacaggggacattgcggcacatttaagtgtgaccgcgattgttgaccgcttgcatccaacaccagcactgggtggcgtcccacgtgaagcggccctgtattacattgcgacccatgagaagacacctcgtggcttgtttgcaggtcctattggctattttaccgcagataatagtggggaatttgtggttggcatccgttccatgtatgtgaatcaaacgcagcgacgagcaactttatttgctggtgccgggattgtggctgactccgatgcgcaacaagaatatgaagaaactgggttgaaatttgaacccatgcggcaattgttaaaggactacaatcatgtcgaatga

SEQ ID NO: 701017 - DNA, 409 bp, Homo sapiens
cccggtccccttctcaaggtgaatgaaccccctccgatttttttgggggcgggccagatttctttttttctccagtttccccccgggaccccgggtttggggcctgggggggctcacctaggaaaaattggggtgttccccccccaaaagaggccccctggtttttttttcggggtttccgtgaaaaaagcccatgggcacagcttttccccccccctttcccccctttttttttttggccagggcgccaaaccctgggtttttttttccccggggaagggggtcccccccccccttttttaaaagaaagaccaaaaactgggggcccccccaacccgtgggtgaaatggggccctgggggccctttccctttttttttggttttttaaaattttttgggggggtttta

SEQ ID NO: 701018 - DNA, 621 bp, Homo sapiens
  misc_feature (410)..(410): n is a, c, g, or t
ccgtccccggcctttgccccccggccaacccgccctacctggcgcgacgggaccccccttggctgtcctcccggctccaagagaagccctctgatcccctcgagtgaccctgatggatgtcgtcgaatattttactgaggctggattccccgagccggcgaccgctttcccagagccggaaattgatggccaatctttgctgctcatgcagcgcaccagatgtgctcaccggcctgtccatccgcctcgggcccagccctggaaatctacgagccacccacatccaggtgcttcagcacaggccacctttgaggatgagtgaccccgagtggcttcttatggctgatgcgccccgcctcaaccgctgcccccgcccctttccggcccccactctcacgcccagagtcccncccgaggtccacggaggctggacgggggacacccctcacgcccttcagtagacccggagttcccaaggagagggcaccctcttgtccttatctttgccccttgtgtctgtttcacacacatctgctcctcagcacgtcggtttggggaggggattgctccttaaacccccggtggctgaccctcccccccccagtcccggaccttttagga

SEQ ID NO: 701019 - DNA, 550 bp, Homo sapiens
  misc_feature (492)..(492): n is a, c, g, or t
  misc_feature (549)..(549): n is a, c, g, or t
cttgatgagacatacctcccatgcatcggtcaaatgaaatgtttgggaaattgttttataagcagaaaagctctttgcagacatgagttcttatagaggtttcagggaattttgcctctaattagatgtcaccttaccattccctgtcagtttttacttttgtttgtacatgttaaattaaatcaaatgaattagttccatcactcccttaagaaatgcatatatgtagctatttagttattttaaaaaattcctgggtctggccacgggtgtcacgcctgtaatgtgaacactttgggaggccgaggcagggggattgcctgagctcaggagttcgagaccagcctggccaacagagcggaaccccatctcttccaaaaatacaaaaaattagtcggatgtggtagtgcatgcctggagtcccagctacttgggtggccgaggcaccagaattgtttgaacccaggaggcggaggttgcagtgagtggagntcgcaccactgcactccaacctgggtgacagtgcgatactccctctctctctctctna

SEQ ID NO: 701020 - DNA, 544 bp, Homo sapiens
cgtctcgggcgggcgggaggtgcaccagcggcggcggcggcggtaaatcctcccggccgctcacagcactgtggagccgcgtcccagcccggcctcggaccgcggcacccctcctggccctcgcggcttctagcccgccgcctgcccgcggcgtcggcctgcgagccggggcggcggctctccccggaccccgacgggcgggcggacgtgcctgaggaggcggcgaggggagggcaagggaccggacggacgggcagggcgacgactgccgaactcctgagcagacccaccaacagcaccagcggaagaagcacagcagcccagccgcagggccaaacgtcacagggattcacccgcgggaacccatgccacaaatgccaggaagatgggctggcagaccaggcgagggcagaagacgaccgaccacaacaaccccaagcccctgaggcacggccacacacacgcactgatcgacccaagtggcaaacaactcgacaccgccctcgccccgtggacctacgccccatcggccgtctccgcacac

SEQ ID NO: 701021 - DNA, 143 bp, Homo sapiens
gatggctcagcgccggaggcacctcagcagccatgttgaagccccatagtgaagccgggactgtcttcattacagacccagcagtctgctcagcagaccaatggtttgacaacagttcctggaagtcacgatgttgtccggcg

SEQ ID NO: 701022 - DNA, 342 bp, Homo sapiens
tcagacggagccactctgtcacccaggctagagtgcagtggtgtgatctcggctcactgcaacctctgcctcctgggttcacgccattctcctgcctcagcctcccgagtagctgggactacaggcgcccacgacattttttgtatttgtactagagacggggtttcaccatgttagccaggttggtttcgatctcctgacctcgtgatccacccgccttggcctcccaaagtgttgggattacaggagtgagccaccgtgctcagccttgaatttcttttttaaatctctccaccctgccaggagaaaaaaaacctccctgatattctgactgagattgta

SEQ ID NO: 701023 - DNA, 120 bp, Homo sapiens
gactacataggcagctgcgctattcggtgcctggcgttggctgatttcgccgccgccgcaccacgatatctactcgatcgaagatctggcacagctgatccacgacctgaagaacgtgaa

SEQ ID NO: 701024 - DNA, 483 bp, Homo sapiens
tttgggctcattcaggatgagcgctgccgctagttaaggaggtggtgtggggtcccggtcagggggtttccaacttccgtcagggacgtgggggtcttgctggggtcagtggccaaaaggaggctcaggtcagcagggatagtgcatagggtggtcatctcagcatggataactgaccctctagcatccagtgccatgatgggttttctgggatccaggacgggtacctgcttagggctgcagaagaagggcctctgacaaaggggggcctgtgtcctctccagcttgactcggttggcctctccatacagagccaatgacctcaaagtcttgataaaatagtggccctgtatttggtcacttgtcccaaaaatagcttcagggcaatcagtgatagatacttacatgctcaattaagtcggctcgctggcctgatgtggaaacgggcaggacagccctcaattcaattcagcaagtatctgg

SEQ ID NO: 701025 - DNA, 145 bp, Homo sapiens
atgcccgagacataataccacaaacacacgcacaccaccacatacagctcccagtgcgtcgtgcctccctcctgccccagtggagagcttctggtgtgagtctcgctggcactccgtgccccgggcttcctgcgtctcagtgcct

SEQ ID NO: 701026 - DNA, 156 bp, Homo sapiens
acatttttgtcaaattattagcgaaaagcaggctgtaaacatcaattttgtcataggcttgtttccctgtatgataagaaaatggattttactcaaaaacagtgacataaggagcatataccattaatcttccacacatattaaggtcactcctag

SEQ ID NO: 701027 - DNA, 709 bp, Homo sapiens
gtgacgctctgggacctgagcagtacttagggccccaatggggcgaatctccttcatggccactcgttcgctacgggtcgtatttgtgtaggcaagactaaggccacctgtaagatgcctctctgttcactggcaacgtgcacaccctcaggcctacatacgattggtggaataaggctcaacgaatcgggcagaccgtgcacgcaggcagacggccaacggttcatgagagaggaggactggccgcgttcagtaggttgtccgttctccagacaacccctcccccgcatctggtgaagtttcccgctgaaccgccctcctggtttcatcaatagagcacttaagcaaaggtctgccggtggatctgacgcaacagtgagccccaagacgggctgaggcctcctggcctgccttgcccgcccacccatgggacgtcccagttggtgagggctcagagaagcttctaaggggaaagacagcagcccggacgtattctggttgaatgtgaagtaacggcagcgtgtatgtgccgtcccacctcgccacagcttctttcgcctataaatcttcctagcagcaatgttgagctagcctgaggaggaggcagggtcagaaagcgtaagggcctgcgctctgacctgccgtgtcctttgcacggaaggaggtaggcacctttctgagcttattctattccccacccacaccttaa

SEQ ID NO: 701028 - DNA, 278 bp, Homo sapiens
tcatcagctggacctgtagcttccagcaggggcacagttcggagaccaatgctagaaggcaggcagcaaaatgccacgatggggacggtggaacctgggaagacggctcccatctcaggggtggaggggcttcgggaggccctcatggctggtaatgggatgtgtatctctgctcttctccagaaggcaccaccaaaggtgcccacttctggaaggttctatctcctggtgggctggtctccacaagctcagtgtcctgagtttggtcctcgccatcc

SEQ ID NO: 701029 - DNA, 357 bp, Homo sapiens
gacattttgtgggtagtaactccccaggtgggctgcatggctcatggctgcagcctcatgtgggtctcctgttccacagtgctcccctgcatcagcggctccttccccaggctctggggcagcgcatgaggggtcatgctgggaggggctgccgccgctgttcacttgggcaggacgtcagcggcatcagacacccagcttccccatccacgtgtctcgcatcttcttccacaacccactggcccatggcaggcagctaggtgctggctgcacagtgcagctatggagccctgcgcccagcagcctacacgcttggagccccagtgcttgtcagctagaggcctggggcattgtgca

SEQ ID NO: 701030 - DNA, 831 bp, Homo sapiens
ctcgtgccgaaaatatatatatatatatatatatatatatgccatacgcagtggctcacacatataatgggaggtcaaggcaagacgatcatttgagcccagcagttcaagaccagtctgggccacatagcaagaccccaactctacaaaaaactttaaaaattagccgggcatggtggcatgctcctgtagtcccaactactcaagaggctggggtgagaggatcacttgagcccaggaattcgaggctatagtgagctatgatcgtgccactgccctccagcctgggtgacagcaagaccctgtctctaaaaaattcaaccattcagacataaacttaatacctaaatatctttattcagtcaaatagttattcaaatgtgcagaccataacacaatatattctcatacaaacacagcttcagaggcttcagcaacaacaaaagtgtccttttctgaaagcacagtaagataataataagataataagcataacccagtcaagggcagcagttatcagattcatggtcagactgctcaccatccacacggagcaacaagtctcagaacacatggcacatcttccgcacggccgaatctgcatagaaaatccaatatgaaggactaacacccagtgagagatggccgcagggacccacagccaccccctaactcctaccacatagacatcaaaagcgtacggccaaacgcgaccacagccgggctgcccatacacggcaaacagcatccgcccacaaggacccccgtacgggctaccaaacgcgccagccgacagcagtcaaggcggccccgcacaaccccgcagcccgg

SEQ ID NO: 701031 - DNA, 638 bp, Homo sapiens
  misc_feature (415)..(415): n is a, c, g, or t
cccatggggttcttcgttgacctgaggcattggccacctgggccaattctccgtttttctaagcgtggttcttctccatgcgcatttgaccaccccgagttaggcctcttgttgaggcttcacatggcctccagataccctgagggtcccagaataggggccctctcattgggcccctctgctggcccactggctcacaacctgccttttagctcccagcccccttgtggccaaaccaacctcgtgttccctcaccaattcccgccatgtgactttggtcgcccgttaccttgtggacaatctattctcgttgtctttgatgtgtcccagaaaattcggtgtagtcttacagtaacaaatcatctgagctctcacctaggaagacccaactcgtgatagtcttgtcgatgggcanagttcataaagtacgttgctagacccactttcaccaaatatgttctgtgtccacccagatagtgttccagaccattgctgtcgcccattgttcggggcagggttagggggacaaagcgcagaggagatactttttggtttttttgttttaataccttcccccagaggggcccgatttggcccacttgctcccgtaatgccataaagacattcgccataaagta

SEQ ID NO: 701032 - DNA, 600 bp, Homo sapiens
  misc_feature (38)..(41): n is a, c, g, or t
  misc_feature (44)..(44): n is a, c, g, or t
  misc_feature (48)..(48): n is a, c, g, or t
  misc_feature (52)..(52): n is a, c, g, or t
  misc_feature (71)..(71): n is a, c, g, or t
  misc_feature (73)..(73): n is a, c, g, or t
  misc_feature (156)..(156): n is a, c, g, or t
  misc_feature (279)..(279): n is a, c, g, or t
  misc_feature (304)..(304): n is a, c, g, or t
ttgccataaaaactcctttgatgtttctcacgaagagnnnngcntccngccnagaagaaggagataaacancnccatcatcaaacagctgctcaagaaatttttaaataagaaaccaagttatggggttaatctcctacacaattcatttacttcntttgaatgttagagctcactcatgattatttgtgtttctaatttatagtttaagtttatttgtaaaaagttaaaagagagtgggtctctgtggctctcactgatgttcactctggcatccttnagcatttttcttttttcatttcatnattgtaggtcattagcatgcatatcgagtttgcccttacgtggtgggagttcaaacacacaaagacccactctttgcacaaaactgttctcgctggtttggaataggctcccgtgcttttttaatgttattgcagcatggatgtccattacagaattcagataaaatttgctaatgttctgctatgatgtttgatctcatcttaatcacagtgagctcttccttagcgctaatatattgatgccggcaacgaggcactctatgatactgtgttagacgccagtatgactgctgacg

SEQ ID NO: 701033 - DNA, 1072 bp, Homo sapiens
gagatgtcggggcggcggcggcgggagctacggagagcgaggagtcgcgcaggcaggcggaggctgagggcgccgctggccggccctcccagccctctccgcgcggctccgccggggttccaagaggagctagtaggttcggtgggggccctggcatggacatgcacagcgctcggcttgacagcttccttagccagctccgctgggaactgttgtgtggtcgggacacaggctcaccctcaatgcctggtcccctgcagccaacctcccaaactggcccagatgtgcagcccagccaccagcttagggcctcgggtgccttggaagaggactcagtctgctgtgtggaggaggaggaagaggaggaggaggaagcagtggtgacagaagacagggatgcagccttgggaggccccagggagcatgccctggactgggactctggcttctcggaggtgtcaggcagcacatggcgagaggaagaactgcctgtatcccagcgcccagcaccctcagcacagccccttcgtaggcagtgcctctcagtcagtggcctccccatgcccaggcagggcccctgtagccagtgtaccacctgtccaccatccacggcccaagtccaccccagacgcctgcctggagcactggcagggactggaagcagaggactggacagcagccctactgaacaggggtcgcagtcgccagcccctggtactaggggacaattgctttgctgacttggtgcacaactggatggagctgcctgagacagggagtgaagggggtgacggaggtgggcaccgtgcccgtgctcggccccctcagttcctgcttggcctctctgagcagcttcggcgccggctggccagggctcggcggacagctatggcaggaaagcggctgtcatgcccacctcgcccagaacctgaactgcctgcggatgtctcacgctttgcagctctcatgagctgtcgtagccgccagcccatcatctgcaatgatgtcagctacctctgaccctgccctccagcctgggacaataaaagccttttttctagacaaaaaaaaa

SEQ ID NO: 701034 - DNA, 2357 bp, Homo sapiens
  misc_feature (38)..(41): n is a, c, g, or t
  misc_feature (44)..(44): n is a, c, g, or t
  misc_feature (48)..(48): n is a, c, g, or t
  misc_feature (52)..(52): n is a, c, g, or t
  misc_feature (71)..(71): n is a, c, g, or t
  misc_feature (73)..(73): n is a, c, g, or t
  misc_feature (156)..(156): n is a, c, g, or t
  misc_feature (279)..(279): n is a, c, g, or t
  misc_feature (304)..(304): n is a, c, g, or t
  misc_feature (1250)..(1250): n is a, c, g, or t
  misc_feature (1254)..(1254): n is a, c, g, or t
  misc_feature (1977)..(1977): n is a, c, g, or t
  misc_feature (2052)..(2052): n is a, c, g, or t
  misc_feature (2071)..(2071): n is a, c, g, or t
  misc_feature (2075)..(2075): n is a, c, g, or t
  misc_feature (2085)..(2085): n is a, c, g, or t
  misc_feature (2118)..(2118): n is a, c, g, or t
  misc_feature (2172)..(2172): n is a, c, g, or t
ttgccataaaaactcctttgatgtttctcacgaagagnnnngcntccngccnagaagaaggagataaacancnccatcatcaaacagctgctcaagaaatttttaaataagaaaccaagttatggggttaatctcctacacaattcatttacttcntttgaatgttagagctcactcatgattatttgtgtttctaatttatagtttaagtttatttgtaaaaagttaaaagagagtgggtctctgtggctctcactgatgttcactctggcatccttnagcatttttcttttttcatttcatnattgtaggtcattagcatgcatatcgagtttgcccttacgtggtgggagttcaaacacacaaagacccactctttgcacaaaactgttctcgctggtttggaataggctcccgtgcttttttaatgttattgcagcatggatgtccattacagaattcagataaaatttgctaatgttctgctatgatgtttgatctcatcttaatcacagtgagctcttctatagctcaatatgcggtttgccctcaagtgtgcactgtttattactttgtaatatgccactgtgagtactgacatttagagctgtttaaaggccaagaactggaaacagcctttcctccattttctgtgtattggtgatgggagtgataaccttttgggggagctttctaaatctcacagaagaggaaagtggcctgctctggcaggtatgtgcaggatacagtgtgtttcatctgttccggtgccaagaatgagcagtgtactgtggcagttccctttggatttgtatgtgctctgggctcatgaagatattgcatcgtgagctgcagcagttgcactctttttcaatgacctaaaaagggcttatttccgaggaatgaaaggctgccatcgttggctgtggatgtggaaaacctttcctagcttagagcatttgtatctacaatacattttaaagtcagagttcgtgttccctgttttaatcacatgactacctgtcccagtacacgaaagggcgctggttggcattcttcttaatgtatttagtaaagatcataagaaatcctttaagagtttaaatgtctctgaaacaggcatacaggctctagtcaagaatgaattagagtgaaggaaagctgtgtgacacctggcattcctctctgttcatggagcttctttgaggcttgaagattgattttaccatctagacctctctggctaatanctantcttcaaccggttactctgacataggaatttacttcttttccttgaatggagaacactttaaaaataataacaaacattattataaactaatatatgtgagagtacttagttgaaacaaaaaggagttttagtagacagtattatactacatttgaaaatcaaggagcagtttatgcaacgtaaaacgtttacaaactgcagcacaatctactgttcgtgaatgtcaaagtgtcatgaggaaagtgtctatacaatcacagagttatatttcctcacaaagttctttacgaagagtgaaatatgtttttatacctctcagtttcagttagaggcatattttgtgtaatatttatggcttaaaatggactaaaggtcctgttcttgccttgtctgaacttgccgcttttgcattctttgagttcagtttaaagacagttactttaagcccattttaaaccctcaggctagaaatcgtaccactgttaattagccacattatttggtctaacagtttttgtttatcattctgaaactgagcttacctaatacattgataaattatttcaaaggtatttttatagttcaaatcgcttcacttttaccctgacacgtataaatgactaggaatgaccttcagatagcgtttagcaactgtaaccaatctgacaataatgtgttcatcaggtacctgtggattaaatcacatactggcatatttaagntgaatgtcagtctgaaaaataaatgtactatattaattcaaataccactctttgtgtaggtattttgtcatatanttaagaaaaattaaatagnatgnaaatcatatnacaataacttaagtctttcttcaaagtgcatgnggtcctttgcaatacctcattcagccaagtatttgttctcttcctcattcagtntaaggcagctttcaatttgcttagaaggcaacattagaagggtagagtttaatcagaaacatagaattttaaagtgtgtgttcaactgaataaatttgaatttctgtaggaagaattaaaaacctatttaaagattgcaatatataatcatttttaaagtatttgattaaacctgataggctttc

SEQ ID NO: 701035 - DNA, 2108 bp, Homo sapiens
  misc_feature (38)..(41): n is a, c, g, or t
  misc_feature (44)..(44): n is a, c, g, or t
  misc_feature (48)..(48): n is a, c, g, or t
  misc_feature (52)..(52): n is a, c, g, or t
  misc_feature (71)..(71): n is a, c, g, or t
  misc_feature (73)..(73): n is a, c, g, or t
  misc_feature (156)..(156): n is a, c, g, or t
  misc_feature (279)..(279): n is a, c, g, or t
  misc_feature (304)..(304): n is a, c, g, or t
  misc_feature (1250)..(1250): n is a, c, g, or t
  misc_feature (1254)..(1254): n is a, c, g, or t
  misc_feature (2043)..(2043): n is a, c, g, or t
ttgccataaaaactcctttgatgtttctcacgaagagnnnngcntccngccnagaagaaggagataaacancnccatcatcaaacagctgctcaagaaatttttaaataagaaaccaagttatggggttaatctcctacacaattcatttacttcntttgaatgttagagctcactcatgattatttgtgtttctaatttatagtttaagtttatttgtaaaaagttaaaagagagtgggtctctgtggctctcactgatgttcactctggcatccttnagcatttttcttttttcatttcatnattgtaggtcattagcatgcatatcgagtttgcccttacgtggtgggagttcaaacacacaaagacccactctttgcacaaaactgttctcgctggtttggaataggctcccgtgcttttttaatgttattgcagcatggatgtccattacagaattcagataaaatttgctaatgttctgctatgatgtttgatctcatcttaatcacagtgagctcttctatagctcaatatgcggtttgccctcaagtgtgcactgtttattactttgtaatatgccactgtgagtactgacatttagagctgtttaaaggccaagaactggaaacagcctttcctccattttctgtgtattggtgatgggagtgataaccttttgggggagctttctaaatctcacagaagaggaaagtggcctgctctggcaggtatgtgcaggatacagtgtgtttcatctgttccggtgccaagaatgagcagtgtactgtggcagttccctttggatttgtatgtgctctgggctcatgaagatattgcatcgtgagctgcagcagttgcactctttttcaatgacctaaaaagggcttatttccgaggaatgaaaggctgccatcgttggctgtggatgtggaaaacctttcctagcttagagcatttgtatctacaatacattttaaagtcagagttcgtgttccctgttttaatcacatgactacctgtcccagtacacgaaagggcgctggttggcattcttcttaatgtatttagtaaagatcataagaaatcctttaagagtttaaatgtctctgaaacaggcatacaggctctagtcaagaatgaattagagtgaaggaaagctgtgtgacacctggcattcctctctgttcatggagcttctttgaggcttgaagattgattttaccatctagacctctctggctaatanctantcttcaaccggttactctgacataggaatttacttcttttccttgaatggagaacactttaaaaataataacaaacattattataaactaatatatgtgagagtacttagttgaaacaaaaaggaattttagtagacagtattatattatctttgaaaatcaaggagaagtttatgcaactgaaaatgtttacacactgtgctgcaatctactgtttgtgaatgtcatgtattatcaggaaacatgtctatacgatcgcagagttgtatttcctcacaaacttctttacgaagagtgaaatacgtttttgtacctctcagtttcagtcagggacatattttgtgcaatatttctgtgattgtgcctatgcgtgatgaatgaatgcatttcaatcatacattgcctaaatcataacttgatgatgcttgggaaagaatcaacagttaaaacttcatgaagttctaatgtctgtgttccaaaacacatcacattattaggttgtagggagatatgtatgtgtgctccctggggtggggagttttctagttactagaccatctccatttttagcacttggcagcctcatgatccttttataaataggagattaacaggagagcagcaatacgattttgccaatggaataacagatttgccggcattcactgaaagagggcagatattgggtccttgtgacttcaactgactcttccgaattgtatgaatttatcaatgtattagataaacccagtttcagaataataaagaaaaaatattagaccaaataangcggctagttaacagtgggtacgatttctagcccgtgggtttaaaatgcacttaaagtcctgtcc

SEQ ID NO: 701036 - DNA, 2114 bp, Homo sapiens
  misc_feature (38)..(41): n is a, c, g, or t
  misc_feature (44)..(44): n is a, c, g, or t
  misc_feature (48)..(48): n is a, c, g, or t
  misc_feature (52)..(52): n is a, c, g, or t
  misc_feature (71)..(71): n is a, c, g, or t
  misc_feature (73)..(73): n is a, c, g, or t
  misc_feature (156)..(156): n is a, c, g, or t
  misc_feature (279)..(279): n is a, c, g, or t
  misc_feature (304)..(304): n is a, c, g, or t
  misc_feature (2049)..(2049): n is a, c, g, or t
ttgccataaaaactcctttgatgtttctcacgaagagnnnngcntccngccnagaagaaggagataaacancnccatcatcaaacagctgctcaagaaatttttaaataagaaaccaagttatggggttaatctcctacacaattcatttacttcntttgaatgttagagctcactcatgattatttgtgtttctaatttatagtttaagtttatttgtaaaaagttaaaagagagtgggtctctgtggctctcactgatgttcactctggcatccttnagcatttttcttttttcatttcatnattgtaggtcattagcatgcatatcgagtttgcccttacgtggtgggagttcaaacacacaaagacccactctttgcacaaaactgttctcgctggtttggaataggctcccgtgcttttttaatgttattgcagcatggatgtccattacagaattcagataaaatttgctaatgttctgctatgatgtttgatctcatcttaatcacagtgagctcttctatagctcaatatgcggtttgccctcaagtgtgcactgtttattactttgtaatatgccactgtgagtactgacatttagagctgtttaaaggccaagaactggaaacagcctttcctccattttctgtgtattggtgatgggagtgataaccttttgggggagctttctaaatctcacagaagaggaaagtggcctgctctggcaggtatgtgcaggatacagtgtgtttcatctgttccggtgccaagaatgagcagtgtactgtggcagttccctttggatttgtatgtgctctgggctcatgaagatattgcatcgtgagctgcagcagttgcactctttttcaatgacctaaaaagggcttatttccgaggaatgaaaggctgccatcgttggctgtggatgtggaaaacctttcctagcttagagcatttgtatctacaatacattttaaagtcagagttcgtgttccctgttttaatcacatgactacctgtcccagtacacgaaagggcgctggttggcattcttcttaatgtatttagtaaagatcataagaaatcctttaagagtttaaatgtctctgaaacaggcatacaggctctagtcaagaatgaattagagtgaaggaaagctgtgtgacacctggcattcctctctgttcatggagcttctttgaggcttgaagtttgattttactatctagacctctctggctaatacctattcttcaaccacctcggttactctgacataggaatttacttcttttccttgagtggaaaacactttagaaagtaataacaaacattattataaactaatatatgtgagagtacttagttgaaacaaaaaggaattttagtagacagtattatattatctttgaaaatcaaggagaagtttatgcaactgaaaatgtttacacactgtgctgcaatctactgtttgtgaatgtcatgtattatcaggaaacatgtctatacgatcgcagagttgtatttcctcacaaacttctttacgaagagtgaaatacgtttttgtacctctcagtttcagtcagggacatattttgtgcaatatttctgtgattgtgcctatgcgtgatgaatgaatgcatttcaatcatacattgcctaaatcataacttgatgatgcttgggaaagaatcaacagttaaaacttcatgaagttctaatgtctgtgttccaaaacacatcacattattaggttgtagggagatatgtatgtgtgctccctggggtggggagttttctagttactagaccatctccatttttagcacttggcagcctcatgatccttttataaataggagattaacaggagagcagcaatacgattttgccaatggaataacagatttgccggcattcactgaaagagggcagatattgggtccttgtgacttcaactgactcttccgaattgtatgaatttatcaatgtattagataaacccagtttcagaataataaagaaaaaatattagaccaaataangcggctagttaacagtgggtacgatttctagcccgtgggtttaaaatgcacttaaagtcctgtcc

SEQ ID NO: 701037 - DNA, 1790 bp, Homo sapiens
  misc_feature (683)..(683): n is a, c, g, or t
  misc_feature (687)..(687): n is a, c, g, or t
  misc_feature (1410)..(1410): n is a, c, g, or t
  misc_feature (1485)..(1485): n is a, c, g, or t
  misc_feature (1504)..(1504): n is a, c, g, or t
  misc_feature (1508)..(1508): n is a, c, g, or t
  misc_feature (1518)..(1518): n is a, c, g, or t
  misc_feature (1551)..(1551): n is a, c, g, or t
  misc_feature (1605)..(1605): n is a, c, g, or t
ggttgatcgaatcctaatcacagagagctcttcattagctcaatatgttgtttgccctctggaaacagcctttcctccattttctgtgtattggtgatgggagtgataaccttttgggggagctttctaaatctcacagaagaggaaagtggcctgctctggcaggtatgtgcaggatacagtgtgtttcatctgttccggtgccaagaatgagcagtgtactgtggcagttccctttggatttgtatgtgctctgggctcatgaagatattgcatcgtgagctgcagcagttgcactctttttcaatgacctaaaaagggcttatttccgaggaatgaaaggctgccatcgttggctgtggatgtggaaaacctttcctagcttagagcatttgtatctacaatacattttaaagtcagagttcgtgttccctgttttaatcacatgactacctgtcccagtacacgaaagggcgctggttggcattcttcttaatgtatttagtaaagatcataagaaatcctttaagagtttaaatgtctctgaaacaggcatacaggctctagtcaagaatgaattagagtgaaggaaagctgtgtgacacctggcattcctctctgttcatggagcttctttgaggcttgaagattgattttaccatctagacctctctggctaatanctantcttcaaccggttactctgacataggaatttacttcttttccttgaatggagaacactttaaaaataataacaaacattattataaactaatatatgtgagagtacttagttgaaacaaaaaggagttttagtagacagtattatactacatttgaaaatcaaggagcagtttatgcaacgtaaaacgtttacaaactgcagcacaatctactgttcgtgaatgtcaaagtgtcatgaggaaagtgtctatacaatcacagagttatatttcctcacaaagttctttacgaagagtgaaatatgtttttatacctctcagtttcagttagaggcatattttgtgtaatatttatggcttaaaatggactaaaggtcctgttcttgccttgtctgaacttgccgcttttgcattctttgagttcagtttaaagacagttactttaagcccattttaaaccctcaggctagaaatcgtaccactgttaattagccacattatttggtctaacagtttttgtttatcattctgaaactgagcttacctaatacattgataaattatttcaaaggtatttttatagttcaaatcgcttcacttttaccctgacacgtataaatgactaggaatgaccttcagatagcgtttagcaactgtaaccaatctgacaataatgtgttcatcaggtacctgtggattaaatcacatactggcatatttaagntgaatgtcagtctgaaaaataaatgtactatattaattcaaataccactctttgtgtaggtattttgtcatatanttaagaaaaattaaatagnatgnaaatcatatnacaataacttaagtctttcttcaaagtgcatgnggtcctttgcaatacctcattcagccaagtatttgttctcttcctcattcagtntaaggcagctttcaatttgcttagaaggcaacattagaagggtagagtttaatcagaaacatagaattttaaagtgtgtgttcaactgaataaatttgaatttctgtaggaagaattaaaaacctatttaaagattgcaatatataatcatttttaaagtatttgattaaacctgataggctttc

SEQ ID NO: 701038 - DNA, 2355 bp, Homo sapiens
  misc_feature (38)..(41): n is a, c, g, or t
  misc_feature (44)..(44): n is a, c, g, or t
  misc_feature (48)..(48): n is a, c, g, or t
  misc_feature (52)..(52): n is a, c, g, or t
  misc_feature (71)..(71): n is a, c, g, or t
  misc_feature (73)..(73): n is a, c, g, or t
  misc_feature (156)..(156): n is a, c, g, or t
  misc_feature (279)..(279): n is a, c, g, or t
  misc_feature (304)..(304): n is a, c, g, or t
  misc_feature (1250)..(1250): n is a, c, g, or t
  misc_feature (1254)..(1254): n is a, c, g, or t
  misc_feature (1441)..(1441): n is a, c, g, or t
  misc_feature (1444)..(1444): n is a, c, g, or t
  misc_feature (1448)..(1448): n is a, c, g, or t
  misc_feature (1456)..(1457): n is a, c, g, or t
  misc_feature (1975)..(1975): n is a, c, g, or t
  misc_feature (2050)..(2050): n is a, c, g, or t
  misc_feature (2069)..(2069): n is a, c, g, or t
  misc_feature (2073)..(2073): n is a, c, g, or t
  misc_feature (2083)..(2083): n is a, c, g, or t
  misc_feature (2116)..(2116): n is a, c, g, or t
  misc_feature (2170)..(2170): n is a, c, g, or t
ttgccataaaaactcctttgatgtttctcacgaagagnnnngcntccngccnagaagaaggagataaacancnccatcatcaaacagctgctcaagaaatttttaaataagaaaccaagttatggggttaatctcctacacaattcatttacttcntttgaatgttagagctcactcatgattatttgtgtttctaatttatagtttaagtttatttgtaaaaagttaaaagagagtgggtctctgtggctctcactgatgttcactctggcatccttnagcatttttcttttttcatttcatnattgtaggtcattagcatgcatatcgagtttgcccttacgtggtgggagttcaaacacacaaagacccactctttgcacaaaactgttctcgctggtttggaataggctcccgtgcttttttaatgttattgcagcatggatgtccattacagaattcagataaaatttgctaatgttctgctatgatgtttgatctcatcttaatcacagtgagctcttctatagctcaatatgcggtttgccctcaagtgtgcactgtttattactttgtaatatgccactgtgagtactgacatttagagctgtttaaaggccaagaactggaaacagcctttcctccattttctgtgtattggtgatgggagtgataaccttttgggggagctttctaaatctcacagaagaggaaagtggcctgctctggcaggtatgtgcaggatacagtgtgtttcatctgttccggtgccaagaatgagcagtgtactgtggcagttccctttggatttgtatgtgctctgggctcatgaagatattgcatcgtgagctgcagcagttgcactctttttcaatgacctaaaaagggcttatttccgaggaatgaaaggctgccatcgttggctgtggatgtggaaaacctttcctagcttagagcatttgtatctacaatacattttaaagtcagagttcgtgttccctgttttaatcacatgactacctgtcccagtacacgaaagggcgctggttggcattcttcttaatgtatttagtaaagatcataagaaatcctttaagagtttaaatgtctctgaaacaggcatacaggctctagtcaagaatgaattagagtgaaggaaagctgtgtgacacctggcattcctctctgttcatggagcttctttgaggcttgaagattgattttaccatctagacctctctggctaatanctantcttcaaccggttactctgacataggaatttacttcttttccttgaatggagaacactttaaaaataataacaaacattattataaactaatatatgtgagagtacttagttgaaacaaaaaggagttttagtagacagtattatactacatttgaaaatcaaggagcagtttatgcaacgtaaaangtntacnactgcagnncatctactgttcgtgaatgtcaaagtgtcatgaggaaagtgtctatacaatcacagagttatatttcctcacaaagttctttacgaagagtgaaatatgtttttatacctctcagtttcagttagaggcatattttgtgtaatatttatggcttaaaatggactaaaggtcctgttcttgccttgtctgaacttgccgcttttgcattctttgagttcagtttaaagacagttactttaagcccattttaaaccctcaggctagaaatcgtaccactgttaattagccacattatttggtctaacagtttttgtttatcattctgaaactgagcttacctaatacattgataaattatttcaaaggtatttttatagttcaaatcgcttcacttttaccctgacacgtataaatgactaggaatgaccttcagatagcgtttagcaactgtaaccaatctgacaataatgtgttcatcaggtacctgtggattaaatcacatactggcatatttaagntgaatgtcagtctgaaaaataaatgtactatattaattcaaataccactctttgtgtaggtattttgtcatatanttaagaaaaattaaatagnatgnaaatcatatnacaataacttaagtctttcttcaaagtgcatgnggtcctttgcaatacctcattcagccaagtatttgttctcttcctcattcagtntaaggcagctttcaatttgcttagaaggcaacattagaagggtagagtttaatcagaaacatagaattttaaagtgtgtgttcaactgaataaatttgaatttctgtaggaagaattaaaaacctatttaaagattgcaatatataatcatttttaaagtatttgattaaacctgataggctttc

SEQ ID NO: 701039 - DNA, 1730 bp, Homo sapiens
  misc_feature (38)..(41): n is a, c, g, or t
  misc_feature (44)..(44): n is a, c, g, or t
  misc_feature (48)..(48): n is a, c, g, or t
  misc_feature (52)..(52): n is a, c, g, or t
  misc_feature (71)..(71): n is a, c, g, or t
  misc_feature (73)..(73): n is a, c, g, or t
  misc_feature (156)..(156): n is a, c, g, or t
  misc_feature (279)..(279): n is a, c, g, or t
  misc_feature (304)..(304): n is a, c, g, or t
  misc_feature (1250)..(1250): n is a, c, g, or t
  misc_feature (1254)..(1254): n is a, c, g, or t
ttgccataaaaactcctttgatgtttctcacgaagagnnnngcntccngccnagaagaaggagataaacancnccatcatcaaacagctgctcaagaaatttttaaataagaaaccaagttatggggttaatctcctacacaattcatttacttcntttgaatgttagagctcactcatgattatttgtgtttctaatttatagtttaagtttatttgtaaaaagttaaaagagagtgggtctctgtggctctcactgatgttcactctggcatccttnagcatttttcttttttcatttcatnattgtaggtcattagcatgcatatcgagtttgcccttacgtggtgggagttcaaacacacaaagacccactctttgcacaaaactgttctcgctggtttggaataggctcccgtgcttttttaatgttattgcagcatggatgtccattacagaattcagataaaatttgctaatgttctgctatgatgtttgatctcatcttaatcacagtgagctcttctatagctcaatatgcggtttgccctcaagtgtgcactgtttattactttgtaatatgccactgtgagtactgacatttagagctgtttaaaggccaagaactggaaacagcctttcctccattttctgtgtattggtgatgggagtgataaccttttgggggagctttctaaatctcacagaagaggaaagtggcctgctctggcaggtatgtgcaggatacagtgtgtttcatctgttccggtgccaagaatgagcagtgtactgtggcagttccctttggatttgtatgtgctctgggctcatgaagatattgcatcgtgagctgcagcagttgcactctttttcaatgacctaaaaagggcttatttccgaggaatgaaaggctgccatcgttggctgtggatgtggaaaacctttcctagcttagagcatttgtatctacaatacattttaaagtcagagttcgtgttccctgttttaatcacatgactacctgtcccagtacacgaaagggcgctggttggcattcttcttaatgtatttagtaaagatcataagaaatcctttaagagtttaaatgtctctgaaacaggcatacaggctctagtcaagaatgaattagagtgaaggaaagctgtgtgacacctggcattcctctctgttcatggagcttctttgaggcttgaagattgattttaccatctagacctctctggctaatanctantcttcaaccggttactctgacataggaatttacttcttttccttgaatggagaacactttaaaaataataacaaacattattataaactaatatatgtgagagtacttagttgaaacaaaaaggagttttagtagacagtattatactacatttgaaaatcaaggagcagtttatgcaacgttgtttacaaactgcagcgcaatctactgtttgtgactgtcaaagtgtcatgaggaaagtgtctatacaatcacagagttatatttcctcacaaagttctttacgaagagtgaaatatgtttttatacctctcagtttcagttagaggcatattttgtgtaatatttatggcttctttgagttcagtttaaagacacttactttaactccattttaaaccctcgggctagtcgtaccactgttaattagccacgttatttggtctcagtttttgtttatcattctgctgagcttt

SEQ ID NO: 701040 - DNA, 237 bp, Homo sapiens
caatgatgtgagccatccaacttagtgtgtcatgagtagtgtggcctgcagtaaatgtatacgcaggttatgtgcgtacgacacaggactatcggttgaatgattagctgatggtttcgataataactagtatggggataatgggtgtagcgtgttgccttgtgcgtagaggaagtgggctagggcattttgaatcttagagcgaaagcctataatcactgcgcccgctcataaggg

SEQ ID NO: 701041 - DNA, 395 bp, Homo sapiens
aaaacttcacaaaaaggctttatttctctttaagaaggaaaaaaagtcctataactctagaagaagtaacacacataaaaaagcattgggatatatccagcaacaaaagatgagacaggaaacgcaaaccaaaagaagtatctccagtgacagccacacaaagcagtgaacaggagagcaacaataccaaaggtgtgaaccagacattaagaacactttgaacaaaagcatgcaatctaaaaacaggtgaattaaaaacatgcacacagaatacaggtcaataaataacgagctctctctctctctctctctctctctctctctctctctctctctctctctctctctctctatctctctctcctcgtgcagaatcctgcagcccgggggatcca

SEQ ID NO: 701042 - DNA, 2359 bp, Homo sapiens
  misc_feature (38)..(41): n is a, c, g, or t
  misc_feature (44)..(44): n is a, c, g, or t
  misc_feature (48)..(48): n is a, c, g, or t
  misc_feature (52)..(52): n is a, c, g, or t
  misc_feature (71)..(71): n is a, c, g, or t
  misc_feature (73)..(73): n is a, c, g, or t
  misc_feature (156)..(156): n is a, c, g, or t
  misc_feature (279)..(279): n is a, c, g, or t
  misc_feature (304)..(304): n is a, c, g, or t
  misc_feature (1979)..(1979): n is a, c, g, or t
  misc_feature (2054)..(2054): n is a, c, g, or t
  misc_feature (2073)..(2073): n is a, c, g, or t
  misc_feature (2077)..(2077): n is a, c, g, or t
  misc_feature (2087)..(2087): n is a, c, g, or t
  misc_feature (2120)..(2120): n is a, c, g, or t
  misc_feature (2174)..(2174): n is a, c, g, or t
ttgccataaaaactcctttgatgtttctcacgaagagnnnngcntccngccnagaagaaggagataaacancnccatcatcaaacagctgctcaagaaatttttaaataagaaaccaagttatggggttaatctcctacacaattcatttacttcntttgaatgttagagctcactcatgattatttgtgtttctaatttatagtttaagtttatttgtaaaaagttaaaagagagtgggtctctgtggctctcactgatgttcactctggcatccttnagcatttttcttttttcatttcatnattgtaggtcattagcatgcatatcgagtttgcccttacgtggtgggagttcaaacacacaaagacccactctttgcacaaaactgttctcgctggtttggaataggctcccgtgcttttttaatgttattgcagcatggatgtccattacagaattcagataaaatttgctaatgttctgctatgatgtttgatctcatcttaatcacagtgagctcttctatagctcaatatgcggtttgccctcaagtgtgcactgtttattactttgtaatatgccactgtgagtactgacatttagagctgtttaaaggccaagaactggaaacagcctttcctccattttctgtgtattggtgatgggagtgataaccttttgggggagctttctaaatctcacagaagaggaaagtggcctgctctggcaggtatgtgcaggatacagtgtgtttcatctgttccggtgccaagaatgagcagtgtactgtggcagttccctttggatttgtatgtgctctgggctcatgaagatattgcatcgtgagctgcagcagttgcactctttttcaatgacctaaaaagggcttatttccgaggaatgaaaggctgccatcgttggctgtggatgtggaaaacctttcctagcttagagcatttgtatctacaatacattttaaagtcagagttcgtgttccctgttttaatcacatgactacctgtcccagtacacgaaagggcgctggttggcattcttcttaatgtatttagtaaagatcataagaaatcctttaagagtttaaatgtctctgaaacaggcatacaggctctagtcaagaatgaattagagtgaaggaaagctgtgtgacacctggcattcctctctgttcatggagcttctttgaggcttgaagtttgattttactatctagacctctctggctaatacctattcttcaaccacctcggttactctgacataggaatttacttcttttccttgagtggaaaacactttagaaagtaataacaaacattattataaactaatatatgtgagagtacttagttgaaacaaaaaggagttttagtagacagtattatactacatttgaaaatcaaggagcagtttatgcaacgttgtttacaaactgcagcgcaatctactgtttgtgactgtcaaagtgtcatgaggaaagtgtctatacaatcacagagttatatttcctcacaaagttctttacgaagagtgaaatatgtttttatacctctcagtttcagttagaggcatattttgtgtaatatttatggcttaaaatggactaaaggtcctgttcttgccttgtctgaacttgccgcttttgcattctttgagttcagtttaaagacagttactttaagcccattttaaaccctcaggctagaaatcgtaccactgttaattagccacattatttggtctaacagtttttgtttatcattctgaaactgagcttacctaatacattgataaattatttcaaaggtatttttatagttcaaatcgcttcacttttaccctgacacgtataaatgactaggaatgaccttcagatagcgtttagcaactgtaaccaatctgacaataatgtgttcatcaggtacctgtggattaaatcacatactggcatatttaagntgaatgtcagtctgaaaaataaatgtactatattaattcaaataccactctttgtgtaggtattttgtcatatanttaagaaaaattaaatagnatgnaaatcatatnacaataacttaagtctttcttcaaagtgcatgnggtcctttgcaatacctcattcagccaagtatttgttctcttcctcattcagtntaaggcagctttcaatttgcttagaaggcaacattagaagggtagagtttaatcagaaacatagaattttaaagtgtgtgttcaactgaataaatttgaatttctgtaggaagaattaaaaacctatttaaagattgcaatatataatcatttttaaagtatttgattaaacctgataggctttc

SEQ ID NO: 701043 - DNA, 115 bp, Homo sapiens
aattttctcctgggtaattgtttgtctagtatatatctctcaatccatttactttcaaccgttgtgttcttacaattagggatagcctctatataatagcatatagctggccctt

SEQ ID NO: 701044 - DNA, 1208 bp, Homo sapiens
  misc_feature (101)..(101): n is a, c, g, or t
  misc_feature (105)..(105): n is a, c, g, or t
  misc_feature (828)..(828): n is a, c, g, or t
  misc_feature (903)..(903): n is a, c, g, or t
  misc_feature (922)..(922): n is a, c, g, or t
  misc_feature (926)..(926): n is a, c, g, or t
  misc_feature (936)..(936): n is a, c, g, or t
  misc_feature (969)..(969): n is a, c, g, or t
  misc_feature (1023)..(1023): n is a, c, g, or t
tacgacgtgactgggaaagccgggcgtggcatctctgtgtacatggagcttatttgaggctagaagattgattttaccatctagacctctctggctaatanctantcttcaaccggttactctgacataggaatttacttcttttccttgaatggagaacactttaaaaataataacaaacattattataaactaatatatgtgagagtacttagttgaaacaaaaaggagttttagtagacagtattatactacatttgaaaatcaaggagcagtttatgcaacgtaaaacgtttacaaactgcagcacaatctactgttcgtgaatgtcaaagtgtcatgaggaaagtgtctatacaatcacagagttatatttcctcacaaagttctttacgaagagtgaaatatgtttttatacctctcagtttcagttagaggcatattttgtgtaatatttatggcttaaaatggactaaaggtcctgttcttgccttgtctgaacttgccgcttttgcattctttgagttcagtttaaagacagttactttaagcccattttaaaccctcaggctagaaatcgtaccactgttaattagccacattatttggtctaacagtttttgtttatcattctgaaactgagcttacctaatacattgataaattatttcaaaggtatttttatagttcaaatcgcttcacttttaccctgacacgtataaatgactaggaatgaccttcagatagcgtttagcaactgtaaccaatctgacaataatgtgttcatcaggtacctgtggattaaatcacatactggcatatttaagntgaatgtcagtctgaaaaataaatgtactatattaattcaaataccactctttgtgtaggtattttgtcatatanttaagaaaaattaaatagnatgnaaatcatatnacaataacttaagtctttcttcaaagtgcatgnggtcctttgcaatacctcattcagccaagtatttgttctcttcctcattcagtntaaggcagctttcaatttgcttagaaggcaacattagaagggtagagtttaatcagaaacatagaattttaaagtgtgtgttcaactgaataaatttgaatttctgtaggaagaattaaaaacctatttaaagattgcaatatataatcatttttaaagtatttgattaaacctgataggctttc

SEQ ID NO: 701045 - DNA, 541 bp, Homo sapiens
  misc_feature (310)..(310): n is a, c, g, or t
  misc_feature (401)..(401): n is a, c, g, or t
  misc_feature (438)..(439): n is a, c, g, or t
  misc_feature (523)..(523): n is a, c, g, or t
  misc_feature (539)..(539): n is a, c, g, or t
aattcgcggccgcgtcgacacgacagaaggggtcagtgaaaagctctgggagtcggaggacggataggcaatcctgttcagagaggggagggccgggtgcggtggctcacgcctgtaatcccagcactttgtaaggccgaggcaggcggatcacttgaggtcaggagttcgtggccaacgtggtgaaaccccgtctctactaaaaatacaaaaattagcggggcgtggtggcgggcacctggaatcccagctacacggtaggctgaggcaggagaatcattgaatcggagtggaagctacatgatggaantgcgccactgcactccagaccgaaaaaaacaaaaacatgaccggtggggtggctctgctgtaaacccagcacttgggaagccgagcgggtngatcactgagtcaggattcgagaccagctggccaacnngtgaaccccgtctgtactaaaaatacaattagctgggtatgttgcagtgctgtatcccagtactctggagctgagggtcgcttnacctggagtggagttnct

SEQ ID NO: 701046 - DNA, 578 bp, Homo sapiens
  misc_feature (513)..(513): n is a, c, g, or t
ccgcgcctggtgttgcccgactctagcaggctcgcctcttcatgttgtgtccgggacactcctttgtgcaatatttctgtgattgtgcctatgcgtgatgaatgaatgcatttcaatcatacattgcctaaatcataacttgatgatgcttgggaaagaatcaacagttaaaacttcatgaagttctaatgtctgtgttccaaaacacatcacattattaggttgtagggagatatgtatgtgtgctccctggggtggggagttttctagttactagaccatctccatttttagcacttggcagcctcatgatccttttataaataggagattaacaggagagcagcaatacgattttgccaatggaataacagatttgccggcattcactgaaagagggcagatattgggtccttgtgacttcaactgactcttccgaattgtatgaatttatcaatgtattagataaacccagtttcagaataataaagaaaaaatattagaccaaataangcggctagttaacagtgggtacgatttctagcccgtgggtttaaaatgcacttaaagtcctgtcc

SEQ ID NO: 701047 - DNA, 397 bp, Homo sapiens
ctgcatgtcgacgccatagtatcccccctctaaaccagttcatgcatgttacccatgacatcgtgtgctgtgaggggtatctcccttcctttaaagccgtgcgtcatctcttcatgaacaccggatgtttctaagtcaattcattcattcattttttgcagaccttctattagcctcacattgtgccggtgggaactcagaagggaactgttgattacatcgtccttgccttggaaaccctcctggtgaaggagacagacatataaaagtgtaatagttggaagatgtgatgctacatgctcattgaggctatgatgaagcatgagagagctcactgaccttgacttgtctttacatagtctttccctttagagcccttggatatgccacacagagg

SEQ ID NO: 701048 - DNA, 117 bp, Homo sapiens
tcaggagaggagagtggaggagtgagaagcgagggatgtgtgagcaggggcatggagccaggagaacgagcctccgccagagtctggagcctggagcagtgtgcaaggctgggcagc

SEQ ID NO: 701049 - DNA, 260 bp, Homo sapiens
ctgtttaatctagctctggggtcacaatgacacccacgccacattcccgctcgaattccacagtgtacgataggggtccaaggggtagactaccgcacgatactcaagcggcagtcgctatagcttgggctcagtgtaggatctatctatactaggctatagtagcttaacaagggaaaggacgagacgcacgggtaatccctagagtacgggcaggctaatcgaagcgcgttagggtgacccgagtctttgaatatcgt

SEQ ID NO: 701050 - DNA, 773 bp, Homo sapiens
  misc_feature (238)..(238): n is a, c, g, or t
  misc_feature (343)..(343): n is a, c, g, or t
  misc_feature (353)..(353): n is a, c, g, or t
atagccaaggttcttggggcccaccagccaaggataattcttctaaaaggccaataatttaccttccccaagacatatttttagttaataaggttatccattgttaaaacaagttagggcagtaatgatgtttaatatgtactgcatccattatgggctggtgcatttgctaatgtattgaatcaaagaattggtaatcatgaatattgttatagaccattaaaatgggccactgcangtggctcatgcctgtaatacatggggaggctgaggcaggagacagtttgaggccaggaggttgagactagcctggacaacataaggagatgcctgtctctacaanaacataaaantaaattagctggtatcaagcagagttccatggaaatattaaaatttttttaaaaaataaaaataggctgggtgtggtggttcatgcctgtaatcctagcactttgggaggccaaggtgggcggatcacctgaggtcaggtgttcgagaccagcctccccaatatggtgaaaccccgtctctactaaaaaacaaacaaacaaaaacaaaaacaaaaaattagccagatgtggtggtgtgcacctgtaatcccagctactcaggaggctgaggtaggagaattgcttgaacctgggaggcagaggttgcagtgagcaagattgcaccactgcactccagcctgtgtgacacagcaagatcctacccccccaaaaaaagttccacccaattccagagaatgttctagatcgcgagcggccgct

SEQ ID NO: 701051 - DNA, 425 bp, Homo sapiens
  misc_feature (6)..(6): n is a, c, g, or t
  misc_feature (76)..(76): n is a, c, g, or t
  misc_feature (124)..(124): n is a, c, g, or t
atcccnatttccgagtagaaaggtggtttaacctgaagggtaagagaaagattatggcccctaaatgatttttttntcctcctaatggtattagggcaaaatccctcaatgatggatacctgcncctcaaagaatataaaattgatgagaaaaactttgtggtggttatggtgacccaaagtaagtttcaacctcattctgtatatctttatgcatgtaggtctttttaaaaatgatgatcacaagtccacacaatggacacagtttatacacatccatagtggtgtacacttaactactatgaaaggtttttaagaatttaccttaagtgaaacataaagttattaatgttttacattaattacacattaaactataatatagttttaataaaattttatgtaaattaaaacaaaagaaaaaaa

SEQ ID NO: 701052 - DNA, 148 bp, Homo sapiens
gtgacgagggcaagatccagtttcatgcccttactcacacttgtgtaggtgctccataaatgtatgtcatgtaaacaaatgaattaagtatggctcgtggtctacaagagccccaagatctttttctccccgagacagatcttcagct

SEQ ID NO: 701053 - DNA, 546 bp, Homo sapiens
gtgatctagaggatcccgaagggtgatgcggttgggcatggggctcacacctgtaatcctagcatatttgggagggtgaggcagaaagattgtttgagcccaggagttcaaggttgcagtgagctgtaattgcaagactgcactccagcctgggtgacagagtgggaccttgtctcaaaaaaaaaaaaaaaaaaaaaaaaagaaaaaaagggggtgtaatgggcggcctgggtagtggaagaacatgagagggaggtattggaccgggtatcgggggatgagtagaatctacttacggaatggcggggcataagaggttggggtcaacaacagacggcatacttgagggtggtcccatgagattataatagcatattttaacggtacccttttctatggttaagatttgtgagagatacacaaaatttaccatttcggtggcggtggtctacggtatccaggacggtaatatggtggacgggttggtagcctaggatcaatagattcaacggaatagccggagggtatggtaggctataccatcca

SEQ ID NO: 701054 - DNA, 157 bp, Homo sapiens
ttttaaaaggacaaaggcatctgccacaaatatcatacagagtactaataacaggccggaaaacaaagtagctaaagcaaaaacagtatataaaccccacactgacaatccaatgtaaccaataaaataagttaataggcaagtcctgatccacata

SEQ ID NO: 701055 - DNA, 238 bp, Homo sapiens
atctacccagcgactaacatacaaagccagaagcaacaggatttgactggcactctattagacagagaaaatcgtgaagaaagaacctatccgtaactggctgcactctcatgagagtcaatcctcacgataaaccatctctatgctgaactgcaagatgccctggtactcttacagttatatgaacgaattaaagttcctgtagactggagtaaggataataaacctccatacccga

SEQ ID NO: 701056 - DNA, 248 bp, Homo sapiens
tgacacatcgtgcactgcactccagcctggtgacagcctgagagtgatttaaaaacaaaaaaaaaaagtgagtggggcctataaataattatgtcaggaaatgagttaacgtaaaagtatttggatttccccagtttgtaagtcccctagtgtaaaatctagtagcccaggatggtcctggttaaaagacccctccaattctctgagtggcaggtgccggcaatcaactccaatctagcagtgacatc

SEQ ID NO: 701057 - DNA, 368 bp, Homo sapiens
aggcaactttgcaatatagaatagatcgtggtgtacaccacacacatatattacaggggcacataacatgctggtcatattcatgtaactcataattccaatttgcaacatttatactaacgttgttctgctcttaatattccttgagctgccagattaaaactcagagttcattgcaagcacatacagcaggactttatttattaagaaatctctggatacctcttacatgcccagaactctcactgtaaattggaaacacaaattaggccacaatctctgatgtgttgtgaacctttaaggaaaattagaaaattcttacgcacaaagcgttctatatgaaaagtgtccgtgtaagcccgtcgggg

SEQ ID NO: 701058 - DNA, 281 bp, Homo sapiens
tctttggttcttacagtgaaccacctactctttcagttttctggcccaggagtggggtaaatcctttacttagtgcatttgaacttgatacctgtgcattcagttctgtgaatactgcccttattatggccggggtattcctacatctaccccagccttgaacttgcttcaactacttaacacccagaatatagtgtcagccgacaagtgaggtttcaaagataagtccctgtccagtattctgtagggtgaccccttcagcattaaggacagtacttcca

SEQ ID NO: 701059 - DNA, 318 bp, Homo sapiens
tcttcacatgtgtagggtttctctccactataaatgatctgatgtatagtaaggttcgaagaccacttaaaaatttcgccacaatctttacatttgtagggttagtctcccgtatgaactatgtaatgttgagttcggcctgagggatagtaaaaagctttgccacattcttcacatttatagggttactctacaagtatgaaatcttttatgttctatcagtcttgaggatttgctaaaggctttgccacattcatcacatttatagggtatctcgtcccaaatgaattatcttctgtatagtccggtttgaagacg

SEQ ID NO: 701060 - DNA, 201 bp, Homo sapiens
ccattgacataagcacggtgcggacagcaggagtagctgcagcggctgcagctgcaggtcgtggacccattgtctgtgttgatgtgttagcaacacgctgtgttgacatgactcgtggaacctgtgatataagctggtctcatagtactacactggtggtctaggagcagctgggcggatcgcaccgtgccttatctcaat

SEQ ID NO: 701061 - DNA, 155 bp, Homo sapiens
gcctctacaagatccccctcttatagtgaaggccgtagcacgaacaggttgaacagtctaccctccctaagatagaggagacacctgctaggtgtaaggagaacatggttaggtaagagtcacaagcttatgttgtttatgcggggaaacgccat

SEQ ID NO: 701062 - DNA, 1014 bp, Homo sapiens
  misc_feature (721)..(721): n is a, c, g, or t
tgtatttttggtagagtagggctttattcccaggaaacagggtgtagcgggagaggggtgtttttaaaaaacatcagggtagatctaatatgtccaacaaagggggggggcctcagccagaggcgaaggggaaagattctctagtattggctggtcatctgggggcacccagaattccacagggtggaaagggggcccaggagtacggccctatagcaaagtggtccggtctcgtgcatcataagaggctaactcatgggctcctccgtgctaaagtttcgcgcagcacaaagctgcttcctcgggaccccgatcttgaaaggaggctcgtgtaaatctcgtgcagtctaaagtgtggacagcaaggccatatattacgggaaaggggttaccggttatcactcccggggtcatttaaattcgtggtcacacattagagtctcacataagtgtgaacggtccactctttcgtgggccgggtcaaatttcacttaagaaagtgtgagtgaggtgagttttgttgggacaacgtgccgtgttcgtcactgtgaaaggccctccaaacagagggggctacctcaccaagcctctcacacaagtgagaggcggtggtcaagaaacaggggactaaaacgggagatccagtgaatccagggggggcacccctccacgcctatggcggtgactcgagaacaccggtcacacaaagggtgctcaaagncgagtggtggtcgcccccctatataccccgagggtgttgccctacaaaggagacccaccaagatgggtggaccccaaggctaaggtggggcaactctactcaaggaaacaccaagaaatcgggggacaggaagtggggaaggcccaatcaccttatgggggcgggaaagggctcacctgtcggaacaaagtggcggcggacaattgaggcagagggaaaacccccaccctcctgtggaaaggaaggccctatgaaagcgggacatttggaagagagaacacggggggaaacgg

SEQ ID NO: 701063 - DNA, 265 bp, Homo sapiens
  misc_feature (55)..(55): n is a, c, g, or t
cccttggagagctaaggtcgggcggtgatgtgagggtgatggtagatgtggcggngttaggggcctttggtgagagttatggcgtcagcgaaggctgtagtagcccgtaggggctacacgttggggctttgcgtagttgtatatagcctagaaattttcgttcggtaagcattaggaatgccattgcgaattagaagtgggttaccatgaggagtaggaggttggccatgggtatttttgttaagaaggaggaatttgaacctct

SEQ ID NO: 701064 - DNA, 793 bp, Homo sapiens
gtcctcagctgctcacttgcacagaaactccatctatgactcgtgatgctttatactagaagacccatctagacttcaatcatctttagaagtccatccattctgggagagacctggcgttgctgttgcctcctgtggccgtgtgtatctgtcaagttctgtgtcccaggccgttctattcaggcggttgcaacacggtgtgtggactttgttgacattggggttggcttgttcttccgggaacttgcttcctttccctggctggtgctgtcaggaaggaccatctgaaggctgcgaatttgttcttagggaggcaggtgctggcctggcctgggatcttccaccatgttcctgtttgctgccttttgatagcctgattgtcacaccttctgggcatctccctgactgtcctcttcaccctccttctcgttttcactcatagtgccagccattttggagtctccttgtggtatccgtaaactctacatgaaatagtctgttagaaatctttgcgtgggctagcttgagaatggggcgaggagccgaggagaagaacaccagctttacaagccctacatccaaggtgaatctacttgcaaaggatcccacttcactagaagcacgagatcaacagagaattcgtcgaaagtggtagtagtaagggctctgtacgagctgtcccagaagttcgagcttctctggacatttttctaacttttggcggacaggaatggggaccattatggctgatgcggtgacaagggagagtccccaccggaagaactggggcctg

SEQ ID NO: 701065 - DNA, 572 bp, Homo sapiens
  misc_feature (2)..(2): n is a, c, g, or t
  misc_feature (85)..(85): n is a, c, g, or t
  misc_feature (102)..(102): n is a, c, g, or t
  misc_feature (107)..(107): n is a, c, g, or t
  misc_feature (127)..(128): n is a, c, g, or t
  misc_feature (131)..(131): n is a, c, g, or t
  misc_feature (133)..(133): n is a, c, g, or t
  misc_feature (141)..(141): n is a, c, g, or t
  misc_feature (150)..(150): n is a, c, g, or t
  misc_feature (160)..(161): n is a, c, g, or t
  misc_feature (172)..(172): n is a, c, g, or t
  misc_feature (186)..(186): n is a, c, g, or t
  misc_feature (188)..(188): n is a, c, g, or t
  misc_feature (194)..(194): n is a, c, g, or t
  misc_feature (198)..(198): n is a, c, g, or t
  misc_feature (209)..(209): n is a, c, g, or t
  misc_feature (243)..(243): n is a, c, g, or t
  misc_feature (252)..(252): n is a, c, g, or t
  misc_feature (265)..(265): n is a, c, g, or t
  misc_feature (275)..(275): n is a, c, g, or t
  misc_feature (283)..(283): n is a, c, g, or t
  misc_feature (299)..(299): n is a, c, g, or t
  misc_feature (310)..(311): n is a, c, g, or t
  misc_feature (318)..(318): n is a, c, g, or t
  misc_feature (323)..(323): n is a, c, g, or t
  misc_feature (347)..(347): n is a, c, g, or t
  misc_feature (366)..(366): n is a, c, g, or t
  misc_feature (398)..(398): n is a, c, g, or t
  misc_feature (414)..(414): n is a, c, g, or t
anggcaaaaaagccacaggcaggcccagaggggcgggtggacggcactgcaggggatggtttcatgccttcttgaggttatatgntttcatccagataaaantcgtnatggtcgtcttcggtgggtnnttnangtggtggntccgggcangcggaatggnntcatcaactcnaataatgtatatangnagaaanttgnacatcatttgnatacataagtcacacatggtctctttcccagaanaagaagagnacggtggtggagnggtttgtgcnctaccaanagcccgtgccttactnatacttcatgnnaattaanttttnataataggggcaaatacataaaanccaaatgccaaagttggtnggagagcccccgagtttgggtttctgcgaganaagcttgaaggggcanaggcggtagacgtattcgttggtggtgagctcgtagcactggctgtacaggtaagcaaactccccgttggggccaaagtcaaaagaaatctcttgctccaggttcctgatggactcctccatgtccttcagcgaccgctcggcctcctcgaacttgtt

SEQ ID NO: 701066 - DNA, 197 bp, Homo sapiens
gtatcactgcttattctgcacaatcttctacgctttgccagtaagaaggtcatgaggtaactttattcccaagatctcgggaatagtccacagtgaacacgacacatagctgggcattgattccattttacacaagttgataggtgatgttcttatgttttgtttttatcttcatctcctgattcccaaaaggtttc

SEQ ID NO: 701067 - DNA, 800 bp, Homo sapiens
  misc_feature (298)..(298): n is a, c, g, or t
  misc_feature (669)..(669): n is a, c, g, or t
cacagtggatcatgcctgtagtgccagcactttgggaggccaaggcaggcagatcacaaggtcaggagttccagaccagcctgtccaataaggtgaaaccccgtctctactaaaaaatacaaaaattagccaggcgtggtggcgtgcgcctgtagtcccaactactcgggaggctgaggcagaggttgcagtcaggtgaggttgcaccattgcacttcagcctgggtgacacagtgagactccgtctcaagaaaaaacaaaacaacaacaacaaaaagcagatgcttaaagatagacngtagattggtggttaccagagacctgttagggttgggggagggaggatgaaaagagtttgattaatggatataaatatacaattcaacagaataaataagacctatggtttatagatcagtagggtgactatacagcacaacaatctattgtgtatttccaaataggtggaagagaataatttgtttatggcataaagaaaagataaatattgggccgggcacagtggatcatgcctgtaatcccagctctttgggaggccaaggcaggcagatcacaaggtcaggagttccagaccagcctgtccaataaggtgaaaccccgtctctactaaaaaatacattacccaagcggtgggggcgtgcgcctgtngtatcaacttctcgggagggttggtgcagagaaatgctttaatccaggagggcaaagtcggacttgggccaaatatgaccactgctttttacccgggctgcagaggggaccccttctttaaccaaattgct

SEQ ID NO: 701068 - DNA, 352 bp, Homo sapiens
agatgatgccttgctctgtcgccaaggctggagtgctgtggcacgatctcggctaactgcaacctacacttcccaggttcaagcaattctcctgcctcagcctcccaagcaggtgggattacaggcacacgacaccacacctggctaggttttatatttttagcaaagatgggggtttcaccttgattgccaggctggtcttgaactcctgaccctaagtgatccgtcagccttgggttcccaaagtgttgggattaccggcataaggcactcgccctggcctcaattttaaactcgttaactttgagggtgccagggagacaatccggggggatactgttaaactacacag

SEQ ID NO: 701069 - DNA, 596 bp, Homo sapiens
ttattttggcgcacggcactagaaaggaactgttgtaaatcaactgattaggttggtaaagggcacggccacctaaggaatcctatggcaaagcgagggcaaattaattctacagactcaaggttatgatggccacgcatgaccacattcctcaggcgtctttaaaagagcttcttggagacacaactttcctaggaactgctccagaaatcggcagcacctgagaatgcttaacagggtagcccatcatggacacgtgaactgggatccgctatgatgatgttgcactctcgcaaaatcacctctgcttgtctaacatcgctcacaataacctgacgctttactagatggctctctgttatacccaggatcgccgtatgaccaatggtgccttaacgtgaaatcaactcagcgagaggactgtcttgacgtgaaagacatcgtcatctgtgcaccaggtatgctcttgtcgtaagcagcttggcgagctatcatgttggttaactgacagtgcttgagaaaagactcagtgcgccgagtcgtttactggggtttagtggcacgctgagtcccaacgataggccatcacgtcctca

SEQ ID NO: 701070 - DNA, 122 bp, Homo sapiens
  misc_feature (100)..(101): n is a, c, g, or t
ccgtcccttccctccccccgtgctctgccccgatggttcggtccgcgccgggggcggggccagggggattcctttagcccaggagtggaggctaagctanntcactccagcctgggtgatca

SEQ ID NO: 701071 - DNA, 382 bp, Homo sapiens
ctccccatctggctcacagtgtcacagtctcattgtcataaacggcagtcatgtttacgctggctattagtaagtcaagaacctggtgcagctctctgtctgtcacgcggaggtccaaagggtacctcagctcccgaagggtctggctggtacatgtgtttgtcagtgagcggggcccggatgatgagctgctccgcccggaagaccggcccacagtgctggtcaccgtactctttaaccaggcgagcctggccgctgggggctgaccagagcgtcaactggattggtagtgacccggacaaacaccaggcctgacgaacacgcagtacatgaaccccagcgagacagcacatgacacagccaggacactttgcatccagag

SEQ ID NO: 701072 - DNA, 888 bp, Homo sapiens
ttgggtttttgtttcgtttttatactgttggttcctttctcctgctttttgggttacgttagttttgtgctgttctacctgtgtctgcctatactctttgttcgccttctctcctttttgtgggtatatttatgtgtactgcatccattcgttcctacattgttctctgtggacgtgtactatggggctacatggtttatctcatctttttttttcgtaatcttgtgaccactgttgtttttgctctcgctgcttgctccctttagttttcctttgtggatgtcaaagtacctactgtgattataaaggtgaatttgttcgtagttttatatctgtgtgctctaatttattgcttattgcttatattctactgtcgtcgtgattcttaggatttcttatggtctgatcattattatatttgttgttgtcatttttgctatgttgcttactagtactactactaaactatactatttatagtagtagtcttatttgtatatagtgcataattataggttatactattgtttactatatatcttgatatcacattaaattagatgtaagatgctaatttgattataacgtaaattgaggtaataattttaatcaataagtctgtgcgaaagggggaatgtgctttctttgagacagtctgattcttgcaacttattctgtaagttggaacttatgttccacaagcatgtatctgaataaaagaatcccagcgacattggcaacttcttctctttttcagcctagaaatgtctgtgttaagtggttttttatttattgttgttgtttgttgttattgttgttcttgttgccaggctccaactcacaaaatactgagtttaaaaactgcgttgtattaacagcgaggtgtga

SEQ ID NO: 701073 - DNA, 1561 bp, Homo sapiens
ggcacacctatcgcgtatgtaccaccacggtggctagatggggcctggggagctgcatacctgcccctcggcagtagtggttgtgggttaatgtgggtgaagcagagaataaaacgaatgagaaacaagatatgacacaaacaaatacactatacatagcatcacacatatcattaccacactacacaccaccacaccacacaactcctcaccactccacccacacactccacacccccacccaccacaccacaaaaacctataacacccacccactactatctatcataataaacaaaaaatatctcgaatcacatatccccccaccacacaaccccccccgcacacatctaccacacacaccaacacacccctaacatatatactccaaccacaacaatactcctacccccacacccccctcacaacctacaacattagtagcactacatataaacaaataacacataccacaacaaccaccaccaacctaccccaacacagcccaacaaacacaacaacaaacaaccaataactctccaactcactaatacacccaccacacaacatacacgtcaactaatatcataccctaaacaatcacctaccacatcccattcaatctcactcactccccaaactcatatcattccactcacaccacacaacaaaaatcaaatcaccacacacccacactttaacaataaattattcacacaaatcattatcccaaaaataacacacccactaccaactacccacatacacaacccaaaatatacaactccaaatatactctacaatttcgagtctcaacgctctaaccctccccccttccactcaacacaccgctttctccacacacccacccctctatcgtcactacaaaatacaaactcactaataccactcctacctaccaactaccaacacacaccactcactcacactacaccctcaccacaacacatccatcccccttccccttcccctaaactactacacacattacatcacacccaccacatacaaaacacatacacaacatcaaccctctatacacctaaatgttaccacctacccaacatcttctccttcccacaatcatatctccctctccactatccaccccactctaccacacactcatcacaaccatcacaccctgcccctctcacactctacacacactctacacactacactcttctactccccctacctcacaaccccctttcactaccacacactcccccaccatcctctttccctcctcccccacctcaccgtctccctcctaccccccccactctcctcccccacatcccccccccacacaccccgccaccactcccccacccctccccacctacctacacaccactcctccactcaacccacccctccaccctaactcaccaaattaaacacactcacacccatcccccctccacacccacactcccccccacccccccagcccacctgcatcaccaacactccacatcctccaccaccccacccacctcccactctccacacaaacctccacatcacaccg

SEQ ID NO: 701074 - DNA, 152 bp, Homo sapiens
cggactcgttggcttcgtgctctgggctgggggcggttgctccgcgttgcgggcagcagcgtctgtctgtctgcgtaactcggagcggtaccactcttcgtgcttcatgcctgttgcttgtatgccattagtctcatacttgcgtgcggatc

SEQ ID NO: 701075 - DNA, 332 bp, Homo sapiens
ctggaggaatcggcacgaaggaattttcaatttcttcgggcactttgaccagcaggcacttgatgaatgccggtgtttttaccaaacagagttgtatattgggttcctgtatactctcaagggaccagggtgaacacaacctgggttactctggtgcgttccggctcctcctcttttaattcatcctttcctggttgcgccaaggcctggacgctgaacctgggcacccagacacaagcctcacctggccgaccgttcatccccgggggctcacgggtgaattcgttcgtttctacagaccctcccacaggtaagctgtgcctcgcccgctg

SEQ ID NO: 701076 - DNA, 442 bp, Homo sapiens
  misc_feature (277)..(277): n is a, c, g, or t
  misc_feature (280)..(280): n is a, c, g, or t
  misc_feature (291)..(291): n is a, c, g, or t
  misc_feature (297)..(297): n is a, c, g, or t
  misc_feature (321)..(321): n is a, c, g, or t
  misc_feature (327)..(327): n is a, c, g, or t
  misc_feature (343)..(343): n is a, c, g, or t
cgaaacctggctcagtgcaatactcccattgccatggggtccttcaccatggtactgtctccacagccctcagtccccaccacaggagaggcgcctgccacctcctcctcatctccggtggttcaatcgctccgcctgtccccaacccagtcccatttttatggccaaactgattctgaaacaaaatgaaactgcaaacctcgtgtgtcttaactccccccagggatgccactccattcctccgccccgtggtctggtgcgtgaacaaaccaaaacnccnaaacaaggtgntgtgtncctacaaacccaaatggtgggagnctatgnaaaccaaacaaccatnctggaccccaaacatggtttgcatcccaggttcctcgcccacctacccccgccacaccccgtctatttagagatctctctaataaaaaggataataagc

SEQ ID NO: 701077 - DNA, 390 bp, Homo sapiens
  misc_feature (270)..(270): n is a, c, g, or t
  misc_feature (273)..(274): n is a, c, g, or t
tttctatagcctctcttaggaccccgccacacaataaaatagttgggaggctcgtcttaggccccaggcttttcatctgccctattacctggcagggcgggaagcggctttgataaaaccttaactgtaatcccgaagacagggagcccatagagggcgggatggtttccactaccccttccctgcacccagtccatgatttgagttctgcttgcttctttagcaaaatattctggtttctagaagaggaagtctgtccaacaaggcccnctnnctcaggcaccacagaccacacggtctgaggccccagcaaaaccgatcctgggccacaatagcaaggccaactctcaggacctcaggcagaccctcctctgctgggtttaatcttct

SEQ ID NO: 701078 - DNA, 485 bp, Homo sapiens
catgcatcaggaggaggatgcgacacagggccctttggactcccaaaaacatgaccagttggaggcttaacccgagctagacgggaggatgtgatgtgtcttggggactgtgcgtgagcctcagagtagaaaagagctaaaacttaatgacatcaggaggtccctatttagcggaatcagcaggatcccttgctaacgagcgcccgtgattactcacctcctcccagtgtacagaggggatcgaggctttctaaatctccgcatcgcttacatatgagcatgataaccaggggcatctgaagaaaagctctgcttaggggagattgagaccagaatacacactgggaaaccagagagcgtgcaggaaggagccttagaaagcaggctgtcattaatgtccacgcggaggtgagcgaaaatatcgcgaacatgaggcaagaacaggaagctctaaaaaaaagccaccaaaaggagtatcgaatatc

SEQ ID NO: 701079 - DNA, 122 bp, Homo sapiens
tctgaactgcacgatgggggcgccaggtccacggggatgaagtgcagctgattcactccttccagcaggcggatgcccagtggtgacacttggacaactgtagcggttgtccccgatgttcc

SEQ ID NO: 701080 - DNA, 627 bp, Homo sapiens
  misc_feature (56)..(56): n is a, c, g, or t
  misc_feature (91)..(91): n is a, c, g, or t
  misc_feature (102)..(102): n is a, c, g, or t
  misc_feature (105)..(105): n is a, c, g, or t
  misc_feature (112)..(112): n is a, c, g, or t
  misc_feature (117)..(117): n is a, c, g, or t
  misc_feature (128)..(128): n is a, c, g, or t
  misc_feature (132)..(132): n is a, c, g, or t
  misc_feature (135)..(135): n is a, c, g, or t
  misc_feature (185)..(187): n is a, c, g, or t
  misc_feature (199)..(199): n is a, c, g, or t
  misc_feature (201)..(201): n is a, c, g, or t
  misc_feature (204)..(204): n is a, c, g, or t
  misc_feature (228)..(228): n is a, c, g, or t
  misc_feature (237)..(237): n is a, c, g, or t
  misc_feature (247)..(247): n is a, c, g, or t
  misc_feature (267)..(267): n is a, c, g, or t
  misc_feature (290)..(290): n is a, c, g, or t
  misc_feature (303)..(303): n is a, c, g, or t
  misc_feature (320)..(320): n is a, c, g, or t
  misc_feature (323)..(323): n is a, c, g, or t
  misc_feature (330)..(330): n is a, c, g, or t
  misc_feature (359)..(359): n is a, c, g, or t
  misc_feature (371)..(371): n is a, c, g, or t
  misc_feature (373)..(373): n is a, c, g, or t
  misc_feature (402)..(402): n is a, c, g, or t
  misc_feature (449)..(449): n is a, c, g, or t
  misc_feature (591)..(591): n is a, c, g, or t
ttctctttgctcgttaccacgcaggccccctggtggaaggacatgtggggacagangatgctgcgcacaggatgtgagctctgctcgatgnggaagcttctnttnagctgcngggtnccctcgttgtntacnacnctgttgagcagcaacttgttgaggttagctttgatgagcagtgagggatnnngggctttgcggntnttncaggaccgggctgagatgctggtnacagggctnccctcatgcnccaccaaacgtttggttttngttagctttcctgtggccatatnatagaggaaaganaagacactgccacggtnatnacccgcncagagcagccggctaggggcatcataggncagagcaaggtnanggtctgttatcttgctggagctcttcttnactttcttgcctgtggagatgttcatgacatgcacgttgtgcttggngttccccaccacagtgaggttgttgttgacaggctggaaggtgcagcagagcagttcagcgctatcgggggtcagggatctctcggatgcagcgaccatcctcagaggcccagatgcgcatggtggcatccagtgaggtggnacgaggatgtcttggagagggacaggcgagtcggag

SEQ ID NO: 701081 - DNA, 1025 bp, Homo sapiens
gttccgtgcctggacccgaggccgcggaggaacttgtccaaccttcctcgttgggaacccgtcgccccccaatgctcgtcgaaatccagtcatagatgtcagttctctgccacagtttgcagaataagtctaaccagatcacacgaactagtactgaacactcataaaaggattctagcattatcaaacggcagatgtaactcaccacaagagagctaccgtttgctgtatgtcgagtggcctatgtgagtccgagcgagaaatggtctataaagcgtactgattcaggccgacgaattgggggtgactggagaatctctagccggctgtaggtttcttgccctctgcagcggtggtggtctgttaattgctggtgaccgaacgatcccagatatatcgaagtcgatcaagagatccttagtataccctacagggttaggggtgggtcgcaacttggtagaatgaaaaaacctccaaaacaagtcatcagtaggccatcgattgatacggcgagttcagagccactctgagagaggcgcgatagaggtatagatacttgttggacctcaagaattattatgagcacgccgagaaagtaatgtctaccaaaggactagggagtcacatatttgagaattttctgatacctagccgcaaataagatgtccagtgcgcgtgttatgtgacagtacgaaacgaaagagcataacgatatatgactttgtttgaacggttttaacacttcggttagatgacatggcgatatacccctcgatacttcgtttagacccagtctatccaaggagtgcttaacttaccaggacttactcgtatgtcctttgggattggcttccttgaattacatttgcaattggtggggagtagtcgttaataccgaacctaaggatctctggaggattagccatttgagttagggcaattagggaattccattggactttaaactcttgggtgaatgattactttggacattgcctagtaataattctcactttggaaaaatg

SEQ ID NO: 701082 - DNA, 160 bp, Homo sapiens
gtcgggcgtgaccttaactaaggcattatcacatactgcggtcataactttgggcagtttgaggtacaacagcaaaacaaatgtgaatttatttttccctcttcacattatcactgatagaagatttgttcttaccatagatcttagcaatttccacagt

SEQ ID NO: 701083 - DNA, 112 bp, Homo sapiens
actgagttccaatacatgaaaacctcccttctgacgctgctttcccaaaactccccctgcatctttatctcttcatctatcccacctctagtctgaacatcccacctttatc

SEQ ID NO: 701084 - DNA, 232 bp, Homo sapiens
agcatcgccgccgccagaggagaaatgtctgaagtaagacccctctccagagacagtgttgatggatgaccctcctgtagtgagcagcgtcctgtgaaccccgcgaaccaatgtgattggtttccttgtgcaatgaccttggaactcatgaaaggaagcgaccccttgggaaccccttaactggggaacggggaaccttttcgggaaattattccctttattattggggggg

SEQ ID NO: 701085 - DNA, 301 bp, Homo sapiens
atgtggaagtttccaggaggcctgtcagagcctggagaagatattggagacacagcagtccgagaggtgtttgaagagactggtgtcaagtcagaattcaggtctctgttgagcatccggcagcaacacaggagccctgggcgctttgggatgtcagacatgtacctgatctgccgcctgcagccgcgttccttcaccatcaacttctgccagcaggaatgcttgaagtgtgaatggatggatctagaaagcctggccaggactaaacacacaactcccatcaccagcagagttgctaggc

SEQ ID NO: 701086 - DNA, 204 bp, Homo sapiens
  misc_feature (25)..(25): n is a, c, g, or t
  misc_feature (34)..(34): n is a, c, g, or t
  misc_feature (90)..(91): n is a, c, g, or t
ccctggcgtcctccctctgtttcancaccagagnaggagagagcggcgttcctgcaggagagaggaggggctgctggacccaaggctcannccctctgctctcaggaccccctgtcctgactctctcctgtatggtgggccctctgtgctcttctcttcctgtcgcatctcgtctcttctctgtacatctcgtctcttctcttg

SEQ ID NO: 701087 - DNA, 322 bp, Homo sapiens
ccagcctgctgccgaagagaatcacttgagctggagtttgaggctgcagtaagctttgatcacaccacttcactccaacctgggtggcagagcaagatctcatctcaaaaaaaaaaaaccagaggctgggggaaagaaggcccaaaaggagggccttcgggcagaggcagaaggatctctgccagaaggatggggaccaagaaaaaggaggggggaggggtggtgcctcacgcctgtaataccaacacttgggggggctgaagcagccggatcacctgaggtcggaattccgagaccggcctgaccaacagggagaacccct

SEQ ID NO: 701088 - DNA, 1596 bp, Homo sapiens
ggctcgtgctgttttcctgcgcaggagccgcagtgccgtaggcagccatggcgcccagccggaatggcatggtcttgaatgccccacttccacaatggactgtgcatgctgtgctgctgtggccactgtggttcaaccatgcctgtgccctgtaagatcctgcagactgtaatggccctgtgcaatgccaatggctgctgcctgcatctgcccctgctgcccctgctgtcatggtcccaatcctgtgcccatctgtgctgcttgccccgacgcgttcgggtagccacactgaatgttgttgctgctgcctgtgcctgcctgtgcttctagcccttggacgcgacgctcatgggcgtggcccgtgcacttcaccacacgaacgggtgcgccctgcgaccactcgcgcatcttcctgtgcggatcccgatgcgacgcgcggcgcacaccaacgctccacctgtgcacagtccccctcgccacgtcgccacaacggttgcaacgccgcgctttgacagcgcagtaacccgccctcccagaacatacattccttcgttcccccccatgcgccaacgccccttcgcggcccccccaaatgcacaccgcgagcaccagcctctcgtgccctgcacacgcaaccctgcacaaaccgtgtgccccaacccacaaggcgtgaaccccgcgcaaccctgcgcgctcccatttgccccccgttcccccgggcaacccgctaccttcactccacaacccaccacgtggccacgacccacaaggcgctctggcaagcctccacttccgcacgttggcagctcgcaacacgcgcaaggcaacccgcaaacttctccccacaccacgccccttttcccgccatccggctccttccccgcacattggccgcgccggttggcccacaacgggccttccgcgcccttcccttctcctccgccccctttcacggcgcctccaccacacacccacgcacaccccccacaactcgcacacaccccccgccccacccacacccagcgcgcacctgcttctccaacctcacgctcacacccacgacacacttcaccacgccctcccttcaccttgccgctcaccactctcttcgcccacacttccccaccacacccccaccctccctccacctctcccctccctctccacgccgccccactccacaactcccacccacctcccacaccacaacaacgaccccaccactcccacaccactggtgcccgacttgccccctccccccgcacctcccacctcacccccccccctctcctcctcccccacccccgccccccaccctcacccccccacccaccacacacaacaccaccaccctcacaacacacctctcgacacacccccgccttcactgtcacacacccacccacccccacacaacaacaccctcactcctctccccactccacccccccacccccaccccacccccccccacctcaccccctccccccaccaccctccccaccctcccccccccccccccccccacccaccacctccaccccccccaccatccaccccactcccacatccacccacacctcccaccacacacaa

SEQ ID NO: 701089 - DNA, 1029 bp, Homo sapiens
  misc_feature (12)..(12): n is a, c, g, or t
  misc_feature (710)..(710): n is a, c, g, or t
gagagagaagancaaaaactaataccggctaaggtaacgaggcctgggtggtgatccagtccgtcccccgcgggtctgctctgtgtgccatggacggcattgtcccagatatagccgttggtacaaagcggggatctgacgagcttttctctacttgtgtcactaacggaccgtttatcatgagcagcaactcggcttctgcagcaaacggaaatgacagcaagaagttcaaaggtgacagccgaagtgcaggcgtcccctctagagtgatccacatccggaagctccccatcgacgtcacggagggggaagtcatctccctggggctgccctttgggaaggtcaccaacctcctgatgctgaaggggaaaaaccaggccttcatcgagatgaacacggaggaggctgccaacaccatggtgaactactacacctcggtgacccctggtgctgcgcggccagccccatctacatccagttctccaaaccacaagggagctgaagaccgacaggctctcccaaccaggcgcgggcccaggcggcgcctgcagggcggtgaactcggtccagtccggggaacctggccttggggtgcctcggaggcggcgcgtggacgcagggatggccgatggccgggcagagccccgtgctcaggatcatcgtggagaacctcttctaccctgtgaccctggatgtgctgcaccagattngctccaagttcggcacagtgttgaagatcatcactttcaccaaggaacgaaccagtgccaggccctgcgtgcaagtatgcggaccccgtgagcgcccaggaggccaagctgtcgcgtggacgggcagaacatcttacaacgcctggtgcacgctgcgcatcgacttttcaaggctcaccaggctcaagtcaagtacaacaatgacaggagcgtggaataccaagccagacctggcctcggggaagccagccccggggacgcacacgggcgcgactgggtcaggaaaccccaaacgtgaggagagggccaccccaggagc

SEQ ID NO: 701090 - DNA, 288 bp, Homo sapiens
tgagacagggtctcttgctctattgcccaggttggagtgcaggggcgtgatcatgtctcactgcagtctctgcctcctgggttcaagcgattcttctgccttagcctcctgagtagctgtgattacaggcaactgccgccacacccggctaatttttgctttgttgttgttgttgttgttgtttttgttttttttttgagtcggaggtttgctcttgttgcccaggctgtagtacaatggcatgatctttagaggtgaagccagctgggcttctgggtccggtgggga

SEQ ID NO: 701091 - DNA, 971 bp, Homo sapiens
  misc_feature (43)..(43): n is a, c, g, or t
  misc_feature (652)..(652): n is a, c, g, or t
tccagtcacgggcctggcgctttagttgtaaattactggcccntgggctacaatatccagtggtacaaagcggggatctgacgagcttttctctacttgtgtcactaacggaccgtttatcatgagcagcaactcggcttctgcagcaaacggaaatgacagcaagaagttcaaaggtgacagccgaagtgcaggcgtcccctctagagtgatccacatccggaagctccccatcgacgtcacggagggggaagtcatctccctggggctgccctttgggaaggtcaccaacctcctgatgctgaaggggaaaaaccaggccttcatcgagatgaacacggaggaggctgccaacaccatggtgaactactacacctcggtgacccctggtgctgcgcggccagccccatctacatccagttctccaaaccacaagggagctgaagaccgacaggctctcccaaccaggcgcgggcccaggcggcgcctgcagggcggtgaactcggtccagtccggggaacctggccttggggtgcctcggaggcggcgcgtggacgcagggatggccgatggccgggcagagccccgtgctcaggatcatcgtggagaacctcttctaccctgtgaccctggatgtgctgcaccagattngctccaagttcggcacagtgttgaagatcatcactttcaccaaggaacgaaccagtgccaggccctgcgtgcaagtatgcggaccccgtgagcgcccaggaggccaagctgtcgcgtggacgggcagaacatcttacaacgcctggtgcacgctgcgcatcgacttttcaaggctcaccaggctcaagtcaagtacaacaatgacaggagcgtggaataccaagccagacctggcctcggggaagccagccccggggacgcacacgggcgcgactgggtcaggaaaccccaaacgtgaggagagggccaccccaggagc

SEQ ID NO: 701092 - DNA, 760 bp, Homo sapiens
tggaaaaagtctgggaggccagggggtgggcttgaaaccagcttgggggggttcgatccctccctttttggtctaaattttatgtatacgggttcttcgaatgtgtggtaggggggggggcttccatatagtcactccaggtttatgggagggttcttctactattaggacttttcagcttcgaagcgaaggcttctcaaatcatggaaaatttaattaatattcactggctggttagaaaaatgaatggacgcctacagatgataggatggttccatggtgggtggtatgcatcggggtagcccgagtaacgtcggggcatcccgggataggccgagaatagtgttggtggggaacgaaatgttagatttaccgccgatgaatatgatagtgaaagggatttgggcgtaggttgggtctagggtgtagcctggagaataggggaaatcagtgaatgaagcctcctatgagggcaaatacagcccctatggataggacataggggaagtgagctacaacgtagtacgtgtcggtgtagaccgaggtcaagtgatagagttggctaatacaatgccagttcaggccacctacgtgtgaaacgaacgatgatcctaggctcagaggcactgggcagatcttcatattggtccgggagggggcgagcagtaaaacttgaccggggggaacgagaaatggaggggaggagaagccgggggaagaatcctggatatggtgccagaacttgagctcgtataataaa

SEQ ID NO: 701093 - DNA, 435 bp, Homo sapiens
  misc_feature (12)..(12): n is a, c, g, or t
gagagagaagancaaaaactaataccggctaaggtaacgaggcctgggtggtgatccagtccgtcccccgcgggtctgctctgtgtgccatggacggcattgtcccagatatagccgttggtacaaagcggggatctgacgagcttttctctacttgtgtcactaacggaccgtttatcatgagcagcaactcggcttctgtctttgtgctctttctacccccccgggttctgttccgggggctctcctaggatcccctttccctaaaagcctgtaacaaggggttaaaaatttataaatttttaaacctgttttgagaccccaggggccgccgccccgttttttaaggtgacacaaaagtatattttgctaacagcaatttccaggctcagtattgtgaccgcggagccacagggaccccacgcacattccgtt

SEQ ID NO: 701094 - DNA, 558 bp, Homo sapiens
  misc_feature (199)..(199): n is a, c, g, or t
  misc_feature (237)..(237): n is a, c, g, or t
  misc_feature (523)..(523): n is a, c, g, or t
cggaggtgaaggacatccttccccactgatcacattcctggcaagatgccaagccaaggtggaacaagcagtggacacagagccaagacccaaactacaccaacataccagatggcagaacgaccatcactggaaactggcactggatcacttttggaattacctgcactggatgcatacactgtctggacaggtgcangaggagctgctcagctcccaaatcacccagtaactganggcactaatggactataccattaaggaatttaaagcctacaaatcagaactggaggaacaactgaccccagtggcagaggaaacgcggtcacagctgtccaaagagctgcaggcggcacaagcccagctgggcacggacatggaggacatgtgcagccacctggtgcaataccactgcaaggtgcatgccatgctcaaccataacacgctagagcttcagatacaccttacctgccacctacgcaagctacataagcaactgctgcacaaatcccatgacctacanaaacaccttgcgatttaccaagccagggcccacat

SEQ ID NO: 701095 - DNA, 190 bp, Homo sapiens
aagtcgcgtgtgcgtgcgataacgttgtagatgtggtcgtaacctagaaaggttgcctggctggcccagcacgggtcgaataaggaggcttagtagctgtgccttaggactccagctcatgcgcctgaataataggtatagtgtcccaatgtctttgtgtgttggtacgagaatagtcacacggtcggcg

SEQ ID NO: 701096 - DNA, 377 bp, Homo sapiens
  misc_feature (161)..(161): n is a, c, g, or t
tataaacgcatctcacctctctgtatggacaggatatgcctcagaggacaccaacagaggcagcagacagtcacactctcaggtatgcacatgacaccaaaggagcatcccctctctcagaaggcacaatgacaccaaaggatgctcccgtctcctcgagnaagcacatgacaccccacaggaggcatcagcaggtctccccactacttctggaagcccaggaccactccccaagtggcgccaacaagagctccacagggcagtctcctcagtaatctaggattcaatgacaggaagtgaataaaaagatacagcgttcaatgccggaacatggatcatagctctaattcagatacaataaacaatcagattgcggg

SEQ ID NO: 701097 - DNA, 136 bp, Homo sapiens
ttatgctcgtctcaaggacttagccatgcatgcctcagaatcactgcattgcaggaatctgtctgcatggctcattacatcagacgtaatctgccgcaataaactcttgcgagtctccgccaaacattggcataac

SEQ ID NO: 701098 - DNA, 319 bp, Homo sapiens
  misc_feature (285)..(285): n is a, c, g, or t
  misc_feature (296)..(296): n is a, c, g, or t
  misc_feature (299)..(299): n is a, c, g, or t
  misc_feature (312)..(312): n is a, c, g, or t
  misc_feature (317)..(317): n is a, c, g, or t
cgcacactgagacacctgcacacccctcttctgcttttgcgcgggcccagcggagcctgtctgtctgattatctgactctgcaactagcctggcagcaaggagaacagccaagctctgtgttccagaagctgcgtggtgcacactctgagaaggtaatcccgggtgcttgttagaaggtgccggagcgcacacacacacacgataaattggggaaggcggttctgtgctcgtacccacatcaacttcctggttctggttttgcacccattacctaagatgtcacngctggggaaanacnaaaaaaccgagcngaatnga

SEQ ID NO: 701099 - DNA, 199 bp, Homo sapiens
atttgttgaaggtcatttgagagaaatatgatgaacctgaggaggaacaaaaaaaaatgaaaagacccaacaccctcaattgcctactcccaaactgtgggcctatttaatgttaagggaaagatatcccaggttatggccttggagtgtccaattatgtgggcagatttccagcaaactttttcccacgtgtaaaggg

SEQ ID NO: 701100 - DNA, 260 bp, Homo sapiens
tcctagctcgccagtgatatccctggggaggctcccctctgcgcctggtgggcctcgtctcctcgcagttctggcaagactcacagtagcacaggcttcgctgtgagggaggctgaaataatcttcgggaagcagtaggagttcttggaggtgagagcaatgggaatggtactcgcaggttcttaagagggactgagcggcaggtgtggtccccctagcacacgactctctattgatacctggccaccgatgtcttgctt

SEQ ID NO: 701101 - DNA, 379 bp, Homo sapiens
  misc_feature (57)..(57): n is a, c, g, or t
tggaaagtatgggtttctaaactccccaggagatgctaacgtatgccaagatgtaanatactgggattcacggacaggttaaaccccccgtcaaacactcttaagttccaggtgtgctcaattcactccacttggtgagcagcacctatctggataaggaggggagaggacaaagtggccagtttgaaagaatgaggaagtcttgaagttgtaagcccagagaggaggtgttacatacattccagaaagctgtagaacccaccaaaagaagaggttctgaaatagaagacccaaagcaggaaacttaattgccttcctgaaagatgaatggaagtccagcagacaacacccttcccacccacatacctcacctgcccca

SEQ ID NO: 701102 - DNA, 451 bp, Homo sapiens
agtgtccgataatcatacctctccatgtatttaaatatatagcatatatcatctccagtggtcagctggaagaccaaggcccgatggtggctctccagcacagcagtgtcattgaacaaaatggccagctcacttccagcattacacaggaaggagttggttctcccagggtgatctacatcatgaatggtggctgcgatgagtgcagcgaactcatcaattggatctaaagtttcctgaaaacaagagagcttttaaaaactggggtatgacactgaaggcaaggaagccttctgtatagttttctttctcccctattactttcaggtaagaatatttcagatttctaagaaaagcatactacgtgagcaaatctagttttcctatctccaacctgaaacagttatatttctgcatatttgttagtctcacacaagttaaggacttacca

SEQ ID NO: 701103 - DNA, 117 bp, Homo sapiens
ctgtcacgctcatttcggttccttgaaaccacttcttgcttgctgttcccacgtcctctgggggctggcctcgcaccctgctcctgatagcgctgttcccggtgtgcagcctcacgc

SEQ ID NO: 701104 - DNA, 154 bp, Homo sapiens
cccccggggtttttttttccccgggccccgggggggggttttgggggggggggccccccccccccccttttcccggggggggggggtcctttttttggccccccccccccccccccgccccctaaaaaaaaagggggggtttttttttttttta

SEQ ID NO: 701105 - DNA, 366 bp, Homo sapiens
ggctgtacgaattctgcacgcggagagagagagagagagagagagagagagagagagagagagagagagagagagagagagagagagagagagagagagagagagagagagagagagagagagtgattgtggtttaacacacctcatttattgtcacataactttctaggcctctccaattataattttccacatttatatattttttcagatgtttattagacatatccgttgagacctaattaggattttgaagtaatgccatatgatgtttgagggcacgaagtctatttagtttttgtatacacttgccagagtgccttactcagtatatagcatttgggaggatcggttgttgtttttctt

SEQ ID NO: 701106 - DNA, 317 bp, Homo sapiens
agcacactcgggtggaagaaaagaaaggctttgccagcatcttgcagacccaaaagctgcagagtctgagaccccagtgaaaggccaagagaagaagccaaaaatccaagaagaggcagtgaaggaaaaaagtccttcgctggggaaaaaagatgcgagacagactccaaaaaaaccagagggccaaaggtttttcaaccacttccctagttaaaatctggtggagaaaaagctttcccaaaagccccataaaaaatggggcccaaaaaaacccaaaggttacccccagttcgaacctaagagtacagtgattcaac

SEQ ID NO: 701107 - DNA, 155 bp, Homo sapiens
cgcgtacagttgcgggcggcagccgttcgggccagctgacgaccagccttagagcatcttatccgaagtacggatcggttgcggattcccttactacattgtccaaatgcagaggtgttcaccttggagagctggtgcgcaactggtacggcggg

SEQ ID NO: 701108 - DNA, 188 bp, Homo sapiens
  misc_feature (48)..(48): n is a, c, g, or t
  misc_feature (53)..(53): n is a, c, g, or t
  misc_feature (95)..(95): n is a, c, g, or t
  misc_feature (145)..(145): n is a, c, g, or t
  misc_feature (162)..(162): n is a, c, g, or t
cggcatcagcagccagtcgcccgtgtcccgcctgtctcctcggcggantgctngcccgtcctgccacctctctgctctgttcttgtctctgcctncattcccgaatggatctggtaggagtggcatcgctgagcccgggacgcancgggccttggggaccancaagtgtccatgggctattcctcaaa

SEQ ID NO: 701109 - DNA, 291 bp, Homo sapiens
gtggacatcacttcacatatgtttatggagtaagatgtgatgtttccatacacatatgtgaagtgattaaatcagctaattaacatattaatcccctcaaatacataccacttctttgtggagagaatatttaaaatcctttttttttttttttttggttagggattctggcggttttgcccgggcggggttgcgggggtgtaatctgggttcagggcaccctcggccctcctggggttcaggggatttcctcccaccttcaccctcgtgaagttagttggaactacgggc

SEQ ID NO: 701110 - DNA, 137 bp, Homo sapiens
  misc_feature (3)..(3): n is a, c, g, or t
  misc_feature (63)..(65): n is a, c, g, or t
  misc_feature (68)..(68): n is a, c, g, or t
  misc_feature (72)..(72): n is a, c, g, or t
  misc_feature (80)..(80): n is a, c, g, or t
  misc_feature (92)..(94): n is a, c, g, or t
  misc_feature (97)..(97): n is a, c, g, or t
  misc_feature (102)..(106): n is a, c, g, or t
  misc_feature (111)..(113): n is a, c, g, or t
  misc_feature (119)..(119): n is a, c, g, or t
  misc_feature (123)..(124): n is a, c, g, or t
  misc_feature (126)..(126): n is a, c, g, or t
  misc_feature (128)..(128): n is a, c, g, or t
  misc_feature (131)..(132): n is a, c, g, or t
  misc_feature (134)..(135): n is a, c, g, or t
gcnacaacagctgagttcagcagcagcaacagagactataaaagcccacaaagcttgaactannnacngcangggccttnccagaaaaaaannncancaaannnnntatannnaaacanaatnnantntanntnnaa

SEQ ID NO: 701111 - DNA, 450 bp, Homo sapiens
  misc_feature (338)..(338): n is a, c, g, or t
  misc_feature (381)..(381): n is a, c, g, or t
gttttttagtatattcacagagggagaaaccattaccactatcttattttagaagatatttatcacccccataagaaaccccatacttattaatagaactcctcattcctcacttcttccagcccctggcacccactcatctaccctctctgtctctagatttgcctatgttggacattggatataaatggaattatacaatatatgatcttttgtgactggcttcttttacttagcataatgttttctaagttcgtcattctgtaggcatgtatcagtatagtcatttgctgcataacagagtttcaggggccaggcacagtaggctcatgcctatnaatggccaggcactttggggcgggctggaggtagggagggatncatttggaggccccatggagttttggaggatccagcccgggggcaaccataggtggaggacttacattc

SEQ ID NO: 701112 - DNA, 421 bp, Homo sapiens
tgagatagagttttgctcttgttgcccaggctggagtgcaatggcaccatcttggcttgtagtacgacgagccacagacaaaactcctcagactccgagttaaagaaggaaggggtttattcggctgggggcatcggcaagactcctgtctcaaaagccgagctccccgagtgagcaatttctgtcccttttaagggctcacaactctaagggggtgtgcgtgagagggtcgtgatcgattgagcaagcagggggtacgtgactgggggctgcatgcaccggtaattaggtcgtaacaaaacaggatagggattttcacagtgcttttctatacaatgtctggaatctatagattacattaccaattagggcaggggtccatttttaactaccaggtccagggtgtggccccgggctgtct

SEQ ID NO: 701113 - DNA, 153 bp, Homo sapiens
cctttttttgggaaaaaaagggggcccccgaaaaattttgttttttttaaggaccctgggccaaattttcctcccctttgccccttggggggggggctaacccccaccggattgttttttttcccccaaaaaacctttttttggggcccggga

SEQ ID NO: 701114 - DNA, 166 bp, Homo sapiens
tgagcatagggtggtcacagtttggagcaggaggaatctaggtaaaggtcaggatcatgtccactgtatggtcaggcagcggtggctgaagaggtgactgatgacagatgggtcagccacagtagaacatgtccccgaggctcatggttccttctgcagcaatctt

SEQ ID NO: 701115 - DNA, 824 bp, Homo sapiens
catacccagtggcaacctcctactcctcatggtacccattctaatcgcacaggattcctaatgcttaccgaacgaaaaattctaggctatatacaatacgcaaaggccccaacgttgtaggcccctagggctatacaacccttcgctgaggcataaaactcttcaccaaaagagcccctaaaaccgccaatctaccatcacctctaatcaccgccggacttagctctcaccatcgctcttctcatatgaacccccttcccaatacccaacccctggtcaacctccaacctaggcctcctatttatctaaccacctctagcctagcggtttactcaatcctctgatcagggtgagcatcaaactcaaacgtaggccctgatcggcgcactgagagacagtacgccacaaacgcaactctcatactgaagtaaccactaagccataattctacgtatcaacattactaattaagtggagtccttaaaccttctccaacccttattcaacacacaagaacacctctgataactccgggcatccatgaacctgcggggccataaatcattggatctctctccccacactaagcagaagaccaacggaacccccctttgactgtcgccgacagggagagactggaataagtcccagggtagaactcggattacgccggaggcccatgcggcatatctgccatagccgatacacaacttctgatataaacgccgcaacgatagaatttcgtaggacaaattatggacctccccggcatctccaatattgtgcccaaccacacacaccggagaaaaagaaagaaccaacga

SEQ ID NO: 701116 - DNA, 211 bp, Homo sapiens
  misc_feature (120)..(120): n is a, c, g, or t
  misc_feature (132)..(132): n is a, c, g, or t
  misc_feature (148)..(148): n is a, c, g, or t
acagtagcgtaatgtaatagcaatagagtacatctgtctatcttttcgtaataagataaaggggcatatggtcatatgattggacaaaagtggatgattcatctttttcttctcagcatnaaaagaagcatntgaacgaaccgtcttngcatacatatacagagagtttgtcagccctttctttcaggacaccagccagccacagtccagg

SEQ ID NO: 701117 - DNA, 221 bp, Homo sapiens
cacgaggcttaaggttatggagtaaagtagcttggaccttgggctgcaggacgaataggattcacccataaggacaccagtgccctgtgtttcttaacttcttgttaccatttgaaactctgtacttttatgtttaaagggttctgtataaccattttttttttcagaaagtaacattgctttgtatagaaataaaaggcattgttaaaatttgcttgtta

SEQ ID NO: 701118 - DNA, 147 bp, Homo sapiens
  misc_feature (1)..(1): n is a, c, g, or t
  misc_feature (13)..(13): n is a, c, g, or t
  misc_feature (45)..(45): n is a, c, g, or t
nttccagcaatgnagtagccctgctgtttgcctggccctcatganaaatctgctcttaaccctgctttcctgctgaagccctgaaacacctgtgttccaggccacctgctaacaataaataatgctgccctgatgtggggaattagc

SEQ ID NO: 701119 - DNA, 548 bp, Homo sapiens
  misc_feature (215)..(215): n is a, c, g, or t
tctatgatgtatcctcatgctgacatcgcatgtaatattctcctatcctcaggctcccgagtatgctgggactacaggtgccgatttggccagctaagttatggtatttagtagagacggggttcactgtgccagccaagatggtctcgatctcctgaccttgtgatccacccgtctgagcctccgaaagtcctgggattacaggcgtgagccancgtgcccgggctaactgctctgatatttctaaaaaaggtgacttggattaaagtatgcaaactcaaggagtagtacgagccccacttgagtcaagttagcttagttgctaaagagcttgataccaaaattactttggtacacttgatgaatgggatagttgttgcacagggccactgatctagattacgtgtcttattggtcaagtacttatagttgtagaagtagcagtgtgaaaattatcggaatggagaaggggccctgataaaaacaatttattttcaggccccaggaacttcaaggtttctggcagcccaatgtagtatacgcttatt

SEQ ID NO: 701120 - DNA, 367 bp, Homo sapiens
atcagtacaacattaagcgtctcagtcgatgtagctacaatagattcataagatcatttaaaacttagaaaaaaaaacaatcacccagaacacagtggctcacgcctgtattcccagcacttggggaggccaaggcaggtggatcacatgaggtcaggagttcgagaccagccgggccaacatggtgaaaccccgtctctaccaaaaatataaagaataagcggggtatgggggcatgcacctataatcccagctactggggaggctaaggcaggacaatcgcttgaacccagggggctgaggttgcactgagccaaaatcatgccactgcactccagccggggttgacagagtgagattccatctc

SEQ ID NO: 701121 - DNA, 1113 bp, Homo sapiens
  misc_feature (30)..(30): n is a, c, g, or t
  misc_feature (359)..(359): n is a, c, g, or t
  misc_feature (362)..(362): n is a, c, g, or t
  misc_feature (441)..(441): n is a, c, g, or t
  misc_feature (576)..(576): n is a, c, g, or t
  misc_feature (740)..(740): n is a, c, g, or t
  misc_feature (824)..(824): n is a, c, g, or t
  misc_feature (853)..(853): n is a, c, g, or t
  misc_feature (967)..(967): n is a, c, g, or t
tctatcaatttctctttatttttttatttnattttgtcttcttcgttttttgtagtccgaccgtttcccatgatctgcgtgccgcttcggcccgccagtcggcgtttaccgctccctctcttttgtttttgtttttaggtgatactcaccactccgcggcctgatggccgacgccccccgaacccccaaccacgccacgaaacgcccaccccccgccacgcgcgcgtacacgcacccgcgagccagggcgcggcacacccggccgtccgcgccctccggcggcgcaaggagccacgctcgccccacccaccgtccacgcctcgcgaagttatagattttattagtattccccctctcgntcntactcgttcacgcaatatccttagaaccatgacttatgatgtgcgtgtggtctctcgttgctcgccctctccttcaccntcctcccgtctctttctcgttcctcgcgcacacgtggtattgacggacggctggatgtggttctgttttgggcactaactcccgcggtgcatctctcgacatcgagcatatcaaatgatttaacgctccgtctanatacaattcagttcgtctttccgcaccctcgagctcgtctacgtccgtaccgacgcactacccatacgctctctaaagccacccgtactaattaattcacacatctccgcacccaaccgtacactctgagacttcagaccgttaacacaatgaaaggcatctcntgtatcttacacaactgtactcctactcaacctcacttcctagtaattatcgtacatatgcagaataactggtcggactgttangcatatgtttttctctatgtctcattttntctctattattgtagtcttctcttgcgtatccctctcaccccatgccctgctgcaactttcgcactttatctatatgattatgaggcttgagagctacgctgtccacactctcnctccaagtaaccatcgtactacccttccattcacctcgtcacacgtctatgtagctctcgtcgtacgtgtatgatgctgagagtccgctactcctccccacacagctctcgcgctcgcgactacgtcttctcttcctcgcttctct

SEQ ID NO: 701122 - DNA, 806 bp, Homo sapiens
agcgggtggagtgggcggggaggtctccgcggaggaggtggagtgaggcggacgggagggcggaagagggcggagggtagtgggatgggggtccctgcggcagcggtgaaactccgggtggacagtacagtggattgcgtgattgcacgatgacagggcgttagtgatgcagccgggccatcacagctcctcacgcagattccgcgaatcaggaactaagaacggtcagtatcaccggaggagatcagattccgtccaacgagacaacacatgaagacaatgaacaaacagaaagaacagacccagtaagagaagcccagggaaggatgaaagtgaacgattagatagtgaaaaggctaaggtgaaagcaaatggtgagcagcaaggaaaattgagttcggatattgctatcgtagtaggaggtggaacacaaactaggagaattgtgaaacaagtgaggagcgaagaagggatggaagtgatgtaatgcagtggaggatgaggaggggaaataaagggatgcgagatttacgaaccagcaaggattatatgcccaccatatacattttgaaggtagaagcggaactaaaataaggaaacttatcgaggaatacgaaacaaagaaatagttggtcgggtcaccaaggtcgacgaaagataaacgacacattcaaagcactagagagactttcaaacaattaacgcagaatctctataagacagaagaggtaaaaatacgccataaacaaggagataaacgtcagatagaacgaggtagatacaatgacttacacgggcgagcgaca

SEQ ID NO: 701123 - DNA, 835 bp, Homo sapiens
  misc_feature (43)..(43): n is a, c, g, or t
  misc_feature (67)..(67): n is a, c, g, or t
  misc_feature (70)..(70): n is a, c, g, or t
  misc_feature (78)..(78): n is a, c, g, or t
  misc_feature (84)..(84): n is a, c, g, or t
  misc_feature (92)..(92): n is a, c, g, or t
  misc_feature (94)..(94): n is a, c, g, or t
  misc_feature (108)..(108): n is a, c, g, or t
  misc_feature (117)..(117): n is a, c, g, or t
  misc_feature (126)..(126): n is a, c, g, or t
  misc_feature (147)..(147): n is a, c, g, or t
  misc_feature (153)..(153): n is a, c, g, or t
  misc_feature (155)..(156): n is a, c, g, or t
  misc_feature (164)..(164): n is a, c, g, or t
  misc_feature (166)..(166): n is a, c, g, or t
  misc_feature (171)..(171): n is a, c, g, or t
  misc_feature (175)..(175): n is a, c, g, or t
  misc_feature (208)..(208): n is a, c, g, or t
  misc_feature (243)..(243): n is a, c, g, or t
  misc_feature (248)..(248): n is a, c, g, or t
  misc_feature (250)..(251): n is a, c, g, or t
  misc_feature (258)..(258): n is a, c, g, or t
  misc_feature (261)..(261): n is a, c, g, or t
  misc_feature (263)..(263): n is a, c, g, or t
  misc_feature (274)..(274): n is a, c, g, or t
  misc_feature (289)..(289): n is a, c, g, or t
  misc_feature (300)..(300): n is a, c, g, or t
  misc_feature (312)..(312): n is a, c, g, or t
  misc_feature (314)..(316): n is a, c, g, or t
  misc_feature (318)..(319): n is a, c, g, or t
  misc_feature (321)..(321): n is a, c, g, or t
  misc_feature (324)..(324): n is a, c, g, or t
  misc_feature (329)..(329): n is a, c, g, or t
  misc_feature (332)..(333): n is a, c, g, or t
  misc_feature (335)..(335): n is a, c, g, or t
  misc_feature (369)..(369): n is a, c, g, or t
  misc_feature (371)..(371): n is a, c, g, or t
  misc_feature (492)..(492): n is a, c, g, or t
  misc_feature (512)..(512): n is a, c, g, or t
  misc_feature (514)..(515): n is a, c, g, or t
  misc_feature (520)..(520): n is a, c, g, or t
  misc_feature (533)..(533): n is a, c, g, or t
  misc_feature (573)..(573): n is a, c, g, or t
  misc_feature (721)..(721): n is a, c, g, or t
  misc_feature (801)..(801): n is a, c, g, or t
aacatatctagatggagaggacgacctcttcactccggcgcantccatcaaatatttattctccggnttnaggtagcngtcgcngccctcanantccatttacatgtntcggctgtngttgcccanattctccagcccgttgttctngccacngnncccacctngngcctnatcnctgctccgttcactgccccgctcctcccgtttnttctcgctgtcacggtcacggtcacgatcccggtnccggngnngctcgcnctngntccggtggttntgtcgtcgctcccgntcacgatcccntttttttttttntnnntnntnagnccgtnagnnangctcccctggaggcccatcatcagggggcgcgtnanccgcctcggagggctccgccatgtcgccaccgccgccacgcagctcctccttgcgctcccgctcccgccgggcccgctcccgactccggctgcttcgccgcttccggtcccggtccttgtncttgctccgctccctggagngnnttcgntccttcttgttgngactccgtgagcgcctccgccggtcccgggagcgggagcntcgccgttctcgctccttgtctcgctcccggctccgctctctgcgctcccgctcacggtcccggtcccggtccctctcatcgtagcgggaggtgtcatcgcggcctgaatgccggatgttcacatcagcccctcctcttctggtaccnccgaggcctcctcctagccgccggggcctccagcccttcacggttcggcccctctccacgtccacaaggaccctcctgcnatcaatcttcttgccatctgcgtgtttgtaagcg

SEQ ID NO: 701124 - DNA, 130 bp, Homo sapiens
ttgaggattcccactgttgtcacactatgctgcactcgaggagatccacaatattcatcagggatcctacatcctgcactaacactttgcaagtggtcggacattgatgacaggtatgatatcacggtgt

SEQ ID NO: 701125 - DNA, 299 bp, Homo sapiens
  misc_feature (22)..(22): n is a, c, g, or t
  misc_feature (29)..(29): n is a, c, g, or t
tgttcacgtggaaagaagaaanaaaaaangtcagagttacgaaagagtatggttatcttgaaacctccagacacaagaaaacttctagcaaattcaggggaagtttgtctgcgggtggggtggcggtattttcaacaaacttgattggacaaacgggcctgtgccttatcttttggtggagtgaaaaaatttgagctagtgaagccaaatcgtaacttacagcaagcagcatgcagcatacctggctctttgctgattgcaaataggcatgggagaggggaattcggaatcatatgtct

SEQ ID NO: 701126 - DNA, 419 bp, Homo sapiens
ggccctggcagcaacctgggaatggctggaggtgggagagaacctgacttctctttccctctccctcctccaacattactggaactctatcctgttaggatcttttgagcttgtttccctgctgggtgggacagaggacaaaggagaagggagggtttagaagaggcagcccttttttgtccttggggtaaatgagcttgacctaaagtaaaggagaaaaccaaaagccctggattttaattttccaaaaaagttagaaggtaaaaaaaaacaaaaaaaaattttttaaatttttgggtttttggaaatgtttaaaaatccattccctttgccctgaagcctgagtgagacacatgaagaaaactgtgtttcatttaaagatgttaatttaaatggatgaaacttggaaaaaaaaaaaa

SEQ ID NO: 701127 - DNA, 1574 bp, Homo sapiens
gcaaggtgccgacttccctggctgacggacggtggacaaactggtggctccttgcggcagcaacgaacgggtgctgaaccttcctggggctgctgctggacttgcctgctgtgctcggagaacggacactccaggatctgaacgtttggcggtcgagcaggcactgttgactactggctgtctctgccgctcaccttccactcccgcaaaggccactctgactgtccactgaacgcttacgcgaaaggctccctgggcagcacgaacgggacacacgcacacactcacacgcacttactcacgccccacaactcgcacgcaactcactgcagcggcggctctcggcagggcttctgaatcgaacactccctgggacggcccacgctgacctggggactcactggctgcgcgtccgctgggcctgcactcctagccgccactccgcaccacctctcccctgccaccaagcacaagggctctctcacttctgccctccagcacaacactgcactgcactctgccaccggcgctgcacacccgcacccctgcggcaaggccctgctcactcctgctgcctaccctccacgcactgcctgcgcacacccactgcactccacacgcaacgcccccgccccccaccctccgcgccgctgacacggccacgcctgactgtggggcccaaactggccagctcccctggcgcacctggccacgcccgcaccctggcactcaatgcctgctcctggcagcaacaccacgccaaagggcgcactatcccctcgtggccacgcgctgtgccgccacttgcaacgcacccttgaattggcccccgctgaagtgccacgaaggcgcctggcccaatcctacccagcctttgccaaactctaagtctctgacggcgaaacctccctgccggcgcctgggcggcccccaaattaacccaagggcgaacccccaaccacgcaaaggccaacccggccgctgggggcttgccgcgctggcatcgggctctccctttcaaacgcttgccttgcaacgcgggcggggccactcaactccgggtcccttcagccacagggtctttgggccagcggtcgtgggctcaccccagctgtttgtgcccaacgaattagcccgcgccacatgcgttgccccccgcatcacctgtggcttggtgaccccacgagcagttcccccacggagcagaggcttcgctcacgagcccccccttgtgttcccgctgggcgctctttccgctggtgccttgtgcgccggagccaagcgcacggagcgggctctgcgagtaggagagagcttggccgcccggggtggagcttggacagaattttggaagacgcgcaggaggttacacgaacgaggcagtgcgcaatcaggctaacccggaagccaccgaggcagaggtaaccaacacacctgtgttgttggtcatgaggagcagaagcagcgaccggtgagcagcagacgaacaccaagtgcacacatagttaggtgagtcaagcgacgcgagcgaacagaaagcgcagcagacgcagacgaacagagatgagatgcgg

SEQ ID NO: 701128 - DNA, 424 bp, Homo sapiens
  misc_feature (373)..(373): n is a, c, g, or t
atacttctcagaccagcagtttcccatctttagctgtacccacctctgagattcaatgggaatacgttcacttttgttttttgagacagggtctttctacgcagccctggctgccctggaactcactgtgtaaaccaggctagccttgaactctcagagatccactgtctctgtacccccagtgctgggattacaggcatgcaccaccacactcagcagggatacatttttatttttaaacaagtgttttgactgtatcctgatttgttttctttctggcctcctgcagagtccctggaagaaaatttaccaatctttcctgctttctatttttatgatgacaatcaaagcttgcccgaggaacacaatttgngacttttaaaaaaatgatcaatggatgtccctttaaaaaaatgtgggtctg

SEQ ID NO: 701129 - DNA, 111 bp, Homo sapiens
gaccagaaaaaatagaaaggaaaaagcaaaagaaaaagaaagaaaagaacgcttgaaacaagaagggaaacttttaactaaatcccagagagaagccagagccagatgatc

SEQ ID NO: 701130 - DNA, 170 bp, Homo sapiens
taaattaggaattcaccattacctagtagttaaaaggtataaactatggcctagttcagccatctgtaatagtaactgagagtaagaataacaacctggatagacaggatagctctgtagagctaattaggatacttatcagacaaaacggaactcgcaggaatgctgtg

SEQ ID NO: 701131 - DNA, 180 bp, Homo sapiens
ttcatcttctgaatccaactatccactacattatgtccagcatctgtatctccattatggacatttcatagacctcctctttcctctctattttttaaatatctttaaaaatacttatttcagtaacttttggggttaaagtggtttttggttacatggatgaattgtatagtggtgaat

SEQ ID NO: 701132 - DNA, 433 bp, Homo sapiens
gggacttctatcgccatgtactctcgcactgtcaacgtcagatgtctcacatcgcctggttatagagattctagtgacagtatgtaggagtagaagatgaggcttctgtagttcgagtacacgtacgttcagagccagtgctgctcattccactcgatgatacgcgaggggcggtttccctcgtatgacatgtcaagtacgcgtagggatctccgttcgatcagaagtagtatcatggcggtcaggatcgttcatcggaaatctattacgctagcctctgtcatgcaaggaacagtgcctttcgcagtaagtgctataaagagtgcagtgaggcagagatagctcctcagctttctcttaaagagggcgtcatcaggacagtcggtaagctgttggaatacataggagccagcgtcttgtagacgcacgtgcg

SEQ ID NO: 701133 - DNA, 107 bp, Homo sapiens
gagttgtgattttaagacagtagagtgcctttctgctgtagcacacagcataactgtttcagtgtcccgctggtacctgttcttattcaataaatctctcaaaagac

SEQ ID NO: 701134 - DNA, 221 bp, Homo sapiens
  misc_feature (212)..(212): n is a, c, g, or t
cgttgaggtctgctgcgcggacagctgtgggcaagagtcccggccgatgtctcgccgccatgacctcacaagggacgatttcgacgagctagtgtcctcccagtgcatcctggcggatgctcctcaacgcctggtggcccgccctgtcggcctccgacgccctcgctcggttggccgatcccgcggtcgccgaagcagtgacccccgactgnaacgaggaa

SEQ ID NO: 701135 - DNA, 287 bp, Homo sapiens
cctcactgtcctaatagctgtaactacagatgcccaccaccatgccgggcaaatttttggtattttttggtagagacagggtttcaccatgtggcccaggctggtctcaaactccggggttcaggcaattctcatacctgggcttcccaaagtacggggattacaggtgtgagccacggcaccgggcccagaaattttatttattcaaccggtcagtggaggtgagccctttatattagtgatttttaatctggtgtgtgtgttacagatctttggggtacggagct

SEQ ID NO: 701136 - DNA, 206 bp, Homo sapiens
aaaaataaacgtctgagatgcgtagtctgtgagcttgatgtgcccggtcctgcatccagggacgttgtccagcttcaggtccctggtagatgatccccctctcggtgcaggaagttgagggcgatgcagatctcggccgcgttagaacctgtgcgtgctccttcagggtagcttccttctgcctctgcaagtgaacccacgcgggg

SEQ ID NO: 701137 - DNA, 159 bp, Homo sapiens
ccgtgggggaggcccttggcccttcgaaatttttttttggacccgggcctcccccccccccccgggggtttggggttccggtttcccggggggggggttttttcccccttcccagggggcccgcccctttccattaaaatcccggttggccccggggga

SEQ ID NO: 701138 - DNA, 578 bp, Homo sapiens
  misc_feature (13)..(13): n is a, c, g, or t
  misc_feature (578)..(578): n is a, c, g, or t
ggcttggatgttntgctggagtggcctgagccgggtgctgcacggggagtgcggagtgcagctgtgctgtgcgtgctgtgcgtgctgtgcgtgctgtgtgtgcgtgagcagatgaagaaactgatgtgccctgtgatgtgaagtgacttgccccccagccacacatgctggaccattctggctgctgtctggacaagaagtcgtagggggtgatgtggtggaatgcttggtgaaacccacatggatggcaaccacactagtttacgatcttcttggttgaccccaacttctctgctgctcattgcctgctggtgactggtgtgctggctgtgaaacaatgtgctgccccctctacgtgtgaaaattgcagtgagtgctgaagccagtgcctgttggacgtgggccttgtgggccggtttggcgcggtgactgcccactgtggcccttctttggggcttgtgctgggctcggtgtctcgttcttgttgtgccccccgctgcacattgtgtccctttggcccccctccccattccacgcccatgcccctgcctcgcgcccttgccttcggtctgttcccn

SEQ ID NO: 701139 - DNA, 180 bp, Homo sapiens
ccgaagggtaagaagctgccactgcaccttctgccagctgagtcctgggaccccatcttcaaggatgcttctgactgcgatcacgtaatttcaatgaaacgagcgagactatgcaaacactggattagacgaaacctggtacagtcaacaactggcacaagcggaggtacacaggaccga

SEQ ID NO: 701140 - DNA, 274 bp, Homo sapiens
gccatccccggtatgatgggtgacagtctccacactcgccaggtagcatccactgtagaagaggcattataccaggttacagatggcagaaaatactttgtagtctctcccatcaagtcttttttgccatcatttaaatctgggatggccatgttacttgctttgagaaatacaataaggcagaaatgacaaattgtaagttctaagccgtgacttcaagaggacatgtagtttctgctcttgctctattggaacatttttaccctgagctagg

SEQ ID NO: 701141 - DNA, 180 bp, Homo sapiens
  misc_feature (65)..(65): n is a, c, g, or t
  misc_feature (122)..(122): n is a, c, g, or t
  misc_feature (132)..(132): n is a, c, g, or t
agtcctcttcggtcccgttgtcatcgttcagcatagacttaactcccttaagcccagacatctgntgagacctgacccctacgtcatggttaccagtgtgtcaggcaatctggactttccangtgatgccanctgagatggcaccgtggtcaaagagagcagtggttccccatttctaga

SEQ ID NO: 701142 - DNA, 263 bp, Homo sapiens
tctagaggatcccggtcaatttctacacggctacagtaccaaaacagcatggtactggtacaaaacagagatatagatcaatggaacagaacagtgccctcagaaataatgccacatatctacaactatctgatatttgacaaacctgacaaaaacaagcaatggagaaagggagaagtgtgtaactgacaaaaagcacagtgactcacttggagctggcgtacttggtgaccgccttggtgccctcggacacggcgtgcttg

SEQ ID NO: 701143 - DNA, 620 bp, Homo sapiens
  misc_feature (117)..(117): n is a, c, g, or t
  misc_feature (120)..(121): n is a, c, g, or t
  misc_feature (165)..(166): n is a, c, g, or t
  misc_feature (542)..(542): n is a, c, g, or t
  misc_feature (548)..(548): n is a, c, g, or t
  misc_feature (550)..(550): n is a, c, g, or t
  misc_feature (567)..(568): n is a, c, g, or t
  misc_feature (571)..(571): n is a, c, g, or t
  misc_feature (574)..(574): n is a, c, g, or t
  misc_feature (576)..(576): n is a, c, g, or t
acaccatgatcaggacactgctgctatctgccttggtggctggagccctcagctgtgggtaccccacttatgaggtggaggatgatgtgagcagggtagttgggggtcaagaggccncanncaacacctggccctggcaggtctccctgcaggtcctttcctccnnaaggtggcgccacaactgcggaggctccctggtggccaacaactgggttctgacagctgcccattgcctcagcaactatcagacctaccgagtgctgctgggcgcacacagcctctccaaccccggagctggctctgctgctgttcaagtctctaagcttgtggtccaccagaggtggaactcccaaaacgtcggcaatggctatgacattgccttaatcaaactggccagcccagtgaccctgagcaagaacatccagacagcttgcctcccacccgctggcaccattctcccgagaaactatgtctgctatgtcacaggctggggcctgctgcagaccaatgggaacagtcctgacaccctgaggcagggccgnctgctngntgtggactatgccaccnnctncancnctagctggtggggaagctctgtgaagtccagcatggtgtgcgct

SEQ ID NO: 701144 - DNA, 220 bp, Homo sapiens
gtgtgcagtgtcaatccagttgcgcatgcagtcagggacaagggagcctactcaggtgtagatatgctacgggtggcgcttccaattcaggtgcattagtaggtgcctgcagtatgttagcggttaggcgtacggccagggctattggttgacacataactagtactaacttataatttaatctaatgtgacaaatactacttattcacttctctaaaat

SEQ ID NO: 701145 - DNA, 313 bp, Homo sapiens
ggcagctatcgtttctgcaactggcaaccgcatcgatcatcgcggagttcgtggcactcacgcttgtgtaggttgctcgcaaatatgtcagccccctgtgcgcgatctcgatacgcattccgattgtggcactcgtgaatttcacgttcgcctaccatttttccagaagaaccgattttggacgcccaagacctgggatgcacttctctgctgtggccccattgctcaaagtgtccggctaccagctcgcgttcaatgtgcttaacttcttctcgcgcaatctcgacaacgtacttgtcggcaagtacctagg

SEQ ID NO: 701146 - DNA, 4058 bp, Homo sapiens
  misc_feature (4011)..(4011): n is a, c, g, or t
  misc_feature (4039)..(4039): n is a, c, g, or t
agcggggcgcggggcgcgggcttctcggcggctgcggcccgggcggcggcgatgctgtggccgcggctggcggcggccgagtgggcggcgctggcctgggagctgctgggcgcctcggtgctgctgatcgctgtgcggtggctggtgcggcggctgggcccgcggccgggaggtctgggccgcagcgggaccccagttcctccgccaagcgcggccgccgcccccgcctcaggtgaaatgacaatggatgctctgttggctcgattgaaacttctgaatccagatgaccttagagaagaaatcgtcaaagccggattgaaatgtggacccattacatcaactacaaggttcatttttgagaaaaaattggctcaggctttactggagcaaggaggaaggctgtcttctttctaccaccatgaggcaggtgtcacagctctcagccaggacccacaaaggattttgaagccagctgaagggaacccaactgatcaggctggtttttctgaagacagagattttggttacagtgtgggcctgaatcctccagaggaggaagctgtgacatccaagacctgctcggtgccccctagtgacaccgacacctacagagctggagcgactgcgtctaaggagccgcccctgtactatggggtgtgtccagtgtatgaggacgtcccagcgagaaatgaaaggatctatgtttatgaaaataaaaaggaagcattgcaagctgtcaagatgatcaaagggtcccgatttaaagctttttctaccagagaagacgctgagaaatttgctagaggaatttgtgattatttcccttctccaagcaaaacgtccttaccactgtctcctgtgaaaacagctccactctttagcaatgacaggttgaaagatggtttgtgcttgtcggaatcagaaacagtcaacaaagagcgagcgaacagttacaaaaatccccgcacgcaggacctcaccgccaagcttcggaaagctgtggagaagggagaggaggacaccttttctgaccttatctggagcaacccccggtatctgataggctcaggagacaaccccactatcgtgcaggaagggtgcaggtacaacgtgatgcatgttgctgccaaagagaaccaggcttccatctgccagctgactctggacgtcctggagaaccctgacttcatgaggctgatgtaccctgatgacgacgaggccatgctgcagaagcgtatccgttacgtggtggacctgtacctcaacacccccgacaagatgggctatgacacaccgttgcattttgcttgtaagtttggaaatgcagatgtagtcaacgtgctttcgtcacaccatttgattgtaaaaaactcaaggaataaatatgataaaacacctgaagatgtaatttgtgaaagaagcaaaaataaatctgtggaactgaaggagcggatcagagagtatttaaagggccactactacgtgcccctcctgagagcggaagagacttcttctccagtcatcggggagctgtggtccccagaccagacggctgaggcctctcacgtcagccgctatggaggcagccccagagacccggtactgaccctgagagccttcgcagggcccctgagtccagccaaggcagaagattttcgcaagctctggaaaactccacctcgagagaaagcaggcttccttcaccacgtcaagaagtcggacccggaaagaggctttgagagagtgggaagggagctagctcatgagctggggtatccctgggttgaatactgggaatttctgggctgttttgttgatctgtcttcccaggaaggcctgcaaagactagaagaatatctcacacagcaggaaataggcaaaaaggctcaacaagaaacaggagaacgggaagcctcctgccgagataaagccaccacgtctggcagcaattccatttccgtgagggcgtttctagatgaagatgacatgagcttggaagaaataaaaaatcggcaaaatgcagctcgaaataacagcccgcccacagtcggtgcttttggacatacgaggtgcagcgccttccccttggagcaggaggcagacctcatagaagccgccgagccgggaggtccacacagcagcagaaatgggctctgccatcctctgaatcacagcaggaccctggcgggcaagagaccaaaggccccccgtggggaggaagcccatctgccacctgtctcggatttgactgttgagtttgataaactgaatttgcaaaatataggacgtagcgtttccaagacaccagatgaaagtacaaaaactaaagatcagatcctgacttcaagaatcaatgcagtagaaagagacttgttagagccttctcccgcagaccaactcgggaatggccacaggaggacagaaagtgaaatgtcagccaggatcgctaaaatgtccttgagtcccagcagccccaggcacgaggatcagctcgaggtcaccagggaaccggccaggcggctcttcctttttggagaggagccatcaaaactcgatcaggatgttttggccgctcttgaatgtgcagacgtcgacccccatcagttcccggccgtgcacagatggaagagtgctgtcctgtgctactcaccctcggacagacagagttggcccagtcccgcggtgaaaggaaggttcaagtctcagctgccagatctcagtggccctcacagctacagtccggggagaaacagcgtggctggaagcaaccccgcaaagccaggcctgggcagtcctgggcgctacagccccgtgcacgggagccagctccgcaggatggcgcgcctggctgagcttgccgccctgtaggcttggcgctgggctctcggtttgttcttcatttttaaagaaggaagggtcatatgtttattgctaaactgtcaaaaaggaatatattctgattaaattattactcctcactttgagggtgtgagaattttagaagatttaaatgttctatataacacttagatttctgatattttggaagaagttagaagttaatgaaagcaaactcagttaccaattttctggaaaatatccatgtggtaatggtagactttttaggtggcaatttctaggtctgaaatatagcagaggaaagggcgctgaggcagttgcaggcaggcagccctgtacttaccctgtactcacctcatccgacagacgctgtggatgaggaggggcttggcggaggcgtgagcaccgatgtccctttgataacctgcactcaccaagatgaactatttgccgccctgtcttttcctgggttggggggtggcatctgatggtggcagagtgcctgttggttcgcccgtgggtctcatggttcagacagagggaggtggacggcagggatcagggagccaggagcgcgcctcagacttgcagcaaccattgtgatttgggttgttcggaatatttaaattactgatcagaagatgaaagtagcttttctcttgggaagtcttgcagcccgtgggagtgataccaggagcaacacagagctcagcagcggcgccaaggtgttccctgtttcctcagcacgtgagccttcaccgcctgcttcattcaggagccagtgcagcagtaatacagtctatacattgttctgttttcaaatttatcctgaggctttgttgagcataaatgattatacgataaaggtatccgttattttggaactcatttcagttgggatctcctgtatgcagagtgttgcatttagaggtttgagtcccatcttggtttcttgccgtgctgactgtagccttcaccttgacttgaatgaaggtctgtggttggaatgtgtgaggagccgctgaggtgttcaggaggtgctgcctggaggtcggtttcttcctgggtgttacgggcaactgctcacacagttgtttctctgtgaacatgccaagcacttcacagccttgatgctttgacttgcctttcctncacctggaaaactccacatttatcttcngataggccgatatattggg

SEQ ID NO: 701147 - DNA, 353 bp, Homo sapiens
tgagtgctctagcggatccttacctctaacactactcctctacctccattataactactcctaattttcacattctcacgacacacctactacccatgcgtgctctctgcaattggactggctggctggcttctggaaaagccaactttcacaaaccaggtggcgacacagaattgcttggcgacgtctgtggaccaggctgggcagctaacatctcttgcaagagccaccatgtatcctgatgttcccattggacagcttggacaaacagtggtgtgtgatgtctctgtggggctgctatgcaaaaatgaagaccacaaagccaggttggggtcatcccatatggccttctg

SEQ ID NO: 701148 - DNA, 2993 bp, Homo sapiens
agcggggcgcggggcgcgggcttctcggcggctgcggcccgggcggcggcgatgctgtggccgcggctggcggcggccgagtgggcggcgctggcctgggagctgctgggcgcctcggtgctgctgatcgctgtgcggtggctggtgcggcggctgggcccgcggccgggaggtctgggccgcagcgggaccccagttcctccgccaagcgcggccgccgcccccgcctcaggtgaaatgacaatggatgctctgttggctcgattgaaacttctgaatccagatgaccttagagaagaaatcgtcaaagccggattgaaatgtggacccattacatcaactacaaggttcatttttgagaaaaaattggctcaggctttactggagcaaggaggaaggctgtcttctttctaccaccatgaggcaggtgtcacagctctcagccaggacccacaaaggattttgaagccagctgaagggaacccaactgatcaggctggtttttctgaagacagagattttggttacagtgtgggcctgaatcctccagaggaggaagctgtgacatccaagacctgctcggtgccccctagtgacaccgacacctacagagctggagcgactgcgtctaaggagccgcccctgtactatggggtgtgtccagtgtatgaggacgtcccagcgagaaatgaaaggatctatgtttatgaaaataaaaaggaagcattgcaagctgtcaagatgatcaaagggtcccgatttaaagctttttctaccagagaagacgctgagaaatttgctagaggaatttgtgattatttcccttctccaagcaaaacgtccttaccactgtctcctgtgaaaacagctccactctttagcaatgacaggttgaaagatggtttgtgcttgtcggaatcagaaacagtcaacaaagagcgagcgaacagttacaaaaatccccgcacgcaggacctcaccgccaagcttcggaaagctgtggagaagggagaggaggacaccttttctgaccttatctggagcaacccccggtatctgataggctcaggagacaaccccactatcgtgcaggaagggtgcaggtacaacgtgatgcatgttgctgccaaagagaaccaggcttccatctgccagctgactctggacgtcctggagaaccctgacttcatgaggctgatgtaccctgatgacgacgaggccatgctgcagaagcgtatccgttacgtggtggacctgtacctcaacacccccgacaagatgggctatgacacaccgttgcattttgcttgtaagtttggaaatgcagatgtagtcaacgtgctttcgtcacaccatttgattgtaaaaaactcaaggaataaatatgataaaacacctgaagatgtaatttgtgaaagaagcaaaaataaatctgtggaactgaaggagcggatcagagagtatttaaagggccactactacgtgcccctcctgagagcggaagagacttcttctccagtcatcggggagctgtggtccccagaccagacggctgaggcctctcacgtcagccgctatggaggcagccccagagacccggtactgaccctgagagccttcgcagggcccctgagtccagccaaggcagaagattttcgcaagctctggaaaactccacctcgagagaaagcaggcttccttcaccacgtcaagaagtcggacccggaaagaggctttgagagagtgggaagggagctagctcatgagctggggtatccctgggttgaatactgggaatttctgggctgttttgttgatctgtcttcccaggaaggcctgcaaagactagaagaatatctcacacagcaggaaataggcaaaaaggctcaacaagaaacaggagaacgggaagcctcctgccgagataaagccaccacgtctggcagcaattccatttccgtgagggcgtttctagatgaagatgacatgagcttggaagaaataaaaaatcggcaaaatgcagctcgaaataacagcccgcccacagtcggtgcttttggacatacgaggtgcagcgccttccccttggagcaggaggcagacctcatagaagccgccgagccgggaggtccacacagcagcagaaatgggctctgccatcctctgaatcacagcaggaccctggcgggcaagagaccaaaggccccccgtggggaggaagcccatctgccacctgtctcggatttgactgttgagtttgataaactgaatttgcaaaatataggacgtagcgtttccaagacaccagatgaaagtacaaaaactaaagatcagatcctgacttcaagaatcaatgcagtagaaagagacttgttagagccttctcccgcagaccaactcgggaatggccacaggaggacagaaagtgaaatgtcagccaggatcgctaaaatgtccttgagtcccagcagccccaggcacgaggatcagctcgaggtcaccagggaaccggccaggcggctcttcctttttggagaggagccatcaaaactcgatcaggatgttttggccgctcttgaatgtgcagacgtcgacccccatcagttcccggccgtgcacagatggaagagtgctgtcctgtgctactcaccctcggacagacagagttggcccagtcccgcggtgaaaggaaggttcaagtctcagctgccagatctcagtggccctcacagctacagtccggggagaaacagcgtggctggaagcaaccccgcaaagccaggcctgggcagtcctgggcgctacagccccgtgcacgggagccagctccgcaggatggcgcgcctggctgagcttgccgccctgtaggcttggcgctgggctctcggtttgttcttcatttttaaagaaggaagggtcatatgtttattgctaaactgtcaaaaaggaatatattctgattaaattattactcctcactttgagggtgtgag

SEQ ID NO: 701149 - DNA, 133 bp, Homo sapiens
aaaataaaaatttgcgaggcgtgttggcgaacgtctatagtcccagctacttgggaggttgagggagagtcctttgagccgagatggcgccactgcactccaatctggccgacagagcgacactcttatctca

SEQ ID NO: 701150 - DNA, 2145 bp, Homo sapiens
agcggggcgcggggcgcgggcttctcggcggctgcggcccgggcggcggcgatgctgtggccgcggctggcggcggccgagtgggcggcgctggcctgggagctgctgggcgcctcggtgctgctgatcgctgtgcggtggctggtgcggcggctgggcccgcggccgggaggtctgggccgcagcgggaccccagttcctccgccaagcgcggccgccgcccccgcctcaggtgaaatgacaatggatgctctgttggctcgattgaaacttctgaatccagatgaccttagagaagaaatcgtcaaagccggattgaaatgtggacccattacatcaactacaaggttcatttttgagaaaaaattggctcaggctttactggagcaaggaggaaggctgtcttctttctaccaccatgaggcaggtgtcacagctctcagccaggacccacaaaggattttgaagccagctgaagggaacccaactgatcaggctggtttttctgaagacagagattttggttacagtgtgggcctgaatcctccagaggaggaagctgtgacatccaagacctgctcggtgccccctagtgacaccgacacctacagagctggagcgactgcgtctaaggagccgcccctgtactatggggtgtgtccagtgtatgaggacgtcccagcgagaaatgaaaggatctatgtttatgaaaataaaaaggaagcattgcaagctgtcaagatgatcaaagggtcccgatttaaagctttttctaccagagaagacgctgagaaatttgctagaggaatttgtgattatttcccttctccaagcaaaacgtccttaccactgtctcctgtgaaaacagctccactctttagcaatgacaggttgaaagatggtttgtgcttgtcggaatcagaaacagtcaacaaagagcgagcgaacagttacaaaaatccccgcacgcaggacctcaccgccaagcttcggaaagctgtggagaagggagaggaggacaccttttctgaccttatctggagcaacccccggtatctgataggctcaggagacaaccccactatcgtgcaggaagggtgcaggtacaacgtgatgcatgttgctgccaaagagaaccaggcttccatctgccagctgactctggacgtcctggagaaccctgacttcatgaggctgatgtaccctgatgacgacgaggccatgctgcagaagcgtatccgttacgtggtggacctgtacctcaacacccccgacaagatgggctatgacacaccgttgcattttgcttgtaagtttggaaatgcagatgtagtcaacgtgctttcgtcacaccatttgattgtaaaaaactcaaggaataaatatgataaaacacctgaagatgtaatttgtgaaagaagcaaaaataaatctgtggaactgaaggagcggatcagagagtatttaaagggccactactacgtgcccctcctgagagcggaagagacttcttctccagtcatcggggagctgtggtccccagaccagacggctgaggcctctcacgtcagccgctatggaggcagccccagagacccggtactgaccctgagagccttcgcagggcccctgagtccagccaaggcagaagattttcgcaagctctggaaaactccacctcgagagaaagcaggcttccttcaccacgtcaagaagtcggacccggaaagaggctttgagagagtgggaaggtactgaaaggctgagccgcagcagcgtggggcacacagttggttgcattttgattaatgacagaaggtcaaatcacagcttcaaagtaccaatttccagaaggcttttctgggagacttggtccttttcgtgaaggtctaattccttgtggatgttgtggaattctagcttaagccagtcccgtcccagacctgggggatgtttgcagtgccttcctttccttttctaattggaattccttgttggttttgggacatgtttttaaggaaccttaatattttatagaaggtaccatataatgctatggattccttgggaaaaaataggccatagccacaaagctaaattatgctgtaatcaaataaagcttcgtggaattgtttagaaaaaaaa

SEQ ID NO: 701151 - DNA, 663 bp, Homo sapiens
  misc_feature (149)..(149): n is a, c, g, or t
  misc_feature (205)..(205): n is a, c, g, or t
  misc_feature (208)..(208): n is a, c, g, or t
  misc_feature (213)..(213): n is a, c, g, or t
gggcttgaggaggaacctgtctttaaagctgtccctgaagtgacagcggagagaaccaggcagcccagaaaccccaggcgtggagattgatcctgcgagagaagggggttcatcatggcggatgacctaaagcgattcttgtataacangttaccaagtgttgaagggctccatgccattgttgtgtcagatagagatggagtanctnttatnaagtggcacatgacaatgctccagagcatgctttgcagatccgtggattgtctctagtccaacttgtttgcgcgcttgcaaacctatgaccgagaggagagcaaagcttggagcgtttgcctaaaaataaatagtatcatctgttactatagacacctaccaggtggttcaatttaatcgtttacctttggtggtgagtttcatagccagcagcagtgccaatacaggactaattgtcagcctataaaaggaacttgctccattgtttgaagaactgagaccaagtcgtggaagtgtcttaatctgacagtggtttgcagtgtgtaccttatcttcattataacaacgcaatatcaatccagcaatctttagactacaatagtactttgatccatgtgctcaagaaagggccctttttccgagttatactaaagagctagcatatagatg

SEQ ID NO: 701152 - DNA, 2014 bp, Homo sapiens
agcggggcgcggggcgcgggcttctcggcggctgcggcccgggcggcggcgatgctgtggccgcggctggcggcggccgagtgggcggcgctggcctgggagctgctgggcgcctcggtgctgctgatcgctgtgcggtggctggtgcggcggctgggcccgcggccgggaggtctgggccgcagcgggaccccagttcctccgccaagcgcggccgccgcccccgcctcaggtgaaatgacaatggatgctctgttggctcgattgaaacttctgaatccagatgaccttagagaagaaatcgtcaaagccggattgaaatgtggacccattacatcaactacaaggttcatttttgagaaaaaattggctcaggctttactggagcaaggaggaaggctgtcttctttctaccaccatgaggcaggtgtcacagctctcagccaggacccacaaaggattttgaagccagctgaagggaacccaactgatcaggctggtttttctgaagacagagattttggttacagtgtgggcctgaatcctccagaggaggaagctgtgacatccaagacctgctcggtgccccctagtgacaccgacacctacagagctggagcgactgcgtctaaggagccgcccctgtactatggggtgtgtccagtgtatgaggacgtcccagcgagaaatgaaaggatctatgtttatgaaaataaaaaggaagcattgcaagctgtcaagatgatcaaagggtcccgatttaaagctttttctaccagagaagacgctgagaaatttgctagaggaatttgtgattatttcccttctccaagcaaaacgtccttaccactgtctcctgtgaaaacagctccactctttagcaatgacaggttgaaagatggtttgtgcttgtcggaatcagaaacagtcaacaaagagcgagcgaacagttacaaaaatccccgcacgcaggacctcaccgccaagcttcggaaagctgtggagaagggagaggaggacaccttttctgaccttatctggagcaacccccggtatctgataggctcaggagacaaccccactatcgtgcaggaagggtgcaggtacaacgtgatgcatgttgctgccaaagagaaccaggcttccatctgccagctgactctggacgtcctggagaaccctgacttcatgaggctgatgtaccctgatgacgacgaggccatgctgcagaagcgtatccgttacgtggtggacctgtacctcaacacccccgacaagatgggctatgacacaccgttgcattttgcttgtaagtttggaaatgcagatgtagtcaacgtgctttcgtcacaccatttgattgtaaaaaactcaaggaataaatatgataaaacacctgaagatgtaatttgtgaaagaagcaaaaataaatctgtggaactgaaggagcggatcagagagtatttaaagggccactactacgtgcccctcctgagagcggaagagacttcttctccagtcatcggggagctgtggtccccagaccagacggctgaggcctctcacgtcagccgctatggaggcagccccagagacccggtactgaccctgagagccttcgcagggcccctgagtccagccaaggtgagctgctgtagaagcttctggaagtggtgcctggctgtccctatactgtgctgctgggtgttccagcctgttgccttgtgcgtggtctcagggaccatgtcctttggagccccaaggttgtcctcatctcaaaccatccaccagtgattggtgatgagaacgtttgtcagagaaatgtgtgttcttggctctgtggcttgcttaccagggccgatgtgctgggagccactgtctcaacgaagcagacattccctgggccagccccgtcctgtgcgcgtgtcgccctgttcttgctgtgttgatggcctgtcctagggcaccttgctggtgtagcgaggctgcccgttgtgactaggaagtaccatgt

SEQ ID NO: 701153 - DNA, 377 bp, Homo sapiens
  misc_feature (149)..(149): n is a, c, g, or t
  misc_feature (205)..(205): n is a, c, g, or t
  misc_feature (208)..(208): n is a, c, g, or t
  misc_feature (213)..(213): n is a, c, g, or t
gggcttgaggaggaacctgtctttaaagctgtccctgaagtgacagcggagagaaccaggcagcccagaaaccccaggcgtggagattgatcctgcgagagaagggggttcatcatggcggatgacctaaagcgattcttgtataacangttaccaagtgttgaagggctccatgccattgttgtgtcagatagagatggagtanctnttatnaagtggcacatgacaatgctccagagcatgctttgcgactcggtgtcttatccacttttgcccttgcaacagaccaaggagcgaacttggactttccaaataaagtgtctctgttactctaacacatccccggtggtgcacattatcgcttaccctggtggtgg

SEQ ID NO: 701154 - DNA, 364 bp, Homo sapiens
aaatacgacgatacgtgacgccgtatttctgcttccgaagggcgatgaccgcctgcggtgtatgccatgcgcttcaaccattccttccttgtcagcaaggtaatcgccgccaacgtcgcgatctgaatcgcggtcatcgcctgcgcccagcggtgatgctggtgcagcgcctgctctgacttttcatcccattccttcgaggtggcttcaagcttttcggcttgtttgcgcacgtcttccttctgggttttataacgctcgatctcgtcggcgtagtgcttggcgtcaacccccggaatatgggtcgccagttccgcggttctgccggctggatttggcctggtagtagttccctggttggcgg

SEQ ID NO: 701155 - DNA, 1470 bp, Homo sapiens
agcggggcgcggggcgcgggcttctcggcggctgcggcccgggcggcggcgatgctgtggccgcggctggcggcggccgagtgggcggcgctggcctgggagctgctgggcgcctcggtgctgctgatcgctgtgcggtggctggtgcggcggctgggcccgcggccgggaggtctgggccgcagcgggaccccagttcctccgccaagcgcggccgccgcccccgcctcaggtgaaatgacaatggatgctctgttggctcgattgaaacttctgaatccagatgaccttagagaagaaatcgtcaaagccggattgaaatgtggacccattacatcaactacaaggttcatttttgagaaaaaattggctcaggctttactggagcaaggaggaaggctgtcttctttctaccaccatgaggcaggtgtcacagctctcagccaggacccacaaaggattttgaagccagctgaagggaacccaactgatcaggctggtttttctgaagacagagattttggttacagtgtgggcctgaatcctccagaggaggaagctgtgacatccaagacctgctcggtgccccctagtgacaccgacacctacagagctggagcgactgcgtctaaggagccgcccctgtactatggggtgtgtccagtgtatgaggacgtcccagcgagaaatgaaaggatctatgtttatgaaaataaaaaggaagcattgcaagctgtcaagatgatcaaagggtcccgatttaaagctttttctaccagagaagacgctgagaaatttgctagaggaatttgtgattatttcccttctccaagcaaaacgtccttaccactgtctcctgtgaaaacagctccactctttagcaatgacaggttgaaagatggtttgtgcttgtcggaatcagaaacagtcaacaaagagcgagcgaacagttacaaaaatccccgcacgcaggacctcaccgccaagcttcggaaagctgtggagaagggagaggaggacaccttttctgaccttatctggagcaacccccggtatctgataggctcaggagacaaccccactatcgtgcaggaagggtgcaggtacaacgtgatgcatgttgctgccaaagagaaccaggcttccatctgccagctgactctggacgtcctggagaaccctgacttcatgaggctgatgtaccctgatgacgacgaggccatgctgcagaagcgtatccgttacgtggtggacctgtacctcaacacccccgacaagatgggctatgacacaccgttgcattttgcttgtaagtttggaaatgcagatgtagtcaacgtgctttcgtcacaccatttgattgtaaaaaactcaaggaataaatatgataaaacacctgaagatgagctccaccttgacccagcctcacaacaaaaagtttgtgtatgaccaggcttcctgtaagtggaa

SEQ ID NO: 701156 - DNA, 285 bp, Homo sapiens
  misc_feature (21)..(21): n is a, c, g, or t
caaggatttctcagcaggcanaatgtgcttctgcagaagggtgctgctcattcttgtcacttgcaagagcacactgagcaagagaagggaatgggtttttatcccttagacagtccgtccctactactgtgtccagtccccattggctggggtcagactgtactacctaagctgattctgattggctacattaaactggatcagttgtgggagctacagcggtgtgaagagcagtttcggaactatgggtgtctagtcatgcactgatgtgcattgtttaccgat

SEQ ID NO: 701157 - DNA, 591 bp, Homo sapiens
  misc_feature (79)..(79): n is a, c, g, or t
  misc_feature (222)..(222): n is a, c, g, or t
  misc_feature (225)..(225): n is a, c, g, or t
  misc_feature (229)..(229): n is a, c, g, or t
  misc_feature (251)..(251): n is a, c, g, or t
  misc_feature (284)..(284): n is a, c, g, or t
taaagcaaagtctcgttttgtccccgaactggagttccattgaagtcacagctcactagcttcaagcatttctcaagcntaagctcccaaagtagtggatttcaggcatgaatcacacacttggccttgaaacattattttaaaagcctaaattccagttggtaagggtacaaaaatttagttaacttcaaaaatcacagtactgcgagaaatggcgggtcntanggtncagagaagtgggagtgaatcanttctggtggttttatcttggcagcatgcatggnaatcacatgagtagaggctgtgggctgggatcacacttcaaagctgtggtacttttacttcaagttgaaacttttaaaatacatctgtcatatagatgtacaaatatatgtagatgcaaacatatatacacactttttgacaaaagaattgtggtaatatacgtgaccatttttgtaaatagattctatttggttaataaaaatattcctcccatcaacctatcgaagtccagaccaactatgaagataggatgcccatccagaagaacgggaagcattttcttcctcacctttggaaagtaaacca

SEQ ID NO: 701158 - DNA, 654 bp, Homo sapiens
gtgatcctcagcgtctggacacattccgtggcagcggcagctggccctcatcgttgtgcaccgccaccagcaacgggcaggagcccagcaggctggggggggccgaagaggagcgcccgggcaccccggagttggccccggccccatgcagtcagcggctgtggcagagcccctggccagccccgggccagcccctggtggaccccggagacgccgggccagcagggcagtcaaggaaagccaagctggtgtttgctgtgaaacctgccactgcccagttgtcgtcaagcggattagaggagaccaggaggagctggccgaattgggttggtgccaccccctgaagagtttgccaaccggggtcctgctgtgcacccatcgcctggccgggcaccctcgcccaacacgggtgcccgagtccggcctccagggaaagcccagcagtgagcgcaccacgctgcgcctgagtctggagacgactctggggtggaggaggctgacacacgcagtacagtgaacccacaactggagaacacaagacacatctcaacggtgtccaagcatgtaccacgttggagctcgggagagcgggaagatcactgacaccacaaacacttcatttcgctgacgggacagcactttatctatcggaga

SEQ ID NO: 701159 - DNA, 502 bp, Homo sapiens
  misc_feature (420)..(420): n is a, c, g, or t
gtagagcatccgcctatatggcagaggtccagcaggtcaaggagatgcggtgcctttccggcatggtttactatagccgatcgcggtgtccctgtcgatccatgctgtgttggtatcattagtcctatcggagcaggtctcgagtgcgtgcttgctccatgctgctgctcctaccaggtcgcgcgtgcttgagctctcgtggccgtgagtgcgttgaagctatgtatctcccgtgctgttcgccgtcctgcgtcgagtgtctcatacgaatatgagagcgcgcctggccctcgagtggtatatacgactccggaatacttggcctgtaagtcagcgcctcactgacggtgcaacattgcattcaaatgccttatcacgctgagaatggcctgtggcccacgcctactgagtgttgcgcgncgctttcttagctaaatgcgcgttcaaagtacctcttgtctacatcacacggttgagcagtactcaggcgcccgactattac

SEQ ID NO: 701160 - DNA, 309 bp, Homo sapiens
tcctggacggcgaggattgatgtgtctctaacctagaggtcaggacagagatagtctcagtgtgagagacctcatgacagtcactctttggtcgaaaatcgaagagcactgagagaaggcacagaggaagaagagcagcgcggccggagccaaggcctggcgagcactggctggctgggctctgagcaagagggaggagtcagaggcagtcaggctcagcacagctcctaggaactgcttccaattcagtgaagattgaaagaccctgccctaagtctgcaccactagaaaggaagtggcccccaggtg

SEQ ID NO: 701161 - DNA, 717 bp, Homo sapiens
tcccatgaaaacaaatgattgtcccttttaatttaattgggaaggcagggggaatcaaaaggcccttctttataatgagctattcatattgcaggagtcagaatgatttgatacaggtgaattttaagttacaggctaaatggcttaaaagctttgtcagtcttccagcatcaggggagtcatttaatagcctttttccttattggctagtatggttaattgagaaatatagtaaaatagatacaagagtcatctatataggtgtgagaccggtgggtgacttttccaaagtttataatttaaaaagctccaaataacgttggcttttctcaagaagacttatactcattgctctgggctatacgtgtgaatcactgaattgcttgaacaaccctgtgaaagacatactttagccctttaagatggccaggagctaagcttgagtctccttaactgaattccgtcctaagtgcaggttacttgtagattctagtcttcacaggctcccgggggctcttaactagtcacactggggacgtcatgaatgtcttctccaataatctcaggcaatcctagaagatcctcaaactgtcaggtctattcatacctcaacacagggaaaaaaacgctctttaacaatttactgactaactcaggaggcaccgttaaccaaaagcacagtggaatgaaagttttcattgctagggttcaaccctg

SEQ ID NO: 701162 - DNA, 225 bp, Homo sapiens
ggttgaagttgtttatacaattgacattcagaaatatattccatgctatcagctttttagcttttataattcttcaggcgagtaaatgagcaagcactgaaggaaatattatcaaatgtcaaaaggatgtggtaggttggtcaattccgtgcgtcattcagttcagtctgacgttgagagagaggttttacacaaaacttgcaggagcatttttcaaaccaagag

SEQ ID NO: 701163 - DNA, 512 bp, Homo sapiens
  misc_feature (5)..(5): n is a, c, g, or t
  misc_feature (182)..(182): n is a, c, g, or t
ttacngtctgctcaaaaccctccacgcttcccatctcacccagaggaagaaccaaaatgtctcaccactgctcacacaaactttcctttccaatcacttctcctctgcttactctgttctagccacactgatctcccgtgctcttcctcaaacatgccaggcacaccattcccaccctttgncctctgcacttgttccttatgtctggaatgttttttccatagactgttacatggtttcctccctcagacagatcatgcagatctctgctcatatgcctgctcctcagaggccttccttaattatcctttattaaaaaggcaaacacataccagaagctggctaccaccggccatgtttccctctctttacatcttttaaaaatgtcaagttggccgggtgcggtggttcacgcctgttatcccagcactttgggaggccaaaggcgggtggatcacctcaggtcaggagtttaagaccagcctggctaacgtggtgaaaccccgtctcta

SEQ ID NO: 701164 - DNA, 486 bp, Homo sapiens
gcgtcgaccggcggcgcgcatatcatcctcattgagacgatcttcgatacgctgaacgccaaggcggcgagtcttcgcctgcgaggagcgtttcgaggccaagggatccgcctgccggtcatgatctcgggcacgatcacagacctatccggccgcacgctttccggccagacgccgtctgccttctggaattcggtgcgccacgccaacccctttaccatcggcctcaactgcgcactcggtgggagtgcaatgcgtccgcatctgcaggaattgtccgatgtcgccgataccttcgtctgtgcctatccgaatgcaggcctgccgaacgagttcgggcaatattacgaaacgcctgagataatggcgcgtcaagttcacagggtttgtcccccaagggccttcttgaaaatctttgggggttttgtttcggctcgaacgcgagagagtagttccgggggattttccaaagcggtgataagaatt

SEQ ID NO: 701165 - DNA, 778 bp, Homo sapiens
gtgtgtgaaaagtcagttcttttggccttttctcgttatcggggagacttgcaatttacacagggatacccatctgaagaataattgagacctgggaggcgtgcaggttgctagatgcacgccgagatttccactgcattccagcctgggcgatagagttagctctgtctcaaaataacccactagtatcatgctctgagtaacattggctactcccgaagtatgcacttgtgaggaacagcaggcctcagtatcaccagggatacttcattagaaataagtctctagtcctcaaccagtatacccacttaattgtaatctggatattaacaagattacccgatgtgggtcaggtgtggtggctcatgcctagttcactccgcacagcttaggtgaggttccagaggctcgggcggcatcatcttgagagctgggagtttgatgaccaggctggtgccaacgtggggtaaaaacccagtctctatcaataaccataacaagaagattaggtcgtgtgtggtgacgcttgcgtgttgtcccaggtgcttgggcggctgaggcgggagaatcacttgagtctgggaggcagcaggtggtagtcgcagctcgaggttgtcgccactgctgtccagtctgggccccatggtgacgctgttggctgctggagcatgttggatgtggcctggagagcctaatcgtgatatggaacgtgggcagtcttctgtcattatggggcctttaggagtgattcactcgggtgcctattttccctgtcttg

SEQ ID NO: 701166 - DNA, 221 bp, Homo sapiens
agatgagctcggtacatcattcaaaactaaaaacgaaggggctgtccgatatggatggccctttatttttttggttggcttcgaagtgaaaccatactgaaagtaatgtgaaagtatggttttactatgttttgcatacaaaaacatggtttaaggttgctttaaccgtgtttttagagcgaaattaaccttgtaactgctagactgtctcatttttttga

SEQ ID NO: 701167 - DNA, 272 bp, Homo sapiens
tgtctgttcatgtggcaggcagcaacaaagttcacggggtgcccactgcacctgtgtgaactgggggtcctcgctgggggcacctgctaggcgagcattgacccttttttggattgtcctcagcaagaggacagcggcgttgggactccccacccggtgcatggaggcggcagccatctgctcgaagtggctagcgcagtctcggcagccgaagaagtagtgcacgtagcctcggatggctgggaggacctccttggccttgccatatgcga

SEQ ID NO: 701168 - DNA, 619 bp, Homo sapiens
  misc_feature (232)..(234): n is a, c, g, or t
tagagacagtgtctcactctgtctcccaggctagagtacagtgtgcaatcatagctcactgcagccttgaactcctggcctcaagcaatcctcccaccttggcttcccaatgtgctaggtttacagccgaaagggagggagggtgtgggtgtgcgtgtgtgcatgtgctggtgtgtaagggggaaagggtctttcctggttttatttaaataaagtagtttatgtaacagtnnngaagacaaaaacaaacacagaagaaagacatagaaagaagagaaaaaacgacaatgaacccagcagagcgcggagggccgcaggagaagacccgcacgatcagtgggcgcccgcactacgaggcctgacccgacgcgcggtcgaggacgcccggacctcacccaaaatagaaggcggcgactctgagggatcccctcgtgacagagtgtgcgtctccttaccctcccaatggggagccatcccgccgattggcgtagagcagaaacagagccttagaggcactcagcgcacggctcgggaactagcggaaccggactagctgtaccgaaggggcgttggtccaacctcgtcgtgaggcagatacatctggccgccgcggaagcaa

SEQ ID NO: 701169 - DNA, 924 bp, Homo sapiens
gcaactccttgcactcatcgccctctggaagcgggccttgtgacgagttgcggctgaccttccctgtgcgcgatggggtggtcctggagcccttccgcctgcagcacaacctggctgtaagcaaccatgtcttccagctgcgagactcagtctacaagaccctgataatgaggcctgacctggagctgcaattcaagtgctaccaccacgaggaccggcagatgaacaccaactggccagcctcggtgcaggtcagcgtcaatgccacgccgtcaacattcgaagcgtggggagaacaagagcctcgcacaagacactctatctgctaggcatgtgtggtaggccaggacgcaagaacatccatataaatgtcaggactggtgtgtgggtgatcccacttgatcgtgctgcatgtaggtgcacgcgccacatccgtccggtcggtgctgcaggggcctcctcaaaaagcgcttctgcctgtgagcacttgattcaccaaggataaagcggaacttcagcagggcaccatccctggcacccctgggccaacggagaggacggggtggagcagacagtatcaggtgtccctgaagtgcccatcaccttccgaggatccaagctccctgcccgaggtcatgactggtcggcacatacagggcttttgacctggagtcgataccctgcagactccaatggagcgggggacttggaggggtctggtgtggcacaaaaccaattgctgggagggccgggaggggggcccaacaacgcgggggactccctgatttatttcggaaagttcgcttgtgaagggagacacattcgcacccgtgtggtgtaatacaaggcctggatacctacagataccaaggaggacgcgagtgggaacaataagagcgcgaatgatgccccaagtttgatgcg

SEQ ID NO: 701170 - DNA, 343 bp, Homo sapiens
gggcacagaagatgatggcagtcacatcgttgaagcactggatccactcgcggcgttcatcgggctggccacccacgtcaaacatgtggaagcttgactttgcgcacgctggaacttggtctcaacagattccagcacgtcaggacacggcagcgaacgcgtgtcctgatcggctcgcgacatacgtcagcctgctgtgatcaggtcgatcttgtccagggaagtactgggcacagtcaatcagctggtactcgtgggagcgttcgtagcaggcacgcactcctacatcctcccagagagccttggaatgctcatagcattcgggaggcaagtcaaagtcagg

SEQ ID NO: 701171 - DNA, 3125 bp, Homo sapiens
  misc_feature (9)..(9): n is a, c, g, or t
ttgctgggngggagggggggagattgtttgcagcatagaagctccgcgggacgggaaggtaaactgagctccccagagacgctcatcctacagcctcagctcgggcccagccttctctctccagctgccaccacagcctggaggcgcctgcctccaccctcccgaatggtgctcctcctagcaggcctcggtccaggatccaagccccctttgccccctgccttggagctgttgctccgggtttgtcacagtggactccctgtggcgggaagggaagaacttttgcacagacaaggcttcagctctaggaaccccactgacaacttgaatctcaacctctaacctagtgtgaggttcttcctgtgcccaccttttctgccttttgagaagagaaactcttctcctggccatctagagcccaggaagccccaagctggggccctggtcccagcatgtcagtcctctcttgtgcatagggctctgccctccccctgtcagcatggctgagctcagacaggttccaggagggcgggagaccccacagggggagctgcggcctgaagttgtagaggatgaagtccctaggagcccagtcgcagaagagcctggaggaggtggaagcagcagcagtgaggccaaattgtccccaagagaggaggaagaactggatcctagaatacaggaggagttggagcacctgaaccaggccagcgaggagatcaaccaggtggaactacagctggatgaggccaggaccacctatcggaggatcctacaggagtcggcgaggaaactgaatacacagggttcccacttggggagctgcatcgagaaagcccggccctactatgaggctcggcggctggctaaggaggctcagcaggagacacagaaggcagcgctgcggtacgagcgggccgtaagcatgcacaacgctgctcgagaaatggtgtttgtggctgagcagggcgtcatggctgacaagaaccgactggaccccacgtggcaggagatgctgaaccatgctacctgcaaggtgaatgaggcggaggaagagcggcttcgaggtgagcgggagcaccagcgagtgactcggctgtgccaacaggctgaggctcgggtccaagccctgcagaagaccctccggagggccatcggcaagagccgcccctactttgagctcaaggcccagttcagccagatcctggaggagcacaaggccaaggtgacagaactggagcagcaggtagctcaggccaagacgcgctactccgtggcccttcgtaacctggagcagatcagcgagcagattcacgcacggcgccgcgggggtctgcctccccaccccctgggccctcggcgctcctcccccgtgggggccgaggcaggacccgaggacatggaggacggagacagcgggattgagggggccgagggtgcggggctggaggagggcagcagcctggggcccggccccgcccccgacaccgataccctgagtctgctgagcctgcgcacggtggcttcagacctgcagaagtgcgactccgtggagcacttgcgaggcctctcggaccacgtcagtctggacggccaagagctgggaacgcggagtggagggcgccggggcagcgacggcggagcccgtgggggtcggcaccagcgcagcgtcagcctgtagccgaggggccagggttcctggcttgaatctgccaccacgggccggttggggcccacagtcttctcacgccctctcctctggggcctcgtcttcccgaaggtccccttctccagtgcttccctgggagaggccagctgtgttcgagtcctctgtgcctgccctggcgttctcacagcctcccccttcccctcagcaggcggctctctttgccttacccattcagaaggctcgccctcggcgctctgtctgcctctgcctgccagctcatcacgatctgcagggcattgaccctttgctttccctttctgctccctctctttccatctgtttggctttttccctcagggaacttggtctagaaggcactgggaagctcatcagagaaaatgggtgctgggcctgagtactcccgtcggaggggatggacagtcacccctcccgttggtttccagccccgccccccttcccaaggcaactctggagggtaccctaggtatgctgctgagccctgccccccgtcctgctccagcctgcccgtgtgtaacctgtaagatgtactgtgtgcctccggaagacaccacctttcccttcagcattccctttcatgacctgaggcactctgcgatgtgtgccccaaagcagaacttacagggcctgcaggaagctggtgtcagggagagaaacccaaccccactgtcaacatagggagcatcaccaactccagactggctcctgtgggtatggtgtttccgctgggctgggtcctcaacattgccaaggtgctagtgggtccctaagagggcccatgttgggggtgaagtcatgaggtcctgaaggcttaggcccctgtcattcccaccctcactcttgctgcacagttgtgtttactttttctgggtagaggatgctgaactgactcagcaccctcctgcaggacggggttagggaatttggtgctcaattgctctcccttgctcttccccaaactgaaaatacctactgcaggatccctcggggcacactgaagcttggctgccaaccctcttacttcctttgttacagggaggggttggcttggggtgaaaagttctgccctccgcagggagcagctccagctgcctggcagtgctcccagtttgtagggaagccacaccagatctgggtgccttgggagaaccagtccttccttttgacccaccccaggaagatggagtgctcttttctaggcccatgttctgccagcaaccgggatgcgtgggcaactggactctgcacgggggtctacaggttgagggaggttggtcacaatgagaacctcggggtttgaggtggccatgggcagacagccgaaagggagggagggtgtgggtgtgcgtgtgtgcatgtgctggtgtgtaagggggaaagggtctttcctggttttatttaaataaagtagtttatg

SEQ ID NO: 701172 - DNA, 2075 bp, Homo sapiens
agggctgtaccggtccggagatttaggatcctagaggtgacaagcaggcgctcgctcagtgagctaggtgcaagtccagaggcctcgaggagtgggatttacacatcggagccgtccgctcagacgccgttagtggagggttccgcgacttcacgggagtgaggaaagtcacttttggaaatcgactttgccttcgcccgcgaagcccgcagcgtccggactcgagttgcccccggagccactgccggaagtttaccagctcactttcggcgtcgcgcccgcctccgtggagcaggccggaagtggctttccggcagccgcgccgcagctccgtaaagcaagatggcactactcactctgagacagcgggattgagggggccgagggtgcggggctggaggagggcagcagcctggggcccggccccgcccccgacaccgataccctgagtctgctgagcctgcgcacggtggcttcagacctgcagaagtgcgactccgtggagcacttgcgaggcctctcggaccacgtcagtctggacggccaagagctgggaacgcggagtggagggcgccggggcagcgacggcggagcccgtgggggtcggcaccagcgcagcgtcagcctgtagccgaggggccagggttcctggcttgaatctgccaccacgggccggttggggcccacagtcttctcacgccctctcctctggggcctcgtcttcccgaaggtccccttctccagtgcttccctgggagaggccagctgtgttcgagtcctctgtgcctgccctggcgttctcacagcctcccccttcccctcagcaggcggctctctttgccttacccattcagaaggctcgccctcggcgctctgtctgcctctgcctgccagctcatcacgatctgcagggcattgaccctttgctttccctttctgctccctctctttccatctgtttggctttttccctcagggaacttggtctagaaggcactgggaagctcatcagagaaaatgggtgctgggcctgagtactcccgtcggaggggatggacagtcacccctcccgttggtttccagccccgccccccttcccaaggcaactctggagggtaccctaggtatgctgctgagccctgccccccgtcctgctccagcctgcccgtgtgtaacctgtaagatgtactgtgtgcctccggaagacaccacctttcccttcagcattccctttcatgacctgaggcactctgcgatgtgtgccccaaagcagaacttacagggcctgcaggaagctggtgtcagggagagaaacccaaccccactgtcaacatagggagcatcaccaactccagactggctcctgtgggtatggtgtttccgctgggctgggtcctcaacattgccaaggtgctagtgggtccctaagagggcccatgttgggggtgaagtcatgaggtcctgaaggcttaggcccctgtcattcccaccctcactcttgctgcacagttgtgtttactttttctgggtagaggatgctgaactgactcagcaccctcctgcaggacggggttagggaatttggtgctcaattgctctcccttgctcttccccaaactgaaaatacctactgcaggatccctcggggcacactgaagcttggctgccaaccctcttacttcctttgttacagggaggggttggcttggggtgaaaagttctgccctccgcagggagcagctccagctgcctggcagtgctcccagtttgtagggaagccacaccagatctgggtgccttgggagaaccagtccttccttttgacccaccccaggaagatggagtgctcttttctaggcccatgttctgccagcaaccgggatgcgtgggcaactggactctgcacgggggtctacaggttgagggaggttggtcacaatgagaacctcggggtttgaggtggccatgggcagacagccgaaagggagggagggtgtgggtgtgcgtgtgtgcatgtgctggtgtgtaagggggaaagggtctttcctggttttatttaaataaagtagtttatg

SEQ ID NO: 701173 - DNA, 3520 bp, Homo sapiens
  misc_feature (9)..(9): n is a, c, g, or t
  misc_feature (3133)..(3135): n is a, c, g, or t
ttgctgggngggagggggggagattgtttgcagcatagaagctccgcgggacgggaaggtaaactgagctccccagagacgctcatcctacagcctcagctcgggcccagccttctctctccagctgccaccacagcctggaggcgcctgcctccaccctcccgaatggtgctcctcctagcaggcctcggtccaggatccaagccccctttgccccctgccttggagctgttgctccgggtttgtcacagtggactccctgtggcgggaagggaagaacttttgcacagacaaggcttcagctctaggaaccccactgacaacttgaatctcaacctctaacctagtgtgaggttcttcctgtgcccaccttttctgccttttgagaagagaaactcttctcctggccatctagagcccaggaagccccaagctggggccctggtcccagcatgtcagtcctctcttgtgcatagggctctgccctccccctgtcagcatggctgagctcagacaggttccaggagggcgggagaccccacagggggagctgcggcctgaagttgtagaggatgaagtccctaggagcccagtcgcagaagagcctggaggaggtggaagcagcagcagtgaggccaaattgtccccaagagaggaggaagaactggatcctagaatacaggaggagttggagcacctgaaccaggccagcgaggagatcaaccaggtggaactacagctggatgaggccaggaccacctatcggaggatcctacaggagtcggcgaggaaactgaatacacagggttcccacttggggagctgcatcgagaaagcccggccctactatgaggctcggcggctggctaaggaggctcagcaggagacacagaaggcagcgctgcggtacgagcgggccgtaagcatgcacaacgctgctcgagaaatggtgtttgtggctgagcagggcgtcatggctgacaagaaccgactggaccccacgtggcaggagatgctgaaccatgctacctgcaaggtgaatgaggcggaggaagagcggcttcgaggtgagcgggagcaccagcgagtgactcggctgtgccaacaggctgaggctcgggtccaagccctgcagaagaccctccggagggccatcggcaagagccgcccctactttgagctcaaggcccagttcagccagatcctggaggagcacaaggccaaggtgacagaactggagcagcaggtagctcaggccaagacgcgctactccgtggcccttcgtaacctggagcagatcagcgagcagattcacgcacggcgccgcgggggtctgcctccccaccccctgggccctcggcgctcctcccccgtgggggccgaggcaggacccgaggacatggaggacggagacagcgggattgagggggccgagggtgcggggctggaggagggcagcagcctggggcccggccccgcccccgacaccgataccctgagtctgctgagcctgcgcacggtggcttcagacctgcagaagtgcgactccgtggagcacttgcgaggcctctcggaccacgtcagtctggacggccaagagctgggaacgcggagtggagggcgccggggcagcgacggcggagcccgtgggggtcggcaccagcgcagcgtcagcctgtagccgaggggccagggttcctggcttgaatctgccaccacgggccggttggggcccacagtcttctcacgccctctcctctggggcctcgtcttcccgaaggtccccttctccagtgcttccctgggagaggccagctgtgttcgagtcctctgtgcctgccctggcgttctcacagcctcccccttcccctcagcaggcggctctctttgccttacccattcagaaggctcgccctcggcgctctgtctgcctctgcctgccagctcatcacgatctgcagggcattgaccctttgctttccctttctgctccctctctttccatctgtttggctttttccctcagggaacttggtctagaaggcactgggaagctcatcagagaaaatgggtgctgggcctgagtactcccgtcggaggggatggacagtcacccctcccgttggtttccagccccgccccccttcccaaggcaactctggagggtaccctaggtatgctgctgagccctgccccccgtcctgctccagcctgcccgtgtgtaacctgtaagatgtactgtgtgcctccggaagacaccacctttcccttcagcattccctttcatgacctgaggcactctgcgatgtgtgccccaaagcagaacttacagggcctgcaggaagctggtgtcagggagagaaacccaaccccactgtcaacatagggagcatcaccaactccagactggctcctgtgggtatggtgtttccgctgggctgggtcctcaacattgccaaggtgctagtgggtccctaagagggcccatgttgggggtgaagtcatgaggtcctgaaggcttaggcccctgtcattcccaccctcactcttgctgcacagttgtgtttactttttctgggtagaggatgctgaactgactcagcaccctcctgcaggacggggttagggaatttggtgctcaattgctctcccttgctcttccccaaactgaaaatacctactgcaggatccctcggggcacactgaagcttggctgccaaccctcttacttcctttgttacagggaggggttggcttggggtgaaaagttctgccctccgcagggagcagctccagctgcctggcagtgctcccagtttgtagggaagccacaccagatctgggtgccttgggagaaccagtccttccttttgacccaccccaggaagatggagtgctcttttctaggcccatgttctgccagcaaccgggatgcgtgggcaactggactctgcacgggggtctacaggttgagggaggttggtcacaatgagaacctcggggtttgaggtggccatgggcagacagccgaaagggagggagggtgtgggtgtgcgtgtgtgcatgtgctggtgtgtaagggggaaagggtctttcctggttttatttaaataaagtagtttatgtaacagtnnngaagacaaaaacaaacacagaagaaagacatagaaagaagagaaaaaacgacaatgaacccagcagagcgcggagggccgcaggagaagacccgcacgatcagtgggcgcccgcactacgaggcctgacccgacgcgcggtcgaggacgcccggacctcacccaaaatagaaggcggcgactctgagggatcccctcgtgacagagtgtgcgtctccttaccctcccaatggggagccatcccgccgattggcgtagagcagaaacagagccttagaggcactcagcgcacggctcgggaactagcggaaccggactagctgtaccgaaggggcgttggtccaacctcgtcgtgaggcagatacatctggccgccgcggaagcaa

SEQ ID NO: 701174 - DNA, 1035 bp, Homo sapiens
tggcacgagggtgctgggcctgagtactcccgttggtttccagccccgccccccttcccaaggcaactctggagggtaccctaggtatgctgctgagccctgccccccgtcctgctccagcctgcccgtgtgtaacctgtaagatgtactgtgtgcctccggaagacaccacctttcccttcagcattccctttcatgacctgaggcactctgcgatgtgtgccccaaagcagaacttacagggcctgcaggaagctggtgtcagggagagaaacccaaccccactgtcaacatagggagcatcaccaactccagactggctcctgtgggtatggtgtttccgctgggctgggtcctcaacattgccaaggtgctagtgggtccctaagagggcccatgttgggggtgaagtcatgaggtcctgaaggcttaggcccctgtcattcccaccctcactcttgctgcacagttgtgtttactttttctgggtagaggatgctgaactgactcagcaccctcctgcaggacggggttagggaatttggtgctcaattgctctcccttgctcttccccaaactgaaaatacctactgcaggatccctcggggcacactgaagcttggctgccaaccctcttacttcctttgttacagggaggggttggcttggggtgaaaagttctgccctccgcagggagcagctccagctgcctggcagtgctcccagtttgtagggaagccacaccagatctgggtgccttgggagaaccagtccttccttttgacccaccccaggaagatggagtgctcttttctaggcccatgttctgccagcaaccgggatgcgtgggcaactggactctgcacgggggtctacaggttgagggaggttggtcacaatgagaacctcggggtttgaggtggccatgggcagacagccgaaagggagggagggtgtgggtgtgcgtgtgtgcatgtgctggtgtgtaagggggaaagggtctttcctggttttatttaaataaagtagtttatg

SEQ ID NO: 701175 - DNA, 3071 bp, Homo sapiens
  misc_feature (9)..(9): n is a, c, g, or t
ttgctgggngggagggggggagattgtttgcagcatagaagctccgcgggacgggaaggtaaactgagctccccagagacgctcatcctacagcctcagctcgggcccagccttctctctccagctgccaccacagcctggaggcgcctgcctccaccctcccgaatggtgctcctcctagcaggcctcggtccaggatccaagccccctttgccccctgccttggagctgttgctccgggtttgtcacagtggactccctgtggcgggaagggaagaacttttgcacagacaaggcttcagctctaggaaccccactgacaacttgaatctcaacctctaacctagtgtgaggttcttcctgtgcccaccttttctgccttttgagaagagaaactcttctcctggccatctagagcccaggaagccccaagctggggccctggtcccagcatgtcagtcctctcttgtgcatagggctctgccctccccctgtcagcatggctgagctcagacaggttccaggagggcgggagaccccacagggggagctgcggcctgaagttgtagaggatgaagtccctaggagcccagtcgcagaagagcctggaggaggtggaagcagcagcagtgaggccaaattgtccccaagagaggaggaagaactggatcctagaatacaggaggagttggagcacctgaaccaggccagcgaggagatcaaccaggtggaactacagctggatgaggccaggaccacctatcggaggatcctacaggagtcggcgaggaaactgaatacacagggttcccacttggggagctgcatcgagaaagcccggccctactatgaggctcggcggctggctaaggaggctcagcaggagacacagaaggcagcgctgcggtacgagcgggccgtaagcatgcacaacgctgctcgagaaatggtgtttgtggctgagcagggcgtcatggctgacaagaaccgactggaccccacgtggcaggagatgctgaaccatgctacctgcaaggtgaatgaggcggaggaagagcggcttcgaggtgagcgggagcaccagcgagtgactcggctgtgccaacaggctgaggctcgggtccaagccctgcagaagaccctccggagggccatcggcaagagccgcccctactttgagctcaaggcccagttcagccagatcctggaggagcacaaggccaaggtgacagaactggagcagcaggtagctcaggccaagacgcgctactccgtggcccttcgtaacctggagcagatcagcgagcagattcacgcacggcgccgcgggggtctgcctccccaccccctgggccctcggcgctcctcccccgtgggggccgaggcaggacccgaggacatggaggacggagacagcgggattgagggggccgagggtgcggggctggaggagggcagcagcctggggcccggccccgcccccgacaccgataccctgagtctgctgagcctgcgcacggtggcttcagacctgcagaagtgcgactccgtggagcacttgcgaggcctctcggaccacgtcagtctggacggccaagagctgggaacgcggagtggagggcgccggggcagcgacggcggagcccgtgggggtcggcaccagcgcagcgtcagcctgtagccgaggggccagggttcctggcttgaatctgccaccacgggccggttggggcccacagtcttctcacgccctctcctctggggcctcgtcttcccgaaggtccccttctccagtgcttccctgggagaggccagctgtgttcgagtcctctgtgcctgccctggcgttctcacagcctcccccttcccctcagcaggcggctctctttgccttacccattcagaaggctcgccctcggcgctctgtctgcctctgcctgccagctcatcacgatctgcagggcattgaccctttgctttccctttctgctccctctctttccatctgtttggctttttccctcagggaacttggtctagaaggcactgggaagctcatcagagaaaatgggtgctgggcctgagtactcccgtcggaggggatggacagtcacccctcccgttggtttccagccccgccccccttcccaaggcaactctggagggtaccctaggtatgctgctgagccctgccccccgtcctgctccagcctgcccgtgtgtaacctgtaagatgtactgtgtgcctccggaagacaccacctttcccttcagcattccctttcatgacctgaggcactctgcgatgtgtgccccaaagcagaacttacagggcctgcaggaagctggtgtcagggagagaaacccaaccccactgtcaacatagggagcatcaccaactccagactggctcctgtgggtatggtgtttccgctgggctgggtcctcaacattgccaaggtgctagtgggtccctaagagggcccatgttgggggtgaagtcatgaggtcctgaaggcttaggcccctgtcattcccaccctcactcttgctgcacagttgtgtttactttttctgggtagaggatgctgaactgactcagcaccctcctgcaggacggggttagggaatttggtgctcaattgctctcccttgctcttccccaaactgaaaatacctactgcaggatccctcggggcacactgaagcttggctgccaaccctcttacttcctttgttacagggaggggttggcttggggtgttgtagggaagccacaccagatctgggtgccttgggagaaccagtccttccttttgacccaccccaggaagatggagtgctcttttctaggcccatgttctgccagcaaccgggatgcgtgggcaactggactctgcacgggggtctacaggttgagggaggttggtcacaatgagaacctcggggtttgaggtggccatgggcagacagccgaaagggagggagggtgtgggtgtgcgtgtgtgcatgtgctggtgtgtaagggggaaagggtctttcctggttttatttaaataaagtagtttatg

SEQ ID NO: 701176 - DNA, 3077 bp, Homo sapiens
  misc_feature (9)..(9): n is a, c, g, or t
  misc_feature (2690)..(2692): n is a, c, g, or t
ttgctgggngggagggggggagattgtttgcagcatagaagctccgcgggacgggaaggtaaactgagctccccagagacgctcatcctacagcctcagctcgggcccagccttctctctccagctgccaccacagcctggaggcgcctgcctccaccctcccgaatggtgctcctcctagcaggcctcggtccaggatccaagccccctttgccccctgccttggagctgttgctccgggtttgtcacagtggactccctgtggcgggaagggaagaacttttgcacagacaaggcttcagctctaggaaccccactgacaacttgaatctcaacctctaacctagtgtgaggttcttcctgtgcccaccttttctgccttttgagaagagaaactcttctcctggccatctagagcccaggaagccccaagctggggccctggtcccagcatgtcagtcctctcttgtgcatagggctctgccctccccctgtcagcatggctgagctcagacaggttccaggagggcgggagaccccacagggggagctgcggcctgaagttgtagaggatgaagtccctaggagcccagtcgcagaagagcctggaggaggtggaagcagcagcagtgaggccaaattgtccccaagagaggaggaagaactggatcctagaatacaggaggagttggagcacctgaaccaggccagcgaggagatcaaccaggtggaactacagctggatgaggccaggaccacctatcggaggatcctacaggagtcggcgaggaaactgaatacacagggttcccacttggggagctgcatcgagaaagcccggccctactatgaggctcggcggctggctaaggaggctcagcaggagacacagaaggcagcgctgcggtacgagcgggccgtaagcatgcacaacgctgctcgagaaatggtgtttgtggctgagcagggcgtcatggctgacaagaaccgactggaccccacgtggcaggagatgctgaaccatgctacctgcaaggtgaatgaggcggaggaagagcggcttcgaggtgagcgggagcaccagcgagtgactcggctgtgccaacaggctgaggctcgggtccaagccctgcagaagaccctccggagggccatcggcaagagccgcccctactttgagctcaaggcccagttcagccagatcctggaggagcacaaggccaaggtgacagaactggagcagcaggtagctcaggccaagacgcgctactccgtggcccttcgtaacctggagcagatcagcgagcagattcacgcacggcgccgcgggggtctgcctccccaccccctgggccctcggcgctcctcccccgtgggggccgaggcaggacccgaggacatggaggacggagacagcgggattgagggggccgagggtgcggggctggaggagggcagcagcctggggcccggccccgcccccgacaccgataccctgagtctgctgagcctgcgcacggtggcttcagacctgcagaagtgcgactccgtggagcacttgcgaggcctctcggaccacgtcagtctggacggccaagagctgggaacgcggagtggagggcgccggggcagcgacggcggagcccgtgggggtcggcaccagcgcagcgtcagcctgtagccgaggggccagggttcctggcttgaatctgccaccacgggccggttggggcccacagtcttctcacgccctctcctctggggcctcgtcttcccgaaggtccccttctccagtgcttccctgggagaggccagctgtgttcgagtcctctgtgcctgccctggcgttctcacagcctcccccttcccctcagcaggcggctctctttgccttacccattcagaaggctcgccctcggcgctctgtctgcctctgcctgccagctcatcacgatctgcagggcattgaccctttgctttccctttctgctccctctctttccatctgtttggctttttccctcagggaacttggtctagaaggcactgggaagctcatcagagaaaatgggtgctgggcctgagtactcccgtcggaggggatggacagtcacccctcccgttggtttccagccccgccccccttcccaaggcaactctggagggtaccctaggtatgctgctgagccctgccccccgtcctgctccagcctgcccgtgtgtaacctgtaagatgtactgtgtgcctccggaagacaccacctttcccttcagcattccctttcatgacctgaggcactctgcgatgtgtgccccaaagcagaacttacagggcctgcaggaagctggtgtcagggagagaaacccaaccccattgtagggaagccacaccagatctgggtgccttgggagaaccagtccttccttttgacccaccccaggaagatggagtgctcttttctaggcccatgttctgccagcaaccgggatgcgtgggcaactggactctgcacgggggtctacaggttgagggaggttggtcacaatgagaacctcggggtttgaggtggccatgggcagacagccgaaagggagggagggtgtgggtgtgcgtgtgtgcatgtgctggtgtgtaagggggaaagggtctttcctggttttatttaaataaagtagtttatgtaacagtnnngaagacaaaaacaaacacagaagaaagacatagaaagaagagaaaaaacgacaatgaacccagcagagcgcggagggccgcaggagaagacccgcacgatcagtgggcgcccgcactacgaggcctgacccgacgcgcggtcgaggacgcccggacctcacccaaaatagaaggcggcgactctgagggatcccctcgtgacagagtgtgcgtctccttaccctcccaatggggagccatcccgccgattggcgtagagcagaaacagagccttagaggcactcagcgcacggctcgggaactagcggaaccggactagctgtaccgaaggggcgttggtccaacctcgtcgtgaggcagatacatctggccgccgcggaagcaa

SEQ ID NO: 701177 - DNA, 419 bp, Homo sapiens
aagggtttatttactggactctggattctgtttccattgtatctgtgttttcctttcttttgccagttaccactacactagtattcattatctgtaccttcgtagataaaatttgatattgagacatgggatttctccaacttcattctttttcaagactgtattggctattctgggttattgataacactttgtcatatttgcactcttgttgttgttgttatgatgtgtctcattcataaagctagctactgacatcatgggaatttgccattgatacttccgcatatcttttctacgataatatgcatttctctacaagaccacaataccattgtcacatccgaatcacttaaaattatggaatatgtaatccatactcacatttcccttgttgtctttattctatattataataa

SEQ ID NO: 701178 - DNA, 2771 bp, Homo sapiens
  misc_feature (9)..(9): n is a, c, g, or t
  misc_feature (2384)..(2386): n is a, c, g, or t
ttgctgggngggagggggggagattgtttgcagcatagaagctccgcgggacgggaaggtaaactgagctccccagagacgctcatcctacagcctcagctcgggcccagccttctctctccagctgccaccacagcctggaggcgcctgcctccaccctcccgaatggtgctcctcctagcaggcctcggtccaggatccaagccccctttgccccctgccttggagctgttgctccgggtttgtcacagtggactccctgtggcgggaagggaagaacttttgcacagacaaggcttcagctctaggaaccccactgacaacttgaatctcaacctctaacctagtgtgaggttcttcctgtgcccaccttttctgccttttgagaagagaaactcttctcctggccatctagagcccaggaagccccaagctggggccctggtcccagcatgtcagtcctctcttgtgcatagggctctgccctccccctgtcagcatggctgagctcagacaggttccaggagggcgggagaccccacagggggagctgcggcctgaagttgtagaggatgaagtccctaggagcccagtcgcagaagagcctggaggaggtggaagcagcagcagtgaggccaaattgtccccaagagaggaggaagaactggatcctagaatacaggaggagttggagcacctgaaccaggccagcgaggagatcaaccaggtggaactacagctggatgaggccaggaccacctatcggaggatcctacaggagtcggcgaggaaactgaatacacagggttcccacttggggagctgcatcgagaaagcccggccctactatgaggctcggcggctggctaaggaggctcagcaggagacacagaaggcagcgctgcggtacgagcgggccgtaagcatgcacaacgctgctcgagaaatggtgtttgtggctgagcagggcgtcatggctgacaagaaccgactggaccccacgtggcaggagatgctgaaccatgctacctgcaaggtgaatgaggcggaggaagagcggcttcgaggtgagcgggagcaccagcgagtgactcggctgtgccaacaggctgaggctcgggtccaagccctgcagaagaccctccggagggccatcggcaagagccgcccctactttgagctcaaggcccagttcagccagatcctggaggagcacaaggccaaggtgacagaactggagcagcaggtagctcaggccaagacgcgctactccgtggcccttcgtaacctggagcagatcagcgagcagattcacgcacggcgccgcgggggtctgcctccccaccccctgggccctcggcgctcctcccccgtgggggccgaggcaggacccgaggacatggaggacggagacagcgggattgagggggccgagggtgcggggctggaggagggcagcagcctggggcccggccccgcccccgacaccgataccctgagtctgctgagcctgcgcacggtggcttcagacctgcagaagtgcgactccgtggagcacttgcgaggcctctcggaccacgtcagtctggacggccaagagctgggaacgcggagtggagggcgccggggcagcgacggcggagcccgtgggggtcggcaccagcgcagcgtcagcctgtagccgaggggccagggttcctggcttgaatctgccaccacgggccggttggggcccacagtcttctcacgccctctcctctggggcctcgtcttcccgaaggtccccttctccagtgcttccctgggagaggccagctgtgttcgagtcctctgtgcctgccctggcgttctcacagcctcccccttcccctcagcaggcggctctctttgccttacccattcagaaggctcgccctcggcgctctgtctgcctctgcctgccagctcatcacgatctgcagggcattgaccctttgctttccctttctgctccctctctttccatctgtttggctttttccctcagggaacttggtctagaaggcactgggaagctcatcagagaaaatgggtgctgggcctgagtactcccgtcggaggggatggacagtcacccctcccgttggtttccagccccgccccccttcccaaggcaactctggagggtaccctaggtatgctgctgagccctgccccccgtcctgctccagcctgcccgtgtgtaacctgtaagatgtactgtgtgcctccggaagacaccacctttcccttcagccagccgaaagggagggagggtgtgggtgtgcgtgtgtgcatgtgctggtgtgtaagggggaaagggtctttcctggttttatttaaataaagtagtttatgtaacagtnnngaagacaaaaacaaacacagaagaaagacatagaaagaagagaaaaaacgacaatgaacccagcagagcgcggagggccgcaggagaagacccgcacgatcagtgggcgcccgcactacgaggcctgacccgacgcgcggtcgaggacgcccggacctcacccaaaatagaaggcggcgactctgagggatcccctcgtgacagagtgtgcgtctccttaccctcccaatggggagccatcccgccgattggcgtagagcagaaacagagccttagaggcactcagcgcacggctcgggaactagcggaaccggactagctgtaccgaaggggcgttggtccaacctcgtcgtgaggcagatacatctggccgccgcggaagcaa

SEQ ID NO: 701179 - DNA, 1303 bp, Homo sapiens
gtagttctcaatgtgctgctgattacctgtcttatgtaactactagagaccatctgcaaggagacatgatttagtgtgtcgtgtaattcaagtcgttcgctgtgtgtggtagaagcagtagtcacttgtgtaagccagtctcttcatgcctaaaagacactaccagtcaccttggattcgcgacgttttaatttatgattatacttagcctcctcctccttttgatttatttgcccaagtggactggacttggcttttttccccccaagtagaactaatgctagcttccaggctgtgaaagtaaaactccagttgtggacgtgaatccggtgtctaagttgataaaccggtaaccaaaactcagacatcgggtacgggccttggcactggagatgggtccctgtaaaaccccctttaaaacgcatatggcatctagtacagagctctctcggaaagtgaaggcgtggacgatgtcgcatcacccaccggggctcaccagggctggaactcgtcaactcagcacaggcagacttggcggcgctccaccgaagctgctccacgcatgcagctgcgcctcacacttggccaggcgaacagctggcaggctgcacagcacagggcacgtgaagacagctcctgcggcaagcccaacactgggctgacattcaaggggcctgaatctactacgaagaccccatggggacatcacacaccactatccaccataactccccaggaaccattaccgggggccattaccggacacggcaagcaaaagagtcgcaaccggcacacagagcgaggtgcgcgctccacacaagacacgtgggcacgagtcggaactaacactccgcgaccccattagcgcccgaccatggacaaaccacagagccaccgaagagaacaccagacgacctgagcatcagcgcaccagacgcgaacgaaactgcggacgcaactcatcgacgaacgccccactatcacgacgaactaggccccactcagccagcatgacacagttcgaccccaatgggagacacttcgctgacacaaggagagaccaaggcgccaccaacgggggcacacaccccatactgaagccgggcgcacctcaaactttacgtcagagcgaaacaaaaacaaggggacctccaacgcgggacatcgtacgagccacaccagcaccacagcacacaacggacacacacatgaacacagcgagctgcacacccaggcagagactgctccaacacacgacagcgaccgcagtcatccactcgccccccaaccgaccgaccacggc

SEQ ID NO: 701180 - DNA, 112 bp, Homo sapiens
ctggaaccagtccagtgcccgatggtagtgtctgggagcgtagatatcacatgtccggagtcttggtgaggcagcacaatctgtggacagcacaagctggtgaccggcacaa

SEQ ID NO: 701181 - DNA, 565 bp, Homo sapiens
agctctcagcccagagaggagggtagactgtgtcgcgctgagcgtatgatagggtggcctggaacaaggtttgggccgatgtataagcgggaccgggcccgtgaaacagcagaagaatggcacagattcgggccaatggcttcaagctggagactagggacccccgcatggtgaggtgcccacctgatcaggccactcgtctgtcgagcgtgaatacgtgctggcatcccaaacctgtgatgggcctgaggcccataggtgccatggccgccaggtacacctagcatgcgcgaccaacatgggcagactatctgcggagaccaccacgcaatctagcacattggccctgtcgcccccgggtgccacacgggtccaaactggccttggctacgctcataccacttgcctttcactggcacgtgccaatcaaacgtcttgagatacccctggacgccttaattgcacatggcgccacatcagcactgcggctagccggtacaggttacaccacgagcacctatctatggacgggcccaacgtggccctgcgctcctccttgcaactg

SEQ ID NO: 701182 - DNA, 268 bp, Homo sapiens
tcctccagagttcccccttctgttctgacccacctgctattagaatgcattgtgaaacgactgtagtatgattaaaagttgcgttccccaatgcttggggtagtggttgttgaaggaaaaaatccagctgagtgataaaggctgagtgttgaggaaatttctgcagttttaagcagtcgtatttgtgattgaagctgagtacattttgctggtgtatttttaggtaaaatgctttttgttcatttctggtggagggtcagaacataag

SEQ ID NO: 701183 - DNA, 787 bp, Homo sapiens
ggattttaaaatttggatccttcaggttcctctcaatctttgaggcatttcaaatgcttaccccttgctttctggttatacctgcaatcagcttgtgttgtggccatattagtgtgattcagatgaacttatagtaggaagaaatacttaggcattgtactctcagtaagaagtctcaactttctgattacggatcatgattattatatgtaaatggaaactccttgtagagttttcttttcactgttaatttgtactatttcgtaagtattgttttctactgattatcgagtagttgtggattattcatgtatcaacttggtttttctccttatccctgtgttcttataggattcctttgttagattattaaagcctgtctgtgatctgttttaactcattaagaaactggcggtagtgggccaggtgggtactgcctaatatctgtgatgatttatcttaaccttttataacagtattaatatttccccacatggcttgtgatgagactagtgtcactgaactgagcttgtacagacatttgggaagctggtctgggtggtcccgggggaaattttgggtgctggaaaataccaccaaaaattatctgtgagtattggttatagctttgtaggggcagtgggtttgttagaagggcaccggaaggcactcagggggggtatatggggcttgggcggtaagtttccagctttgaatggggccggtacctggtgggccccaggagtggggcccgttaaggaccggccttagaacccggtattggccc

SEQ ID NO: 701184 - DNA, 218 bp, Homo sapiens
gcggccgctactactactactaaattcgcggccgctcgacgagcagcttgcacctgtaatcccaggtactcctgaggctgaagcaagaagattgagcccaggagtttgaaattaaagtgagctataatcatgccattacactgtagcctgttcaacagaacaagaccttgccttgaagaggaaaacgaggaaggaaggagggagggagggagtcgacg

SEQ ID NO: 701185 - DNA, 210 bp, Homo sapiens
cctacatatctgtcttataaatcacctagattaacatccttgagggaaataacaataccatgattatctatgtatacagcctgtactagaaactcacacatagtacatactccataaatgcctgtccttggtagaataagataacggcaacatataaaccacaattaataggattcaagtatgtgcatgtacatggatatagttacaaca

SEQ ID NO: 701186 - DNA, 1149 bp, Homo sapiens
  misc_feature (177)..(177): n is a, c, g, or t
gacatctttttaaaaaaaataacaacaaaaaaaaaatgagagaaaagctaaaaaaaaaaaagttaaggggttgagcagttaagttggttattcatttccacattacaatattctggtgttaaaacgattttcctgtgtagaagttagctttaagtggttttggctctagaataccgntaggtctatccttagagcacttcacgccagtgcttttcttccctgtgggtttttaaacttcattattaactttcagaaattgtggagagcaaaaattttggctgtgtcactgcacattcaatattaaaaaagcttattttaaccttatcaaaaccgtattttattggccaaacctatgcttttttttgggttaactttggtccatatttatatcgggatgacaaattccattagaatatatttctttatatgttaacacttatgatcttcatattaatcttaaaactttggtgacggtgctcttttccctttttttccaaagtttcaatatattatctcttcaacgacattttcttggtaactttacacttttcttgggcaaattctccattttaacaaacatctgcaacaaattcaatttcacaaaattgcaaaaaactgctcggattatccatcttagaaaattcccccctttgtgttggactgccaacttgagtccttctccttaaggccctttcccaattaggcacggagactgtgtctgctaccagcttctggcgacagtcacagcaaggaaaacaactttacatgtatagcttctaacacacggggcacacacaaacacaacgaaaaccccttgagatctccagagttgtccacttttaaagaattcccgttcacaaaattttgagagacccacgaactccgggttgggaatttttaccaggtctcatggctaccagacctgcggccacccacaccttagcgatgacgtactctatatattcctcgagtaggcaacaacgcgcgcacacaaatctcacatacgcgggagagccttacaacgaaacaacttcgtgtcgcactagggccatgaacataagccggtttatcaaaaaaagggcggctaaatactagggaacaagacaacattcgtacagacccactagtaaataagacgactaaagcaac

SEQ ID NO: 701187 - DNA, 315 bp, Homo sapiens
agtctctagtatattgtgggctgcacaatgggaagcattttttttaaagcattggatattttgccaacccagaagagatataataaaccacaaaggtataaacttaacttctaaattaattaaatttattatttgtgatttgaaatatttaaaaaaccagtttgaactctccctttaatattaaaaaaattaaacaaaaagaaccacttaaaagcagataggttaatgtatacacaaaggcaatttttttccttcgcttttattaatctttaaagttttaatgggtgaatgaccttgctggaattcccctgtcag

SEQ ID NO: 701188 - DNA, 404 bp, Homo sapiens
gcaaataagaatagcttcgaatgcaattccatatcgagaatgacttccaccgctggtctgtcttgctgccatcagcactgctcaacatgtcatagacgggctctccgagtctttgggacattcatttaggatctgaagataaaaaggctgcttgttagaggcgtggggtttcaaagaaaagatgaagttgatcttaccggttcaagctaaaagttaattacctgcagaaataagcactttgaaatagaccataattaaggctcattgcccattgtggattttcttctattagacgagctgtgtttttctcccaaagctttatgtatctttttattatttgtatttatgaccaggcatgtgccacgctccaggttgtgaattaaactgatgggacgaagacggcg

SEQ ID NO: 701189 - DNA, 197 bp, Homo sapiens
tatccagagagagttataagcaattaggctgaaatcttggtaagatctgtgaccagatgacaaaccacagagaaacaataaagaaaggaagaaggtgtcctggccaggcacggtggctcacgcctgtaatcccagcactttgggagactaaggtgggcggatcacctgaggttgggagttcgagtctgtccaacatg

SEQ ID NO: 701190 - DNA, 287 bp, Homo sapiens
tccaacagaagccatactttatgtatgatagaaacagtacaaatccaaatcacgcggcagttactccttggagacaccaaaaaaggtggcttccatatggttacatggttaattccataatcgcatatacaatatcataagggtggttcttcagggctcggactgccttggctctcgacacattggctggtgacatgaccaattcaaggtccttaacttctacaccggtatcatcgacctcttcctcttcactctcctctggtacagtgggagaaggacgggtgggg

SEQ ID NO: 701191 - DNA, 283 bp, Homo sapiens
ccttctctggctcagccatcttatgaggcacagaaaacgtcaggtccccaatcacctcctcactggggtaggtaaacttgacgcaactagagtggatcagatcgtagtactacatcttcactgtggtcttgtacccaaactcaaaataaaagtccttgtcaacaggcaccggcgatggcgtgcgttccagagaggacagcacgaccatgatgtgctggatgaagcagagcgtaagtgtactgtcccgcgtcaagcacgtgaccaactgcatcggtgtagaacc

SEQ ID NO: 701192 - DNA, 290 bp, Homo sapiens
  misc_feature (20)..(20): n is a, c, g, or t
  misc_feature (22)..(23): n is a, c, g, or t
  misc_feature (91)..(91): n is a, c, g, or t
  misc_feature (225)..(225): n is a, c, g, or t
acagcactacccacaccgtncnnatgggggtgtgcaccagtaccgactccagccactgaagggtcaggagtcaagactcagacgggacttncctagggcttctggatttgggcaaacagaactgaatgagcccatagctgcttccttccagctgcctctggaacctaggccgagcatattgctgaggaacggggggtacaaggtgccagatgattgggtctggtngacaagaaacaagacttgtggtcacaattggcctctgcttcggagaaagctgtaaatcttgtctg

SEQ ID NO: 701193 - DNA, 1123 bp, Homo sapiens
gcaacaatctcgtatggagcatgtgaacaccgttgaagccttgcatgagtatccagtgatgtggtatattatgcatgaggtcgatccagagcataactagctctctctccgaagtcgtcgttaagctccagacactagaattagcctgcacgagtcccgtttcgcgttacccactactgataattgtagtagtgatcgcatcgagtcagagggggagctggatgatgaactgctgcatcatggcactacggtgaagcaccttgcgcgtgtgcctgtgtggtgtcagatgctgattgtgctggagtgagattctggtagagatagacgggacgtcgctgaggatagaaactggcccctggggtattggtggtcatggactctgaatacacgtcccatcgcatctactgacgagccacgaagtacacaagactcggagggtctttgttggtcggtaggagttccctacttgggatgcttatggggtagtcaggaattgcaccgatggacttgtggggattgggcgaaggagaagataaggctaggtatgcactcgtgggactgacctatttcaaccacatcatctgactgagcgtagtgatggagtgcctcttcctagtaggaagcgagagcctgcttgatcgatggcccacttggcattactatggaatgattacagccgcctcagtcttgggcgtggcctgaaaggggaacatcttggagagtgtccaagtgatccttctggcatttatggcgtcagacggttcaggggtcatcaatgctaattatgccagatcacgctacttcccgtcgtggggggactcatgctagatcaggggaacttggaactagaaataagaggactcttggctttgagactgccttcaaagagcctggttggagcactttgaatttgacggaaaacatgggaccgatggccacggaggaaggtggggccagaagagcccgcaaggtagtgttgtataaacctggactggttctgtgcttcaggctccaggggacttcttagaaagagtgtgtcgcatatgccggtgggcagtagcctgggaatccagattttccccgatcagggaagggctccactgccgcactctttgaaggactc

SEQ ID NO: 701194 - DNA, 426 bp, Homo sapiens
gaggggctccccccccaaatacccccccaccagggttaggtgaccattcaggtgatggtctggcggttgttgactgtctttctaaagtaataattggtcacacccggcaacagggaaaagccggctcctaatagatagaaaacactccgaaactggtgagcagtagtttccctataagatctcaggagttgagccagtgggctcaggcaggcacatgggacagcccaccccaagggaagaaccaggggagaaataacgcaagaccccgaaagcatgctgacgtataaaaccccaagtcaaaaggtcaaaccacgcacttgctttttaagtcgtccacttggccctcttccaagtgtactttccttccttttgttcctattctaaagcttttaaataaacttttactcctgtgctaaaacttgaaaa

SEQ ID NO: 701195 - DNA, 177 bp, Homo sapiens
  misc_feature (11)..(11): n is a, c, g, or t
gatcttaaganctaaccccactccaggccacaaggtatggtggggccatgtgcagcctgcacaggacttcagcccccactatgcacccaacacccacagatgaactacggtagctctggacatcctgtctatgacctcctacatcctagaaaaccctattgcccatgagttttgacc

SEQ ID NO: 701196 - DNA, 800 bp, Homo sapiens
gggtgcgcgcggagcgaggtggccgcagcgtctccgcgcgcggccaagcccggcaggagtgcggaaccgccgctcggccatgcggctcccggccggggggctgggctggtgtgcccgagcagccccctgggctcacgtccccggtgagcctgagcccgagcctggtggcgcctcccgacaggcaccatggtgcaggaatgtcgcgcaacgggtggcgtataccccgtgctctgagctggggggcgactgatgctgatggtgggcttcgtggggcatggaccccggtgctgcgcagagatcgcaaccgggtgacgtgggcgctgctgacttcgcctgggtctagaggccacccaacgccgcgagagcgatccttcagcagaccctcgctgctggggtggctgccggacgcaggtaaagcctccctaatgtgcaaaggcgttcttagcgaaagcatggacgaattgtcctctacagggttgcttggagcggctgcgccggaatacggcgccggtaacttctttagccacggcattaccgttgtgacccttcgcgttggtattcacttgcacgtgcgttcgtggatcggtccgtggggtttatgccccacccagtacaagggacgttattggacaaccagaacgttgttcggtaaggtgagggggcccttcctctacaatcccgtggggaacactcgtggaccatacttccggcggggttcacgacacgtaggacgtaaccatccagacggcgggactcctggggcgcagagcgcgtaggtagacatcgccagggtaaccttg

SEQ ID NO: 701197 - DNA, 133 bp, Homo sapiens
acatagatccgtgtggttgagagctgggtagggaagagtgtgttcagttgcactggggtggtgtggactgttgttgattcctcactacgggccaaaggttgtggaactggcagaaaagtgtgttgtggagttg

SEQ ID NO: 701198 - DNA, 278 bp, Homo sapiens
  misc_feature (54)..(54): n is a, c, g, or t
cagaaacagggtgtgtgcttcccaggcgcacagaacccccaactgtgtgcaccncccccaccttctatcacaaactcactattgacagtgcaccacccacctgctttgtgcaacacaaggaaacacccaataaacactggagacagtgtcaggccaggcatggtggctcacacctgtgctcccagcactttgggaggctgaggtaggaggatcgcttgaggccagaagttcaagaccatcctcagcaatacagagagaccctatctctacaaaaagtt

SEQ ID NO: 701199 - DNA, 225 bp, Homo sapiens
  misc_feature (35)..(35): n is a, c, g, or t
atggtgatagtgctatgaaaaagaataaaacaaanataagaaagaggcagaaaatgatgggcaagttgtcattttataaaccatcaacctgtaatgcttctgtcataggtgacatttaagcagagacctgaaggaaggcagggagtaaacagaaatatgaggcagagcctcaggggctttgcccttgctgtttcattttttctccattatttgctgaatggatga

SEQ ID NO: 701200 - DNA, 244 bp, Homo sapiens
gccaacccatgccaatgtccatcaatcccagtattagcctctgttaatctattttctgttgcttccatatacatttttcaatgcatatgttgctcaaaggtggcaagttgttctgggttttgtgagtccttaaatggattttattttttatgctggggctaaaagtaggtcttcaaatatgggattgttgttcccaccctgtgctgttctcccagtggcccaactttttttttctgtttaatta

SEQ ID NO: 701201 - DNA, 485 bp, Homo sapiens
ctgccgctactactaccaaaacatcttcaaagaactagaaaaaactatttgaaaattcatatggaaccaacaaagagccagaaaagccaaggcaatcctaagctaaaagaacaaagcgggaggcaactttacccaacttcaaactattacttagggctacaataaccaaaaccgcatggcactggtacaaaaacaggcacagagaccaaggggacagaatagagagtctagaaataaagccgcacacctatgaccatctattcttggacaaagctgacaaaacaagcagtgaggaaaaagagtccctattcaataacgggggatacgggctaggctagccatatgcagaagatggaagctggactcctttcttataccatacacaaaaattaacggaagatggattaaagacaaggtaaaacccaaaactataaaaatcctggaagaccggccgggcacagtggcccacgcctataatgccagca

SEQ ID NO: 701202 - DNA, 345 bp, Homo sapiens
agggaagtgtagacatatggagagacacaaacagatttgtgcgatatagtgttttttcaaagacaccacgatgtggtaaatgagaaattatataggtcactttcctgttgtcatgaaactttggcttaagaaggtgctggatttcaagggttgtaaaggcattttggtaaagactggtttttgaatgcgctatgaatttgcattaacttgacatgagttgattctgaccagacttgaggggtttaagtcggaaccggtaaattttaaaaaggagaaataatttgacctataagtatcatgaaggtttaatgggactttggtatgatagtgggctctcttagtcgt

SEQ ID NO: 701203 - DNA, 291 bp, Homo sapiens
aacggaagagcgggtgttgcatgtgacccacagaacggggggaaagctgcccagaataggtgtccctgtgaccatcatcagcaggggggaacttagcgccgactgcatgctgagcgtagtgacaaggtcttggctcgagtggaaaactcagaaacaagtcaatccttgaagcagttttctaattattacacccattttccctgaccaccttgcctgctgaggaaggggccgggggaagacggctggattttgacttctggcaagtgaacccaccgccgggggattcctcct

SEQ ID NO: 701204 - DNA, 505 bp, Homo sapiens
  misc_feature (18)..(18): n is a, c, g, or t
  misc_feature (50)..(50): n is a, c, g, or t
  misc_feature (120)..(120): n is a, c, g, or t
  misc_feature (421)..(421): n is a, c, g, or t
  misc_feature (477)..(478): n is a, c, g, or t
  misc_feature (480)..(480): n is a, c, g, or t
attagaaaaaaaaaattnggtggtgttgcggccggcgcaattaaaatagnaaatttaatttttttttttgcgggaaaaaaaacaaatcacacaggggggccgggggttttttccccgccnccccccaaaaaatatattccccccctttttttttttaaaaaaaaaagggggggggtcctcttaaatctttttaaaaaaaacccttcttttttggggggggtataaaaatgggcccccccccccaaaaattttttctccgggttctcccccaaaacaaaaaaagaaaagggggatacccccccccaaaaaaaaaacgggggggaaaaaattttttatcttttcccccccgggggggggaataatatttttttttgggccccagggtttttaaaatttcttttcccccaaaaccttttatttnggggtaaaaatgggtttgggttaaagcttgtctggcctcgtaagggtgcttcgtgnncngaaattccctgccaggcccgcgggg

SEQ ID NO: 701205 - DNA, 517 bp, Homo sapiens
cccttaagattttgagcatcacaatcaaaacctgatcctgatctcacacacacagacacacacagtacatatatcaatacaaaacactgtattttttaaatttttttgcgacagagtctcactctgtcacccaggctggagtgcaatgacatgatgtcagctcactgcaacctctgccttctaggtttaagtgattcttctgcttcagcctcctgagtagctgggattacaggtgcacgccagtgtgcccagctaattttggtatttttagttgagatggggtttcaccatatgggccaggctggtcttgaactcctgacctcagctgggattacagcatgagccaccacacccggcctaaaacactaatgtttttagtggtttctaaacatatcctcacaaggaattttttatatctaaacggtgagggggttcccctcttatggtccaggttggattgcagtggcgcaatctgggctcattaaaaacatcgcgcctccctggtccaagtgatcct

SEQ ID NO: 701206 - DNA, 151 bp, Homo sapiens
gtctgctggccctgagacatccagtcttccacatcaactctggatggacgtgcgtgcttaccccatgaggctgtccaggctctggcacacagctgtctcacaaatactggctggcttggtagagctaattgtagtgagcctcaggtaggta

SEQ ID NO: 701207 - DNA, 865 bp, Homo sapiens
ggggggttgggccggcccccacgcagctcggctgccctccccgccccagagtgaggcctggtgccggagacgcatctgtcatctcccacgccctgggcctgcgcagcctccgctgtgagttggtgccccagctggctgggctcagccgcggctgctctgtgctaccactgtgcagttctgggccgctgcggggcggggaggcgcaggcgggtggactggtgccctgctggtggcctgcaaactgcaccacgactgcatggtggccctggcgcacgggcaaccgcctacctgtgtgaccgtgacctgcctgccttccgctcgtggccgcgaagagcgcgctgtccgccaaggcctgcacgcccgacggcccgacgcccggagcccacgccccgtgccccgagcaccggacccggggacccggcagccggtgagcccggaagccggcgtacacccgaccaccccgagagggccggagccgtacctgaggggccgcattgtgtgccgaaagccggagcggaaggcgcccaagcccggggcagactgggttgcagggcacgggcataacaccaagacgagactaccgggcggagcccgggaccgtactcacctggggcgcgcaagagcagtaccgcggccgttggggaccatgacacgtcacaaggggggtggcgaggacgaacgccctggcgggggagaccgagggagggagcggcaccgggacgcaatagcacggcgggcaggagccgcgggcggacaggagaggggcaccagggggagaggggaggtggacgaggggagtacggagcgagcgaaggggacaagggggaggaaggccagggggcagaagcaccggaggggaggaggc

SEQ ID NO: 701208 - DNA, 879 bp, Homo sapiens
  misc_feature (879)..(879): n is a, c, g, or t
gggcgccttggtgtcgcgggagaggctgggggccctcaacgctgccctggggccaggcggtccggtgtggagtcaaggagacgcgcacccagcacactgcgttcccgatactttctggcaccgaaccgcgcgctgcaggcgcgcttcgatgacggccaggttccggagggtgggctccatgccctcgcctgcctgcagggccccggtgtggccccggtgctgcgctgcgcgccgacccccgtcgggtctgtctctccaactgcagcggtccgccgatcttcgacgcgctgtcctcatgcgccgtggccgcctatgccacgcccgcctcgcctgcctcgctgggccagcgcgtcttactacactgcccagcactgcgcagctcccccttgcgcactccgcttgagccacgctgcgtacgggtgctcgtggcccgatcaccgtggcgcggagcccttgctgcgctcacgggggctgtgcggtgcggccttagttgcccacgctgtgcgggatccggagcattgcctgacccttccttgcaggtaactgcgtggtggcactgggccgcttgcctcgagagagagcttcactcacaacgaccctgaggagcccatcgccctttgacagaaacttaagccttctgctaacatgacggggaggaccactgtccccctggggatccgtaggacagaacttggtgatcttgaacgggagctggctgagaaccacaaagtggcccgcaccagcactgagacttattgaaccccaagcttgcaacaaacatgtcatggctgactgaagggatactccctcttctgtagctgcgctgacgctgccaagagggctccttatggcaattggccccgaagcacacgccaacan

SEQ ID NO: 701209 - DNA, 167 bp, Homo sapiens
  misc_feature (106)..(107): n is a, c, g, or t
gattgagaatccgaagtttttgagaaaggtgtcaatcagttagaaagcttatttgggcaaggttaaggaaatgtttgtgaaaaagcctcaggaggtcctgaaaaannttcccaaggtggttggggcacagattgtttttaatacattttcaggggagacgcgaaatt

SEQ ID NO: 701210 - DNA, 105 bp, Homo sapiens
  misc_feature (3)..(3): n is a, c, g, or t
gtnatacaagaaaatgtagggacttttgtttgggtctttttctctttgtggctgaggggaaacaagtcagtgtccaataaagctgtaaactcctctgctctaaga

SEQ ID NO: 701211 - DNA, 179 bp, Homo sapiens
cagcacacatctgcatcaataattacggtatcctgcacttaaagtttgcactacactatgcggactaacactaactgaactacagatacttaccataaccacccaaaccatcaggagtaccatatcctccactgtaattgttccccattcccattcttccaactgatccatagcctccc

SEQ ID NO: 701212 - DNA, 314 bp, Homo sapiens
gtaagacattcaatcaactgctatgagagtacttaaacatatatgtatcactgagtttacaaatgatcatatgaagtcacactggcatatgctttatgagtcatgtacaagcaatgcaatgaaacacgtacctcaggtttcttcgttatcgcgatgcataacgtgtgcttgttcattgggtaaataatgattgaaacatctccaaaggcagttgggataatacccctgcggtagtctctggagtgttcagaccagacgatatggacctcgtcattccccaagtgacgaagctttttggtgagggaatcatctga

SEQ ID NO: 701213 - DNA, 682 bp, Homo sapiens
gagcggagtcacttcatgcgtaccggtgtggctgtgaccgttggtcctgtgcggtcacttagccaagatgcctgaggaaacccatacccaagaccaaccgatggaggacgaggagggttgagacgtacgcctttcaggcgaagaacatgcccagttggatgtcattgttttcatcaagtactttctactcgaacaaagagatcttgctgagagagctcatgtcaaattcatcagatgcagtggacaaaatccggtctgatagcttgacagatcccagtaacttagacgtctgggaaagagctgcactattaatccttataccgaacaaacaagatcgaactctcactattgtggatactggaattggaatgaccaaggctgcacttgatcaataaccttggtactatcgccaagtctgggcaccaacagacgttcatggaagctttgacaggctggtgccagatatctctatgattggccagcttcggcgtcggttctctcatactgctatatttggttagctgagaaatgtaacctgtgatcaccaaaccataacgatgatgacgcagtacgctctgggactccttcacgcaggatgaacctaatgggtcgtgggaaacaaacagttaatcctacaccatgaacagaatgaccaacatgagtacttgaacagaacgaccga

SEQ ID NO: 701214 - DNA, 235 bp, Homo sapiens
cttacgggttctacaactaaatctgattaaccctttgcctcttccttcctcgatcagacatagagcctcaccttttcctggtagatccctaactaggacatagtgacagagagagcccatggccggtcctcatcaccctcctcccttttgagctgcatgaggtccatgagagcgcgggggatcaccccaggttgctctgggccgtaagacactaaccgcggtggtaccgagctcg

SEQ ID NO: 701215 - DNA, 428 bp, Homo sapiens
aataactagagcaggcactttaccacctccagctgactatagcatcttcaagactcagctacacgtcatgttgtccgaaataagccttactaatccctgcaaagggaatatataatagaatctccacttcgtttaacgatcctatggaacgaggatgtgtttcctagcttcaacaaattttctagattttgaaaatggttatacgcgtgtactttaccaacatactacctagacactattcctaggggttgtactggggcagagatgctataagtcaaatcacataaatcttttctccctgaagaatacaaaaattatgagcagcttttaatgctgaaagttaatgactacaatgcagttttactggcactgtactgtcaagatttagcgtgccaaagtgaagttcacagttatgttcatagttttaa

SEQ ID NO: 701216 - DNA, 796 bp, Homo sapiens
  misc_feature (445)..(445): n is a, c, g, or t
tctgagatggagtctcattctgtccccaggctggagtgcagtggcgcgatcttggctcactgcaacctctgcctaccttgttcaagcaattctcgtgccttggcctgccaagtagctgggactgtaggtgaacattaccacacttgggtaatttttagtagagacagggtttcaccatgttggcctgtctgggggattctttataccattctgctagtggtagggcggtatttattaggaattttttgcttcattaaattgaaacaaaagtacagtagaaaatgttgtcaggcccatcatcagaccaggatatttgtacggcaaaatgctcagcatgagtcatacttctggtacgcacttctgttgcatgtgacagcacactgccattcgcaacttcatcatttgttctttcttgcggccatgactgtcaaatatcatacatatncattatgaaagctttaggcaccaagccaatggctcccttcatttgtcctacccaccagccatatctatagaattccttgctaagagtgcaaatcacatctccacgcttaatggacactcatctgaaaagctccagtacagtacacatccctgggtaaaataaccataatagtgtttttatccctgaggtggatgacgttatctgactcacttcctttgttcttcacttgcactggaccctggcctctttttttttggaagttgtcataaattaaatcacttttggttaactgctgctagtggttgctatccggaaggatgacaacctactctaattctccttttccaaaat

SEQ ID NO: 701217 - DNA, 379 bp, Homo sapiens
  misc_feature (236)..(238): n is a, c, g, or t
gtctattaggtgactatcacaaacccttgaaagagttgaaacaaatgtgtttaaacacagaatgggttgaaatgaagagcaaggcggggattgaatgaggaaacagtgagctccgggattatcgaaagggtcaccggattgcctgccacaggttttggagctgtctttcctagacatccaccggattggagcaaaatgttagtagtccctaaactgctacaactgtacattactgnnntcttgagggagagggcttgtttgcaggggcaaaggtatgacagggtgagccaaggccaacaaaatgccctttacatgacatcttcgacttgcctttaaccaaatgttttctcctttcacacacacaacattaataaccgta

SEQ ID NO: 701218 - DNA, 1180 bp, Homo sapiens
  misc_feature (484)..(484): n is a, c, g, or t
  misc_feature (957)..(957): n is a, c, g, or t
  misc_feature (1180)..(1180): n is a, c, g, or t
agcgggggtcggggcgtggcgggggtgacggcgggcgctggcgggcctgtgtgtgctggcgtcgggggcgcggcgggcctggcggctcggtggctctggtgacgtgcagcgggcggccggcgtccgggtcccgcgctgcatcgctgtgcagccgggtcgctcggccggtggcttggccggggtagtgcgtgactgggcgcgaggcgctggaagttcagagtgtcgctgtgtctctacttcatcctggataccgtgcttgggtcatcggcgcttcttacctgctggggacctctggggacgcgggcatgatgtattccaccatgcgcgaaatgactaggactctccccatgtagatcggaggagacttgggcaacggtaatgactgacatcgggaaatggacaaggtcttgtgtcctgtcggccccactgaggcaacacagtcggattggcgcagtaagtaactttgcaccaccggtgacaggtnttcgcatagaatccggaatttgcgacatggacaccccgaaaggagagtgactggaacagcgaaggcaatcgaaacaagagggtttcaccgtatgagaggggaatatcgcagacgcaagcgccgttaacgcagagggtttcggtgaaaggtaggaaggaagcgcaattgcggggaaaatttgtggcacttaccacgtacaaaggcgttcctttgctaaggaagttcgttgccaggtccaattagattcacaatagcacctttaaattaccctagggaagcgttaaagaaaaatttcctagtagcaccgttatggaacgcggacggggaatagaggaattccgattcacatttggaatccctacgagtggaatggatccagagaggctaatccgtgtataaggtgagaaggataagggttccacgcgaaatcaagagaaatggagcttccatcttggcagtgcttagggcgaacngctagtcatcttgagttcgtacattggctacaaacacgaattataggttagcgctccacactctgggggtaccgttttgggaagtaaattacgacgcgtagttttttcccctttagagaacccctttcatgcttgcaccatggttcgtcgaacgtacaagcttaaccccccccctggtttgtaaaaaagcacttttcttccctttagacttgtatacaccccn

SEQ ID NO: 701219 - DNA, 552 bp, Homo sapiens
tgaggttccccccgatcccgatggcccactgaggggtctcgcttatggcggcgggcagagacgctcctcactttccagactgagcagccaggcagatggggctcctcacatcccagactgatgggcggccagtgcagagacgctcctcacttcccagacggggtggcggccgggcagaggctgcactctccgcactttgggaggccaaggcaggcggctgggaggtggaggttgtagggagccgagatcacgccgctgcactccagcctgggcaccattgagcactgagtgaacgagactccgtctgcaatcccggcacctcgggaggccgaggctggcggatcactcgcggttaggagctggagaccagcccggccaacacagcgaaaccccgtctccaccaaaaaaacacgaaaaccagtcaggcatggcggcgcgcgcctgcaatcgcaggcactcggcaggctgaggcaggagaatcaggcagggaggttgcagtgagcagagattgcagcagtacagtccaacttcggctcggcatccgagggagac

SEQ ID NO: 701220 - DNA, 223 bp, Homo sapiens
catgcatcccaaggggccctgcctcagtgatgtgtcgatctctatgtactgcctgcgaggctgtctgtatagaggatagtgcacatgcagctaggcccaggtgcagccatggatcatgtagacttccagatggtctcctgaaccgccttgcttttccggcggccctcctaacgtaagagcaagcagccgtgaccctaagccgagctgttgaaggccctcccgt

SEQ ID NO: 701221 - DNA, 171 bp, Homo sapiens
tacaggatcccttatcgaggaaggagaggtgatcaagaggtttgctgcccagttgaatgctgttgcagaaggctgaatggctcttcctcgtatctccacagggtagatctcgctgagtgacaagccaggtcactggcccaaacccaaaggggaaggcactgacaacgacct

SEQ ID NO: 701222 - DNA, 1250 bp, Homo sapiens
gaccgcgtgtgctcgcctccctgggactaggctttcagcgggcgcatggggatgaccagaaataatggcagatcccagcacggtgtccctgtaggctaccagtgccgagagtgcatgttgttaccggtgtggtagcgcaccttgtaccagtgtagtctggctaggtcgaaccatagtaacgcgcctcatcagacgcaagatcgccatggacgtattctcggccctgctctctactgcgggaaggcatcgtatcgatagagttgcatcataggagacagcgagtgaacgctagaagcagattgcggagcgggggtgaacagagggttcagaaatttgttatgaaaggagagaaggggatctatggttttgggctggtaggacatcacgtgctccattcgaggtataactgtccattcgtccacagtcgatgtagttgagggaacgcggacaattttgcgccgtatgtctattagtccccgctcagagacgggaatcgggcgtgcgatgcgcagctaggagttccgaaagcgccccaacacatgtgtggattaatgggtccaaacgcacacgatcgtagcgtagttacccaagggagtgcttacggatccgagctgccctggaagcgagggatgggagaacccatgtgccacatatccctcataatgacgggtgcatccgtgatataaaccatggggcaaactgaccgggtgaggaacgctagtatggggcatggctgcatgggaacgatgttgcgatgttcctccctggctcatcgcatcagggtgaacggggcaattcttacccaagggttgtcccagagggacatgggccctttacttttcccagcggcaatggtacttagcatgggcctttttcactggaagagggttaaactgctaaggtcttcgtgggtccccttcgaagggggctagttctccctggttggaaagcctaagaggggctgtttcccgaagaaatgttggtagctggaggaaaagtgttcacattgttaaccacctagtggagatacgccacacaggaggacacccaaacagaagggccaggggggcgttgcatctggagggggagagggaatacggagcggttcccgacagggggaaacgagggccaaagcaggggtacggaggaagaaagcacactggtcgcacagggggggacccacgggggagcaggacaacagagggaaaccgtcggagaggcggaccaaccatggtagggacagcgcacga

SEQ ID NO: 701223 - DNA, 942 bp, Homo sapiens
actagacctgtcgtgtgggtcgcgctcccagacggtaatgtgacactattgattattaggtgtttatctagcgtagatcgtggtgcacagccgccctcagttgcttcgtgattcctcaatcaaaggttacactacgtccctgggtgtggccctctctgatgcgtacctagatacaaaatcacaggactgagacgtatctagatagtcatttacagaaattctcatcgacatagcagtacccagtgctgagagctcaagatcattgcacattcacgcatcgtacgtgctcaatctgccctccccatcccctaagggcattccttttacaataaccacggacggagcgttcaagagatcaccttcgcacgtttaaagccatttcaagagtccaaattttgtggccacacaaagttggattagccttggaaaacccataccggcatattaaccagcacgaaggtaacctgggaggcactataattctttacaacagcgtcccgtaacagttagccttgtagccgcagccaagataagtttccccgtaacgaaaaactccagggggacggaaacctggcaggaagttccattaggacacgggttaaggtacaaactcggaaggattagttaaaccgtccccaggaagttgtgaaaacggaccacacccgaaaagaacggaactaagacatagccgtttacctgggtccagcacaaaggggaaccgtgttcattatgccacactcaagtagaaggccttggaccagcccaggcaagttgaaggggccgtgtacgcacagcaagcaggggcattgcagaagtaaccacgtggaaagggatcatacagagcaaagcagaccagagatatagacagccggcaaacgcaccgaacgcgagggggtacaaaccaacggggaacaacgactccaggcaacacccaggtagagg

SEQ ID NO: 701224 - DNA, 322 bp, Homo sapiens
caaagatgttaagctgttatattaatgggcttttatgtaagttatatagttttaatttggaacttgaaatagcattagtgtgaggtaagtattttagtaaatgctctgtgagttgatgcagaagagaggaagagagggatttagaaagaactttgttttttttttttttttaatgatcagttaatttcccatgtaatattgctgtaaatgatgtgtacagataactctgttcatgtattcaattgtaaacttgtcaatatttgcatttctattgcttttgtatggaatgataattgcaaaaataaagatgctttaactgata

SEQ ID NO: 701225 - DNA, 980 bp, Homo sapiens
gatcctattgcctggctgtcttgggatactagacccaataaggagggttgcagtgttgagtcgcagagagactccaataaacgatgtgtggcagatatgcgacaggtgtcccagggtgggaagatcatcgcttgcggccgttctgactcgcgattatgctggtgacaggagacaggtaagaaaatgtggaccccattgtgacgaacgcatctcgcttggcgttggtgaataggtggatcaaggaatgcacgtggtgaacgctgatacccgtacgaggtcctattggactaatagcacgaagcatagggtagaagcaggtcaataggtgatgactagcgggtcgactgcagatcgatgctggtgtttgtctacccgtgactcgaacgatcacaacgtacgcacaaatcatctagagagagccaaatgatgagtagccaccataagagaaagacggaaatgataccttcgagtggttacaagctggacggttgggagctttaccttctagggaatgcatgcatacaaggtgtgcgttgggagatcgcttcgtgagcacgttttggtctcttgatcgttggatggacaattcgactttaagggcgccgaaagatggaaaccgtgcgggtggcaacaatggaattccgttgagtacttgtacctggacttgaaaacattggcggtggacgcccgatcaacggggacggaccgcggaagataggaggcgcgatctccaaggcgaaagtgttaggcgcacgcaaggaccgcgggcaagggcaaggacataaccgaacgtgcatgagcgaatactggagatgccgaatgcacgtttggacaccactgaacgcaggaccggcgcgagagagtcgcccacaagcgggtgaaaccagcggcaagggaacacgaaaaacgaaagaggcgagtcgattaaaaaagggagcaaattagaacgccgaaaaaaatcgggccacaaacgattaggc

SEQ ID NO: 701226 - DNA, 101 bp, Homo sapiens
ctcagctcggtaccgtgatgttatcgcccaacactatagtaaggcttaggttctcacttcctgtaagacaaaaatcttgtaaatctcttaacttttcttaa

SEQ ID NO: 701227 - DNA, 180 bp, Homo sapiens
agctttggcttatacaagtgtgtagccagaatgttgctggcaggcggaggtgctcctgccaggtcactgtggatgatgctccagccagtgagaaacaaggcccagagatgaaatccggaggccaagagctctcttcctcccgtgctaggcactgagagtgatgagactgtgggtggcatt

SEQ ID NO: 701228 - DNA, 172 bp, Homo sapiens
gaggaattactatttgcgaggaattactatttgcgccgtaccaaaaccactgatggtgatatttgaactgtcatctgcccaggcaccagacaccgcagcagacattaccaataaggccataaaaggttttaatttcatgctatctcctcgaaagtttcttcattttattcct

SEQ ID NO: 701229 - DNA, 258 bp, Homo sapiens
atcgcgaaaacacgatcacacacagtaactaccaacaccatggacacaaacacagtcacgtcacgttccatcaacacatcaaccaccaacaccatcaccagggacacattcatgtccatcaacacatcaaccaccaacaccatcaccacggacacattcatgtccatcaacacatcaaccaccaacaccatcggcatgagtacattcacatccaacaacacatcaactaccaacaccagtgccacaaacacattcatg

SEQ ID NO: 701230 - DNA, 899 bp, Homo sapiens
agcagacctgatagatatctgcagaactctccactccaaaacaacagaatatacatttttctcatcatcacatggctcttaaaaattgatcacataatcggaagtaaacactcctcagcaaatgcaaaagaactgaaatcataacagtctctcagaccatagcacaatcaaattgaactcaagattaagaaattcacccaaaaaattaaaacaaaaatgaaattaactcagaaccacacaactatgtggaaacttgaataacctgcttgtgaatgactcctgggtaaattactgaaattaaggcatagatcaagaaattatttgaaactaataagaataaagacacaatgtaccagaatctctgggatgcagctaaagaagtgttaagacagaaattaatagcactaaatgcccacatcaaaaagctagaaagatctcaagttaacaacatcacaactaaacatagagaaccaaaaacaaaccccaaagctagcagaatacaagaaataagatcagagcagaactcaaggagacagagacacaaaaaatctttcaaaaattaacaaatccaggagctggtttctttgaacaacacaattaatagactgctaactagactaataaagaagaaaagagagaagaatccaacacaatcagaaatgataacaggggatatcaccactgaccccgacagaaatacaagcaagcatcagagaatattataaacacctctctgcagcgtaaactagcaaaatctacgcaaaacgagaatacattttctggaacacatacaccctcctaaaggctgaacctgggacagacatttggaatccttgaatagaccaataacggacttctggaattcgaggcagtatacgttaccaagaaaaacacaacaa

SEQ ID NO: 701231 - DNA, 1084 bp, Homo sapiens
ttcaatggatgctgctgaccaaaaatgggcagctacagatactacttcaatgaaatgtgagctgactgagttctgacttgtggggctggtgttttgacggatgtgttctgatgatgtgactgatggcctgtccctgccctgtctttgagtgatgaagatcatctggcaaagttggagaaggtggactgataggctggtgtgtgcttggccgcttgtgccatggctgatggcccttgtgctggtgcactgggtgtcactggccagtgcatgattgactctctgtacatcatgtgatgccctgattgggtgaacatgttgtttgtgtgttgtaaccacccaatccctgttggtctaccctgatgtctagatggcacggtaaggaggtgtcccatccaatgtggtccacaatgcttcttgtcctgcccccaaggcaggcagccttggaccacatcctcatatgcaatactttggagtggcccagcccaatgtgaaggcagccgatggtcccatgctgccagcttcagtgtgaccccacccacatccccctggcaacctcccttgggcacgtgtgctggcgatctactttccctctggcgatttgcccacgtacccaggtctggctggggcccagtgcccggatgcagatggcctgctagggcctctgtcaatttgtacgcgccagcgagtgccttcaacacagcttgtctcttgccttggcacttgtgttgactccgcgcgactcgagcccttgcacctgccttccagccgccggcttgtgcatgtcctggggtcctccttttccagaaggcccgtgtacacacttgttacatctattacaggctatcgccagcagtgggatagaccgaaggtctaggatatccatttgcggattggacgctggtaccaatactgatctcccaaacagccacatcggaataactacatgactcaacgccggcttctttgaccctctacacaataattcaaactctcggtgcgcgccacattagaagacacactagagagccaacaggtcatcgtagcgcgcacatttatcacaccgggccacataaggatccaactc

SEQ ID NO: 701232 - DNA, 756 bp, Homo sapiens
gtgctgccttcccatccagcgagtctgccagcaatggcttcttcatcctttatatgtctgcttcctattccctgtcttccacatacgtcacttactcggcagtctttctgcttttcattaagcctcaaattcctctgtctactggacacaagctatgtctatatttttctgactggcaggatagtcagggtcgcagtgtataccttcatataaatgggcctctgggatgtgctcttcaggagctttggtaatcaatacttctctcagaagtatgagacatcctctgactctgctctgtcatcaaggctgctgggtggagataccctttgaaaggggcttggtgagaggtatggagccagtctctagtgtgccaatcactctatctctggcctctgattctcaattgtacctgtgtggctcctctgttagtgcaatgttgactgttgacaaagcagcagtatgcttacaggttgcttagttggggacaccgttaccaccagaattggctgctctgacaatatgcctagggactttctacatggctctttatttaaataaggaggcttggcaccctataaagcctcatgcacttcacacctttgcagcatggtttatgcctcagtgttatgtgcacctggaatgtttccacttcagcatttcccaagtagaaatattagtgttacggaagtgccttagtatccagtccaacatttttttaaattaaatttagtgacgaaacagtttgttgcgtgacac

SEQ ID NO: 701233 - DNA, 502 bp, Homo sapiens
caatatctagatcattgtgctacagtctatatccagtactagcattgctttggcttttatatatggacatggttctttacttaaactcatgaaccagctctgctagtttccaactattcttctgcagcttcctcaaactaaatagttagaggcttgctctgggattaggcactggcttacaggaatgcgggggctggtttgatcttcaatctagaccactgaaaattcctccatgtcagcagtgagtctgtttcactttcttaccattgatgtgttcactggagtagcacttgtgattttcttcaagaactatcctttgcatattgcaactcggctgactggtgtaaaaggcctagctttttacccatctaggcttttgaaatatcttcctcattaagcttaatcatttctagcatttgatttacaagtaagagatgtgcaactcttcctttcacttgtatactaaaagggcatcatagtaggattttttcttttgatcttt

SEQ ID NO: 701234 - DNA, 395 bp, Homo sapiens
tacggggacatgagacacagcctaatagcacagaaactcacagaggacgagtttcttagttttgtcatctctgaaatgggaataataatattactcccaccttgcaaggctttgggattagagagaatgtaaaaaggtccatgtgagaggtcctcgtgggttaatgtgtggggggagtccccagtccctccccgggcactcagagcgatgtgggaagactgtggagcccatgcttattgatgctgtttcatttcaattaaacctccgtcagaaacatcgcatgacatcaaaatggaagagatgttgagtctgaacggtgaggtcatagattttgtttttatttatgtattttccaaataaaaatatgtatcatgttttctcatcaaaaaaaaaaa

SEQ ID NO: 701235 - DNA, 213 bp, Homo sapiens
tgtcggtaccgctcattgggtggctcatcgggtggctcgttgggtggcgtggagtatgacaagttcattgagtccgggcgcaagtggttttgccacgtggatgatgacaattatgtgaacgcgctcgtggtgcccctatctccttgttccaagggcctctcttgccttgaaagccctcttattacaccatgggacccgaagtgcccctaagag

SEQ ID NO: 701236 - DNA, 549 bp, Homo sapiens
  misc_feature (507)..(507): n is a, c, g, or t
accgacccaatgagctacttatgtggcaaagggaaatatttaaccaaccccagcccactccagccatggggttcaccgaaaaatccaggaataagcagtggggaaaactgagaagtcccttgcaaagttcacggtccagaggcacaggctcaccaaaagactgagacctaattatggtgctacagaatgctgcccctcccacacaccttactaccacattaataaaggccagtttacatcagtttctttaacccaatacatgtctggtcatcaagaaaaaattacaagactcagatatggcagaaatgctggaattatcagaccaataattaaaaacagctataatattctgagggctctcatggagaaagcagagagcataaaatggagaaagtagacagcataaaagaacagatgggcaatacaagtggagcgctagaaatcctaagaaaaaaccgcatagaaaggctaaagataaaaagcactgtaccataaattaagaataanttaatggacttaatagctgactgggctcattgggttccgatg

SEQ ID NO: 701237 - DNA, 369 bp, Homo sapiens
  misc_feature (6)..(6): n is a, c, g, or t
  misc_feature (202)..(202): n is a, c, g, or t
  misc_feature (214)..(214): n is a, c, g, or t
  misc_feature (295)..(295): n is a, c, g, or t
  misc_feature (310)..(310): n is a, c, g, or t
  misc_feature (312)..(312): n is a, c, g, or t
  misc_feature (319)..(319): n is a, c, g, or t
aaaacnaatgctcgggcgggctttttgttggcgtcgacgattgcgtcgcggctcaaggcgttggcgcttgcgaacacgtagttcgtcattccgagcacgcgctggtaggtgccgagcgactggatgccgagctggtaatcgtcgtccgccgcaccgagcgccgtgaagaccggcagcagatgctcgtcggtcggatgcatcnaacccgcgtgcngctgccggcggtagtcgagcagtgcatcgacgtcgcgtgcgcgagtttcgcctcgaaccagtcggtgaattccgtgacacngggtccgcatcctcngngccggcncgaaatcggccgcgcgcaggttgtgcgtgatctgcccgagccgatcacca

SEQ ID NO: 701238 - DNA, 588 bp, Homo sapiens
tcgacccacgcgtcctggctacatctggaccagaatcccatggcaatatcccacggctttaaggtgcataatatctccgctgtgtggtacgattgtcaagtcaaaaacgggacatgttctatccagcaaacgctaccccaactactgacaaccacaacagctacttctatacgacttttttacatcgacttacctgactacttacctgatgaccctacacgagactttgtctactaggtacctactactcttgacataacctagctactttaccacaacatatgacgtccaccctggcttatctatctaacccgctcacgcaatcggacgctgcatgctgctgctgctcacactctctgaccacgtggcctacaagccatctcgtgcttagccatctgctaagcaactactgcctaacacacagcttagtagtacacagcaccccttgtgtcacactatctcccccacatgaatactaacccattcgacagcgactacctcaagcagttactacatccacgcgactcccctccctggaacgaagcattcgtcacccacaatattaaccttaaattggcctccactagg

SEQ ID NO: 701239 - DNA, 188 bp, Homo sapiens
aaacaacttaagtattaggacaagatgatggatatataaacatagatctaactattaaaaactatacaaatataccatcttacttactacaggtctcttgagcttcacgtaagcaactactcaaaaatactgagcacttgaaatcccttagtatacattatatactacttcatttgagagtacgggga

SEQ ID NO: 701240 - DNA, 645 bp, Homo sapiens
aatttcttctctaactattcttatattttatttttatatttcctttttttcctctctctttctccttttttatattttacttttatacaatgcggaaaataaaaccctcttaaaaaaaaacatcataatcaggcaaaataaaaaccctctcgctttccccaaaaaaaaaataaaaaatattttcacggtcccgcactcaacaaaaaaaacttttaaccacgaccccccaagtaataaaggcttttccccggaaccaaaaaaaatatacccccccaaaacaaaaaaaaatatacaaaataattgctgccaaaaaaaaaagaagcggcctctcaacaacctccttttctaacaaaaaaagattttcctttttatacccctttaaaaaaaaaccatactcacaaccttttcaaaaaaaaaaaatatcataccccctcttctgagcttttttttccttctacccacaaaacgtcttacaattaaacaattaaaaacatatttatcttctctcttacaaggacataacaccctactatattatatcacataaaacgcaacaaaaacttttataaaccacacctcctcaaatcatatcgatctccatcaaaacaatagagccgacgggacacaaacaatacaacacaaccg

SEQ ID NO: 701241 - DNA, 365 bp, Homo sapiens
cataacggttgtgcccttggcaatgaggtagtttctacactaagtaccagtggacagcgcatgggtcacaccggtgggaacaagttcactgtatatgtggatctcgccaattacagcctcagtgtaaggcatgtgtctcatatcgtgcatgcgtgggctcctgtgtctgccaatcacatcatcaatctcttcgtggactttatcttagacctgtgggtgctccaacagaatcagcagtccatatctcagagtggcgctcactactgaattcagagtggcgggtgcccttgacctgctccatttcgcacagaaagcaatctatagagtccggatgtttggtcccacacagtgaagctgggagatct

SEQ ID NO: 701242 - DNA, 1874 bp, Homo sapiens
atgtgttgttttcaatcaaggtgaattggatgctatggaataccatacaatgatcagggagctgattttggatggatctttacagttgatccaggaaggtctcaaaagtggttttctttatccactttttgaaaaacaggacaagggtagtaagcccattactttaccacttgacgcctgcagtttgtcagaattatgtgaaatggcaaagcatttgccttctctgaatgaaatggaacatcagacattacaattggtggaagaggatacatctgttacagaacaggatttatttttgcgagttgttgaaaacaactctagctttacaaaagtgattactttaatgggacagaaatacctgctaccaccgaaaagcagttttcttttatctgacatttcttgtatgcaaccacttctaaactataggaaaacatttgatgtaattgtgatagatccaccatggcagaacaaatcagttaaaagaagtaataggtacagttatttgtcacccctgcaaatacagcaaatacctatccctaaattggctgctccaaactgtcttcttgttacttgggtgaccaatagacagaagcacctacgttttataaaggaagaacttttatccctcttggtctgtggaggtagttgctgagtggcactgggtaaaaataaccaattcaggagaatttgtgttcccattagattctccacacaaaaagccctacgaaggtcttatactggggagggttcaagaaaaaactgctctaccattgaggaatgcagatgtaaacgtgctccccattccagaccacaaattaattgtcagcgtgccctgtactcttcactcacataagccaccgcttgctgaggttttaaaagactacatcaagccagatggggaatatttggagttgtttgctcgaaatttacagccaggttggactagttggggcaatgaagttctcaaatttcagcatgtggattattttattgctctggagtctggaagctgactatgatcttgattaaagtagtggtttcttcattgtttcctcaccacttttcccttaattctaagtcatttttttattttgttaccaacccatattcttagaatataaacaggacttgtttttttcagtaagggaccagaagtgactagccttcatgtaattttaagatgaattttacttgagttgcactaacattctatgttattctagactatacaaattaagtggtaagcagttataaagacggcaagaccatgctattgaaaaagttcagaaaacatacaccgtggaccagaggtcttaatcctatctatggatgtgttttgtgtgacccatacagtgttgtaaaaaacatttagaaccattattctaaaaaatggggctatttcacattaaagtccagatttctgcttctttttaaacatcagaggctctggctacacagaggcctttgttctttcctggcatcagtctgcaggaccaagcggtggtggctcacttgggaagagccttgtgctctccactttgccacagtaccactgccaccatgctgctcacttatgtcatccacttggcccttgtatgacctgaatttgcaacctctggtatactgttatgttctggagaaaatattcaaagatctgccaaatactgcattagtatactaagtttatacagcatttttgtagggttttaaattgcattcaaggtcactttccaagcactttctggttttgcttgtttttctagaagaaaatgaaaagctattccttataataaacatggcagcaagtaaacagtgtgattgtgaaaaaaatattatttatagattttctacaaataaatatttgtctaccaagt

SEQ ID NO: 701243 - DNA, 457 bp, Homo sapiens
  misc_feature (4)..(4): n is a, c, g, or t
  misc_feature (25)..(25): n is a, c, g, or t
cgtntgactgcattcagctggcagnttctgggaaggcgggcctcttccctcatccccagttgttgaaggcccctctgtctcccatgtgatatctccaaagggcccccttcagcaaagtaacccagcctcccctatgtggcccttaagcatctgagagggcaaaggcagagactccccaagccttctcaaggcattggcctgaaactggttcagcatctctgctgccacattttcaggactaaagcaagtcacagactcagccaggatccaaagggaagggactatgcaagggcatttataaacgttgacaaggttcattatagaacaccattgtaatggactatcccaagcatgtaccactgtgtctcatgcatggtaaaggtcccataaatgttattgctctcttgcagtatagtagtaatagtagtggtagctgttttaggagtaaaaacagcta

SEQ ID NO: 701244 - DNA, 2283 bp, Homo sapiens
atgtgttgttttcaatcaaggtgaattggatgctatggaataccatacaatgatcagggagctgattttggatggatctttacagttgatccaggaaggtctcaaaagtggttttctttatccactttttgaaaaacaggacaagggtagtaagcccattactttaccacttgacgcctgcagtttgtcagaattatgtgaaatggcaaagcatttgccttctctgaatgaaatggaacatcagacattacaattggtggaagaggatacatctgttacagaacaggatttatttttgcgagttgttgaaaacaactctagctttacaaaagtgattactttaatgggacagaaatacctgctaccaccgaaaagcagttttcttttatctgacatttcttgtatgcaaccacttctaaactataggaaaacatttgatgtaattgtgatagatccaccatggcagaacaaatcagttaaaagaagtaataggtacagttatttgtcacccctgcaaatacagcaaatacctatccctaaattggctgctccaaactgtcttcttgttacttgggtgaccaatagacagaagcacctacgttttataaaggaagaacttttatccctcttggtctgtggaggtagttgctgagtggcactgggtaaaaaggttttaaaagactacatcaagccagatggggaatatttggagttgtttgctcgaaatttacagccaggttggactagttggggcaatgaagttctcaaatttcagcatgtggattattttattgctctggagtctggaagctgactatgatcttgattaaagtagtggtttcttcattgtttcctcaccacttttcccttaattctaagtcatttttttattttgttaccaacccatattcttagaatataaacaggacttgtttttttcagtaagggaccagaagtgactagccttcatgtaattttaagatgaattttacttgagttgcactaacattctatgttattctagactatacaaattaagtggtaagcagttataaagacggcaagaccatgctattgaaaaagttcagaaaacatacaccgtggaccagaggtcttaatcctatctatggatgtgttttgtgtgacccatacagtgttgtaaaaaacatttagaaccattattctaaaaaatggggctatttcacattaaagtccagatttctgcttctttttaaacatcagaggctctggctacacagaggcctttgttctttcctggcatcagtctgcaggaccaagcggtggtggctcacttgggaagagccttgtgctctccactttgccacagtaccactgccaccatgctgctcacttatgtcatccacttggcccttgtatgacctgaatttgcaacctctggtatactgttatgttctggagaaaatattcaaagatctgccaaatactgcattagtatactaagtttatacagcatttttgtagggttttaaattgcattcaaggtcactttccaagcactttctggttttgcttgtttttctagaagaaaatgaaaagctattccttataataaacatggcagcaagtaaacagtgtgattgtgaaaaaaatattatttatagattttctacaaataaatatttgtctaccaagtaaaatattttgactgaaatgattctttgaaatgcatattgatttattatgtattgactttttaaaaattgaggtataattttcacaaaattctccaattttcagtgtcgaattcagtgaattttgaaaacatatatacagttgtctgtctgccacagtgatcatgatacagaacactttctttaccctgaaaacttctcatttttccttttgcagtcaatcccctgctcctatccttggcccctggcaaacactggtttgctttctatcattagttctgctgtttgagaatttcatataaatggaatcatgcaatgtgtaatctattgtgcctggcttctttcacgtagcattttgagaaaagcatttatactatttacagattgttgacaaatatttatccactaagtaaaatgttagactgaaatgattctttgacaagcttgccaatttactgattttgtcaaagaaaaatatgttatttttgaagtttgttcatcctttgagtgtgtgagtatagtatcagaggcttaattttgtatttatggagctattctaacttgttatttaaaaggaaaaaggtattaaacttgaagcaaacttctcatg

SEQ ID NO: 701245 - DNA, 1567 bp, Homo sapiens
  misc_feature (324)..(324): n is a, c, g, or t
acggggctgtccctagaggaccgtcactcgcattggccgatcggtggctcggtctccccctgtatgctatgctgcgatccatgcggactgagggagtgagtcgtcgcgttgccttgcaggtgctctgcgaggatgtgcttcccgcgactattgataggcaaaggacccggtgtctacagcggtgggacagaacaagaatagacacacacacacgagagaccgatcttcccctcgcagtcggtgggtgcgcaccctatgtgcaccagggggcggtgcacatgcgtgtgtgcagtggtgttcacgaatggacttccataatgatgngggcgaccgaaggacccaggagtcagagatgtaagagcagtccatcagcccgtgagaggtaccctcatatacgaagacactggcaatcgggcacacaaagcgttggggaccgaggagtggcacgcaaggagtcgtgggcgaaccatcatcactttcgtagcgagagtggaggcatgacagatggtggggctaccacgagggcagcaaccccgttgtcatgacgtgcaccagagggcgcaccctttgtaaaaccctcaagggccgtaattccgtcgtgagtgagagtactgaccacaggaagtccactgctgtctgagacaccgtttgcaaagcaacccccgaggcacaatggttgcggttggacgtaatcgcaggggacatggatgtcttaatctccctggtgagcgccattcttgggagaccagctaacccaagctttggggcattcagtggcattgggacctcccgggttgcaccagggggggatcaacacacaacaaacttgtatgcccccaaattactaacaggaaggggggatattagcccgcttaccccacgcattggccaaatcccttgacggatcttgaggaacacgtgggccgtgtgggcccggggaaccctcggaccttgaccttatcccttcaattgtacagaatccatacaacagaagctcgccgtgataccaaggcgttatccaacgcaacccaacggggccgggagcggggggaacattcggttgccggtgaaccttttaacgggaggaaagagctttgtggctaacggggtacagaacacacatggaaacattatccgacacgaccaaagaagaaatggggcccagacgggaggatagggatataccaaagacgacttccattacccccttggagaaggaaagaacggcataacagcagcagttggacactgggcaggggcccaggggcacatacacacccagttgggggacaacgaatacgagggaaccgcaagagccccaggagaagcaacaacctctcagaagcacgacaccttccacggagggaacatgttgatcaacccccatgtaggagaacatccaacagcagacaatacacatcacatacccaaaccaaaaaaccagggtgcagcaagagaacaaacgcacgacaaaacaccgacagacaccaacaaagagacgatatcaagaaggaacaaccaccaaaacaccagacataagctgcagcaacacgacagagagacacac

SEQ ID NO: 701246 - DNA, 135 bp, Homo sapiens
gctgccttccaggatgctggtggctatgcctacttcctgcgcgggcgcctctactggaagtttgaccctgtgagggtgaaggctctggaatgcttcccccgtctcgtgggtcctgacttctttggctgtgcccgg

SEQ ID NO: 701247 - DNA, 352 bp, Homo sapiens
gaccggcgtaggacgccacagaactgcccagcgcaaagcggcaggaaaatactcaagctggcgcccacgcgccagcaccaatgttcaagtgctcgcccatggcgccaaacgccggcaagtacatgtccatggcgagataaccgagcatgctcagccccgccagataccaggtaaaaccaaaagaatttttcatcgatgccttgtagatactgccatcaaactatttgctgactgtcgcccattatgaggctgacaatatctgtgtgaagcgataataattggacactcttatcaataattttgaaggcagtacctatgtggtcggaatattccctggatgcgtccgtagcgg

SEQ ID NO: 701248 - DNA, 314 bp, Homo sapiens
cgatcctctcacggatccccccggacccacactcaggcgcaaggccctgctctgtctcaaacttgcgtgcggaagtcactcagcagccagcacgggcattgtcaactctgtagcagtgatgttggcattgtccacggtggctgtgaggatcttgtcctgcagctcctcaattgtcctgtattactggctgtatctcacgggcgggccccggggcctgcctcttgtaccagtcactgatctgcacctccagctcagtgtttgcctcctccagggcacgcaccttgtccaagtccgagaccggctgtagaccggct

SEQ ID NO: 701249 - DNA, 788 bp, Homo sapiens
cgtaaatagagtccaatgtgggctgtgagagcctgtcccgcgcctgcccgctcatgtctctacagagcctgactgtcctgtgccgcctgttgcacagctgctgcgctggctgtgtggcagctgctctgtccccccgctgccccctgtgcccgtgacacttgtgctgtgtgtgccacgatggaccctgcagcagcactgtgctggtccccctgtgctgttcctgtggctgtgttctgtgcctgcctgtgctgctggacctctgtgctgtgtgatgttgtgtggctgtgtggtggtgctgtgctgtgctgtgtgtgtgtgctgtgacatgcctgtgtgtgttgctgcacattgtgtgccccccatgtgcccataggctgtgctgaatgtgttgtgagcctagatgcacacatcacacactgacttgtgcatggataggctgacagactccctttacttgacatgtgtgcccttgatggttgaccaagtgcatgctggtgacgtgacagcatatcagctatcttgcaagtgggaacctttttggtacaagggcttgacaggaaatgaattccgcggaacattgggaatgcggaggattgcgctgagaacggcggggttagcgcttggtgacacgtgttgtgacgtgatgccccaggtgttactaagaaatgggagcagaggcagggctccaattcgaggacgaaaatcttccccatgctcccggccaagcgaacaattcagccaaatgccttgtgaggttgtgacgcccattcggtccaaactgcccgcca

SEQ ID NO: 701250 - DNA, 189 bp, Homo sapiens
cattgtatttcaacgtggtacacggggaaagccacgtgtcgggaaccaccacgcttactggactgcctgcgacgattcaccagaccagagcacttggcgctggcagcgccaagaatcaatgtgcagcgtgttgccagtagctaccatggagtccacaaagtcagctcactatgatagaaactgcccact

SEQ ID NO: 701251 - DNA, 337 bp, Homo sapiens
tgctgaggaacagggactggagcctgggaaggtagggcaggctgagacctgccggtatggatgcaatgtgtatgaggtaatgccgtctgcgcgacggaatgaacgcgaacgaaatagccaagagctggcactgagagaacagcgctggcgggccctgctcgaggcttccctgcatccagggagtgtgacgatggcttgccctgcctcctgaggcatggaccgagccctagcccgcatctgagctccgctgtgctagctgtgtggagtctgaaaacgcaaaggtactgttagaaagttgctgtcagcaggcattgttccagctttccatggaaattct

SEQ ID NO: 701252 - DNA, 490 bp, Homo sapiens
tcttcggtcggtgacgcgaagacatcgccgcgtcgacggaaatcgtcgcggcgcgaagcggagccttatctaagctccccgccgccggatccggtcctcgcccagatctgcgcagaggagagcccgcccttcgaccgcggaggatccggcatcgcctttttccggaacgacccgaacggcggcaacgttttccggctgttcaacataacctggaggaaacccatgaaagtctcggcgattgcgctcctgaccgctttcggcttcgcgacggccgccatggccgcggaagaccggggcgcctcctcgaaggcgcccggccacgagatgcagcaggatcagggccggatgcagggctcgcccaacgcggccggcttcggcaagaaggacggtgcgggcgacaccacgggctcgaccggttccaccacctccggctcgtccggcagcggctccagcagcacgggcaccgccaagccgcactgatcgcggccgc

SEQ ID NO: 701253 - DNA, 128 bp, Homo sapiens
acccaagtttagggaggcataaaaacaaatgtcatcagcccatactacccttactgtggactgtgggtttggctgccgatagtatgaacactgcagcgcctgcccaaggtcatcggagaaccagagcc

SEQ ID NO: 701254 - DNA, 712 bp, Homo sapiens
gcacagcatggcttgtcttcaagactttctttgcctctcttcttccagaaggccccccagccatcgcaaactagatggtgttatgtgctagtagctgtaggaggcttcgacaggaatggactggatcacctgactccagctagattgcctctcctggacgtggcaatgatgagtttttaaaaaacagtgtggatgatgatatgctttcgtgagcaagcaaatagcagaaacgtgaagcctgtgatactaaattggtgaacataaaacattgcccataggtccttctcgatgtctttaattctgaacgcagctttaaatatatactctcatgtagtttaataagcactgtacgtagtaaggccgttatcgtgttgcatgtctatgcttgaggaatttttcttaaatgtgtgtgtatgcatgtgtgtttgtacatagaagtcatagatgcagaagtggttctgctggtcacgatttgattcctgttggaatgtttataattacatcataatgtgtactactttatataatcaattgaaattcgctagacatgtttagcaggactttttctaggaaagacttatgtatcacttcgtctttctaatacatgctgatgcttcatctcttaaatctaaggggaccttggcggaggtgaaaacctatgctgggtcttctgtgacaatcacagttttctcatgcatgacctgataaccga

SEQ ID NO: 701255 - DNA, 103 bp, Homo sapiens
agactcacatggctgcagaacactgtcaggtgacctgcaaatgtaacaagaagttggagaagaggctgttaaagaagcatgaggagactgagtgccctttgcg

SEQ ID NO: 701256 - DNA, 177 bp, Homo sapiens
tctcaataaagccaaaaatctttctctttctccccctcaggccacctcctgtccttcacttcctgttctgtgcttggcttttcttggaaccgccaggcgcccattgcttggcacctttcttctttgctcttgctctctgcccctatggccttgcgcttttcccctttaaccttccat

SEQ ID NO: 701257 - DNA, 344 bp, Homo sapiens
ccacccccccactcccacacacagacaccgaactgatacactgaagattgaaattctaactgtagaacctagaatgtaactgtatttggagatggggcctttaaaaaggtaatgaagataaaatgaagtcaaatggggggaactccaattccatatgagtggtttccattaagaagagattaggacacagacacacagaaaggtaagaccatgtgaagacactggaggaagatggccatctacaagccaaagagatctacaggctttagaagaaaccaacactgctgacaccttgatcttggacttctagaagtgtgagaaaataaatttctgttctttaaact

SEQ ID NO: 701258 - DNA, 222 bp, Homo sapiens
ccaatcggattgacttacagatgaatttctaaccctgcagaatgggtttaacctgtgcttaacagctttagtaaaatgagagataaacagattgtgaaaaataaaataagccaaatctcatgtgaggataaaaaaaagcgatgtcccaaataagtcaatgtgacactaaagatctaaacaatttttttaaacttttaagtattaaaaatcaaatatacagca

SEQ ID NO: 701259 - DNA, 171 bp, Homo sapiens
tattgtgcatgtgattatgccaggctgtttaattcacggcattttctcaatgcttcattacagccatacaaggtacacagttattattgccattttatatgttaaatagcattttcttttttccgaactattaattatgaattgtgcaaaattttataagtacggaacgca

SEQ ID NO: 701260 - DNA, 361 bp, Homo sapiens
tgtaaatactcgtcgtgactggtgcacaacctgcggttggtacatatgtatacatgtgccatgttgctgtgctgcacccattaactcatcatttactttaggtatatctcctaatgctatccctccccactctcccgactccactacaggcccgggtgtatgatgttccccttcgtgtgtccaggtgtgctcatggttcagatcccacctatgagtgagaacatgctgatcaccatacttttctagatcagggctcctatcggatttcctacacaagtattttctttgagaggtcttggggggccaaaatttatacatatttataaaccctaagttatcttcttacatggctggtaccgca

SEQ ID NO: 701261 - DNA, 164 bp, Homo sapiens
ggagaggatcggtcggtccgcaaggtctgtaagtctgccgagacaatgctaccaaaaatgtatgtagtcgtgaaagtgaagacccgtatgagagacaaggggaagggtaagcaggaggcctgctagtggggtctaggaggagcctcttggggtgtgtggaaggc

SEQ ID NO: 701262 - DNA, 134 bp, Homo sapiens
ctcaggatgttacctcaaaattactacgctcgaggctcatccctcgcctcaccctcccgatgtagacttgagaggtatcaggcacgtcttgaactctgggtctcgaagtcatccaccttgcctcgcgcctccca

SEQ ID NO: 701263 - DNA, 131 bp, Homo sapiens
cccccaacatttgctggaggaatagaacgaaaagattcaagagaagataatgacagaaattactgatagaggtgaggactagggcagaatcaaagctaatgtctaggttcttaagtgttgtcaagcggcac

SEQ ID NO: 701264 - DNA, 507 bp, Homo sapiens
  misc_feature (18)..(18): n is a, c, g, or t
  misc_feature (408)..(408): n is a, c, g, or t
  misc_feature (416)..(416): n is a, c, g, or t
  misc_feature (503)..(503): n is a, c, g, or t
aaaaaaaaaaaaaaaaanaaaagaaaataaagaagcacttactgtataaagagtgagcccttaatttctcagcccaactaggctccccagaggtaatcagctgcttagtgtgtggcgcatgttccatgaagtttcttttgtataaatgggatcctactgtaggcttcattttacagctcgcttttgttttgccatgtcattgtacattttggagacctttccatggcaacataattagatctatctcattgtgcaagcattccacagaatggatgtacagtttatatagccatcctcctcctggtgggcagtggctttcttgtccttataagtaatactgagacagcatatctttgtgcatttctatatttgtgtagtttagattccctaggggacaaaatgctccangtccaganctataaggagtattgggaaattttggatgggagactggcccaaattggccctcctaaaggagcccctcaccaacagggcccgagttnactg

SEQ ID NO: 701265 - DNA, 186 bp, Homo sapiens
cacgaaggacattctggatacatcgatcaagcacggagctgagcatggtgctctaatcaatgtgactctagaagatgcactttatgcgattggtatttaccacggaaactgttttcccttatctggaggatatctcagaccctcaggtgaaatggattccgtgtcaagatccccacatatttggtc

SEQ ID NO: 701266 - DNA, 177 bp, Homo sapiens
gatcacacgcgggagctgtactggtgcacgcactgatgaagcaggcacgaaactcatcgcaggactcattttccttaaaatttagacttgtacagtagggacttcaactgaccttcctcagaccaagaactgtttccagtatctacatcaagatcactgcagttatgactagagatt

SEQ ID NO: 701267 - DNA, 1715 bp, Homo sapiens
agcgggtcctctccgcgcaggctcccggttgcccgcggtccccggcccatgctccttgtgcctcctcctctgtcggtcctgccccatggataggtcatatgagcagcccagcatcagtccaggcctctgagtgcagcctgtcggactcagcccgaggctggccgcgtgcgcaacatagcgagagacagccgctctcgcggcgaaatcctcagcgatatacccttggatctcgcagacaaggagtccacgcagccacgaggaagaccccgagggacctgcgagacacctgtcgccagtcgccggaaccctccagcgccgcgagcactagcacaccaccgcaaacaggacgcacaacacagcgagaaaccacgcggcgcacctgcggcaccacagcaaccacacgcggaggacacaccccagaggacagacaaccccagccagagcgagcacccgccgaacgagagcgaccccaacaacaccagagccacccaactacatacacgatagtggacagcgaaaagcatacacaggacggaacgccactgaggcctcaacagccaccaacacgcccagccaccagtcgacgagaacatcggacaattccgaccagcaacgcccacccccacgcgcccctagcagcacaccaccaccataacaacacgggccaaccacacaccagcccgcaaaaccacatccaacgcaccacccaatcctcgccaaaccacgcccactaggcaattcgcaaacaccacaccacacactcagaaacggcatagagcaccacacccccagacacgcaccactcccaccgacacgcgcaaccatccacgcacaacaaccccaaactacacaaccacaccaccagcacacgcggacagccacgcaccccaccatcaaagcaccagccggcaaaaccacagcagagcacaccacatgctgcaaatcaatatgcacacacgcacccctgcgccactccacatcacgtcaaggcgcacgcgccaaccaccacggcaacacacaccactagatataggcaaacaccacacaagcaacaccgaccacgaccgccaacagacagaccgcacgcacacaacgccacagagaaacaaaacaaacagcacaccaaagaaggacaccatcagacgcaaacgagtaactacttaaagacgcgcacgacacgaggcgccagcgacacacaaacaacagatcagcgcccagatgcgaccaccagagtcgagcagcagaccacgacaacggacgagactgacgagacaccaatggggcactcgaacagacaccaacgacaacgacgcgtgcactagggcaagcgatacatcgcacgcgatgcaagaccacgcgacctacgtgagcgatgggtagaccctggacagcacatatcaaatacttgacaccagtacatgctaactagccacgacacacatctggtatcacctaatccataagtactaaggcacacaaaccactcataccacacacatctacctcacaactaagcttcactaaacaaccaatacaccatcatcacaatcacacaaaacaccacataacataacatcacacaatgcaatcaacacacccatacccctaaaccaccccacatcccccatccaacatctactcatgccagtccacatcgatcacaactaccccacccacaaacacaaaacgaaccataacacactcacaccactcac

SEQ ID NO: 701268 - DNA, 1139 bp, Homo sapiens
gcgtgatgtctcacagagagttctccgctccacagacatgggatccctcgggctgtcctgcctcgtgaagcgcatgtcagctaggcatcgctggggaaggtgaagcatgctgtcctcgtaaggcatgactccgtccgaatcctggtcgcactcttcacagtcacttccatggcgattactgaggcatggacgagtgacgtcgacagtctgtgcgcggaagtcgtacaggccgtggatccgaaggatgagagcgaatgagaggaggtggtaggaacggctgtgaccagttgtaagagacaccacccagtggtggtatgctgggcacttgtgcggctacgctggaagacgccctcgacggcctccaggaccgttcagacgaactgtctattgcatgtagcacagtcatgtggatgcacatgcaaggacggccgtttcctatacagagacttggcgatacacactctgtaagacatgaaggctctttacacaatgatacgtgcaagaacatggtcacggtactgaggcatggcgaacgtaagcgagcgtggacgagagggacttcatgcaggctctgacagaatgtagctgccaaagtctatcccgttgtctattgccgcagcactccaggatgctgccttagcttcgctctggcggccaggaatgaacgtgcctcacctggatggagtatccgagggtgaactaggaggcatctgtgcgccgagaagagctggactgtggcccagcgacgaggcgttgagcacgcgagggtacctgtgaaccaagctgttagggcaggatgagatggatcgaacgtcatcagtcgggtgaccacatgggccaagggctaccaaagggggaacaccagacgtatgggcacaccaagaaggctgccccggaagaacgcaccgaaggctgcgcccaggtggcctggagtggagcgcatggcagtcctgcaccgtgtaaggcgatcctctgttggcacggcgcctgggcccgcaaagggctaaccattcacccgaaactgagacatgaccagaacagcacttaataagcatagggccaaggctacacttaatccacgggaccgggcaaggtgattcatgaccaaggctccacttggctataacctatctggcaaa

SEQ ID NO: 701269 - DNA, 357 bp, Homo sapiens
gtttcccccctcccagatctataagaggtaaggaagccagtgtgcttgggccccctgggagttgcacttttgccaggccaaaccagggggctatgtgaaccccaaagcagagggtgtcccttggaaggggcggtggtgctgtcggggtgcaaaccacgttcgtattgaggcagttgatataaaggatgttccgcgaatgactttttcccactcatggcctatactatcaaaggggagaggtgtggggtttactgagccccttgtgctgcgtactgtaactcaatcctcagtaccactgcgacgaggtaaaaatgatgattcccattttacaaataaagaacctgtggccagtgcaaa

SEQ ID NO: 701270 - DNA, 257 bp, Homo sapiens
gctctagagatccacctcataatgtgtgcccaaagatatacacttggcgaaaacatcgaaagagagcgaagaaaggggccgcgaatgaccttctaggggtgaaacttgagctgatatgtagagaactaagcctgtaaatctgccttatcccccactttctctgctcccaatccttcctaaactgagaaaccctgacctaatgcaaccttagctgtcttcttctctgtaggctgctctgaaccacttgcaaaacattt

SEQ ID NO: 701271 - DNA, 162 bp, Homo sapiens
  misc_feature (20)..(20): n is a, c, g, or t
  misc_feature (99)..(99): n is a, c, g, or t
cccaacactaagctctcttnactctgccacacgaggcagatacggagggggtgcagaaagtatacaaacacatttagaaaaatgagaaggcaggcgcgncaaagtcagtagttaaaaatctaaaattattctaatattaagatgtagcctgggggcaagatc

SEQ ID NO: 701272 - DNA, 114 bp, Homo sapiens
cagacatttgggagggataggagtctatatcccttaaaggccctgtgtcagattaaaatcttgaagctaagtggcttcacaggttggcacacacttaacatttcgggccactct

SEQ ID NO: 701273 - DNA, 329 bp, Homo sapiens
gggaacgttcttgtccatgtgtgtgttgtcagcattattaaggcataatggacaacatttcatatttttacagtatagcaaagtaagtgatgtgatgtactgcgtatattatgaaatgattatcacaatcaggctgattaacacatccatcactccacataattaccgttctttcctttttcttattggtgccaatgcttagcacacttctagtatataatatggcatttttaattacagtcaccatgctgtacagtagatcctcagaatgtatataccttataactgaaagtgtgtattctttgaccagttctcccacttccagtgcc

SEQ ID NO: 701274 - DNA, 259 bp, Homo sapiens
gtggcgactgaccaacgctctaaatgggacgatttcggtcaaggggtcctccctaagcgctttatcttcggggtgaacacgatcattccctttctttccacataattcaacagctgaattatgtttccagtttacatcggtacctcaccgatgtcgcccatgtcgatatttactggtttattggtagtcggttggatgtcgcgccatccaagttgcctcgcctaaccaccccaattcaaggctccagtacagtcccttg

SEQ ID NO: 701275 - DNA, 133 bp, Homo sapiens
  misc_feature (6)..(6): n is a, c, g, or t
  misc_feature (46)..(46): n is a, c, g, or t
  misc_feature (101)..(101): n is a, c, g, or t
gcggantgaagctgcgggaggcccccagccccacggaaggcgtggncagcttcgacatcgccggccttctgaacaaccctgtcttcatgagcatggcttcnaacctaatgaacaatccccagattcagcagct

SEQ ID NO: 701276 - DNA, 260 bp, Homo sapiens
gcccgggggagcccttttgggtgggcctgccccctgggccttaaggtctccttccccttgggggttgggggccctgggggctatggcttccttttcccccccccccaggttttccccccgggccgtgtgtcgtgggtgggggttttcccccttttggggccccccctgggtccccccttctcccctttcccttttccccccttcctgtccccccctctggccccctcctgggggcccccttgggttttaggggacccgga

SEQ ID NO: 701277 - DNA, 242 bp, Homo sapiens
gggcaggcccaccttatgcatcatatctttcccctggtcatgttcagccggatcaggggtttacgtgtcaacgttccattttttcagctaggcgcgggggctcatgcctgtaatcccagcaactcgggaggctgaggcaagagaatcccttgaatccaggaggcggaagttggagtgagcccagatggtgccactgcactccagcctgggtgacagaatgagactctgtctcaaaacaaagg

SEQ ID NO: 701278 - DNA, 1743 bp, Homo sapiens
  misc_feature (1743)..(1743): n is a, c, g, or t
tgtgtgatgtgtaggttggtgttgtttgattgttgttgttaagtgagtgagttgtgtgtgggtaagttttattgtgtttgtgattttgttgtggggttgttgtttgttgtgtagggggggtggtagatagggtcgttattggttttgatgttttgttgagttgttgtaggtttgttgtggtgtgagtagtagtttgttgagggtagtttgtggtgtggtaggtttggtgagtgggggttttttgtgttgtggcgtgccttgtcgtagtattgcgctcgtcatgtttgatacatgcccttttgggtggtcgaagacgactaagagcggtttttgagtgggccaccgtgtttgtgagctccgcggggggttcccacacgaggttgtgggcacacaggtggcctcggcttggttttgttcgcgtcggcgccccgtttgtcgttgtgtgccgggtttctctttgaggtttatgctgacgtcctcctggggggtgtgccgaaatttctcggggcactccggagggggaggattcctctggggggtcgctgccaccaatgggtgctctcccccgcgtccccccgccccccgcttgtgggggttgatcccccgggtgtatgtgtgtgtgaagggggtccgaagtccgcggggttgccctgcctaaagtttgttccgccgtgtttcttggcgccggaagggtgtgtccccactgtgaatggccccagagagagtttctcccccagagtgtttggaacagctgggggggctcgtatattaagaggccgcgcaaatagattgggtaatggaggattttcccccgcgatttttggtggggccacacacacatgggggtgtccaacggagttgggatatatttgggtacacaagctgggtgctcgttgtgggagggccccctgtgagagggcctttgtcgccccgaaaatgttttgtgggcgccccacgaagaaagggacaccacatggaggtattatagaaaaggtgtggttggcccacaaaaggagatgggggcggtgtgccaacaaaaatactcccggggtggtacgcggggcatctccacacaccacccgtgtcccaacacgggtgaatggtcgtctcggaaggtctcagcacacaaagatagtggtgtgtgttctccttgttgcttgggggggcgttacacacagggggtcttcccacaacacagggcacattgtctgagagggtgtcccttttgtgaaaatggcgcccccccagagggcacacctggtgggccacagagagtgtctcacacatggggcgccacagatttatctcagagtctccatctccgcgcactccttagagttgccagagcaccaagaggagccatattggatttgagagcccttgcgcgcacaggggcctcaagattctcaagatttctcctgtgcgccgcccagaagatctccaccatttctcaaagaaagatggggcttctcacaccaagagttctaatgctggatgaatttgaagaacacatggtggctgtaataagcggcgctatccccagatggcctttggggtctaagtaccatctccccacgccgtggccctttggacaaatggcgggcccatgcactccatgagggcttcccatgtgctgcccccctcttaatactccacccaatataattttacgtcctgtcctagaaaaaagaaaaaatactcgagcattaagtcggccgagaagagtagagcgctcctggtctn

SEQ ID NO: 701279 - DNA, 179 bp, Homo sapiens
tgaggggccctgctagtcaggcattgcgagtccttgaccgttgacatcgagtagtactcccgattgaagcccccattcgtataataagttacatcacaagacgtcttgcacttcgtgagctgtccccacattaggcttaaaaacagatgcaattcccgagacgtctaaaccaataccac

SEQ ID NO: 701280 - DNA, 969 bp, Homo sapiens
tctagcatcaccactatcagaggcaccgtctgcccagtggcacatgttgaaagagccgggtaccctaagcgtgacacaggtagcataatcacgtagtgccttaaatagggacctgtatgcagtggctccagcgagtgttcagctgtctcttactttgaaccagtgagaattgacctggccgtgaagaggcgggcataacacgagcaagacgagaagaccctatggagctttaagttgattaatgcaaatgagtacctaacaaacccactggtcctaatactagcaaatcgtgctttaaaaatttcggtatggggcgacctcgtgagcgagaacccaaccgtccgagcagtcacatgcgtaagacttcacgcagtcgaaaagcgaactactatactcaatgatccaagtaacttgaccaaggaacgagttaccctagggataacagcgcgatcctattctagagtccatatcaacaataagggtttacagatctcgatgttggactcaggacatcccatgtggtgccagccgctattacaggtgcgattgtcaacgataagagtcctacgtgatctgagtcagagcggagtactccaggtcggatctatctacttcacattcctccctgtacgaaaggatgaagagaaatagggcctacttcacaaagcgcttccccgtgactgatttcgctgtcagcttagtattatacccaaaaccactccaagaaccgggttcgtaacacggtcgcagcaaagaaacgtcgcataacaaaaacaggggggcgggacgagagagcgccacggggccccacaggaagcgcacctcttttgcgaaaagggcacaagggggcgtaaaaagagaaggccactaaacgtccgggaccagcgcgcggatcgaggaactctgtgcgacagtggcccacagaacgccaccacaatacgtagacacacagcgggcgggaggggttat

SEQ ID NO: 701281 - DNA, 254 bp, Homo sapiens
atggctcatggcagcgtagggtggctcttcagtgtggcatcgttgtgtgctcttggggtggacccatggagggtcgcatggtgtggctcgttgcgtgcggcaaggaaacatgacagctgccctacaggcagatctgaagaacccccctatgagccacgcgaagagccaacctaggcgcccacagaggaggtggacagcaccagcaggcggtggcacagcccagaggcggtggaccgctggacagcacagcgggg

SEQ ID NO: 701282 - DNA, 251 bp, Homo sapiens
gcacctgtaatcccagctacccgggaggctgaggcaggagaatcacttgaacctgggaggcggatgttgcagtgagctgagatcatgccattgtactccaccctgggcaacagagcgagactccgtctcaaaaaaaaaaagacatgagaataaaacagtttactgcatataccaaggcatatcagatgtttaggaattgcatacaattttggaacacatatcaatacaactgtaactcaaagaaagctgaa

SEQ ID NO: 701283 - DNA, 146 bp, Homo sapiens
ttctcagtttcccgtttcgtttggtggactgttccactgcccctcctggtcaccctatcacccatggatcgtaatgtaaaatgggtgtaccatgtcaagaaattattaaaaatacaggtactttgagctctttgtaaaaaaaaaaa

SEQ ID NO: 701284 - DNA, 112 bp, Homo sapiens
accttttacacaggaaacaagtattacgtcgtgaacgggaaaaacctcgggagcctttttaaaagaaacaaagattataacctaaaagggaaaaacccgggggaacccttta

SEQ ID NO: 701285 - DNA, 1610 bp, Homo sapiens
  misc_feature (338)..(338): n is a, c, g, or t
ggtggagaacctagtctctgagtttcattctttttttttttcgcgtgttgggatgcttatattccagctggtgcgcggggaggaaatctgtccggtgggccaggagatctgtgcgtgaggagtgataggccgcctcctggcgggtaaccatagcggccgtcgagacatgggcttcgcccctcaaagtgccctagtatgcatgggaaaactcttggggtgccaggctcgctgcggaggcaatatccttagctcaccagcggtggtaagaggcatgtgtgtagggcggacaaccttgtgtgtctgggaagcgattgagaggccacccgcttcacctcagnggggcgcgaatttcacttccgcaatcgaagaggcccgctcgagaaacgcccctccatgttgactgtgagctatgggacttagtgcgctgatcgcacctcgatatgtcgctttgtgtgtctcccctctgtaacctctccgggaacgtgatatagagggttgcccaaagacacaccagtgtggatgcgtccctcagtgtgcgagtcagccacaggcgcgaaaggacctgtgtggggcggcaaaaatttctagcgagacacacgcccctgcgaaggcacacagccggtggtgtcccaacgtggtcgttcttgaacaccacaaccggtggcgcatattcgatcggataaccactggcccccatccgggcgtgtcgattcaatacgtgcacccacaacgtggcaaccgcggccataacatgaccccccagcgacaatatcacgtcgatcagacgcggtatagccctacgcctcccacaaggaaggtgcagcacacaactccaccgaggcatgcaccgccgctaagattagacagatagctacaaccgacctatccgccatagaggacggtacgcaattggagaaaacccacacacgggggagcaccgccccccactttattggccacaacacagaggggcccacacttctctattacacaccacgaggcgtcgaccatcgcacgccggcaagcatatacggagacggttgtactagtagcgcaccaaccctactacgatactctacatatgcaccgcagtaggtagcacacaaacagcgaggtgccgaggcaatacgcacccgaagagagtgtagctcaccccaggacatatagaggcacgacacacagtaacatgagtcggactcacttacaattatacaccaccccacaggtaccatgtgtgtgcaaaggacaacggacccttcctgacggacatcgtagtgtaagctccaaaccacgagcacacacattgacgtcacactgcgctcacaacctggggattctctcaccaccgtgaacatcttccacagtgtgcggcgtaatagctgacacaccacccattagccaacagcggcgcaccatctttgagtcggtgctcaggaaaacatattgtacgcatcccatcacgtactaacgactgcttgtagtaagaacagcccacgtcggccccgactatagtgcgagctaacgttgccgagcccacccagcgagcgcagagcccagctgatcgtaggccccccaccattttctgtagcgcggaatactaccataacgaa

SEQ ID NO: 701286 - DNA, 702 bp, Homo sapiens
tgaggcccggggatcccgttttgggccacggtttttatggtcccttgtgggcacttaaaataaattccggcttgaagcttgtggcctctaacgcggtagtttattgcggtgggaggaggtctcccagcagctcgttctatattaactggttttggcaggggcatttccctattccctattgccggggtcacagcaaaaaaggtttgaatttagaggatagagttagttttcttgcgaaatgttgaaaccatatcttaattcattggcgaaggcgttaaaagacacggagtcatagcactcccttgtctgcgggtcatgaggtatcctgttccttcttttggatatcactggagaggggtgcccgcatttcgtatcgcagcctctttaagagtgagggtcctaaacttgaaccgtttattaataaaaaccaggggtggcctggccccttaacagagacatctctatgcacccccaccaagccatcgtccattatgggagtgataaaatgagttctgcaatgtgcctacaagaaagaccagccaacgcgtatgttttgagggctcgtaacactcacgtccgaaatggttaaggcatgttgtacgcactgtgtggccgctcgcaccgtggaaaaccaccccttatgaagtccgaagggtaggattcacttgcgttgagtagcttaagccaagcaagggcgcctta

SEQ ID NO: 701287 - DNA, 347 bp, Homo sapiens
tactggaacttctggcatacctcgtttctgtggcagaccatttttcattttcaagaccgctcatggctgggcacggtggctcacacctgtaatcccagcactttgggaggccgaggcgggtgggtcatgaagtcaggagttcaagaccagcctggccaacatggtgaaaccctgtctctaaaaatacaaaaattagctgggtgtggtggcgcgttcctgtaatcccagctactctggaggctgggatgggagaatcactggaacctgggaggctgaggctccagtgagccgagattgcatcactgcactgcactccagcctgggtgacagagggagaccctgtctcc

SEQ ID NO: 701288 - DNA, 124 bp, Homo sapiens
ttgtaatggagaaagttacggcgtgtaggggagtgagactcaagtttatagtctggcgccatcagctcacaggtgtaggacttcgggcaggtatttatcactagaatttctgtgcccatttcaa

SEQ ID NO: 701289 - DNA, 311 bp, Homo sapiens
taatggacgttaactagcaatcagagtgtagtaaagaaactataaaatatacaaatagtataacaatgatcttcataacttgaaacacacaaggacacaccttcgcaactgcatacgttaacgttactgtactagggatagtagaaaaactgaactccacgaatgttgaaaagtaacaactacctaaatataacgaataacctagagtaccactaaccacaatcgacagggcaatctacctaatagtaatgcaaagaaaaagcaaaagacaaagctacaacagataaaagagctcaggaatagtacatcta

SEQ ID NO: 701290 - DNA, 754 bp, Homo sapiens
ttttttcgccgagtgagatcgtggcctgatgcaaatatatttcacgtcacatacagaacatatccacattctgcgagatgaggaaacatattttcctaggcgctatgacacgtatatgtcttgggcactgactctatattgtccttttcgagagaaccccacgctgggtgcacccataagagcttgtataatggaacaggagagaagagatagaaagaggctgttcacagagaatattgattgtcacaccacggtttcgcttctggcaaacccactacttctggagaccttcttcttcttccttcctcattttatacttcgaggcctgcccacaattaaccacgccccaccctgttttcacggctcacagagaatgcccttaaagactaaattaatgttgaggccaccgttggtacgcaaagaatgtgcacgcctatatttcctgagccctagtaccccacaattaagcccactccacttggttagcaccaactcacgcgactgtgagttcgtgaagaacaccgggagaaaatccacccactaataacaactgagcacttcacattttcaaactttagttatgttaaacaccagatttttttacttttttatttttttttattttgagacggggttttgctctgtcgcgcagagatcgtgccactgcaatccagcctgggcgaacagagcgagactctgtctccaaacaaaacaaaagtatctggttaccgtacacagcaaatctactacactc

SEQ ID NO: 701291 - DNA, 787 bp, Homo sapiens
taattatttttttcgagggggtaatctcgctcggtcacccaggtgggagtgcagtgacgcaatctgagctcacggcaacctccgcctccgtgggtttcaagcgattcttctgcctcagcctcccgagttagcctcggactacaagtgtgtgccaccagtgcccagttaattttggtattttatagataaacagtggggttattcaccaattattgtggccaggctgtggctcacgaaacttcttgtgaactctggtgtgactcagacccaccttgtgtgccctcttcaagagtgtgcctaggaattactaggcatgtgacgccacgcgcacccgcaccctctcctttaaaatctctttaatagtgaggtcacattgcggactcctgtgtgtccacctcccgcttctcactcgaaaacgcaactccaacacagagatatctccgctgtgtgcccctgtggagtaaataaaacacccaaaaacaccacttagtgtgtagggcgccacaacacatgaggggccacagtgtgagtgtgcaactcctaagggccccgctgtgacaacactaatctccacgcagaagacgctataaaactacctcccctcttccacaacttgtgaaaccatcgtgggggtactccacacaaccttatcaccacagaggtgtatgtcatctgtggagtctccactatttcaacacaatataaaaaaaaccacacggctacgtgggctccccccaacacccccgaggggggcccctatctgtgggcccactagtgactatctccc

SEQ ID NO: 701292 - DNA, 407 bp, Homo sapiens
gcccagtcaactactgatacgctctctgacacacacacacacagacacatacacacacaccttactctgtcatatactattatataaatggggtcatacaaactgtgagatcatactttcacttgcctcgggtaaatacctagaagtggaggctggctgcagtgggtcacgcctgaaatcctagcactttgggaggtcgaggtgggtggattgcctgagctcaggtgttcgagaccagcctgagcaacacggagaaaccctatctgtactatacagtgagctgtgtatggctatagtcccagctacttaggatgctgaagcaggagaattgctcgaacccaggatgcagaggatgcagagagccaagattgctccactgcaccccaacctgagcaacagagcgctgg

SEQ ID NO: 701293 - DNA, 163 bp, Homo sapiens
acagtggagtatatggttagtgtctatgctcagaatccaagcggagagagtcagcctctggttcagactgcagtaaccactattcctgcaccaactgacctgaagttcactcaggtcaccctgcactcgtatatccatgtgatgctgaacatttggtgtggtg

SEQ ID NO: 701294 - DNA, 347 bp, Homo sapiens
ccgcgtccgaagggtgacacaggcagccgcggggactgtggattgcaaggtccgaggggtcctcccggccccagagggcggcccgggcccccgggtcctctcagggggtcctatccaattgcaacaagatgatcttggggcagcttttcagacgtggatggacaccagtggagcacttaggccagagagttacagctattcagaccggctggtgctggaccagggaggagagatctttaccaaagagaaccccggccgggtctgcaaggacctcatggactgtgagcaggatggtggatggtacctactgggtggatccccttggctggtcctctgacaccattggg

SEQ ID NO: 701295 - DNA, 341 bp, Homo sapiens
agcccctaggtagcttcaagatgggggctggtcatcagagagacataggcaggattagagggttgggactttcatcccaccatcccacgtactgggagggaagggggctaaaggttaagctgttcgccaatggccagtgatttatccaatcatgcctacgtaatgaagcctacacaaaaacccacgaagaccgggttcagagaacttctggtagctgggcacatgcaggttcctggagggtgccaagccctggaagctctgtgctcccttccacatgccttgccctatgcccctcttcctttgtatccttcctaatatcctttctaatcccctcgtacatg

SEQ ID NO: 701296 - DNA, 598 bp, Homo sapiens
agcggagcggagcggcaacggcggcggcgccggacccgcacgcgcgcggcggcggctcctcccaaccgcgagagaaaacaccgaagaacgaaaaaaaaaaaaaaacacgcgacgcaacagggaagaaagaaacgaaaacagaaaacagacaagaggcacacaacgaacgatcacacagcaggaccaacacacacgacagaagacacacgacaacaggagaaaagaacaaagcaccgacaaagacaagagacacaagcgaacacacagcacgcgacaaacaagcaagaagacaccaaagagaaagcaagaggcagacaaagcgacaagggcgacgaacggagggagagaccacaggaagagagaagaaggcggaggcgagaacaggagagcagcgagacaggagagaggcgacaggaaacgaagggcgcggaagaaaaagaaaaagagggagaagaaataggagagaaaaacgcgaaacacaaaacgggacgaaagaagaagaaacagaaaagacaagacaaggcgaccgaaagagaaaaaaaggaggaaacaaaaaaaaagagagagaaaggaagaagagaaaaaagaaaagaagaca

SEQ ID NO: 701297 - DNA, 370 bp, Homo sapiens
cctcctggctcctcctcaggccaaggcaccatggtgagcctggcagcacctgacccagccatctgggcctccaccacttggagtaccgagctcaggacgcagatgtcagggcctgaccaccctgaccccagtgtccgagagcagcaaggtcgtcgtgtgaagaagtttcatttacaaactcagttcacatccccagctcacctctgtagcccatagcaccccctgtttcagccccaccgccacctccaaggggccctgcctttccctaacaatttttggggtctgccttggggaaggaggggagaaacacccatgagtgctcactaaaacaactttttccatttttaataaaacgccaaaaatatcaaaa

SEQ ID NO: 701298 - DNA, 840 bp, Homo sapiens
ctatccacaagtacaatgcttacagaaaagcagcatctgttatagcaaaatacccacacaaaataacagagtggagctgaagctaagaaattgcctggagtagggaaaaaaaaattggctggaagggttggagagagtttagagaaaatgtggaaaatcgtgtaaagtggaaaaagattcgagcaggatgatacgacgttcatccatcaatttcctgactcgagttagtggcattggtccatctgctgcaaggcaagtacgtagatgaaggaattcaaaacactagcaagatctcagaaaaaatgcagatcactggaaccatcatcagcgaattgggctgacatattaggggactttgacaaaagcaattcctcgtgacgcagatgtcacaaatgcacgcatatggtactaaatgacagttaaaaacgtggatcctgacatacatagctacagtctgtggcagtttcagaagaggtgcagagtccagtggtgcacatggatgtctcctgacccatcccagctatcaacttcagaactcaaaccacaaagccaaacactgtaaatcaggaagggaagcagcaacaaagggacacacatcaaagataccaggcacagggcgagccaacgccagcggggtcagccagctcccgtaaaacggagaaaagcaaatcaaaggaaaaatgaacacaggaggaaccaaagacacgaaacacaggcgggccacaataaactggaaaagcaatccaaaaaacatagaggccatgccctaaaaagagaccacacataacagaaaacgacagggacacacgaagagggaaccagacagaaacaaaagcaggt

SEQ ID NO: 701299 - DNA, 280 bp, Homo sapiens
aaccttcccttgaagacagaattttggtgttggtgcttgcaagcaagcattttcattaataatatgagaaatgatacctggagagagagattatgagcaaatgtattgcttcttttagaggaggaagcatacaacctcttttgtgtgaattctgtcattatggtcacagagtgcattcctaggttttcatttgagtacccactacacaaaggtgtccctttagggaattaagattagttttcatacatacatttccgtctgacatctgagtatatgacct

SEQ ID NO: 701300 - DNA, 221 bp, Homo sapiens
tctcctcaatctcctgagtagcgaggggcggggaccccaggcatgcaccaccacaccgggcggtttcattatttttttctagagatgagctctggcggtgtggcccagtcgggccttaaactccgggcctcaggagagcctcctggcctcagtttcccaaggtacggggattacaggtttcagccatggtgcccagccaattggttcacatcgtggagtcc

SEQ ID NO: 701301 - DNA, 181 bp, Homo sapiens
ggagtgagcagaagcgtgtgtgtagagaagagggaaagagacagagattgatgagtggctagtaatctgctaaaatccaagttgatttattctaagagacatatcatttgcgaagcgaaagtgcagccatagtacttctatgtaaagttatcgatttgaactacattaatccttgattgta

SEQ ID NO: 701302 - DNA, 507 bp, Homo sapiens
  misc_feature (501)..(501): n is a, c, g, or t
ggctttggagcaagcctctcatcccacttattttggttttctgcagccctttctccaaaagtttccaagctggtctccgtggggtgacgccccccacacacacacacatcaggaggtccaaggacatctttctcacacttgatctgctttctccctagaaacgcgtcgaacctctgtccctggtcctcctaaattgctctgtggcgcgtctcggtgtgttttgtgtgtatatcctgtttggctttccttggccctttccatttgaggccttgcagctgtttttgaggttggatgaaattcacataccataaaatgcaccatttcaaagtggcgtttaacacgcttccagaattgtacagcccccattactgctccccaaaaaaagaagccctgtgccttttagcagctgtgccctctttctctgccctagcttgtgcccacctccagcccaccgtctctgtaggtttgtctgttctggatgtttctgtgaggccgaaaaanaaaaaa

SEQ ID NO: 701303 - DNA, 1025 bp, Homo sapiens
  misc_feature (1025)..(1025): n is a, c, g, or t
ggagtgcgtttagatttatatcagcttgattgcgactgcttacttctagctggcgcatggatggatcacgtgtgcaaggttcagaagatattagagacctagtattaaccggcaatgcgtgagtagcagagttattctatacatatagcgcaatgtactatgtagtttatgtgcgttattggattaagtgattgctttacgatctctgcacgcgactactaacgactactatgatagtatcataactcaggcagaggatgcgagtgtaggtataagtctgatcagtcgtaagtcgttactcgagtcagctgtgatctatactgttgattatccacttactataaggatactgatctgtatcattgtagagagacaacatgtgtagtgtgttacgtcgacgtagaagtaatagaagagtgtagatacatatcagtctcatgcacagacacatggcacacgctcatccagactcgattcagtagacgtatacagagagcagtgtcgtatgcacgacaatcattcactggtctttagtcgccagctatcatatacttgctctcagtcgaccgtgatcaatcagacgagtatggagtgccatccgcacatctgtatgaccctagactgtctgactgagtcgatgctgtctagtacgtgtagcgtgtatctagagcacagtatgtagatcagtatagcgtttgcatgtcgttgttgtcatgcttgcgtgctaagctgtctgtaggtgctgatctctagtaatcgtagagtgaccattgccgtgcgtcgttcagtcgctcttgctcgtatgtcgctgtcatacggtacgtcgtttgtagcgtgctgtttgagcgtgtacatgctgtactgtgtgtgctcgctgatgtgcgatcgtcgtaacgatctatatgcttcgtagagttagagcttacatcgtacggtccgattgagtagtctgcgtcgatatgggtgtcgggtgtcttagtgtgtgagctgtgagactaggtatgagttgatactttcgagttgcn

SEQ ID NO: 701304 - DNA, 221 bp, Homo sapiens
  misc_feature (155)..(155): n is a, c, g, or t
  misc_feature (204)..(204): n is a, c, g, or t
aggcttgtgttagacatgagaaagcaagaatcaccttttcctctgctttttcctaacagctgcagagataactgacttctgctcagtcaagtcaactttggtgctgtttttggagtccttccttggcaggtttgagaaggtggctgtgttcaatnagaaaattaatggtactagtacagtgccctacacactgactggaagaangttgtcatgtacctgtt

SEQ ID NO: 701305 - DNA, 217 bp, Homo sapiens
ttccttcatagttatatgtcaggacatagtctggggcatgctggtgattttcatctggattacacagatacactttctttcatggtttaatttttaatcagagggtgtcctctaagggattcttcaccaagacggggctgagtaaaacggtgccactccgagtaagtgtatctgcagtggtccacctccgtgtgtcctccccggcagggaggatcag

SEQ ID NO: 701306 - DNA, 153 bp, Homo sapiens
catattgtctggttcggagcgtgccagctgctgcttgatgcatggctcgtccccggagttgggggtcccgttgcagcgccaggtacatgatgcaggcgaagcttgggatctggccacgttggactttgatcctttgggcagatgtcccattgc

SEQ ID NO: 701307 - DNA, 158 bp, Homo sapiens
gtttcaaaaggggtttgttttgttttgtttggttttggttttgtttggggggggggggtcattggggttttaaattatgttttttttggcacccaacagttatggattaactttttttggatgatgaagtttaaagggtccattaataggacccccca

SEQ ID NO: 701308 - DNA, 1326 bp, Homo sapiens
attgtgccgttcgttaacaccaggagtgaacgttatattattctccggtgcagtatttaacagtactcaggaccaaacttaaaaaagaaatacctccggtggtgaaaaagttacatttaaaaaggggaagtggagtgggggtgctgaaagggattagtaccttggccccaaggagctcacagcaatctctgatgggctccaaggaaatagaaaagattatggggaaaatgtacacaggagcgcaaggcaaaatgctgaatttcactgatgggagaaggtgcctcgaaagtgggcctcgaagggggaactggttggccggggagttgggctcatggggtggaggagaaaggcccccgaatggatagccaataggggtgggggtccgttggacgcgcccatggtgttattccaagtgggggggcatacaggtgagaggaggctccagcgcatataccagtgtgcggaggcaataaggaccggggatgacccagtggggaagactccgaatgtggaggcccctcggggggggacattgcccaatgggaggagaacggctccagagatgagcgcataccaaggtggtagacacggggcaggttggcattggcccccaaaagcactgggggctacacagcgtagggaatagccataaagccattgaggggccattggttgttgcaaggctgggaattatgaagagaatcccctggaattggggaatccacaaccgcggggtgggaaacagcggcagaacagagtttcaaaagtgttccatcgaacccagagaggacgtgaccccctgtggtgactacactgtacaacaatagtgggtgggccaactgtcactacgataaagccccacagaaggacaacacagcgtgatgagggacacaactgagaaggagggaataccaccaagcggggaaggggaggccccaccacaggaggtggacccacaggcatggtgggaacgatcacaccccgaatagaacaacaaacacacgctgtggagaagaagaccaaaccacacacggagtaaacccccaagagatggaaccacagctggccagagaagagcaaccaaaccacctgagtgggagaccaacaggacactacactatacacaaaaacacatgacaacacaaacgacatcaaaacacctcacataaaaacaaccacaacaatacaaaacacaataacgacgatcacaatacataaaaaacaaaaattcttcccacatatccaactgacaaacacaaaatataaacataaacctgcgattggataactcctttttctcttctcctcccttcctcgttaactttg

SEQ ID NO: 701309 - DNA, 663 bp, Homo sapiens
  misc_feature (1)..(1): n is a, c, g, or t
nggtagcataatcaactgtgtcctaattagggacctgtatgaatggctccacgagggttcaactgtctcttacttgttaacccagtggaattgacctgcccgtgaagaggcgggcatgacaccagccagacgagtaagaccctatggagctttaatttatgtaaagccaaccagtacctgaccaacccacaggtcctatactcccaacctgcattaaaatttcggttggggcgacctcggagcagaaccccacctccgagccagtacatgctaagacttcacccagtccaagcgaactactatactccatttgatcccgataacttgacccacgggaccagttaccctagggataacagcgccaatcctattctagagtcccatatcaaccatagggtttacgacctcgatgttggatcaggacatcccgatggtgccaacccgctattaaaggttcgtttgttctaacagattaaagtcctacagtgatctgagttcagacccggagtaatcccggtccggtttcttatctaccattccaattcctccctgttcgaaaggacacagagaaataaggcctacttcacacaagcgccttcccccgtaaatgatatcatttcaacttagtattataccccccacccaccccaggacagggtttta

SEQ ID NO: 701310 - DNA, 163 bp, Homo sapiens
ttagttgagccaactaatgacgtgaacgtccgtgggagtcctgtggctacaaagaatgtagagtctgtagatgccgtcggagatggtcgaagggagcactcgaagtactctgcaggcttgtaggagggtaaaatagagacccagtaaaattgtgataagcagt

SEQ ID NO: 701311 - DNA, 317 bp, Homo sapiens
cccacgcgtcgagagcctgggggcacaggtgcaaagccaggcactgtgcccagcatgtggctccctgcctgccacctcccctgccagtcatccaattacgagatcttgacatagctcgccagttcctaggtattcatactgcttcactatcggccccacgtcgttctacgacgctgggtacgacttaatctcgggcactctcatacgacattattctagatccgctgcgccgcttaaataaccacttctaaagccataaacaagaagcccgaagcaaccctaaattagtagcccccacacaaacatccaaagaccgc

SEQ ID NO: 701312 - DNA, 80 bp, Homo sapiens
ggatttgctggtgcagtacaactaggcttaatctcgaattcgactcgaattcgagctcgaattcgagcctcgaattcgag

SEQ ID NO: 701313 - DNA, 253 bp, Homo sapiens
gtgatctagaggatcccggaaaattagcgacgtagtataggtcacggatgcggctcgttctggtgtggccgtggtgtggtggaggctggcagtgaagctctgatttgaccccagcccaggaactcctgtatgctgcgggctggtgtggccataaaaacaaaacaaactaaacacttaaaaaaaaaaagtggaaacaaatgggtggataaggttgtgaaccttacgagggaagaagttgggattcggcgtcggc

SEQ ID NO: 701314 - DNA, 729 bp, Homo sapiens
tgtggaattaagcaggatacaactctcacctgagttcgagccagtttttagtctttttcgccttcaccaacaaacattcacttactgtgccacagtagaattatttggtcttgtgattggagtcctgacagcaagtatttcttcactgggagtccgagacgaaacaaggtggttgtctggggtagagtgtagactccactgcatgactgtatttagagcacaacattaggcccctgctcctcagtcctgggacgtgggctggggctgtgacagtctgtcagcgtctgccctgtgtctccaccacttctcaacgatacgtggttgcacgtagcgagttggcaggtgtgtgagcagatttgcttatatacctggcaagaagactgatccagttccatgacataatatgactggacccactgtgtagaaacaagtcaaagccaaagtcatacactggctagtcagaaaattatgctggaagaattgcagtggaaaaactgaacagaaggaagcagaaggtgctgagtggttacactttgcaagctgtggtgaaagatcacactgtgaaagatacacagagtccaatcaatgtgcactgtatgggcggaaaaaaaaaaaaactccgggggctcttttcgggggggcggcaacaaaaggttttccactggccctgtggcaagtttttcccggcccgctttttgttccaggggaaactccggggcccaatagggc

SEQ ID NO: 701315 - DNA, 270 bp, Homo sapiens
gaacaagcacagtgctgcgatgagctccaataacaactttcaaacttggagcagcaacgaatgcaacatgcgccaacacttcctgtgcaagtaccgaccatagaggaagaatcaagattctgctaactcctgcagcagccccgtccacttccttccagctagcctggctaaatcggcacattatttcagacgggaaacctagcaaactaagagtgaatagggccctactacactggctgttttaggctaagagacagaagactttagcat

SEQ ID NO: 701316 - DNA, 136 bp, Homo sapiens
gaggaacgtgtgtcacagttgtggggagcggtgaagtgtagaagggacagacgaggtcatgtactgggaactgccgagggtgggaggcatttcataacatttcttgttgatcaaaccaccgtgaacagcttctttg

SEQ ID NO: 701317 - DNA, 283 bp, Homo sapiens
cgacgtcatcgttgaagagtttttccatcgctcccgccgtggccaagtccgcctgcaatgccacagccttcgcgcctagcgcctcgattgcggcgacggttgcgttcgcgtcagcctggctggaagcgctgttgtagtgcacgaccacagccttggcgccatgcttggccagatcgcgggcgatcaacccgccgaggttcttcgcaccacccgtgatcagtgcaaccttgccgttgattgaatgattaggcatgacgacattcctttaattgggagaagtacg

SEQ ID NO: 701318 - DNA, 270 bp, Homo sapiens
tgctggcgctgcggactctgccagcacccagctgggtgcgaggctcgggccctcccgtcatgacccgcttgcaggacgcgcccgtggtgcggcctggcttcctgagcacggcagaggaggagacgctgagccgagaactggagcccgagttgctccacctccgagacgaatacgatcactgggacgtgaccatccacggcttccgagagacagagaagtcgcgctggtcagaagccagccggaccatcatgcagcgcgtgcaggcggccg

SEQ ID NO: 701319 - DNA, 101 bp, Homo sapiens
tactcaaaggtaagtcttttgttttttgttttgttttttggagacggagtctcgctttgttgcccaggctgccaagctggagttccgtggtgcgaccttgg

SEQ ID NO: 701320 - DNA, 645 bp, Homo sapiens
tagtggggtgatgaggaatagtgtaaggagtatgaaatattgggagggggggatcaatagagggggaaataaaatgatcagtactgcgggcgggtaggcctaggattgtgggggcaaatgaattgaagcgaacagattttcgtccatttgggtccctcagggattggttataatttttttattttatatgggcttgggtgagggaggtaggtggttagttggtgtctaatatttatagtggggtgatgaggaataggtgtaaggagtagtgggggtaattagtggggggctcataagtggtgttgtgtcgatgcaggtagaggcttactagaaagttgtgaacaacgtaggctgggattagggcgacagcgattcctaggaatagctcagatagaattagaaatggtgaagcatgaataacgggtacagggaccggtacacggggcagaaatggccagggggggggctccccaattagggtgccataaagtagaggtggcacctgcaagaaagtggtacgcggttaaggcgataacggccagagcaaattgggtcaaatagataaggcagagaggtccagacaaaaaccaagatgggggcaaacagggggaaagtagaccctgtgggacaaaaggggcaaggcaa

SEQ ID NO: 701321 - DNA, 857 bp, Homo sapiens
  misc_feature (204)..(204): n is a, c, g, or t
aggctttgggccaccacgcccggcttatttttatttttgagacagtctcactctgccgccaggtgagtgcagtggtgcgatctcggttaccgaatctctgcctcccaggtcaagcgatctcatgcctcctgtctcccaagtagctggggattacaggcgctgcaaaccatgcccggtaatttaacgcccagctaatttggtatncagtaggagatgggggttccacccattgtaaacccaggctggtctcggacttcctgacctcagttgatcccgcccgcctcggctccccaaaagtggctgggaattaccagggcgcgagccacatttgttgccctggcgctggattttaattccctttgcaggtcacagggcgctgggtggaataattaaccctttgttggttgttttttttacccaccttttgtctttggtctcaatccccaattgggtgtggtcgactgcgcccattgttgcggttgggtttcccacccttttgttgggcttagttgtgtggcgacattaaaggcgcttggtttatagttgaaacccccgtttggttggttacacagaccgaacatcaccaactgcgtgctaatcacatctaatacaacacaagaatcatctgttttctgtcgggcgcgcgttcttctgcgcccttagtaagaaaagacgcttttttttataagaacaccccatctcggttggtggggggcgcgcgcggcgggccccccccaatgtatgtgcgtttcatagctcacccaaccgttgttgtcccaacaggggcggtcttcaccacaaagaggaaagacatctcctggtggcacaacaggaacaacagcggggcgcgcggacac

SEQ ID NO: 701322 - DNA, 201 bp, Homo sapiens
gggcagggttgacaaagtgcccgcccttgggcctggcgtgtagtaaagagtgggtggtagggtaggcgcagtagtaattatggtaatcatagtagcttatatgtgtgtgacagcatgtggcaagaactgtgctaagcactttgtacagattatccacacaacagccccataaagtggctgctaatcagccaggtgggtagt

SEQ ID NO: 701323 - DNA, 1077 bp, Homo sapiens
gtactgcaatccgggccactgtctctgcatggtaaagtccctgataggaaggcagagcgacaagaacgaacgatactgatgcgcaaaccgatagctgtagcccgctcgctgcgtcagcgaccacatgtgtccagtcggtatgatactccctcctagtgatttggcgccatggtgggtttccgctgacgatggggacgagattgatatgcacaggctacatggtatcgtaggcagtgcacgaacaagacgcgtgttgttgtattccaatagaacgcacttaaagttatcggagcagagtgtgtcagggcgtacgcctggattgacattgcgagggcggtagatgggcgtagtgttgcacatcctcaatcgtgatacgcttggagaggcgagaatcaatcggaaatgcggtaggacatcataaatttgcgattgtgggtggaattgtaacgatgttgacagaggaagtccagtgcaagcagtggagacatagtgatcgagtcgcaagatgggcgggtagcaactgttgtcttgtcacgacgaagttgatgtagcaaagtttggtacgataaattgtagtagttatcgtggtggttgcttcccaaaatgttgaggtcatgttatttgtttgggagatctttaagggaaacgtggtagtatacttcgtaagatacgtccggatgaccttatcgaggaaaattaggcctcgcgttaagagcctttgcttgttaggcagtgcatgcctgtgccacaggggtggggaaagtccttgaaggatcaagtcccttgcggcaaacacctgggagcagtccaagatccatacctagaatggatagcaagataagacatgggcagaacggtgatataaatggagcgctctattccagtggatacccgtgggggattcgtgacaaggcactcggtggccgtggagttggctgaatgtacattgctcacggaggccctagcacatggtcggattggccattcacctagggaagtgacacgttgccaactcttgacatgcgtcaccctgtgaagtggtggtgcaaattcaaaaaatgccacacttgaaaggcc

SEQ ID NO: 701324 - DNA, 325 bp, Homo sapiens
tgaagagaatcttgctctgtcacctgggctggagtgcagtggcgcaatcatagctcactgcaccctggaactcatgggctcaagtgaacctcctgcctcagtctcctgagtagctgggactacaggcaggtgccactctgctcagctaatttttaaaattttttcaattccttttttttttttttttttgagacagggtcttactctgttgcccaggctgaaattaatttttttcatttttcatttttattatacagatggtgttttactatgttgcccaggctggtctcaaactcctgcttcaagtgattcttccattttggcc

SEQ ID NO: 701325 - DNA, 222 bp, Homo sapiens
cacaatgaggctcctcgagaggatgcaggaggctgggcacggagagctggcagggggcttggatctacgggtgcccagcgggttgtcaagctcctgtaactgatggactcaccctgcaatgattccggcaataaccgggacagctgcctgaaactagcaactggtgaggatgatgatgcctgtgatgaacagcacaggtgagaacaacagcccccgtttccg

SEQ ID NO: 701326 - DNA, 1753 bp, Homo sapiens
  misc_feature (298)..(298): n is a, c, g, or t
  misc_feature (402)..(402): n is a, c, g, or t
  misc_feature (864)..(864): n is a, c, g, or t
  misc_feature (1455)..(1455): n is a, c, g, or t
  misc_feature (1543)..(1543): n is a, c, g, or t
tggaaaaagcctcgggggggggggggggaaaatccttgtaaccccggggggggtggcggggacccaagaatacaccccaggtggcctccccagccctaaggacaaacagaagaatcttcgggtctcaaaaaaaaaaaaaaaaaagaaaaactccccgagagagaaaaccgggcgcgcctcagagttcggcgggggggagacgtggggctcgggggaaagcgcaccacccgcgcggtcaacccacccagagaggcgaaaagcacaccagcggtgggtaatatataaaagaagagagggnggaatcacaagaatattctcaccacgaaacagagagagggcccgcgcgcagagagggggccgcgtgcacaccacaccgcgggggtgtgtgtgcggagcgaaccncacgagagagagtgggcgcgcccgcgagagagagggcgcgcgcgcctctagaggcgcgcgtcgggcccccgcgaggttcatcccccccccctctcgtgggtggtggcccacacacatctctctctctctagaaagaagaagagagctctctctccagagagaatcacccgcggcgagagacccagaggaggggggcggccactctgagacgagaagagtggtcgcccccctgaggaacaaccacctctcgtgaggacgcctgtgtgacaccctctgagggggtggcggcgagcccatctgtgtggtagaatacagcgacaactatcaccgcgtgtgtgagaacaacacccccttgttaggagatgagacgacctcacacgagaacacacagcgagtggagaaaacatatgtgggagcagagtctctccccagaggagggcgggcagagagaagagcaacccnccacgaggggtggtgtagcggtccgccccccccggtggggtggtggtggcccccccccaagacgcacgcggggagcgccccccgctgagtgaccacacaactctgtggtgtggccgacaaacaggtgggagagaacaagcaaacaccaatgaatgtagaaataggcaccccccctatagtggacgtaataatccgcgtcagttcagtccccacccggcaaagaaaaagaaatgacgcgcaccacacaaggagtttatcacccccaagaggggtgggggagcggccaggacgacaaaacattgaactggtgggctcgtcgacagacaccacactctggttggtgtggtggcccccccccaaaagagaagaacatccacctcaaagagtcaggcgagtaagcacgaggtgaaacaaaaccccccccgtgtggtggttgtgtgcggtgagcaggcggacgatcaaaaaacgctacgcgacggggtgtggtctcccccccccagcagagactccttgtgtgagtgtacaatagagggcgggcacacaaacacacgactgcggcggaagaagaaacactccgcgcaggaagagaancacccacatcaacagcgggcgagggagagggcaggcgcatctcaacacaaacgaactaggtgcgttctgtgtggagccagcccgaccncagacagaaaacaccaaaacacagcacacgcggcgggaggtctacactataagtagttgcgggctggctgagcacagaacagacggtgatagtaaatagcgacgcgatgcgagcaaacgtgagtgctgccgccccgcacgattgtgtttacaagggagaaaaaacacggcgcggcccccaataaggagggcagcatccaccgactccgtc

SEQ ID NO: 701327 - DNA, 291 bp, Homo sapiens
aaacgtaaccgggagacgagattggtgagagaagctggtgattgagcgtagaggcaatatatgggggttgtagctgtatgactgaggatggagctgaaaaagaggttataggtggagctgaagtagaggctggaactgaagctgagactgaggctgaggctgaaactggagctaagggtgagtgctggaactggagctgaggttgaggccagaactggagctaaagttgaggctggaaccggagctgaggttgaggctgggactggagttaaggttgccgaagcttgatca

SEQ ID NO: 701328 - DNA, 800 bp, Homo sapiens
tcggcacgagggtagccctgccgttatcagtaccttgtggaaccggagctgggagcggattcaaacgaggcaccgaggcactcagaggaggctgccatgtcagaacctggctggggatgtcctgtcagaacccatgcggcagcaatggccatgcctgacgcctcttctgtgcccatgtgtgacatgctgatgcatgctgatgcctgctgacatgtgatgctgctaactgtgctgtggctgcaatccatgtgatggccctgtgaagcagactggacacttctgagcatattgtcaacccgacaggacacacaccttggacgtgtggttgcacatatcagcacattgggtgcaggacagtttgctttgcatgtgtgttgcactatatgtgacacatatgtcaccgcaatggactaccataaacaggtatacacacaacatgtggagggacaccgcgggagacggacaggggacccgggaggcactaagcagcttctggggtgcacgtgcaatggggccaacggtggcatgggacaccattgggctaacctcctattccacacgacctttggagcaattccttttgacataagaccacacgcgggggaagaacccaactagacaatgacatgtggaacaaaggacacgccaaatttggatatgagagaatcccgtatgggttactatcaatatggttacctttttgtgttaaccccaccgttataggttaaggtccacttacctgggacctatacccaacggggtggaggaaacagccaatgcgtgagccatttggaaaacag

SEQ ID NO: 701329 - DNA, 393 bp, Homo sapiens
gcggaacccccggaaagcacacccactttgcaaccgctcatagagcgactgcgcgattcggccaaactcgggctcaggattaaacccttcccagtaaatgttcgcgaacacggccgcagcggtattggcttcgtccgcactcgggctgaacgctacaccctgagcctgcccatactgggctgtgagttcgtcattgcggctcgcggagcagatgaaaagagtgtccttgccatccttcagcgatctgttcaacgcctcgttatgcgtacgccaagcaatatggcccgtcacttggagaccatcagtttggctggccagcctgagagctgcctgcaacaaagtaagtgacgacatctgttatctccttagcatttcaggcaagcaacgttgaac

SEQ ID NO: 701330 - DNA, 111 bp, Homo sapiens
gccactacatccccccagcacactgcaaagtaaaacctaattttccccttttactttttatgagagccagttaaacaaattggtggggattatactacacaacccaaggat

SEQ ID NO: 701331 - DNA, 1556 bp, Homo sapiens
  misc_feature (1181)..(1181): n is a, c, g, or t
tcaactgggttggagcacagggtacttaatggatgggtacatgacaaggtggggtctccctaggcccctccccttttcagaggggtgtcatacatgtggcaacgtggtaagggaggggagaattcaggtggtgggtgggggacgtgagtgtggtggcagggaacctccccagacaggtgagggttctctctctttcctcttgggtgctcttgtgggtggggcggtgggtggctcacaggggggttctttactctccttgtggagggccatgtgtgtgtggccatgtgagggcgtcacaacacaccctgtgtgtgtggcgtgatacgcacacaatatctgcggtggcgtcatatacccgagagagaacagtgagagacctgtgagaccacagagtgtgtggcgcgcgtgtgagagagtgaccatagtgcgcccacgcccccactagagcgtgtacacagagagtgtggagagagcaagagtcgggtgtgtgtgcgcgcgtgggcgggaaagagtctcatcagacgagagagagacaccacaccctgtgggtgttgctctcagagtgtgtgttacgccacagaggagagagtgcgccccttgtgcagagaggggggggccccctactctcgagagaagactcgctgtgacgatattccacaccaccaccctctctcttgtgtggagaataggcatcgcaatccacaaatcatattgtgtggggccacaaggagtctatactagtctcctcatcaagaccacgcgggggccgaggagtagtcattcccaaggggtcttcccaacaacacacaagctgtggcgcaacacagcggcgttgtagggaccacacgcagttgcgggagtagaccacacccaggaggaggacaagaggcggccgccaactattgtggcgacacaaatagagtgagaagagccgactcttcccccaccggggggtttatccaaactggctcttcccacagggcggggggattcttagagcaacacctctatttgtgggcaccacccaaatagaaacaggcccctctttgttgtgtggatcaaatcaggcgtacggcgaccccagattgttgtctcctcacgacagatgcggcgcacaaacagcgcgaggaccatcactcaacgacctctagatggctatcacatccaacttgagcggaacnaagacacacgcacgcccccccaccacgggacgagggaagaccaacacacacaacacacacaacagaggggaccgcaccccagacacaacgggagatgcacccccaccccccatgactgggaagagagacaggcaggcgaccaccaacaaaaatcagccacaaacaaaaggaagaccccatccaacaccgacgggcggacagggcacagatagcacaccgacaaggtgagtaaacaacgaatgtgatgacgccccttctgttatgcgtgacacacccccgtaggagggcaggcagacactcacaaccgtagctgagcagcatgcacacccatcatttagcacacagaacacaagaacaatgaaaatacgccacaaa

SEQ ID NO: 701332 - DNA, 819 bp, Homo sapiens
cgtagttttttcccccccgcgtccggggtccaacctccccccgcacaccgccctttggggggtcaacccccgccgccgctcgggattttcccccccggggttttttctggggggtgtacccgcccccaatactgtccccgcgccgtctgcatctcgttgtgtctcgcgacaggatactgtagtgggccaaattctgggggagtcgtttacagaggacagacaggtaggggactgtctacgtaggggcagtttctgtcgagacacacgacgagacactcccacacgaatgggggacataaattcgtctcgtggaaataggacaagagtcgaatccttcccgtgatggaggatcaatataccgcgctgttagaagcgagcgctctctcgtcgagatcagctgtgagcaataatcagtagcgggggtcgtatcaatctcagtccactcgagtgaagtctccttgttagtccaccgaaaaaggggcttttcacaggacaaaaaattatggtagattctatgagagggtgactttatggaattaatgttggctgtgttggttcgctgaggaccttgtcttccatctctatggtctctcccggtatcgcccgtgtatatcgtgccacgttcatattttgcttctcttcacgaggactctgtactagcacacttttttgtattgttctcactacttgagagacacctcgagcccttcggtatagctgcaccgtagaccggcctcggggtaaatcatcaactccggcgtggtgccccttggtgtatcatgaaaaaagtaaggggcagagcgccatcaatagtacgca

SEQ ID NO: 701333 - DNA, 239 bp, Homo sapiens
  misc_feature (175)..(176): n is a, c, g, or t
  misc_feature (212)..(212): n is a, c, g, or t
cacgaggggtcctgccggtcctgcgcgttgagcacgatcaggatggcgatgacgatggccagcgcacccaggacacccgcagcccacagcagcgcgcgctggccgggtgagaacgtccgccgcgccggcggggccgggcggtggctgccgctggcgggccggggccgcggggtgnncggtgccgggcgggccggctcgatggccgcgcgggnctgcgtgctcgacgggatcgccgccgg

SEQ ID NO: 701334 - DNA, 585 bp, Homo sapiens
tcccaggacacaaagggttaaatccaaacctctccacccgccacagttccacatcccagttcagcaggccatccggggacagtccctacgggggggtctgtctatgacagccccatcctgagtcccaagtccagtgtccggacggaggtggtgagtgtgctcactcgggttgctcaggaagactctctgtgcgtgcggtatgggtgtaggggtgccagcgccactccacgtctgcgtggtggcctccgtgctccagcgtgcccagagggatcatgtccagcttcagctcaaagcggggcccgacctcagtgagctccacgtggcgggtgggtctggtcttcttatacacttgggtgcctggggagggaacacgctggtgggtgtcaacgtgcaacgcagcacgaggtacacgggggggggatgcttaccgggggacatgtgcccgtggacccacgggagtcgatattgtagtcgtccgggttggcaaaggtgatgacccgggggtctgtaatcttggggcacgggaaataggtatcggaggatgccacagcgcggttgaccaggcgggaaggaaaagcagtgtga

SEQ ID NO: 701335 - DNA, 168 bp, Homo sapiens
  misc_feature (6)..(6): n is a, c, g, or t
  misc_feature (63)..(63): n is a, c, g, or t
  misc_feature (94)..(94): n is a, c, g, or t
cagganttcggcacgagctccgctgaccaggcaatctccttcaggtcacacagcaggccctgntccatccccactcagaacagagcatcccctnctcagcccagatctgagccctcaggactgggaggactcagagtcctgatgctcagtgagggatccagactggaa

SEQ ID NO: 701336 - DNA, 133 bp, Homo sapiens
tatataaatagtgctggggacaagggacttactgagaattttttttccaaatatttttgatccacagttagttgaattcaaaggcatggaacccagggccagagggctagccgtactttgaactcagtaggat

SEQ ID NO: 701337 - DNA, 620 bp, Homo sapiens
ggctcatatcagtcaaagaatacgacaaaaacctattatttgtgaaaacctgttttcaggaaatgcgacataagaattgagtgactccaggaagatattggagggaaagaccaaatcctcttaaaaataaagggccagttattaagtaccccttggaaaaagaagattggcttgaaaatatgaaacagtgaggaaagccatgaaaaaaggggaataaaaattaaataaggaccaaagcaaagagatcagagagaaaattattgatagaagacaggccattaccaatagaaaaaccactaagtattaaaaccacagactaggagaaatgtctgaaatttaaagaaaacttgaatctgcatctttaaagggtcctcagtatccctgggaaaataaacctggaatggtgaagtccaaggcatatactaggaaaatattgtaatttacagataaagaacaaatttgtctagatctccagggcaaagtatccaatcacttacatagggaagaaaatcggacttctcatctaaagtaaaagaataacgcaggcacatcttcaggaaactaaggaactgtggaataaggtttatgtagatagagctaaggttcaaggttctagcgaa

SEQ ID NO: 701338 - DNA, 148 bp, Homo sapiens
atccgttatctcaggtcagccctactgttcacaggacgtcatgagctgatatctgcaggtagatgtctgcggagtcatcccgttcttaaagatgatgccacgctgctgcgttgctgcctcctcgttgtgtacaattcacagtggggcc

SEQ ID NO: 701339 - DNA, 121 bp, Homo sapiens
tactgttggtcgtctcttacaggatcccggtaatctagtacatccaattttgatcctattaaaggtcagactccctatagttccatggtgatgtggtgtaatgtgcagttggtagacgtag

SEQ ID NO: 701340 - DNA, 101 bp, Homo sapiens
  misc_feature (46)..(46): n is a, c, g, or t
  misc_feature (94)..(94): n is a, c, g, or t
acagcaccttgccctgccacccaagctggagttcagtgagctgagntcacaccactgcactccagcctgggtgacagtagtgagctccgtctanatgaata

SEQ ID NO: 701341 - DNA, 282 bp, Homo sapiens
ctaagacaacttacgatcaaagcagaaggtagatctccagatctttgccacctcgtgcctacctggatcagacagttgtgcctatcttcttacaggaacttgctgtgcttgcaaaggaaagatgaggaaacagacttggagaggttccgtgacatgctcaagacaacactgctgacggggatttcaccgatgttgcccaggctggttgcgacctccatgagctcaggcaatctgtccgcctcgagcctcccaacgtgctaggattacaaggcgtgagccacc

SEQ ID NO: 701342 - DNA, 330 bp, Homo sapiens
  misc_feature (45)..(45): n is a, c, g, or t
  misc_feature (111)..(111): n is a, c, g, or t
  misc_feature (118)..(118): n is a, c, g, or t
  misc_feature (128)..(128): n is a, c, g, or t
  misc_feature (155)..(155): n is a, c, g, or t
  misc_feature (199)..(199): n is a, c, g, or t
  misc_feature (246)..(246): n is a, c, g, or t
  misc_feature (321)..(321): n is a, c, g, or t
ccattgatggagcactcacacactgtgccagcactattctaggtncttaacatacattaattacttcagcagccataacagcctaataaagtaagtaccaatattattctnattttanacattagganacagttacagacagattaagtaacttncccaaagtcacacagctggtaagatgggcagagcaactgtctanacaattacactgtatattgacagagtacagggtttaatattctattnttccttgggtttgtatatatactttgttttcaactgtaggggtaggtgcagggacctacagggcctccggggtgnaccggggtg

SEQ ID NO: 701343 - DNA, 371 bp, Homo sapiens
tgaacggtcctgccatcagggtgcaatatttgtagcactagatcagttgcaaagtgatcttccctgtgaatatctcattctatcattgggtactctgaagagcgaagtggccattggggtaagaagtttaggttcttgccatagcgtttgcctggacagggtaaggctcagggtgcaggacccttaaagaagactctaaggattttaaggagagtcgaaactctacattcatccatgcaaacatctactcttccatagatataatggatccactcatccgtgcaagacattcactctaacatccatccattcatccatctatcctccatcaatccatccatgtatctttcatacatccatttatcggggat

SEQ ID NO: 701344 - DNA, 133 bp, Homo sapiens
atgagattggtttctcctaacagcgcaaacaccatcacctgtcattgcgcttcccaacagcacacccctgttttttctgtcttcgatttggtagtagttagctagggcaatagcagagggggatagtcccata

SEQ ID NO: 701345 - DNA, 891 bp, Homo sapiens
ccttgggcgcgctttttttggtgggccccccattggtgagggaccaagcgtgtgggtgtgccaacagacaaccacgagggctgggggtcggccccgcgtctcgcgaggatttttttccgcgcgaggagattttgttttgtgggtccacccccgacgggctcgctcgcggagagacaccccccaacacacactaggggggccagcgctttttctgtcgccacacacacaccccgctcgctagagtagaagacgggcgccccccgcgcgtccgctctcatcactcatcaaacaagagatgagtcatcactcaccgcgcgcgccctcggtgggcgcaacgcagattttcctcccacgcgcagcacaccagcgcgcgctgtttgttgtcgcgagagagagagattcgagcgccgactcagtatatctcctccgcgcgcccagagagttcgtctcgctcgcacccacgatagatagatcggcgtggttggttggttcgccgccgctctctctgtttgtgagaggcgcgcgatatatcgacgagagagaggagcccccccgctctagagagggttatttttccctctcccaccgtcacaggagggagaggagaagaaaaacagagagagagaaacacaatcatatacattcttctgtgagggtgtttccacctccggtgatagcgacgaagaagattattattgaagaaaaagatacctctccccactacatgagaaaacacttcaacaactttgtctgattcggcgccactattggtgcaccaactcctgcggctccctccccccccacacggggggggattcctccacccccgcggggcccctttttattttttttttttgtttttttttttcaaaaaattgggggcccccccca

SEQ ID NO: 701346 - DNA, 138 bp, Homo sapiens
tgaaaaacatatgtcaaattaacatattgaagagctgctcagatttcattagtgatcagggatatgcaaaacatgattcaaaatgtggtactaatttaacttcctcctcgagtgggctaaattaggaagcctaaaaaa

SEQ ID NO: 701347 - DNA, 176 bp, Homo sapiens
atagacctgtacgccgaactctccgggaccacctctcacttcgacaccatcactgatccaccagtggtgctggtaactgccaagtgaagccctgcgcacactgcgtcagcagtgcactcgacctgctattcgcttttgacgaagcctgctggcaccgcagaggagcgggccgaaat

SEQ ID NO: 701348 - DNA, 336 bp, Homo sapiens
aggtgtttaagtgggggtcctgtatttttatgtgctaaatctggcaatacaggtctggcgtggtggctcacgcatgcaatcccagcactttgggagaccaaggccggcggattacttgagctcaggagttcgagatcagcctggccaacgtggtgaaaccccttctctaataaatatacaaaaattagccgggctcagtggcgggctctggggtaatcccagctaccctggaggctgcggcagaagaatctcttgagcgcgggaggtggaggctgcagtgagccaagatcgcgccattgcactccagcctgggggatagagtgagactccgtctca

SEQ ID NO: 701349 - DNA, 812 bp, Homo sapiens
  misc_feature (426)..(426): n is a, c, g, or t
taagcgccttttggtctcggggggccgcctccgggctcccccccgtctgtctgttgccgttgccgccctgaaattcatctgcctgcgacattccggccgcttctggttcccctataacttagttcgccgatatttgggagtttctttacaacatgtggcagacatttgacaacaaaaaacagcctcttgaactttgactcaagaattgtggattgcattgttgaaaaagttaaaaaaagaggaacacgttggttgaagaaacaaaacctcaaagcccggtcagcataacgtgtctcagattgtagtgacaaaactccactcgagaatttcttttggcgagccctttcaagaaagagcactttgagtggctctggttagaaaaccaccaaacgagtgagattaccttttgaaagccttgccttaggnggatagtttctaaaaagcacgagtgtgaattgctctctcaaaacaccttgcaagttttaatgtgtgcacagaatatgaaaagccaatttctagtgaggaaagtttcacagaatctttgaagaggaagtatgcttgttctcttataaagcctctattttggataagcgattatgaaaatttattaagtgcacttttattgaaccctacggaacaacaacatttgtgatgtggcacccagtagtgtaaacaacatgagattccggaggaattgaaaaaaaaggccagtatttgagctttaagaaaccggttgagaaaaagaaagccacacagaattccgaaatttggtcactgtttcacaatgtgctgctcgatttgtcagacccata

SEQ ID NO: 701350 - DNA, 140 bp, Homo sapiens
gacggtcaggctaagagcaggtggtggtctccagcatcagcacgaggaactgtctctgcgcaaacaggttgtgttggctgagaggacttggcactgcggatctacctccgttgcaaaagccggatgcgtcgcgtaaattt

SEQ ID NO: 701351 - DNA, 115 bp, Homo sapiens
ctgggttactagagttcctcgtaacaggcctccaccctaaaagatatcagctcaaatgtattagtgccaggttgagaaactctggattaagtaaatagggctatatttgattttg

SEQ ID NO: 701352 - DNA, 594 bp, Homo sapiens
  misc_feature (13)..(13): n is a, c, g, or t
tcacacatgatgnccaagcgggaggagcaggctcttcttcccgtatcatacaagacctttcacctttaatagataacccactcataaaaagacctcttatctactaactagtcctgtatacccttttactaacactcacagcacaaatacctaatactaacatcttatacttttaggagggaccaacaaactcaactatcctgcgcgccttcatactctgcctcataaaactcagatccctacgctttctcaacataacacacatggctaacaatccctcacttaccattaaaccatatttgctaccattgatactgagcctaccatttcactgtctaaggagatctaatcctcaacttctacatacttaccccattatcgcttagatccatgcaaccttcgactcattgacttatcactaatcacctttaacttcaaaaatgaacccccccttccataataattacatcacaagaaggttccctttcctcatattaccacacattttgaattcgttcaatacaacgcgcaagcctctcaattttgcgaatcaacaacactttaatgctacccgcctacaattatccccttaag

SEQ ID NO: 701353 - DNA, 401 bp, Homo sapiens
ccagaccccccccggggcccagggggccatttaggcagcccctcaggagcctgagcaaaaacggggcaggcaggccccaggcccagacaaaacaaaaaacagtggattaacagcggggcctcctgagggtggtggggaaaactttgccccctgttttgtggggcccggcaagtccctgtaaccttgacaacaggggcatcctcccaggcccccaacccagccatagggttttttttgtccgcaggggttttggggccaaatgggtgaatttttgcttttaacaatgggggatttcttttctttttttttttttttttagatcaaggataagttacttttgtaagcagaaaaatactttcaaacaagaataaaagaagctgttcgctagcccccaaaaaaaa

SEQ ID NO: 701354 - DNA, 835 bp, Homo sapiens
gggcaggttttcctcggccgcttctccatggaggaggcggtgcgaacggttcagccccgaatgctcgcattcccactggacggcgacgaattgcggtggccgtgcgagcgcagtgactgggcggctgtgtgggggtgtagagccgctggtgcccaaggctagcgccaggcgaggggaagcctgctgctggacagagcggaccgactagggttctgacagactgcttcattctgcctctagtaccagcggtatactcgtgttctagtgatcaatgtcgattcacaggaacctccttaagtaccacaacgaaattgagccagcgcgcgttgcgcaaaactatgaccttctagtatttgggtctgggacttgggctagtgagcgtccagaccatttcttcatttggcaggcaagtcttcatttttgaaacacaccgaattgggccttccttctgacgttggcccaggcaaatgggctctatgacagagccacgcggggaagcctggttgccgggtgggccagactatcgactgcggtataggcgctattgcggcccaggaccacttcttagttggagcttcccaagctaagagacggactctcagacggtagctaagtacaagttgcccacatccttatgtcctttccggtaccgttttccctcacagctgcacactgcacatttacagtcctttcacttgcggcagacaactttggggattgtcaagggcgacacggtactccctaagacgaactccattaacaggtgaagtgggtccagtgtccagatgacatcccaacagggcacggacgcgaagcattgaaggattgcgacaca

SEQ ID NO: 701355 - DNA, 343 bp, Homo sapiens
tagaggctagtgaggaaaaggaggcggtcccaagtcttagggacgacttaagaggggctggcggagggagtaaaacctcatcttccaggggccagagaaggctccgggggctttccattaaaaaatagaaaaataaaaaaattaaaatataaaaaaaccccagctctagcaggacactaaagctaagggctaagggcataggctcgggaagctccagcttcccaattctgtcttcccaggcggggcaacccggggcacttgattaaggcgtccaaggcctcaggttaatcccgtatgattgggtaatgacacaagtatggacctctgggacccttggtgattc

SEQ ID NO: 701356 - DNA, 409 bp, Homo sapiens
  misc_feature (229)..(229): n is a, c, g, or t
  misc_feature (365)..(365): n is a, c, g, or t
attttactgaaaataataaatgcttaaatcaaatgtttttgtcagaaaaatagaactttaacactttttggttcatgtgactatagtaatctttgggaaataaagacagttttaaagattattgataaaataaaaatgtgaaaatttagacatctggtctaaattaagcaggtcagatactgtgttcactaaactacttaaactgcttttttgacttttgatagttgtncgacttacctgctttggagccatttggttctaggtaaggcctggagaaatgtggagttagctatgcaccctggctatactgggaaatagttagaccttacctgtacttctgtctggcatcctggactccacatctnggtacatatttaaatcaccctcttaccagggttttcatcaaaat

SEQ ID NO: 701357 - DNA, 138 bp, Homo sapiens
gccccaattttttttggggaattaaaaaaagcaaacttttttcgggttttggttccaataaaaaaaatttaaaaaaaaggctgaaaaggtttgtttttgaatgttttttttaaaaaaaggggccccttttggccccca

SEQ ID NO: 701358 - DNA, 939 bp, Homo sapiens
  misc_feature (32)..(32): n is a, c, g, or t
  misc_feature (131)..(131): n is a, c, g, or t
  misc_feature (157)..(157): n is a, c, g, or t
  misc_feature (200)..(200): n is a, c, g, or t
  misc_feature (202)..(203): n is a, c, g, or t
  misc_feature (206)..(206): n is a, c, g, or t
  misc_feature (213)..(213): n is a, c, g, or t
  misc_feature (222)..(222): n is a, c, g, or t
  misc_feature (237)..(237): n is a, c, g, or t
  misc_feature (267)..(267): n is a, c, g, or t
  misc_feature (271)..(271): n is a, c, g, or t
  misc_feature (330)..(331): n is a, c, g, or t
  misc_feature (337)..(337): n is a, c, g, or t
  misc_feature (341)..(341): n is a, c, g, or t
  misc_feature (345)..(346): n is a, c, g, or t
  misc_feature (351)..(352): n is a, c, g, or t
  misc_feature (366)..(366): n is a, c, g, or t
  misc_feature (370)..(370): n is a, c, g, or t
  misc_feature (372)..(372): n is a, c, g, or t
  misc_feature (380)..(380): n is a, c, g, or t
  misc_feature (400)..(400): n is a, c, g, or t
  misc_feature (404)..(404): n is a, c, g, or t
  misc_feature (518)..(518): n is a, c, g, or t
  misc_feature (540)..(540): n is a, c, g, or t
  misc_feature (764)..(764): n is a, c, g, or t
  misc_feature (775)..(775): n is a, c, g, or t
  misc_feature (909)..(909): n is a, c, g, or t
tataatattataagcaccaaatttataatatntaagtcaatttattaggggaaagaaacaccatcaagatacttccctccagcaaaacaacgatagttcactcctccaaatatccaaattgaagatctacnaaaacaaaaacaaaaacaaaagcccncagagaaataaaaaggaacaaaaatcacattctaatggggggngnnagngcatttnggggtcttngctgtgctgtctaancatccttcagctgactttcaaaaaaaaaanaccntaagctcatcaaaatatacattttccatttgcttttttaaattaaaaataattattaannaaaggnaaantttnnggggnngggagtgggttggntggntnatttatgntgttatgtacgggatatggnaggngagggggggtatttgcggaacatgtgattggggggtactgatcttcagggtttagctttcttccaaacagtgtaaaatacccacaattccaagtatgaaggggcacagacgatntcctttgaaaattccacagganaatacaggcgccccagctgttcttcatagagcggcagtgcttctgtcagattgacacagttcccctgtgtaaaatatttcccatcctgtttcaacactttcattgagaggtcaagaatcagtctgagaaactcccatgtggaatcttcttctggagacgtggagattggaacagctgtcaaatcattaatcacataatcaaattctctcccttctttggcgtanctcttcagtancgggatacagtcttctattagaacctgatagcagtctccttttaagattgtctaagacatcgccacacgtttttcgcatgtatttcttacacccatcaatcaccatttggtcaatctctaccatagtgaccatntttggttttagtttgactatttcacacaat

SEQ ID NO: 701359 - DNA, 315 bp, Homo sapiens
ggtttcaggcgcggtgctgcggcttggccgggcggagctatgccgctgctggatatttcggcgctggagtgcctatggcgccgttaagcgattggccgtggcgacactgggcgcgccttcagccgcaggcgacggcgttgctgctcggcgaacagccgctgagctggctggcgttgcaaggccaggtggatgagctggcggcggattttcagcaccagggcgtggagccgggctgcggcgtggcgctgtgcggtaaaaacagctacccgctgctgttggcctatctggcgctgctgcaatgcggcgtgcgcctgt

SEQ ID NO: 701360 - DNA, 714 bp, Homo sapiens
tgacaactttatcatattgtgctgatcgaagaatagttgagtgattggaccaatgatggatggggcctgaagaaagctgctgatggggctgctgagccaggcgttgtggggctgatgatcgaggcagctgaagagcgcccgtggtgtgggtagtctagtattctaactgtagcccttcctgtgtatcctggtttatcctcgttctgctgttctggagaataaacagaccagtggtatggagtataagagaactgatgcacctcaaccggatgtgaaggaagaggaacaaagagacaggaagaggaacaaggacacagggagcatgaggcggaggacggagcaagagacacttgaagagcaaacagaaaagtgatgctgaacgaagatggtggcactgtctagtcaagatgcgaggaaggtcatgaaaacctaaagcgagaggtaggatgcaaattttgaaccagatcagcaatgaaagcagacaagccaggaacgagagtgaaacaatcttaagagcttgatctgtgatttcttctccctcctcccctgcaatgagtggtcctagtgcagaggacctggaacgacttaggtcagacattcagaaaaacttcaagaccataacatcagcaggctccagttgaacagctagtctgtgtaactttaaaacatctaggcagtaaatagttgcaagaatgtggataataaaatggaccc

SEQ ID NO: 701361 - DNA, 1231 bp, Homo sapiens
tccgcccacgcgtccgcaagagactggtgcgaacaggctgtcctggagtggcagaccaggttgccttgccgcagagaaaacaccaaagtctcctgtacgcatcataaagaagtctcttgggactggcgagagaatccagaccatcttggggcagccaggcccttgccttcactttttacacgaggctagcacaacgtgacttccatactacgaaaagccaccattacccacttcttctacacactgatcttcgtgcttcctaactggccatagactcaaagggcctcagaaaaccattcgctgtgctactccatcgtattgaaagcaactgaccaacgcaaccttcacctttccaccggctgggctctccaccgatcacatcactcaccttaactctgcctgctggaaacccctcctctctcgggaggaccgttaacacgcgccgctctccctctaccttcgctctcctccccacacgcacctgctcctgcactgctgctggtcaccggtacgcactctcccttcggaaccagctggcatggtaaactaccagcaccgggccaccctgccaactaagccctacttctacaacgcacccctcactgctgcctctgccctcgccgcactgctccccttacgctttcctcttcccctaccccctacaccgtgcccctcaccttcccactccctcctccctgctacaccgcttgcccccccccgctcctgccccccccctgcctctcccctcgaacggccaccgctccccccacactcacgcccacccccacccccaccaacacacccgcgccccggcccccgccccccccccccccccacccccccccccgcagcgaccccacccacacaacacccccccgaaacgccgaaccaccactccccccaccccccacaccgacccaccacacacaccgcccccccacacacgaccccacacacaccacgcccgctcctgcccccccctccccaccactcccccgccgctgacacaacccgaccaccccccccccccctaccactcccgccctcctacttccgccggacaaacacacacttccccccccccctccccaccctccccccccaccccccaccccccctccccccccccagttcccccaccccccccaccccccacccacccccccccccacatcctacacccactccctatcacaccaccacccacccctctccctcccctcccccaccc

SEQ ID NO: 701362 - DNA, 163 bp, Homo sapiens
tctttcaagagagaatcatggattgagcagataaacatgtatataaacggcgttaagtatacaaattaaaggccaggggccaggcgcacgggctcacacctgtaatcctagcactttgggaggccaaggtgggcgattggcctgagcccacaagttctcgacc

SEQ ID NO: 701363 - DNA, 117 bp, Homo sapiens
  misc_feature (25)..(25): n is a, c, g, or t
  misc_feature (27)..(27): n is a, c, g, or t
gacagcgagttcacagtgcagagcncnaccggccactgcgtccacatgagagggctgccctacaaagcaacggagaacgacatttacaacttcttctctccactcaaccctgtgaga

SEQ ID NO: 701364 - DNA, 861 bp, Homo sapiens
  misc_feature (172)..(172): n is a, c, g, or t
  misc_feature (221)..(221): n is a, c, g, or t
  misc_feature (232)..(232): n is a, c, g, or t
  misc_feature (244)..(244): n is a, c, g, or t
  misc_feature (273)..(273): n is a, c, g, or t
  misc_feature (281)..(281): n is a, c, g, or t
  misc_feature (296)..(296): n is a, c, g, or t
  misc_feature (323)..(323): n is a, c, g, or t
  misc_feature (326)..(326): n is a, c, g, or t
  misc_feature (331)..(331): n is a, c, g, or t
  misc_feature (333)..(333): n is a, c, g, or t
  misc_feature (336)..(336): n is a, c, g, or t
  misc_feature (351)..(351): n is a, c, g, or t
  misc_feature (353)..(353): n is a, c, g, or t
  misc_feature (355)..(355): n is a, c, g, or t
  misc_feature (364)..(364): n is a, c, g, or t
  misc_feature (375)..(376): n is a, c, g, or t
  misc_feature (407)..(407): n is a, c, g, or t
  misc_feature (415)..(415): n is a, c, g, or t
  misc_feature (417)..(417): n is a, c, g, or t
  misc_feature (420)..(421): n is a, c, g, or t
  misc_feature (445)..(446): n is a, c, g, or t
  misc_feature (452)..(452): n is a, c, g, or t
  misc_feature (456)..(456): n is a, c, g, or t
  misc_feature (459)..(459): n is a, c, g, or t
  misc_feature (482)..(482): n is a, c, g, or t
  misc_feature (615)..(615): n is a, c, g, or t
gagtgctcgcagtgcgcaggcgtggggctctctccttgtcagtcggcagccgcgtgcgggctggtggctctgtggcagcggcggcggaggactccggcactatgagcggcttcagcaccgaggagcgcgccgcgccttctccctggagtaccgagtcttcctcaaaaatganaaaggacaatatatatctccatttcatgatattccaatttatgcagatnaggatgtgttncacatggtagtngaagtaccacgctggtctaatgcaaaaantggagatngctacaaaggacccnttaaaccctattaaacaagatgtgacnacnggaananctncgctatgtgcgaatngntncccgtatanggatatatcgnnaactatggtgccatccctcagacttgggaanacccaggncncanntgataaacatactgctgttgtggnngacaantganccncattgatgtgtgtgacactcgangcaggtatgtgcaaggaggtgacatactgggcgtgaaacgttctaggcattatggggctatgattgacgaaggggaaaaccgactggaaaggtcatttgcccattaagtgtggatgatcctgatgcagacaanttattatgattttcatggtgtcaaccggttgaaacctggtacttagaagccactgtggcgggttagaagggttaggtccggtggaaaccgaaaagggttggttctgcggcataaacagggtgggctgtttttaaaggccgcctgggagccttggcccaccacgggaggacaggcggtaaattgtggccccgtttgtctgccccggtgttccccgttgccacacggggcgccacacatgccgtcact

SEQ ID NO: 701365 - DNA, 261 bp, Homo sapiens
  misc_feature (249)..(249): n is a, c, g, or t
cgacaccagcgtgatgtcgcccttcttcatgccttgcgcctgcagcaggtcgtcaatcacgtaggcctggccgtcgaacgaggcccagacgcccttgaactgcccctggttgcgcaggaacagcgcctgcatgccgttgcgcacgtcgtcgcgccagctttgcgtgcgcgccatgctgaacttggccaggtccttgacggcggtgttttccgacagcaccgcgtcgagcatcttgccgcggatgcgggngccggagttgcc

SEQ ID NO: 701366 - DNA, 189 bp, Homo sapiens
ttttttaagtacaatttcattttatttttctccagagaatagcctgtcttcagtctttaagaactcgagctccttcatgggtggggggacgtggggcagcacccgcagtcttaaatcgggtggggtgtcgcttcggcttcacgagatcgatcctgactacttggctgtgaattgcacaactcacacagt

SEQ ID NO: 701367 - DNA, 744 bp, Homo sapiens
  misc_feature (288)..(288): n is a, c, g, or t
tggctgcgggttgctgctgggacctggcggtcctgcaggtgtgccggtctctacctggtggcctgtgctgcggtgcgcagccgcgccctgtggcctggggctcgtgtcaccctgcgcagctgcgctgtcttcccatgtgctgcccctgtgcttctggtgcctgtgccctgagtgtggggctgcctgacatgcatgctgtgtgtgtctggtggcctgatgtgcctgatgcttccatgtgccaaaccccatttactacagaacctgcttacctgcgtgacaagaatccangcattgcattgctgccaggtgtcaagtgaacccaatgcataggcattatatggagagtcacctgctctttgtagatggaaaaactggcagggttggaaagtatatccggggagaatgcattgcacaagagtagtggtgcgcaatatccccaaggtggccaacaggggtttggagctcttttatacttcccaaagcaatttcgctgtgttggcgaagaccgagtagcacagtgaacccacggcaattgcaccatattgaggcgcgacacacaacccaagggattcgtttggatagaaaaacccacggaagggggacttttccaaccttaaaaccgcggaccccagataggaacattcattccaagggttttccaaatttccttattataaaacaatttttaggaagcgaagatttggggcttacaacaacacagtgaacacacaaaaacacctgtgg

SEQ ID NO: 701368 - DNA, 333 bp, Homo sapiens
atctgtttataaattgaataagattactataaaatgttaattattctggctgggcggggtggctcatgcctttaatcccagcactttgggaggcagaggcgggcggatcacctgaggtcgtgagtttgagaccagcctggccaacaaggagaaaccccgtctttactaaaaatacaaaaaaattagccgggtgtggtggtgcatgcctgtaatcccacctactcgggaggctgaggcatgagaatcacttgaacctgggaggcagaggctgcagtcagccaagatcgtgccattgcactccagcctgggcaacaagagtgaaactctgtctca

SEQ ID NO: 701369 - DNA, 1127 bp, Homo sapiens
  misc_feature (179)..(179): n is a, c, g, or t
  misc_feature (356)..(356): n is a, c, g, or t
  misc_feature (1127)..(1127): n is a, c, g, or t
agcggatgcggtcttaatctcgtgttgaaggctggaccgtgtgcatcaattccttgcatacaggtgtatactattgtcctcgtatcatgtggagtctactacgttggctctatagtagtgccctcgacatagatcacgcacagggaaggctgctgcgttcgaatctgctcactagcttngcaacgcgcagaaaatctatcaggacatggaccgcacggtatacaagatctaactggccatgctgacagcgaactggtgtggcttccttggatggggatgcacgcccagttccgggacaggtcgtccagaggcaactcgtgcttattctagcacaggagcgtgcactgaacgaagancatctatgaggtacgaaaaaagacgggaatgaggcaagcagaaactagttgggatctccccaaaggaacggcgtctgagaatgcaatacgcatgatttgaattagacgagccacagccattggaggcgaccaaggaaggatcttcctcgtgaggggacctttccacttgcaatgggcacgcgtgcaatttattgggccaagcgatagttccagattgagacttgggtggctccctctggattcgggagattccttgtccctagcgagtcgctattaagtgcccatactgagtgagaatcgccgtggtggacatagccatctagcggcgaatagattctcgctgcggggtgagaacaaatcgtttacgcttctccagcctgaatcaatttctttgatccctgcctatgtgcctatggtccaatttaggcaagtcctagtggtccgatacgccgcaggtcccaagtcgatctcttggagatagcgatggatgaggagagtttgctatgtacggggaaccttgaggtaggatttccgaaagacacacaccccttcggttggtaacacgtgagagaggccctttcacagttgtaaaaaccccaaacaagggcgacttaggatctgcgttaggaagaacgatcggaatttggttttaggaaagggtaaccttggttgggtttaaccgttaggagtattggagttctaacctcaaattttagggggaaaatatcgttgggctcaggagggtattttagagatgttacttcgtgggtn

SEQ ID NO: 701370 - DNA, 892 bp, Homo sapiens
  misc_feature (25)..(25): n is a, c, g, or t
  misc_feature (74)..(76): n is a, c, g, or t
  misc_feature (83)..(84): n is a, c, g, or t
  misc_feature (104)..(104): n is a, c, g, or t
  misc_feature (110)..(110): n is a, c, g, or t
  misc_feature (112)..(113): n is a, c, g, or t
  misc_feature (115)..(115): n is a, c, g, or t
  misc_feature (117)..(117): n is a, c, g, or t
  misc_feature (131)..(131): n is a, c, g, or t
  misc_feature (137)..(137): n is a, c, g, or t
  misc_feature (154)..(154): n is a, c, g, or t
  misc_feature (187)..(187): n is a, c, g, or t
  misc_feature (189)..(189): n is a, c, g, or t
  misc_feature (196)..(196): n is a, c, g, or t
  misc_feature (213)..(213): n is a, c, g, or t
  misc_feature (216)..(216): n is a, c, g, or t
  misc_feature (229)..(229): n is a, c, g, or t
  misc_feature (231)..(231): n is a, c, g, or t
  misc_feature (245)..(245): n is a, c, g, or t
  misc_feature (254)..(254): n is a, c, g, or t
  misc_feature (268)..(268): n is a, c, g, or t
  misc_feature (282)..(282): n is a, c, g, or t
  misc_feature (320)..(320): n is a, c, g, or t
  misc_feature (338)..(338): n is a, c, g, or t
  misc_feature (345)..(345): n is a, c, g, or t
  misc_feature (347)..(347): n is a, c, g, or t
  misc_feature (349)..(349): n is a, c, g, or t
  misc_feature (365)..(365): n is a, c, g, or t
  misc_feature (409)..(409): n is a, c, g, or t
  misc_feature (430)..(430): n is a, c, g, or t
  misc_feature (456)..(456): n is a, c, g, or t
  misc_feature (463)..(463): n is a, c, g, or t
  misc_feature (475)..(476): n is a, c, g, or t
  misc_feature (534)..(534): n is a, c, g, or t
  misc_feature (538)..(538): n is a, c, g, or t
  misc_feature (541)..(541): n is a, c, g, or t
  misc_feature (594)..(594): n is a, c, g, or t
  misc_feature (597)..(597): n is a, c, g, or t
  misc_feature (601)..(601): n is a, c, g, or t
  misc_feature (612)..(612): n is a, c, g, or t
  misc_feature (776)..(776): n is a, c, g, or t
  misc_feature (789)..(789): n is a, c, g, or t
  misc_feature (805)..(805): n is a, c, g, or t
  misc_feature (811)..(811): n is a, c, g, or t
  misc_feature (831)..(831): n is a, c, g, or t
  misc_feature (875)..(875): n is a, c, g, or t
tatgataatacagagaagagattangtggcagttgcccagaatctttgtggattacagatgcaaagtagttagnnntccttgnncccacacttcagttacagangggggngnnancngcataaatacaganaacatntgacactagacatttcncacctttctgcatttccattttaaatgtatgtntnttacaantttacatattaagttantantccacatattttntnacaatggctaaggntgcaatgtncccatccccctganataaacagactctngtctgcaacacagaacatttcagtgggataccaaacangcccttaacacgtaacanacaaaangntntttaaaaatcagattnttacaatgttcttcatgttatataagggagaagaaagggaagtnaaaaaaaaaaaaagagagacnttgggggggtttaaatgtatagtatnttggggncataaatgtttnnttcccttcctccaaaggggaaaaaaatgtttaactaatggaaaaagaaagcaacatcntaangcnctacaatgaggaagaccccatcctgacagtgcttagttgcttccttttattanatncggnaggtagcagancaaagtcacaaatattggcttggtttttatttctatgcttataaaaaaaatatgaagcttctttgtgtggactgaaggggtgttagcctgtggatgttggtcttcggtgcctgtaccccagtggctgtttacattccaggcccctgctaaataaagcaggctcnactgccagctgtntgtacactttttcttnggggangagttcttgtcttcagtttnctgcagtagggttcctggctctgttacatgctctgtgttccggnagaacatatgaaatatc

SEQ ID NO: 701371 - DNA, 597 bp, Homo sapiens
tggtggtgcacgcctatagttccagctacttgggaggctgagtcgagaggatccttccagcccaggagttcaagactgcagtgagctatgattgtgccaccgcactccagcctgggccacagagggagagatccagtttgtttttcttaataaaaggacacataataacagaccacaaagaatcatcagagacaatcatgaacaactatatggcaacaagttggaaaacccagaagaaatggataaactcttggagacataccacagattgaagccataataaaatgtctaccattgaagaaaagcccaggaccttatgggagagatccagtttgtttttcttaataaaaggacacataataacagaccacaaagaatcatcagagacaatcatgaacaactatatggcaacaagttggaaaacccagaagaaatggataaactcttggagacataccacagattgaagccataataaaatgtctaccattgaagaaaagcccaggaccttatggcttcactgctgaatcaaacatttaaagaagaactagtaccaattctactgaaactcttcacaaaaattgaagaggagggcca

SEQ ID NO: 701372 - DNA, 925 bp, Homo sapiens
  misc_feature (337)..(337): n is a, c, g, or t
gggtgtgtagcactccgccgagtcaagcaatctgtggcccacataaaatggtccggaaaacaatatttggtggacgcccgtggccaaagtgtttcggcgcgtgcccccgaacttttattaagcagcgcggttaataagtagcgggcccacttgccgccgcattcccagcacaccgcggttggggagcccttttttcaagcccgcggttttaaacaaagaccacctcccacgcggaagctccaaatccacccattgatgttgggtctatttcagaccgctgtccaagtagtaggaaaagattggggcgcaacctacccacaggaaagatggcctggtncacacaagagaggaggaaccccccggatagtgtgtgggcccccaaggcacccagttgtgtacaacccacgcacggggagcaccggtgtgagcctactaccacacgggtttatgataaaattgaggtcatgtcccacaattttatcagaaaaatagtatgtagaactaataggcttcttaggtcaacccttatttatatccctttgagtttctatgggacaaccccccgctctattcttgctctggtcaccccaagaagccctatggtatgaacccagggtgacccacgggtgtgacatgatgtagcagcactttaggaggacatccaagcccgacgcaaggggattatcgtcaggggcacatacaagcctgtagaagaatcctaagaaccaaacttacaaggggagatgttttctcttctgttaccaaaacagttgtgggtgtaataatactgctgccactcgtctttctaccaaagggatgatacttatgacatggagtattttctttgacaaacaaagaagttgtggacgcccccttctgtgttcccccaacaaaaaagacgaggttttatcccgcccacaaaaca

SEQ ID NO: 701373 - DNA, 1188 bp, Homo sapiens
ctggaaattgctctgggggataagcaagcgcgccctaagagaactggtctctgttccccaaatttccggggcggaacaagctcctcccgtgataaagtccaacgggtctcttggcccaagatctgtggaatttccgcctctctggggcaaccttgggcccaattccggcctggttgaagctaattagatccgtgaatatgccgttgaccgggtgatcggggcgaggaaattcggaaaggtgtctcaacgctgccgtccggtgaataatatcggtgcagaaaggcagagggaaactctacggactgaaaggccaatttgtaacgagagacgcgcctctaatgtctgtaattgcttacaaaggggccaccagaaagcagcgcaaggtcactccgtatacgaaataagcccaacgtcacagccatgtctatgtggaaacgaattacatgtgcgtgggggagacaacgtcgtgagacagttaggcacatttaactaaaaggagtatggctttatgaaagaaatgcaagcctgctgtgtccctaggctaagattgagtcgacttgtctcctggagcaagctagaccatgggggaaacgacacgctagcgcccttcgcgtgcgtcgaagcccgtatgctggacgtcaaggcaacgggcatgccctcagcgaatagtacctcagcttcgggctgcgagacggcaagcactcgggatagtcggtcatgccatgcgtccagttggggcccgcgacatacagtgtcaagactaggacgtcattacaaagtacagatgagttgtgaggacatgcatgaaaagaactcagttcctaactgtgggtctccaagtatgttgtgacgctgaagatagtcgtgctctatgtcaatctattgtctctcacgttgactaaagtagaaaattatctactagcatggaccaggggcgactggtggcttcacacgctgctaaatcgccacgcaactgttgaggaaggccaagtgctagggatggatcatgaaggtcaggagttacaatgaccagcgctagccaagatggtgaaaccccgtctctagtaaagataacaaaaaacttagtctgggcttgatcgcatgcagccttgtaatcccagctaactcgggaggattgaggcaggagaatcgcttaaacccagtaggacagagggtgcagtgagccaa

SEQ ID NO: 701374 - DNA, 1381 bp, Homo sapiens
  misc_feature (566)..(566): n is a, c, g, or t
gacgctggtgtgagaacaccgagactcagtcatgactgatagctcaatgcgcatgatgcaaagtagttgggaaaagtagcgtgccggggacggctttgcggtgactccagtttgcgtagagaagaactggttgggattacacaatgctcttgaggttagttgtgctcccactgtagagagaggacgataactgcgagagactagctggcagtgtctaaggatccatctcctctcgtcggtaggtgcttctgtgatgtgtcctgaggttgccactcggatccaggactgatcacagagggtcccggccgatgaagattttggccctcatctgtggccttcgtggtgcggcgtcgagatctcctcattacacggtacactagaaaagagtggtcgaggtacatctgcgccgaggacgatcatgaatgctgtactagtggagtcgtcaagagatctctgcatgacgtctgattctcaagcagatcctgcaaggtcctccgatcctaaatataaatgcgctagaggcatgagttcttctcgctatccccgtagttgactttctatcaaangaggaaaccacttttgagataggtcagaagtatgagaagtgaagcgtgaaatcttgacacctatatatcaaacttctgccctatttgggaaaggaacctgtgttcgtttaactaggttctagtggctttgttatgacttattgagttcactcgttgaatctgaattgcacgcgagaaccggagttagtttgccgggggatagatcttaaggctaatttctaatgccataggtggtttggctacaattacccattttcttgtggcggtgtggtgccatttccgtcctttcaaagggaataggtctatcgtcgggtcgatgatagactggttcccccgagcgtcccttctcatttttacatcataatcggtatgcaacgctaagtgggggcaaaagaaccccccttacgcgcgcactttagttacttcccagggagcgacgctgttgtggtggggcgtgaccttgtcccgtatgtttagcaccacgatttccgagatccaccccttggagtttccttcaaaaattaacccttccggccactttcatttggccacgaaattggcttaaggccggcgagtgtgcacattggttcgccgtttgtgcgcccttatgagaatttaccgttataaacacgggtttgagttcaacacggtggtgtgcccaacaatggggatccttaacccgaaggcatttgttcgtaggcaagcgcccttttaaggcgtaaacgcacattgcggaaccaccccttgtagtgacgtgaggaaacccatcaaagggggtatttagctttgcgcaagtttagtcccctgatacaagg

SEQ ID NO: 701375 - DNA, 558 bp, Homo sapiens
gactgtgctgtgtacacatacaatgaaattactcaacttcgctgtctcagtcttcctcatatacgaatagggggatagtgagaatatctacattatatgttgatgagactaaaataaaaggcattcacagcagggcctgccacagtaagcacacaataaatatcagcttctgtagtgtgaggtagtgtaactgtcacggcttagaagaacaggtctaattctatagatttattttacattcataagaagtgctaggatatgtagcagatgcaaccaaaccccaatctagagatacggtcagggactgtcctctcagggaatgggcattccctcaagcagtgtcacttccctcaatcggtctgtcttcagttgtgcaccggaaactatactccagaaaggtatctctcaggcctgtcaccacatttaaatgtcaatttcagttgcaggggaactcacatctatacatccagactatcagatgacagatataggcttggaaaacttaggctttggaatcctaacatgatcagctcagtcctgacctcacgccatgcgggt

SEQ ID NO: 701376 - DNA, 240 bp, Homo sapiens
ttattgaatcctgtatattgccaccactctgtgatagttccacaatgatagtggtcgtgtctctatggtcgctcgctccagtgcattctgcgccgcttccagctccagccgatcgtgagacacggtcttcactagaatggtgatcaggtccatggtcggatgtggcggtgtgtgtgactcctcctaagacgacggcccggcctttcgggctgcgtctcgaactggggatggtggttgggg

SEQ ID NO: 701377 - DNA, 172 bp, Homo sapiens
ggtgactctatagatctcgggtgcgtgttcacttatggttgttccttgcacaatctgggacatcagtgaataaccctcccatatggtccaatacagctccatattgatggcgatcatagtgtaagtcagctacaaccgttattacgtgtcgtgacttgcaaaatcctgtggt

SEQ ID NO: 701378 - DNA, 119 bp, Homo sapiens
aggggagcggagacgggggctcctgcctcccttcctggaaaggaacctggggttggaaaaggggtacccctctcagggaagacatgaaaagcagttcctgccaacacatttccatatgg

SEQ ID NO: 701379 - DNA, 892 bp, Homo sapiens
atagggaaccaaagcaaaagacaatgtagaaattttggctccgattacatgcgttccgtaatatttatccgtttaccacttctcgttgatgtggtcctgttttaagctgtggcctaaagaacctcttccccggggaaatatcgtggtgttgccactctgtgcatgtttttccccccgcccgcaaattttttgggcaggacagtaacacggttctgttaaggtacttctccgtccaagtgagtcataatcgttctgtcccccagggcttgttaccgtgttgtgtagcacagggggttcttccacccgccgggaaaggttagagagtgctatatccccccacttggcgacgggggatcccatttttcttattataggccccgtggccatccccccttattctgggccgcgctggcagcaattgtgaacagacaagtctgcgtggtaacccgtgcggattatttccaaagagtcgtggcacctatagctagtgagttctttcctaggccctgaaatataaatggaacacacatccggttggcaccaaacctagaaatttgtatatgcacaggcctggaaatcaggaaccaaatgaccactttatttgtttactgacagaaaaacatattccaccgtgttgtcactgatctataatggagtcaacgcctctgctagacaaactcaccatgctgaaaaccagacactcattgtgtgtgttcaagccatctcattctggcagacagctactcggtaattcgttcccacgtttgaacagataaatcactgttcctctactggtagagtgggacaaaattaagttcgatcaccttggcagggactgattgggccaccgacgtgacttcccaaaaacaggaaaaatttttcaacaaaaaca

SEQ ID NO: 701380 - DNA, 211 bp, Homo sapiens
acgaagggcgactccgggcggatgctattgctgcttttccagtggcacatggacagtcatgactgagactataccacacagccagctggaggccggcgtccctgcgcttggaagtgggttccctggccaccggggttgacctctctcgctagcagggcccacccagctcactccccgcgtcttccatcccctctaggagtccccttgtcgt

SEQ ID NO: 701381 - DNA, 135 bp, Homo sapiens
gacattctacgctgcactgtctgaacactgggcaggctgaggtgagaggaccttgacgccaggagtccacggctgtagtgagccatgatggcaccactgcaccccagcctgggtgacagagcaagaccgcaactc

SEQ ID NO: 701382 - DNA, 394 bp, Homo sapiens
  misc_feature (30)..(30): n is a, c, g, or t
  misc_feature (82)..(82): n is a, c, g, or t
gtgcagaaaaactagaatctgaagaagatngtgtccaggctttcccttgaggctgttgctcagtgaaaagcctcatgtaaanacctatttctctaagaccattcgcgatttagaagttgtggagggaagtgctgctagatttgactgcaagattgaaggatacccagaacccgaggttgtctggttcaaaagatgaccagtcaatcagggagtcccgccacttccagatagactacgatgaggacgggaactgctctttaattattagtgatgtttgcggggatgacgatgccaagtacaactgcaaggctgtcaacaagtcttggagaagccacctgcacagcagagctcattgtggaaacgatggaggaagggcgaagggggaggacgaaga

SEQ ID NO: 701383 - DNA, 741 bp, Homo sapiens
taagtgaaagataaagcccttaaggatcaatgattgaaaacggctgtggtgtctcagcgcctgacagtaattctccgtgtgctttggtggccagccagtacggatggtctggcaaccatgtgagcagtatatcatgaaagcacaagcgtaccaaacgggcaaggcacatctctacaacattactatgcgacgtcagccaagcaacaccatttgcaaaattaaatcccagacacccgctgcatcagagcacatgtcttcgacgaattaacggaagatgacgatgataaaacagtataggatcttgctgaggtaaaagtttgaaacagcaacgcttcggtccagggtatctattaccagacactaaagcatatggcgatagaatagacacagacatgcttcgcctcagtctgaacattgaccctgatgcaaaggtggaagaatgagcccgaagacgaccctgacagagccagcagaagacacaacagacagacacagagcaagcacgaagatgacgaccctgggatgttggggaaacaggacatgaacgaaagcacggaagacacaggaaaaacgagaaatcttagccagctggaacacacacgacttgcaacttgctcaaacttcactacctcatcacccattcagggcatcctagttgtcgcaacgacgccaattggtagacattttcaccattcatttaaataaagggccaacacatagtatcaggatgccgccaaaatc

SEQ ID NO: 701384 - DNA, 353 bp, Homo sapiens
gaaggatcacttgagccccagagattgaggttgcaggctgggcatggtggctcacgcctgtaatctcagcactttgggaggccaaggtgggcggatcacctgaggtcaggagttcgagaccagcttgggcaacatagcgagaccttacctccacaaaaaattaaaaaaattacccaggcatggtggtgcttgcctgtagtcccagctactcaggaggctgagttgggaggatcgcttgaacccaggagtccaaggctgcagtaaactatgatcacaccactgcactccagcctgggggacagtatgagacccggtctcaagaaaagaaaagaaagaaagaaattcaccattac

SEQ ID NO: 701385 - DNA, 122 bp, Homo sapiens
atacggacgatttctatcaaggaacttaattcgttcatataactgtaagattaccaggcatcttgcaggtcagcatagagatggtcactgcggatgccaccatatcggtcccgtatttcaca

SEQ ID NO: 701386 - DNA, 103 bp, Homo sapiens
tacgaatcgagctcggtccttaccagatgcactcctgctcccctaaaagagcacacacacacacacacacacacacacacacacacacacacacacggaacat

SEQ ID NO: 701387 - DNA, 153 bp, Homo sapiens
cttatgtactttctacgttagtgaaattgagattcggagctgctggagtgactggcccaaagtcacccagctagaagatagtagaaatggcttttgaactaggtctctctgactccaaaattatgccaataatcagctataatctgcctacca

SEQ ID NO: 701388 - DNA, 918 bp, Homo sapiens
ggtatgtgactgcccctctggcttcagtggactgaactaaggagtgcaatcttttattccaaataggccattcagtgtcccttctctcactgagatcggaaacaacggatggagagatctctctgagcgtagactctctcgagggggcggaaatgttccaactcatgtggaccagtgtgcattaccatctgccttaggaacggagctagtctctgtctctcaagtaagacacgaatgggggcacaccacaggagcaagaaacacaagcaagacagtaaaactaaaaaagctgagtgaagacgagttctggctaatgcagcctgaagaagtgttgatgtattagagaagcttggagaagggtctgaatggacacgtgtacttaagaggcatagtacagcaaggaatccggtcaagtttgtcgcaattaaacaagtaccctgttgaatcagatcttcagcgaaatacatcaggagaaactttccgtaatgcagcaagtgtgacatgccccaatactgtggtaaagtactatggccagtcatcttaaagaaatacagacctctggatgtatggacgtagctgtagtcgctggtctgtctctgacactaagttagctgacgaaaccaagacattatcagaagatgacattgcaccattcttaaatcttcgtttgaatggactagaatattgcctttatgagaaacatacccgagatattaaggtggaatatctctcatacagaggctgcaatggcgatttgagtggcggcgtacagtcatgcaacgcgatgtataggaccttggcggcctaggtccggaaaggttggtgtccaaaggctggtattctaaaggggaccctttaccgcgggttttcacacccacaacacgcgcttatgggacaacacacggtccaaatagtgac

SEQ ID NO: 701389 - DNA, 512 bp, Homo sapiens
tcctcttttgaaaacgaatcttgcatctgtcacccagggctaacagtgtggattgtgagtggcctcagactctcagcctcacataaaattctccaccctccgttgggctcaagttgcaagtgatctttcccaccttcagccctcccaaggaagctgagacagaccacaggccaccagtgtctggcataattttggtatttccagtagagacagggttctcggccagtgttgcccaggctgtctcttgaacctccgtggacttcaagcaatcctccgtgcctcggaccctccttgaagttgctgggatttacccggttgttcagccactgttgcctggcctaaaccagaaattcttttacccatgagatgacttggggacgttttcagtgcaaacgggcctcatttccctttggacacttacaactcttgatttggtgtgtcaggtggcttgtgttaaccctatttaactgggttactggctgtccctcttcacctgttctcttcaccctccc

SEQ ID NO: 701390 - DNA, 282 bp, Homo sapiens
  misc_feature (239)..(239): n is a, c, g, or t
agcaacattggactcgaagaggtggaccacagtggaaaggcccaaaccagcttttggacagcagcatcagcagcaacctaagtcacaagcagaacctccttcaggaaacaaagaaccattagcagacaccagtagtaaccagcagaggaattttaaacatgcaactcagctgcatttttccatgtgctggcagactgtaacaggatgtcacaggcgggctcagtacaaatagagaatcntaagctgactcctcaacagagagcctacctaaaagctgaagtc

SEQ ID NO: 701391 - DNA, 250 bp, Homo sapiens
gtaacaaagaaaagaaggaacaattgtcgtgccaaaaagggccgcggcacgttaagcctatttggtgcactaactgtgccccatgcgtgcccaaggacaaggcattaagaaattcgtaattcgaaacatagtgagggcgcagcagtaagggacatttcttaagcgagcgtcttcgatgctatgtgcttccaagctgtatgtaaagctacattactgtgtgagttgtgcaattaacagcaaagtagtagga

SEQ ID NO: 701392 - DNA, 119 bp, Homo sapiens
gacttcggcacgaggcgtacttcaaagcttcaggcttactcacggcatccagcagagacttgaaagtcaacgttcctgacttgctatgtgtcttgggctcatccatccgacattaaggt

SEQ ID NO: 701393 - DNA, 215 bp, Homo sapiens
cacagacctggtgtgggggtagagggaggctccaaagccaggagacggaacccaaacttaggtagtatcagccagctatattcggtggctggaagccatgtcctcggctgtcattctagcaaataagtctggaggaatattcccgacagatgacatttttgctcattgtaacttcgtggaactagggtctatggagaacttcgtaagaactaggg

SEQ ID NO: 701394 - DNA, 488 bp, Homo sapiens
taacttgccacacaagcgataacaccatgtccacagagacctgaaactggcaccgatgttgtaaccaccaactatagtgtgtgtgaccaacagcgcggaaaagtctggatcccaggctatgatgaggggagtcgacctaagccaaagtgaaccgtattctcggacactgaagcgttgatcagggctgagccttagaatcaaggtgctttgaagcctgcccccccatgcctggatgccaaacgtatgataggacgcagatatggtgatgctgcagaccagcctgatatgacacattctcccgacacaggggagaatgacgctgtgagctcccagggtccagtagaattcagggtcgagacctgcagctggtctccacatgaggtgttgaaaatggttctgacaacgatcatggaaatcgctcaagcctacgtttggaagactgctaccagtagtgtggtcaacacacctgcttactttggtgactatga

SEQ ID NO: 701395 - DNA, 189 bp, Homo sapiens
gcgcgtcctgctcactatgtctataataggagctgtattgccatcataggaggtcattcactgatttcccctattctcaggctacaccctagaccaaacctacgccgatgaatatgatagtgaaatggattttggcgtaaatctaactttgcttcccacaagcactttctcagaccatctctccggcgc

SEQ ID NO: 701396 - DNA, 397 bp, Homo sapiens
  misc_feature (16)..(16): n is a, c, g, or t
  misc_feature (347)..(347): n is a, c, g, or t
  misc_feature (382)..(382): n is a, c, g, or t
  misc_feature (384)..(385): n is a, c, g, or t
cccgtaaggtttaaantgtgttgaaaaacaccccgcccctctgacccaagcatttccaacccccgggcatacaggcaaaagaaatgcatcccacgtgttcatcaaaagatgtaacctgtgcccgggtgaggtggttcatgcctgtaatcccagcacatcgggaggccaaggagggaggattgcttgagcccagaagttcgagagcagcctgggcaacagggcaaaacctcgtctctactaaaaagtagccaggcatgatggtatatgcctgtggtcccagctactcaggaggccaaggcatgcagattgattgaacccggaaggtggaggctgcagtgaattgtganctcgccactgcactccagcctgggtgacagagcantnntttgtctcaatt

SEQ ID NO: 701397 - DNA, 315 bp, Homo sapiens
cagtttctggggcctggcctcatgctgtgctcagctgggttgagcagctggccaggcaagtgcagtgcagtggtgctttgatcatacacagcaaacaggaatgggcggttcagtgatcactccaagcactcaggcttgtacagcatgttgggtagactctgtgggctctctctcatccgctttatgctcaaaaacccctgctgtacagcacctcccccaacctgatgcggtcattgctcaatttttgcaggttcagctcggttgtgcacaatggcgggcagctcagcctgggcgagcaggtcctgccggtcataa

SEQ ID NO: 701398 - DNA, 963 bp, Homo sapiens
cattttcagaggcccatttcattagatcaggaaatggggcttctgtcgagggttttgaaatggttaacttcaaagaagagggctttgccttgatatctcttgctgctctcaaagcagagatatcgatgcaatggcgcttccacgaagaatgtgctaagagactgttgaatctgcgtaaacgattcagatgttgtgcgggcctgtatattctggaagaccgaatcgcttcaagagcagtgggaaacatcgcagctggccctttcgaattcgctcgtgtgagcgagccaggcctaactccttctggcagccctatattcaaaccctccccagtgaatatgacagctcctgctctactttgaaagaagatgaagtgcggtatcttcagtccatcactagagctatacatgatgtcttcagccagatatagaaataacgcagctacgacagcacgcctacttctataaagtcatccagacccatcctcatgccaacaaactaccctggaaggattcttctcacttacgaggactacaggtgggcagtctcttctgtcatgacgaggcaacacaaatacgcacagaggatggcttcccgcgtgaccctggctctgatacctttatgggatatgtgtaaccacagcaaggctgatcactactggttacacctggaagatgaccgctgtgacagtgtggctctgcggactgcgggctggagacgatcgacatatggatgggatcgatcaagccagaatcgcgaccccccggctcgcttgacaatactcagcgacagaggaataagccgcgggctaagcaagcacacccatacgccggctgacgcgcagatccaccagcctgctgattccacccacgcacgctgcaccaacggtacacagacgcggcccccacccgcccacccagacccccccaccacaaaaacgaccccccagagtcgctctagactcac

SEQ ID NO: 701399 - DNA, 257 bp, Homo sapiens
  misc_feature (231)..(231): n is a, c, g, or t
agggtgttgctgagggtgtctagaggatccctacgctggtcgcaagtccaggagagcacattggagcggctatctcaaccaagtcgtttgtctagatgacacaacagtgaagtttgagatctgggacacagctgggcaaggagcgatatcacaggcttagccccccatgtacctacagggagtgcccaaagctgcaaatcgtggtttacgaacattactaagtcaggaaancctttgcgccgagcaagagacactgg

SEQ ID NO: 701400 - DNA, 486 bp, Homo sapiens
atattatattatatatattatttgtatgaataatgaaaataaaacacacctcgtggcacataaaaaaaaaaaaaaaacaaaaaaaaaaaaaaaaaaaaaaaaaaaaaaaaaaaaaaaaaaaaataaaaaaacaaaaaatataaaagaaaaaaaaaaaaatttaacatttctcatcccccctcccctcggaaaaatcaaattttaaataccctaatctaactaccaacaaactttgttaaatttctaatattccctaatcttcacctaattcaaaattaaccacctctttctttaaaaaatttttaatatggaaaatccttcctcaacaaaacaaattcgcctacataaaaattctctttcctcaaatgtcaataatatatattaacaccccaaaaatataaattttaaaaaataccctatctttttatcaaaagaaattttaattccatattacttatcaaaaacacctttaaaatattctcaaaa

SEQ ID NO: 701401 - DNA, 1133 bp, Homo sapiens
  misc_feature (104)..(104): n is a, c, g, or t
  misc_feature (108)..(108): n is a, c, g, or t
  misc_feature (124)..(124): n is a, c, g, or t
  misc_feature (760)..(760): n is a, c, g, or t
  misc_feature (816)..(816): n is a, c, g, or t
  misc_feature (822)..(822): n is a, c, g, or t
  misc_feature (849)..(849): n is a, c, g, or t
  misc_feature (876)..(876): n is a, c, g, or t
  misc_feature (907)..(907): n is a, c, g, or t
  misc_feature (913)..(914): n is a, c, g, or t
  misc_feature (923)..(924): n is a, c, g, or t
  misc_feature (930)..(930): n is a, c, g, or t
  misc_feature (933)..(933): n is a, c, g, or t
  misc_feature (955)..(955): n is a, c, g, or t
  misc_feature (957)..(959): n is a, c, g, or t
  misc_feature (985)..(985): n is a, c, g, or t
  misc_feature (989)..(989): n is a, c, g, or t
agcccctcatacaataaatatatacgtagcattaaccatctcacttctaggaatactagtatatcgttgcacaacacttcagtgatctccctactatgctaganggantaatactatcgctgtncatgtatagctactctcataaccctacaacaccactccctcttagccaatattgtgcctattgccatactagtctttgccgcctgcgagacacggtgggcctagccctactagtctcaatctccaacacatatggcctagactacgtacataacctaaacctactccaatgctaaaactaatcgtcccaacaattatattactaccactgacatgactttccaaaaaacacataatttgaatcaacacaaccacccacagcctaattattagcatcatccctctactattttttaaccaaaatcaacaacaacctatttagctgttccccaaccttttcctccgaccccctaacaacccccctcctaatactaactacctgactcctacccctcacaatcatggcaagccaacgccacttatccagtgaaccaactatcatcgaaaataaactctacctctctataactaatctccctacaaatctccttaattataacattcacagccacagaactaatcatatttaatatcttcttcgaaaccacacttatccccagcacttggctaatcagtcacccgatgaggcaagcagtccagaacgcctgaacgcgaggcagcatacttcctattctanaccctagtaggctcccttcccctagtcatcgcactaatttagcactcacaaatacnctaggnctcacgtaaacgattctagctactcantctcactgcccaagaagctatcaagangtcctgagccaaagaacttagtatgactagnttacannaatagcttnnatagtnaangatacctctttacggactccantnnntgactccctaaagcccatgtcgaagncccnatcgctgggtcaatagtacttgccaagagtactcttgaaactaggcggttatggtataatagcgctcaaacgcattctcaaagcccttgagaaaacatagctaccccttgctgtactaacttatgaagcataatataaaagtcc

SEQ ID NO: 701402 - DNA, 1417 bp, Homo sapiens
  misc_feature (1417)..(1417): n is a, c, g, or t
tgagagtagctttgaggagcctcatgggggagctggggggtgcaagggacctgagctgagaggtactcatcgcttcaatgccccctcccttgctgaaggcaggacggagtgggcgcagaagtcgcctgataccgatctctgtgtcaataaccgcgattcttagtctgatgacaactagtcccggcagatcactcctcccaatacatacctcccattgaccttgtagaatgcatcccgagggaggtgtacgagggagggggctcccaggaagggcactcaggagacggtttacagaagacctccctccagcagggtctccttgctgagcgttccctttgtccactttacttacgtttcttatagggtcaccgtgctcataagtgccagctcgctactaccctaggggcttaccccacgtaggagttgtaccaaggctgtgcttacgaggccagttagactcccttggggcttcccaagggcatgtaggactaggggcgcaaaaccaaccacgaggttcgcttgtcccggaggagggctggaaaggagcaacgtggcaggttacgcaggactctggatatcacttgctgtctgctatggactctactgtaaccccgtttgctccttcaccagctgggtactttcgacagtatggagtttatggtaagctaattgtactgttcacccctatatttctcgctggttctcaatggagcctgcctcaatggtacgcaacaatggtaaaactccacttatgtggtctttctcatgttatatgttactcctcgagttagttccctctcatccatagtcccaacttcctagtacgccttattatacgtcgtgcttatttaaagccatttgcagtatatagagtaattaacttcaacatgggttcccggtttaagggttataccgggtttaacaaaacaaaaaagggggggggcgggcaatacgggagaaggtaccgcccctgcagggaggggtggcccccaacggtatggagggcgcggaaacacccacagatgctgttgtgcaacagaagtggtggggtcccccaaacaagggagagaggccccgatatataaaataaacgcccaagggagctaatgaggcccaggagcggaaatatacaccacggcctgtggaaacctggggaacaaaagtgcagatgggacaaggaggacgcacgtggggagggaaaggcaaccctgttagaaatcagtagagccgtggtgtagcacaatagagtggggggcacacatatcttgcaggaaaatttatcaagcgtctaatgtggaaagcatttaaaggttataaagagaggaaataaggggggagaaaaagggtgaaaagacagggggatagaaaaattgggttacaggggatggttttgggaaagtttatcaagcagagaagn

SEQ ID NO: 701403 - DNA, 741 bp, Homo sapiens
ggctacatggcctcctgtgccgtcctgtgccccgattcccccagttccttctgtgccaccatgagcccactgccactccatgtcgggcatgccgaccttgaatccgccacctgtggcacctctacgtgcgtggcaatgaatggctctggagcacactatgaattcgaaacgataaatctgaatcctatgtgtcttgggtccgttgaaatcctgttaatcgcacgtagtccagatgaacgtctcagagcagtggtgaagccactccccatcaaccctgatgatctgtgatgtcagggtgcatggaatgcccttttgctgcaatggaataatgatgtgcagagattaggtttcatgggctccgcgtggatgcgagtgcgatttgtggaaagatcatgtaggtcgaaataatggagaatggaataggcagccggtctcctcaggcccgaacaacataagacgggaaggcacctgtaacgcaggcacagagtgctagccgggatccacggcgcccactgctggacagcttcggaccccgtgacgccacactgaccaccgaaccacgtcgccgtgaagctaagctccgagcggccaatagtacaagtccagcaaacgccaaacaaaaggggcgagaacgcatctcgggacggaaagctcgctcccccacactgcccatcgacgcacactaaacccacaaggtccaaaagatccggccgccagcggggagcacacacaaaagaatcg

SEQ ID NO: 701404 - DNA, 165 bp, Homo sapiens
aagcccagcgacacaaaagggggtggggcgggtttatggggaaaaagggagcaaggtcaaaggagggcatgggttggcagggtgggcgtttggggccctttatgctggcttttccccccaaaggacacaggcagcttccaaaaaatatttatttttttcccggga

SEQ ID NO: 701405 - DNA, 981 bp, Homo sapiens
  misc_feature (608)..(608): n is a, c, g, or t
  misc_feature (664)..(664): n is a, c, g, or t
  misc_feature (670)..(670): n is a, c, g, or t
  misc_feature (697)..(697): n is a, c, g, or t
  misc_feature (724)..(724): n is a, c, g, or t
  misc_feature (755)..(755): n is a, c, g, or t
  misc_feature (761)..(762): n is a, c, g, or t
  misc_feature (771)..(772): n is a, c, g, or t
  misc_feature (778)..(778): n is a, c, g, or t
  misc_feature (781)..(781): n is a, c, g, or t
  misc_feature (803)..(803): n is a, c, g, or t
  misc_feature (805)..(807): n is a, c, g, or t
  misc_feature (833)..(833): n is a, c, g, or t
  misc_feature (837)..(837): n is a, c, g, or t
atggccggtccactgttgagcagtattgtgctattgcatactagtctttgccgcctgcgagacacggtgggcctagccctactagtctcaatctccaacacatatggcctagactacgtacataacctaaacctactccaatgctaaaactaatcgtcccaacaattatattactaccactgacatgactttccaaaaaacacataatttgaatcaacacaaccacccacagcctaattattagcatcatccctctactattttttaaccaaaatcaacaacaacctatttagctgttccccaaccttttcctccgaccccctaacaacccccctcctaatactaactacctgactcctacccctcacaatcatggcaagccaacgccacttatccagtgaaccaactatcatcgaaaataaactctacctctctataactaatctccctacaaatctccttaattataacattcacagccacagaactaatcatatttaatatcttcttcgaaaccacacttatccccagcacttggctaatcagtcacccgatgaggcaagcagtccagaacgcctgaacgcgaggcagcatacttcctattctanaccctagtaggctcccttcccctagtcatcgcactaatttagcactcacaaatacnctaggnctcacgtaaacgattctagctactcantctcactgcccaagaagctatcaagangtcctgagccaaagaacttagtatgactagnttacannaatagcttnnatagtnaangatacctctttacggactccantnnntgactccctaaagcccatgtcgaagncccnatcgctgggtcaatagtacttgccaagagtactcttgaaactaggcggttatggtataatagcgctcaaacgcattctcaaagcccttgagaaaacatagctaccccttgctgtactaacttatgaagcataatataaaagtcc

SEQ ID NO: 701406 - DNA, 471 bp, Homo sapiens
tctgccggatgaggccggagctgccccgccaaagctgaccgacctgcggctcctctacatacggcttctatgggctactagctccggcctgattagataacctgatccgtcggaggccgatcgcgacggtggtttgcatcgccagcttctatatataacgggctttatttttggctggatataatcttgtaaaaggtgaagactacctgtatgctgtgagggaccgtgaaatgttggcgcatatgaaattacatccagagaattttcctgaggaagataagaaaacatatggtgaaatttttgaaaaattccatccaataacgttgaagtcttcaaaatgcttgctccagtttcactgatacctgcggtttctgaatttgatggaacatgtttcttatgacagttgaagcttatgctacactgtattgttgaccccttgtaattaaaatacgcacgttacgccgaatgcgg

SEQ ID NO: 701407 - DNA, 944 bp, Homo sapiens
  misc_feature (571)..(571): n is a, c, g, or t
  misc_feature (627)..(627): n is a, c, g, or t
  misc_feature (633)..(633): n is a, c, g, or t
  misc_feature (660)..(660): n is a, c, g, or t
  misc_feature (687)..(687): n is a, c, g, or t
  misc_feature (718)..(718): n is a, c, g, or t
  misc_feature (724)..(725): n is a, c, g, or t
  misc_feature (734)..(735): n is a, c, g, or t
  misc_feature (741)..(741): n is a, c, g, or t
  misc_feature (744)..(744): n is a, c, g, or t
  misc_feature (766)..(766): n is a, c, g, or t
  misc_feature (768)..(770): n is a, c, g, or t
  misc_feature (796)..(796): n is a, c, g, or t
  misc_feature (800)..(800): n is a, c, g, or t
cagaaggtgcattttaccttttgacaaggagtagcctagccctactagtctcaatctccaacacatatggcctagactacgtacataacctaaacctactccaatgctaaaactaatcgtcccaacaattatattactaccactgacatgactttccaaaaaacacataatttgaatcaacacaaccacccacagcctaattattagcatcatccctctactattttttaaccaaaatcaacaacaacctatttagctgttccccaaccttttcctccgaccccctaacaacccccctcctaatactaactacctgactcctacccctcacaatcatggcaagccaacgccacttatccagtgaaccaactatcatcgaaaataaactctacctctctataactaatctccctacaaatctccttaattataacattcacagccacagaactaatcatatttaatatcttcttcgaaaccacacttatccccagcacttggctaatcagtcacccgatgaggcaagcagtccagaacgcctgaacgcgaggcagcatacttcctattctanaccctagtaggctcccttcccctagtcatcgcactaatttagcactcacaaatacnctaggnctcacgtaaacgattctagctactcantctcactgcccaagaagctatcaagangtcctgagccaaagaacttagtatgactagnttacannaatagcttnnatagtnaangatacctctttacggactccantnnntgactccctaaagcccatgtcgaagncccnatcgctgggtcaatagtacttgccaagagtactcttgaaactaggcggttatggtataatagcgctcaaacgcattctcaaagcccttgagaaaacatagctaccccttgctgtactaacttatgaagcataatataaaagtcc

SEQ ID NO: 701408 - DNA, 446 bp, Homo sapiens
  misc_feature (104)..(104): n is a, c, g, or t
  misc_feature (108)..(108): n is a, c, g, or t
  misc_feature (124)..(124): n is a, c, g, or t
  misc_feature (412)..(412): n is a, c, g, or t
agcccctcatacaataaatatatacgtagcattaaccatctcacttctaggaatactagtatatcgttgcacaacacttcagtgatctccctactatgctaganggantaatactatcgctgtncatgtatagctactctcataaccctacaacaccactccctcttagccaatattgtgcctattgccatactagtctttgccgcctgcgagacacggtgggcctagccctactagtctcaatctccaacacatatggcctagactacgtacataacctaaacctactccaatgctaaaactaatcgtcccaacaattatattactaccactgacatgactttccaaaaaacacataatttgaatcaacacaaccacccactcctcacacgctgtcagtccaaatataccncccattggctccatgctaatttatgcgacacttc

SEQ ID NO: 701409 - DNA, 317 bp, Homo sapiens
tgatcaatggggggagggcagctgtgcctaatttaggattgatttattctaacctctcttactaaataaatgcttgtattcagagtctgtttggaatttaacccaatgcttagaactccttaaatatacagaaatatattttaggggtaattgattcatggaactctcctactttggagcacaattgtattataattgtccggaaactggccagataatgtaggaacgcacaagttgttgaggaagcccttttgtttcctgatagttacatgtaattccagcagtatttgggaaataatttgctaaggtgttaggat

SEQ ID NO: 701410 - DNA, 266 bp, Homo sapiens
agtgaattgaggtgactagagatatcatgctaccttgtggcagccatgtgggcacatcaccacgtcttagtctgcaggacactgaggcagaaagcaccgtcccattcacaccttggtaactgaactctaacatctcagcctgagaatcctggattttttgcttatttgtttttaaactaacttttcttttcctttcctttcctttccttttcctttcctttcctttcctttccttttcctttccttttccttttccttttcctttt

SEQ ID NO: 701411 - DNA, 650 bp, Homo sapiens
  misc_feature (90)..(90): n is a, c, g, or t
  misc_feature (96)..(96): n is a, c, g, or t
taagttggggtgatgaggaatagtgtaaggagtatgggggtaattatggggggccataaaaatgattaaggatcactagttataagaaantcaggnttcgctccttataagtggtgggtgtagtgggttatatattgtggtttggagggtatagttgtgattagctcatgtggtgggggtgggtgactatagctcggctgtgttagatgagaatattgggagggtggggactcacataggagggggaaattagaagtgactcagtacgtggcgggcgggtataggccataggattgtggctgggggcaagtgaatgtgaaggcgaacagaattttctgcgtctacacttgtggggtctcctcagggggttgggttatacatttttatattcttaatggggccttgggatgagggaggctagggtggatacgttcggtggttcacatatttttacagtagggggtgatagaggaatacgtgtaaggagtatgggggaccccgagaggcgctgttgacaccgccgccacaaccgccgccacaccgccgatgccctcagtcatgccgaagcacgagttctctgtggacatgacctgtggaggctggctgaagctgtctccccggggccccaaaaagcttggaggagtaagtag

SEQ ID NO: 701412 - DNA, 475 bp, Homo sapiens
  misc_feature (21)..(21): n is a, c, g, or t
acatcacttcaacacctttantggttgaactcatagggctatggggatcacggcatgtctaataccaaaagaactttgagaggcagtcccttgatggcaaggtacttccttagggaacaaagcattgatggaaccaatcaagataaagggttctcgattgtccagactttcttttgtaaaatgaaaagactggcagctggtgtttatcttttccttccaaggctcaggggttagcagctttatagataagggcagtcctaatcataaacccaaactgcatttgcacacaatggtacaattctatccttctatcccttcttgccttaaatcctggggcttgcttcattactaattaatgttccttgtggcattttttccagaataaggcccttttgtccacattaaaaacctattcagggccaggcgcggtggctcacacctgtaatccccagcactttgggaggtccagacgggc

SEQ ID NO: 701413 - DNA, 764 bp, Homo sapiens
ctgccccaaccctctcccccagctacactgacctcttctgagtgggtggaaggggggtaggaggaggaagaaaaacaacaacaaaaaatcgatcttagatatgaaattatgggcatgggatggtggtagaggcaagagtgatgatgaagattgggagatgacgtggcaccctacgttgctactaggacttccttctccatactaggacatagggggcaggagggagctaaacctaggaccaggatatctccctacctgtaatatacccaacctacatacatagagcctgttaagccctaccagcaccctggacgaggttggagtaggggggtagaggtagagggctataccctgagtaggcatgccacatacctagtgaggcagggtgtagagaccgagagactacccaatataaacctacagtacaacaaaactaggttgataggtactgagtgggaaggaggtggtagatagtagaggggtagggaggagctatagtagtacagcagcagagaggagaggagagaggaggtaataaaaatctatatatacaatgggaatatgtagcaataagtctaagtagggagcatagggggagccgggttggaggtgaggaaaccataacctactacagagaaaacaagaagaagagaaatgtaaaagatacaaataagagactacatatatctataatcaatattacacaaacaaaaaccaaaccagtaaacaaaggaagagaaaagaaacggacacagaaacacaag

SEQ ID NO: 701414 - DNA, 452 bp, Homo sapiens
cgacacgtactggctgcagttacgtattctctttttctttttcttttacttttgagacggggtctcactgtgtcgcccaggctggagtacagtgtcgtgaactgggttgaacctcccaggtgccagctgttctccagcctcagcctcctgagaagctggaactacaggtgcgtgccaccatgcccggctaattttggtattttttagtagagacagggcttcaccgtattggccaggctggtctcgaactcctgatctgcccttcctgaccttgtgatctgcctgcctcggcctcctgagttcaagccgattctcctgcctcagcctcccaagtagctgggattataggcgcatgccacacgcctggctgattttggtatttgtagtagagatggggtttcaccgtgtaggccaggctcgtctcgaactcctgacctcaggtgatccaccca

SEQ ID NO: 701415 - DNA, 786 bp, Homo sapiens
accggcttagaggaccgggcaatgggtaattggaggctggatgccgctggcactgttggttcggctcgactgtcaactggatggtgaccaggagccgagatgggagtgcggcgggagcggcaccaaccccttcctcaggtcgttgcaccactgcgtgaactccatagcagacaaagtcctgtgaaaagcactcggttaccatcacttgtctctaacacctgtgtgccagagtgattccttacaaggaccttgccgtctcgaggtgcttagcgcatggactgtgagggatgggccgcagcactcagtcaggggcgcagagggacgcatgccgtcccttgtctagtactacttcgtagagtgttgggatcctatgagagagcctggagttaggacgtcggtctagctggtgtccctcgcgactccgagtagagagactgggccttgcgtgttccttggtcatggatgctttgtatagcttcgctccgggtcctgggctgtactcgtttcgtgacacacttgtcccaattcgatagggctggttcatcccacagcttcctggcatagttctgcatcctctgaacgacaggaaggaggctgagattagtgccaaagaagtgggggctgatgggccgtgggaagactgtgtggtggatgaggggtgggcaggtaagaggtggacaacctcgacgactcgatgatgtgatcgatggttgtgcatatggtggaagggggtggtgtgggcatggcagaggatcgagaaggctccgaggaggaggggagctggtg

SEQ ID NO: 701416 - DNA, 150 bp, Homo sapiens
tagaggatccccagtcacaggatagtttatcataagaatgtgagctctaacccatgtcataaggcagttgggattaaaaaggtcagcagctagttttttttttatataaagttttatctagtagacgctggagtctcactattgttgcca

SEQ ID NO: 701417 - DNA, 926 bp, Homo sapiens
gctcgcttgcaacatatcaccatatgattcggctgttcgatcgacctggcagagcctgtaaagagatcagtccgttcatcatttatgatataatgaagtgaattagtgggaaagagattttctccagaaggaccctggatgatgatatgttgtggtcatgtcagccatgagcatatggtcatctctcagagatctagaactgtgcctaccaagtacgtgggcttttaaaagaccggagacgactggaaattcattgggacctgatcaagcatcgtaatatctattgattccaagttcttcgagtttcgactttcgtctaatggatacacatacttgatgtgaccttgaatgtggtatgaggaccggataccgttcagcctactttccccgctcccaaacaatgattgcatcgttctgccaagcttgggatgtgggctatcggctagaagtgagttcctaaaatgtggcaagatcagcaaggaatatggtcatactttccgcagtgagctgagagaagagatctgatgctcatggccaaggacaagcaccctacagaaggctcacggggctcttctgctggacggtggctgctgatgtcacaatctgcgtattagaagccacccatcgcacagaatggtcgggatgggccggcccactcctcaacgttagatctctttaaggaggggaacctcgaccggaacttgcggctccagccgcacatgacaaaccgaggagaaagcacatgctagtcacgtatataccccgacagagtaagcaagcacactatgctcacagatgctacacgagttctgttgccgctgctgagcatctcttttcgtgctgcccgcaacactacgaaaagataacaacaacataacaggcaccaacaagaaaagatcacaaagtaagcacaagcacaaaaacaa

SEQ ID NO: 701418 - DNA, 360 bp, Homo sapiens
aggtccattctcgtggaaggcgcagtgaggatttccatatcagaatcacgatgtaccaggaatcatgtattgtcttcagtcatagagtctctcaacttcatagacctgaatggtaccagttggttgaatataggaagctgctaaaaacacgatctgagacttcttggtaggcaccactgtattcctgggattcagtttggtcattacatctcccatagtttcaataccaagtgttcggggacatacatcaagcattaccgggtcccctgtatcttcctcaccagcaaagcagtcgcagtgctggaacaaggtatgcatacgctatcggctttctctgggtttatgcccggatgatctcct

SEQ ID NO: 701419 - DNA, 172 bp, Homo sapiens
gtcgactatacatgcatacacatctctctctatctctctctctctctctctctctctctcacacacacacacacacacacacacaccatgcaccacagacatacacatgctcacacacgctacatacatatgcctgtccatcacacacgcccacacacacacacacacacac

SEQ ID NO: 701420 - DNA, 817 bp, Homo sapiens
  misc_feature (817)..(817): n is a, c, g, or t
aaggctagtacgaggctggctggtagtcggccgagggagagcagagagagaactagtctcgagttttttttctttttctttttaagtagagagggggtttcaccatgtcagccaggagggtctcgatcttctgacctgtgggaatcgggccacctcagccccccaaaaggcggggataacgggggtgagccaccacacccactcctcgccccagtttattaaataccttctccctcttacaagctcctaaccgttgcgaggctaatcccctcccgtggagagaaagaggatcccaagtgctccgatgagcataaaaaatccgggctccttgaaatgcacgtggacccattctccagctctcgtggggtggtagaggccgtgaggccataattattatctcagcacctctccatctccttctcagtctcaaaacagattgagggacaatatacaggcagcttggtgccctcaggctgccaggagcaaaggggccattcaccagcgtgggccacagcctggggggagccatccaaggggggctccggctaaagccctagggggggctcctcccgcagtcggggagaacagatccgggcctcccacccagtctcgcgggctgccagttggagaacctcaacaaattacagagtggtttttggcaactacaacagatcgcggctctctgggagcagggtggtaacagactttctaaatccggagagtggaaaatcccctctagcatggggtcgcggctggggaacacgggcgtcacaacgggcccaaaccgcccctcccgaattgtggggcaagggggggn

SEQ ID NO: 701421 - DNA, 394 bp, Homo sapiens
  misc_feature (9)..(9): n is a, c, g, or t
  misc_feature (70)..(70): n is a, c, g, or t
  misc_feature (89)..(89): n is a, c, g, or t
  misc_feature (126)..(127): n is a, c, g, or t
  misc_feature (146)..(146): n is a, c, g, or t
  misc_feature (185)..(185): n is a, c, g, or t
  misc_feature (187)..(187): n is a, c, g, or t
  misc_feature (284)..(284): n is a, c, g, or t
  misc_feature (383)..(384): n is a, c, g, or t
cccaagctnggagcacatcttgttcacctgctgccacaatcggcaccctggtcctgcccccgacaagganacggctgctctccctggantgacaactggagggagatcttagatagcaaagcgcgnnactgcgcagcgggaatgancggggatccgcgggcagcagctggagctaaaggaagggncnagccacaggggccaccgcagagccgagtcggggcggcatcgtgcatggcctctggccccgtggagtggagcaggcagataccgttaagcgctgtgcntaacggcccagcccagccacccggtacctcccgagaggctgtccctggaccctggctggcatggaaatacagtgggaaaaccagtcgggacctttaatnncagaccttgg

SEQ ID NO: 701422 - DNA, 913 bp, Homo sapiens
  misc_feature (316)..(316): n is a, c, g, or t
aaggctggtactggtctcggaatgtaatggatgggtgcggcagcactgccaggtgaagaggtgtgatcctgacccggggaaggtctgctgggcagggcagagttgggaaagctgcatgccccctgcaggcccacgcagacccattctcctcctttctcccacgtcctatctgcctctcgctggagtgccaggcctgtgcagcaatcagaagacaggaggaactaggagcctcatttggcctggccctggaggcgccggcctcgggcttaaataggagctccgggctctggctgggaccctgaccgctgccggccgngctcccgctgctcctgccgggtgatggaaaaccccagccctggcctgccgcctgggcaaggccctctgctgctctcctcctggccactctcggcgccgccggccagcctcttgggggagaatccatctgttccgccagagccccggccaaatacagcatcaccttcacggtgcaagtggagccagacggccttccccaagcagtaccccctgttcctgcccccctgctgcagtggtcttctgctagctgggggccgccgcatagctcctgactacagcatgtggatggaagaaccaggtacgtcagtaacgtggctgcgcgactttgcgtgatgtgctgtgccgatggcctgggcggctgatgaagtgagatcgaggcggcgggggatggcgcttgcagagctgtgcacgctgggtgttttcgggctgccctgcctgtccccagctgtgcaccggggcagacgtctggctggacgctggaggtgcagcgcaggcactctgctggtctccgtttgtggttgcgcatcgttgcccagcccccggacttggttctgtgggcggttggacaggcctggacccttgtgcgaccgggggaccg

SEQ ID NO: 701423 - DNA, 362 bp, Homo sapiens
ccgtctcaaaaaaaaaaaaaaaaaaaaaaaaaaaaagaagaatacagtcatgtatctcttggtgacagggacgcattctgataaatgtgtcattaggcaattgcattgtagtgtgattatcacagattgtacttatacaaaacttagatggcatagcctactgcatacctaggctatatgggagagcctattgctcccaggctacgcacctgtacagcatgtgactactgaatactataggcaattgcagcacaatgggaaatatttgtgtatctaaacatatgtaaacagagaaaaagggtatatggcatagggctgagagttgctccagatgagtcagtgagtggtgaatgatgtgggcc

SEQ ID NO: 701424 - DNA, 729 bp, Homo sapiens
ctcgcctctccattgtgccactgaagtgagtaatcaatagctgcctactctgtatgtccagcacggagaatgactgacaagtgcctcctaaagatagcagacatgagatatgaccatcgtagactgtaagattgcgtgaatgactgagagccacacctgctttgtatgtagtttcactgtttctaatagaggggcatcgtgagagtctgccagaccatgcaaatttagatgcttatgtctgtgaaacatgagatcctgatgcactggtggaagactcaaggcaatgactgctcacgatgtgtagagacggatgatgctctgcagcttctgtagagactatatctgcacctgcacaatgattattcctcaaacctccgaagtctggtgcatacataggctagagatggcgctcacagattcctttgccactgtagagagattgttgcattgtactgatgctaaacataagtcatacctgctatatgccatagccgcttattccgatcgctagtgccaatgtgttcacatggatatacaatgtgttgacaatcagtacgtatgtgtaaacacctaatgacgaatctccatacagttgctgatgaagaacatattgtgtcaagaacatgaccactcttgtgtaccatgcgatcttgttctgacatagctttgacgaattggcgtataggctgctgggccactgcattcactagctgatgctgtggatgcact

SEQ ID NO: 701425 - DNA, 409 bp, Homo sapiens
atgcaacgtatgctgtactcgagataaactcctgactgcactattgagacgcactgaagcatctctcttccaatcaccttcatagttcattgcttcccatgaaagtgtcttggcctcagatggatggatgtgtttggacgagtgtctttaaggagtagtcctgaacaggtagttattgggtgtcccatgtaacattttttgaagataaaaccactaatagctagtcataatttactgttgactgcattctcattaaaatgaaggtaaaggctcaggaatcatattgatgttctgattttcaaattggagtccaagtctatgtttatcattttactatgttcctgatgttctttgttatttaattaatgggagcgaataaaaccagaagagcttgggaagattgctcagt

SEQ ID NO: 701426 - DNA, 194 bp, Homo sapiens
  misc_feature (79)..(81): n is a, c, g, or t
gcacaagctccaaagttcaagacaaggtagcccttagagaggaaaaccatgacaggcaaatgcatttctctggagttgnnngagttttcgtttaggattagttgagttccagctgggtgaaggagtattaaccaagtttgggatgatagggcgagaccctcacagttgagtattagagagcttgtcttcacagg

SEQ ID NO: 701427 - DNA, 1397 bp, Homo sapiens
ccggtgtggtgggaaggtcgagggatggggagcaaatagatgtgtggtgtaaataagaaggagttctagatggtgttggtattacagcgttgtgttgtgtttttagtttggatgacgagaggtaggcgtttgtgtagaaagtggtttctctgtgggggtggttaaattaaagagatgtgctcagcggggggggggagtgtggttctcatagcgagtactgttcgcaggagtgtagatacatcattggggcgggttgatcatctactggattgtatgtattttgggcaacctagagttagtcatacgtttgtactgcgaatagtatagggttgattttgtctgtgggaggtatcctcaactggggggggtgagctctctgtcctgcagctaagtagatcgtcctgcttctaccttgcacacaaggacttgggtggggggcccccaccgagagtattccgacagagttgtctgcaccaaaaaaggcagctcactgtctggtaggtagaatagtaagagccacatgttgtgcgccgaatttctagcacgaacgccccaactgtgggacgtcaactactcagtgagggaggaagcacatccggcggccgggtgagaaagagttgttttgctccggggagatgtttttgcgggcgcacaaggtgtgcactacagtgggagcgtaacacgagggtcacaagtgtgtttagatagcacagcgcccgcgtgggacggacacacgccggaataccgcttggggaccttggtgacagagaccgaccgctggtgaaacacacaggagtacacagagagggtgtctcacaaaagatgtccacggtgcgatcgctaggaaggaaacccttgggggggacacagccccccacgggctccacacacgaagggagaggagacatgacagcgcagcgagatgaccgaatgttccctaggcgatccatttcacaggggcccaccgacaacgtggtgagctgggtgagcagaacaggggaaccgggcacaaccgacccgggagagcaacaatatagccggcacggggagagcacctgggtgcaacaacacaaggcatggcatggctttggtctcagtgttattctaccgcagcgccacacacagcgcctcctacagtccaacgcggcgagcggtctcaggtgtccggggcacaggggacactcaccacaaccccacctgggcgcggcgccaccagtttggagcaccagcgacagtctctgttctataaaacaagaaatctggggactagccatgaaagtggttttggaacacgagacctctatcaaattgatgagggcgacccatcacaggacattttctccctcccctcctttgaattgtaaatggcacattaagaccttgtcccggcatttcca

SEQ ID NO: 701428 - DNA, 291 bp, Homo sapiens
ctgtaggatcccgaatcattcgtgtctttcgtacagtgcagaaatttgatgtacatggtacgaccgacctggtattactccgtgtctgaactctagatcacgtacgacttttatcgttgaacaaacaaacctttaatagcggctgcaccatcgggatgtcctgatccaacatcgaggtcgtgactcgtatagacccttgcggactctagaataggattgcgctgttatccctagggtaacttgttccgttggtcaagttattggatcaattgagtaggacacgaatgttca

SEQ ID NO: 701429 - DNA, 541 bp, Homo sapiens
gcgacttttctctttgtatggtggagtataatcttaaatcatttggaatcagttgagttgaccatgatgaaatttttccgaatgtgaatatgtaggttgatgagttacagaaaaatatatctgtgtgtaacaaacttatcaatgactttgacgtttgtaagtttggtttctatcatgaatttagtcattaaactttagttctatcatttggtactatcattaatgttttatatacactgatacttaaaagcttgtgtggacaaaaattaatctgtataattttgtatcatctctccctggatatgtgttctgtatctaagcgacttttgtgagagattactcgtgcaatgagatcgaccaaataaatcttaattaaatctttgcagatacatacttatgtgaactttgaacaaatgagtgaaactctgtgttctaagtaggctgttataatcatttccggatcacttgcagaggacttgctatttgccaggtgcgttatgtatcattaaattttactcatagttcatatgaatgtgccaag

SEQ ID NO: 701430 - DNA, 573 bp, Homo sapiens
gcgcagacacatctgccgtctgcctgactcctgcaggtgcccagtaccggggcacgcacaacaggtcacatacagcaacaaggacttccaagaggaaatggatatagaaaccaaggagagtggtagccccatatatgataaatctacgatacaaagtaatagacaagctagtacaaaactctttaaacatgcaacactttactaaacaacaatccatactactagaatatgtatcagagcaggttaccgacctacactgctaacatacccgcaggtctgttccctggaactggcgtgagggtggagggctggcacatgatgtgagagacatggcttctgccagagaagccccggacagctgcgagcgctggctagaaaacgtacgcttaggaggccagtctttccgggatcaccagacagcattagctagatgtcaataggctgataaacatcaccctacaatacaaccaccaaaaggaacccaatacgggtcaaaagcggagagggggagggggaataaacggagcaaggagataggaaatcacttatatgattaatgtgacatggttgaaa

SEQ ID NO: 701431 - DNA, 267 bp, Homo sapiens
  misc_feature (42)..(42): n is a, c, g, or t
  misc_feature (50)..(50): n is a, c, g, or t
  misc_feature (248)..(248): n is a, c, g, or t
cccgctgcatgcacgcaagctggcggataccgggcgctatgngcggatcngtggcgtcgggctttgtcgtcgatggcggcatctaccgcacgagtttgtcgcggacgccgtcatcagcggcctgatgcgcgtgcagctcgatacgcaggtgcccgtgctttccgccgtgctgacgccgaaaagcttccacgatcacgaagaccaccgcaaattcttcagcgagcacttcgtcgtgaagggccgcgaangcaagggcctgcatcaaga

SEQ ID NO: 701432 - DNA, 539 bp, Homo sapiens
caggagttgattttcactgtaattattactaagccattgattttatagagttgtgaggccattaccttgagacaaattttaaataaaaaataaaaaaaggaaagtccaggaaggaattcaggcatgaggacatttaagaactttgaattttagctttgttgcttgtagtttcccaattttaaaaatctttaacatcttccataccaggagataagcagtaaatgagagaacacatttggaagctcttggtagactgaaaataactaagggaggttcccttctttcctcttacagataaaacttggttttcaatagtataaactcaatctttgaaaaacccacctcttttcctagactcacaagggtgcttccatgacatcttggatataaaaggaatacttagtgtacatgtgaataattaagtcattttttaaaatgccctatgtgaaataagaaattacctctgtgtaattcaactagtcttgcaatgagaccctttctccaacaataaagtgcaataaataatttactcacaaaaa

SEQ ID NO: 701433 - DNA, 853 bp, Homo sapiens
agcggagggcttcgtgcggtggggctcgctcgcgcggcagcggtggccgaggcctcttggttctgcggcacgtgacggtcgggccgcctccgcctctctctttactgcggcgcggggcaaggtgtgcgggcgggaaggggcacgggcacccccgcggtccccgggaggctagagatcatggaagggaagtggttgctgtgtatgttactggtgcttggaactgctattgttgaggctcatgatggacatgatgatgatgtgattgatattgaggatgaccttgacgatgtcattgaagaggtagaagactcaaaaccagataccactgctcctccttcatctcccaaggttacttacaaagcccctgctaagattccagatgaagaggccacaaaacccgaaggctggttagatgatgagcctgagtacgtacctgatccagacgcagagaaacctgaggattgggatgaagacatggatggagaatgggaggctcctcagattgccaaccctagatgtgagtcagctcctggatgtggtgtctggcagcgacctgtgattgacaaccccaattataaaggcaaatggaagcctcctatgattgacaatcccagttaccagggaatctggaaacccaggaaaataccaaatccagatttctttgaagatctggaacctttcagaatgactccttttagtgctactggttcggagactggtggtccatgaacctctgacatttcttttgacaactttatcatttgtgctgaatcgaaagaataatcgatgatgggccaatgatggattggggcctgagcaaagttcttgattcggctgctgatccaaggcgtgt

SEQ ID NO: 701434 - DNA, 463 bp, Homo sapiens
agcggagggcttcgtgcggtggggctcgctcgcgcggcagcggtggccgaggcctcttggttctgcggcacgtgacggtcgggccgcctccgcctctctctttactgcggcgcggggcaaggtgtgcgggcgggaaggggcacgggcacccccgcggtccccgggaggctagagatcatggaagggaagtggttgctgtgtatgttactggtgcttggaactgctattgttgaggctcatgatggacatgatgatgatgtgattgatattgaggatgaccttgacgatgtcattgaagaggtagaagactcaaaaccagataccactgctcctccttcatctcccaaggttacttacaaagctccagttccaacaggggaagtatagctttgtaagtaaccactgctcctccttcatctcccaaggttacttacaaagctccagttccaacaggggaagtata

SEQ ID NO: 701435 - DNA, 508 bp, Homo sapiens
  misc_feature (106)..(106): n is a, c, g, or t
  misc_feature (373)..(373): n is a, c, g, or t
caaaaatggcccctggaggccgtggccccccagatggatgacatggccatggtcttagccagggaatttttccaggccttgaaggagctcaaggtgttagtggctnccaaggcccttttggacccgcccaaaagcctggggtgcactgctttccggggaaaggtgggggtttttttttaaatggaagccaacttcaaaaacctgtcccggggggtggtgaaagtggcccccaagttgccccccaataaaaatgtcaaaaacctgtttgtggcccttggggaaaagtttggggaacccccccgctccgccccctggcccctcaaggagggggggtttttcctgaatcaagatttaagggtttgtcccctccctngaggggttccgaccccaggccctttggggccgctacatgggccccccccgggggggcctccggggcctgttttatgattggggggcctccccacgccccgcccccgctgccaataaagttgttttgggtttggga

SEQ ID NO: 701436 - DNA, 1591 bp, Homo sapiens
agcggagggcttcgtgcggtggggctcgctcgcgcggcagcggtggccgaggcctcttggttctgcggcacgtgacggtcgggccgcctccgcctctctctttactgcggcgcggggcaaggtgtgcgggcgggaaggggcacgggcacccccgcggtccccgggaggctagagatcatggaagggaagtggttgctgtgtatgttactggtgcttggaactgctattgttgaggctcatgatggacatgatgatgatgtgattgatattgaggatgaccttgacgatgtcattgaagaggtagaagactcaaaaccagataccactgctcctccttcatctcccaaggttacttacaaagctccagttccaacaggggaagtatattttgctgattcttttgacagaggaactctgtcagggtggattttatccaaagccaagaaagacgataccgatgatgaaattgccaaatatgatggaaagtgggaggtagaggaaatgaaggagtcaaagcttccaggtgataaaggacttgtgttgatgtctcgggccaagcatcatgccatctctgctaaactgaacaagcccttcctgtttgacaccaagcctctcattgttcagtatgaggttaatttccaaaatggaatagaatgtggtggtgcctatgtgaaactgctttctaaaacaccagaactcaacctggatcagttccatgacaagaccccttatacgattatgtttggtccagataaatgtggagaggactataaactgcacttcatcttccgacacaaaaaccccaaaacgggtatctatgaagaaaaacatgctaagaggccagatgcagatctgaagacctattttactgataagaaaacacatctttacacactaatcttgaatccagataatagttttgaaatactggttgaccaatctgtggtgaatagtggaaatctgctcaatgacatgactcctcctgtaaatccttcacgtgaaattgaggacccagaagaccggaagcccgaggattgggatgaaagaccaaaaatcccagatccagaagctgtcaagccagatgactgggatgaagatgcccctgctaagattccagatgaagaggccacaaaacccgaaggctggttagatgatgagcctgagtacgtacctgatccagacgcagagaaacctgaggattgggatgaagacatggatggagaatgggaggctcctcagattgccaaccctagatgtgagtcagctcctggatgtggtgtctggcagcgacctgtgattgacaaccccaattataaaggcaaatggaagcctcctatgattgacaatcccagttaccagggaatctggaaacccaggaaaataccaaatccagatttctttgaagatctggaacctttcagaatgactccttttagtgctactggttcggagactggtggtccatgaacctctgacatttcttttgacaactttatcatttgtgctgaatcgaaagaataatcgatgatgggccaatgatggattggggcctgagcaaagttcttgattcggctgctgatccaaggcgtgt

SEQ ID NO: 701437 - DNA, 1143 bp, Homo sapiens
  misc_feature (338)..(338): n is a, c, g, or t
  misc_feature (624)..(624): n is a, c, g, or t
agcggagatgaccgcttgccgaaaccccctggagatagcaaatggttatgtggagcactgtgttccgataccagtgtaacgaacctactacagactgcgctcagaaggcagactggagatagtacaccgtctagaagtgataagaagcattgcgagtataataagggctggctggacgattaacatcttctctgagattgtgaatgcaagctagtgtggagagagccacgagagaatgccggcagaaccacacgctgtgagcaggagtccctgggttggacacctgggtatgcccaaagggctggtccttgtcccgtggccagggctatatgactggnttatcccgacgcgatatagtctctacctcaccagcggtcgtccacagcttgcattcaagtggagaacaaactgggacatgcatgaaccgagcgggggtacacaaaagtgcgtgcttccctgggaaacccatgtccaggaatacatgctgatcagttgcacataggacattggtccccattaactagtggatacactactaaatgctgagggaatagaaaaggtcgacgcttgctagagcagagattggagaaagcgtgggctctccttaccaaccccttgaacatnatcatgccatgcggtatgattaccttcgggggatcattcacagacttcactaaccaggaaggctgacgtagagagagtgagtagcagttgcactgccccattcctcgtctctatcccctgcaatagcacacttatgccaagaaaagctgagggtgggctgtgcgcgtttaacggtggtgtgggggctggggtcgtagcaaagaaagttgagcatatctttcaaaaaatcttcatcgtagatcccaattcttgaaaagctatggctcacttgcgtagtcccttgtagggtctgtacccaacagggaccgaatttgccatttagcttgcactttatggaagggggcaaaggaccactgtccccgcaggaaatgggcgcaggggagacccccgaacattaagccgcttggaagggggaaattgggaagtcctaagtaacgtgggaaatcggaatcgaagacccggtggctcggtggtaccgagacagtaggccttaaaggtgaacccatggggaaaggaccc

SEQ ID NO: 701438 - DNA, 1261 bp, Homo sapiens
  misc_feature (1254)..(1254): n is a, c, g, or t
agcggagggcttcgtgcggtggggctcgctcgcgcggcagcggtggccgaggcctcttggttctgcggcacgtgacggtcgggccgcctccgcctctctctttactgcggcgcggggcaaggtgtgcgggcgggaaggggcacgggcacccccgcggtccccgggaggctagagatcatggaagggaagtggttgctgtgtatgttactggtgcttggaactgctattgttgaggctcatgatggacatgatgatgatgtgattgatattgaggatgaccttgacgatgtcattgaagaggtagaagactcaaaaccagataccactgctcctccttcatctcccaaggttacttacaaagctccagttccaacaggggaagtatattttgctgattcttttgacagaggaactctgtcagggtggattttatccaaagccaagaaagacgataccgatgatgaaattgccaaatatgatggaaagtgggaggtagaggaaatgaaggagtcaaagcttccaggtgataaaggacttgtgttgatgtctcgggccaagcatcatgccatctctgctaaactgaacaagcccttcctgtttgacaccaagcctctcattgttcagtatgaggttaatttccaaaatggaatagaatgtggtggtgcctatgtgaaactgctttctaaaacaccagaactcaacctggatcagttccatgacaagaccccttatacgattatgtttggtccagataaatgtggagaggactataaactgcacttcatcttccgacacaaaaaccccaaaacgggtatctatgaagaaaaacatgctaagaggccagatgcagatctgaagacctattttactgataagaaaacacatctttacacactaatcttgaatccagataatagttttgaaatactggttgaccaatctgtggtgaatagtggaaatctgctcaatgacatgactcctcctgtaaatccttcacgtgaaattgaggacccagaagaccggaagcccgaggattgggatgaaagaccaaaaatcccagatccagaagctgtcaagccagatgactgggatgaagatgcccctgctaagattccagatgaagaggccacaaaacccgaaggctggttagatgatgagcctgagtacgtacctgatccagacgcagaggggtgggtcagagcagtggaggggagacatcgcccatgtgcttctgctactggtccttgggctggntgttggc

SEQ ID NO: 701439 - DNA, 184 bp, Homo sapiens
ggcaaaaaaacaaaaacgaaaacgaaaacaaacaaaccaagaattcagtgggatacattaactatgtcaaaaggaaaaaaaagggcggggcgtgaactaaacaaggaatgcgggcggggtgcgggggctcatgccggtaatcccagcactttgggaggcaaggccggtgggatcacctgaggtc

SEQ ID NO: 701440 - DNA, 257 bp, Homo sapiens
atcctttcacgagaccctcttataggaaaatactgaatgaactgtcctctgatgtgcctcgtgttccaagattgaagaagagagatcagaggaagagggaacaccacctagtattgctaccatggcagtcccacctagcatatatcagactagcacggggcaatacagtatgtattcctgcaattcgatatgataaagtcctagcctttaaggcctcctctaggtaatatgagcacctaggtttggcataagatgcc

SEQ ID NO: 701441 - DNA, 331 bp, Homo sapiens
gtgtcaccagcagaggctgcagaatagcaaatattgctgcctgatccttcctctggaagctttgtcccagcgggcacccacttgtatgaggtgtctgtcggcccctactgggaggtgtctcccagttaggctacacggtgtcagagacccacttgaggaggctgtctgtccattatcagagctcaaatgccatgctgggagaactactgctgcctttagggctgtcaggcagggacatttaagtctgcagaagctgtctgctgcctgttattcagatatgtctgcccccagaggtggaatctagaggcagcaggccttgctgagctgcagt

SEQ ID NO: 701442 - DNA, 348 bp, Homo sapiens
cgtaaaagacattggtgcttcagctttgctctcgcggctgtctgactctgggggaagccagccaccacgtcatgaggacacccaaacagcctacggagaggcccacgtagggaggagctgaggccccctgccagcaagcagccctagcccgccagctgtgtgagtgagcgagcctttttggaagtgcatcctcccgtcccagtccagccctcagatggctgcagccctgctagcatcttgactgccgcctcatgagggacctcaagccagaaccaacagccacgtggtgccagaattcctcatctgcagcagccgtgtgagatcataactgtttattgcctttttaaa

SEQ ID NO: 701443 - DNA, 319 bp, Homo sapiens
atgaaccacatgacctcaggatactcctcaatagtttatgctccagcatacagtatacacgtctgcgaagggccagagaaagccagaaccaagtaagaaaacatagcctcatttactttcaaataaggcaaaaattccatttaaaatgtggggatagggcacccactcagttctttcagatggtatacttcagaatacagaaggagcttccagttgaattcgaccagtggacaaactgcaggacaccaggtgaacaagctctttctgtatttacatacaaagtcagatcagttatgggacaatcagtcacatgcagaga

SEQ ID NO: 701444 - DNA, 1558 bp, Homo sapiens
agcggagggcttcgtgcggtggggctcgctcgcgcggcagcggtggccgaggcctcttggttctgcggcacgtgacggtcgggccgcctccgcctctctctttactgcggcgcggggcaaggtgtgcgggcgggaaggggcacgggcacccccgcggtccccgggaggctagagatcatggaagggaagtggttgctgtgtatgttactggtgcttggaactgctattgttgaggctcatgatggacatgatgatgatgtgattgatattgaggatgaccttgacgatgtcattgaagaggtagaagactcaaaaccagataccactgctcctccttcatctcccaaggttacttacaaagctccagttccaacaggggaagtatattttgctgattcttttgacagaggaactctgtcagggtggattttatccaaagccaagaaagacgataccgatgatgaaattgccaaatatgatggaaagtgggaggtagaggaaatgaaggagtcaaagcttccaggtgataaaggacttgtgttgatgtctcgggccaagcatcatgccatctctgctaaactgaacaagcccttcctgtttgacaccaagcctctcattgttcagtatgaggttaatttccaaaatggaatagaatgtggtggtgcctatgtgaaactgctttctaaaacaccagaactcaacctggatcagttccatgacaagaccccttatacgattatgtttggtccagataaatgtggagaggactataaactgcacttcatcttccgacacaaaaaccccaaaacgggtatctatgaagaaaaacatgctaagaggccagatgcagatctgaagacctattttactgataagaaaacacatctttacacactaatcttgaatccagataatagttttgaaatactggttgaccaatctactcctcctgtaaatccttcacgtgaaattgaggacccagaagaccggaagcccgaggattgggatgaaagaccaaaaatcccagatccagaagctgtcaagccagatgactgggatgaagatgcccctgctaagattccagatgaagaggccacaaaacccgaaggctggttagatgatgagcctgagtacgtacctgatccagacgcagagaaacctgaggattgggatgaagacatggatggagaatgggaggctcctcagattgccaaccctagatgtgagtcagctcctggatgtggtgtctggcagcgacctgtgattgacaaccccaattataaaggcaaatggaagcctcctatgattgacaatcccagttaccagggaatctggaaacccaggaaaataccaaatccagatttctttgaagatctggaacctttcagaatgactccttttagtgctactggttcggagactggtggtccatgaacctctgacatttcttttgacaactttatcatttgtgctgaatcgaaagaataatcgatgatgggccaatgatggattggggcctgagcaaagttcttgattcggctgctgatccaaggcgtgt

SEQ ID NO: 701445 - DNA, 567 bp, Homo sapiens
  misc_feature (169)..(169): n is a, c, g, or t
  misc_feature (176)..(176): n is a, c, g, or t
  misc_feature (248)..(248): n is a, c, g, or t
  misc_feature (298)..(298): n is a, c, g, or t
  misc_feature (309)..(309): n is a, c, g, or t
  misc_feature (359)..(359): n is a, c, g, or t
  misc_feature (369)..(369): n is a, c, g, or t
  misc_feature (393)..(393): n is a, c, g, or t
  misc_feature (396)..(396): n is a, c, g, or t
  misc_feature (407)..(407): n is a, c, g, or t
  misc_feature (431)..(431): n is a, c, g, or t
  misc_feature (435)..(435): n is a, c, g, or t
  misc_feature (462)..(462): n is a, c, g, or t
  misc_feature (464)..(465): n is a, c, g, or t
  misc_feature (475)..(476): n is a, c, g, or t
  misc_feature (489)..(489): n is a, c, g, or t
  misc_feature (497)..(497): n is a, c, g, or t
  misc_feature (515)..(515): n is a, c, g, or t
  misc_feature (557)..(557): n is a, c, g, or t
ccggttcccccttttaaaaggtaatgaccatgccccccccccttttgggcagggtttagtccagccctttgtccctctcccagatccccaatttttagtaaaggaccgggtcataagaaataaggctgccaaagaatcacaccagcttcgggcttagtaaattacctgnatacacnccttttcctaaaggaaatcccacatcttcgtaggagatctggtgtaatgctcttgggccctctctctaaagnatgagctagtatccctgggtcctagtaagtttcagcaaatataatagagncagacctgtcntctttttcagaaaagaaccagagaaaattgtttaaccaatggttttgtgnccttaaagtntgtgttagtcccttagcacccccnctnaaattttgctnaaagggacgttttgtgtgttgggnttcnctaaggaagcccctgaaagtgttcaanannagggaaaatnngaaactgttccanctgaaaanacgggcaagggggaatcnttgaaaaagccagaatattgaagtgttcaaatgaataaagangctaaaaact

SEQ ID NO: 701446 - DNA, 1538 bp, Homo sapiens
agcggagggcttcgtgcggtggggctcgctcgcgcggcagcggtggccgaggcctcttggttctgcggcacgtgacggtcgggccgcctccgcctctctctttactgcggcgcggggcaagatcatggaagggaagtggttgctgtgtatgttactggtgcttggaactgctattgttgaggctcatgatggacatgatgatgatgtgattgatattgaggatgaccttgacgatgtcattgaagaggtagaagactcaaaaccagataccactgctcctccttcatctcccaaggttacttacaaagctccagttccaacaggggaagtatattttgctgattcttttgacagaggaactctgtcagggtggattttatccaaagccaagaaagacgataccgatgatgaaattgccaaatatgatggaaagtgggaggtagaggaaatgaaggagtcaaagcttccaggtgataaaggacttgtgttgatgtctcgggccaagcatcatgccatctctgctaaactgaacaagcccttcctgtttgacaccaagcctctcattgttcagtatgaggttaatttccaaaatggaatagaatgtggtggtgcctatgtgaaactgctttctaaaacaccagaactcaacctggatcagttccatgacaagaccccttatacgattatgtttggtccagataaatgtggagaggactataaactgcacttcatcttccgacacaaaaaccccaaaacgggtatctatgaagaaaaacatgctaagaggccagatgcagatctgaagacctattttactgataagaaaacacatctttacacactaatcttgaatccagataatagttttgaaatactggttgaccaatctgtggtgaatagtggaaatctgctcaatgacatgactcctcctgtaaatccttcacgtgaaattgaggacccagaagaccggaagcccgaggattgggatgaaagaccaaaaatcccagatccagaagctgtcaagccagatgactgggatgaagatgcccctgctaagattccagatgaagaggccacaaaacccgaaggctggttagatgatgagcctgagtacgtacctgatccagacgcagagaaacctgaggattgggatgaagacatggatggagaatgggaggctcctcagattgccaaccctagatgtgagtcagctcctggatgtggtgtctggcagcgacctgtgattgacaaccccaattataaaggcaaatggaagcctcctatgattgacaatcccagttaccagggaatctggaaacccaggaaaataccaaatccagatttctttgaagatctggaacctttcagaatgactccttttagtgctactggttcggagactggtggtccatgaacctctgacatttcttttgacaactttatcatttgtgctgaatcgaaagaataatcgatgatgggccaatgatggattggggcctgagcaaagttcttgattcggctgctgatccaaggcgtgt

SEQ ID NO: 701447 - DNA, 1668 bp, Homo sapiens
cacgaggccccaagacacatctaatataatacacagggcgcttacgtggttagaaaagaagagataagccgggtgcggtggctcactcctgtaatcccagcactttggaaggccgaggcgggcagatcacgacgtcaagagattgagactatcctggccaacacggtgaaaccctgtctctattaaaaataacaaaaattagctggatgtggtgctgcacacctgtcatcccacctacttgggaggctgagatcatggaagggaagtggttgctgtgtatgttactggtgcttggaactgctattgttgaggctcatgatggacatgatgatgatgtgattgatattgaggatgaccttgacgatgtcattgaagaggtagaagactcaaaaccagataccactgctcctccttcatctcccaaggttacttacaaagctccagttccaacaggggaagtatattttgctgattcttttgacagaggaactctgtcagggtggattttatccaaagccaagaaagacgataccgatgatgaaattgccaaatatgatggaaagtgggaggtagaggaaatgaaggagtcaaagcttccaggtgataaaggacttgtgttgatgtctcgggccaagcatcatgccatctctgctaaactgaacaagcccttcctgtttgacaccaagcctctcattgttcagtatgaggttaatttccaaaatggaatagaatgtggtggtgcctatgtgaaactgctttctaaaacaccagaactcaacctggatcagttccatgacaagaccccttatacgattatgtttggtccagataaatgtggagaggactataaactgcacttcatcttccgacacaaaaaccccaaaacgggtatctatgaagaaaaacatgctaagaggccagatgcagatctgaagacctattttactgataagaaaacacatctttacacactaatcttgaatccagataatagttttgaaatactggttgaccaatctgtggtgaatagtggaaatctgctcaatgacatgactcctcctgtaaatccttcacgtgaaattgaggacccagaagaccggaagcccgaggattgggatgaaagaccaaaaatcccagatccagaagctgtcaagccagatgactgggatgaagatgcccctgctaagattccagatgaagaggccacaaaacccgaaggctggttagatgatgagcctgagtacgtacctgatccagacgcagagaaacctgaggattgggatgaagacatggatggagaatgggaggctcctcagattgccaaccctagatgtgagtcagctcctggatgtggtgtctggcagcgacctgtgattgacaaccccaattataaaggcaaatggaagcctcctatgattgacaatcccagttaccagggaatctggaaacccaggaaaataccaaatccagatttctttgaagatctggaacctttcagaatgactccttttagtgctactggttcggagactggtggtccatgaacctctgacatttcttttgacaactttatcatttgtgctgaatcgaaagaataatcgatgatgggccaatgatggattggggcctgagcaaagttcttgattcggctgctgatccaaggcgtgt

SEQ ID NO: 701448 - DNA, 192 bp, Homo sapiens
caggttactggatccctggtgatgcagtcactgggttctgacttgcaccttcatgtgtcctgcagtgtagtttgtgagaccacctcgtcaagagggtcctttagttattggcccactgcacgctgtgcgtcatagggaggctctgaccattcatccaccacaggtcgcttgcgtccggagatctcaggatca

SEQ ID NO: 701449 - DNA, 792 bp, Homo sapiens
gctcacgcctgtaatcccagcacttgggaggctgaggtgggtggatcacctaaggtcaggagttccagaccagcctgaccaacatggtgaaaccccgtctgtactaaaaatacaaaaattagccaggcatggtggcccatttcctgtaatcccagctactcaggaggctgaggcagaatcgcttgaacctgggaggcggaggtgcagggagctgagatggcgccactgcactccagcctgagcgacagagtgagactccgtctcaaaaaaaaaaaaaaaaggcaaaaattagccaggggtcggggcgcatgtcggtaatcccagctcctcgagaggctgaggggggaggatcacttgagcccaggaggcagaggtggcaaggacctggcgatcatggccattggcactccagcctggggcaacagagactctggtttcaaaaagaaaaaaaaattccccacattttatttaatttcagtccatacagttctatcctggctagggctggtaactccagttgagggcaccacagtggtccacccagggagtttctggtgggccatgggatggtgttggctttcatggtacgtggagaccaccaggtgaaatccctggcaggtgtgccctcaagagccaagttcatcctgtgggttcttcctagacaaggatgtgttttgctgctgtgcatgacctctgtcggcacccacatgtgcggcctggtagcattgggtagggggtctctgtccagtgctgtgtcccttggtttgtttgttctgccagtcccatggtctc

SEQ ID NO: 701450 - DNA, 1537 bp, Homo sapiens
agcggagggcttcgtgcggtggggctcgctcgcgcggcagcggtggccgaggcctcttggttctgcggcacgtgacggtcgggccgcctccgcctctctctttactgcggcgcggggcaaggtgtgcgggcgggaaggggcacgggcacccccgcggtccccgggaggctagagatcatggaagggaagtggttgctgtgtatgttactggtgcttggaactgctattgttgaggctcatgatggacatgatgatgatgtgattgatattgaggatgaccttgacgatgtcattgaagaggtagaagactcaaaaccagataccactgctcctccttcatctcccaaggttacttacaaagctccagttccaacaggggaagtatattttgctgattcttttgacagaggaactctgtcagggtggattttatccaaagccaagaaagacgataccgatgatgaaattgccaaatatgatggaaagtgggaggtagaggaaatgaaggagtcaaagcttccaggtgataaaggacttgtgttgatgtctcgggccaagcatcatgccatctctgctaaactgaacaagcccttcctgtttgacaccaagcctctcattgttcagtatgaggttaatttccaaaatggaatagaatgtggtggtgcctatgtgaaactgctttctatgtttggtccagataaatgtggagaggactataaactgcacttcatcttccgacacaaaaaccccaaaacgggtatctatgaagaaaaacatgctaagaggccagatgcagatctgaagacctattttactgataagaaaacacatctttacacactaatcttgaatccagataatagttttgaaatactggttgaccaatctgtggtgaatagtggaaatctgctcaatgacatgactcctcctgtaaatccttcacgtgaaattgaggacccagaagaccggaagcccgaggattgggatgaaagaccaaaaatcccagatccagaagctgtcaagccagatgactgggatgaagatgcccctgctaagattccagatgaagaggccacaaaacccgaaggctggttagatgatgagcctgagtacgtacctgatccagacgcagagaaacctgaggattgggatgaagacatggatggagaatgggaggctcctcagattgccaaccctagatgtgagtcagctcctggatgtggtgtctggcagcgacctgtgattgacaaccccaattataaaggcaaatggaagcctcctatgattgacaatcccagttaccagggaatctggaaacccaggaaaataccaaatccagatttctttgaagatctggaacctttcagaatgactccttttagtgctactggttcggagactggtggtccatgaacctctgacatttcttttgacaactttatcatttgtgctgaatcgaaagaataatcgatgatgggccaatgatggattggggcctgagcaaagttcttgattcggctgctgatccaaggcgtgt

SEQ ID NO: 701451 - DNA, 2188 bp, Homo sapiens
agcggagggcttcgtgcggtggggctcgctcgcgcggcagcggtggccgaggcctcttggttctgcggcacgtgacggtcgggccgcctccgcctctctctttactgcggcgcggggcaaggtgtgcgggcgggaaggggcacgggcacccccgcggtccccgggaggctagagatcatggaagggaagtggttgctgtgtatgttactggtgcttggaactgctattgttgaggctcatgatggacatgatgatgatgtgattgatattgaggatgaccttgacgatgtcattgaagaggtagaagactcaaaaccagataccactgctcctccttcatctcccaaggttacttacaaagctccagttccaacaggggaagtatattttgctgattcttttgacagaggaactctgtcagggtggattttatccaaagccaagaaagacgataccgatgatgaaattgccaaatatgatggaaagtgggaggtagaggaaatgaaggagtcaaagcttccaggtgataaaggacttgtgttgatgtctcgggccaagcatcatgccatctctgctaaactgaacaagcccttcctgtttgacaccaagcctctcattgttcagtaagtgaaatgcttgttggataaaagctttctgcaaagggtaatcttagaagacattatgtaacttttactctatgttaaaaaattatgagattatataagtggtggtagggatttttgggtgaatttaaacaccttgtaattaatagtttttcctggctaatgcattattttgaaagaaactggttacttattttcctgactctaaataacttgtagattttgcagaacaaatttaccggaaatctgcattaatagtttttgtaattaattaattacaaaactagtaattaatagtttttcctgcctaatgcattattttgaaagaaactggttactcattttcctgactctaaataacttgtagattttgcagaacaaatttactggaaatctgcattaatgttcaatttaattttatttatttttgtggcatttgataactattcaaaaacaatagaagatggaatcctttgtaagggtaaacatttgacctatgataaaacgtgactaagatgagggagagaggaaatacattaagagagtttcgatctttcaaaatgccatacagttttctgcttttctctctgatattaggtatgaggttaatttccaaaatggaatagaatgtggtggtgcctatgtgaaactgctttctaaaacaccagaactcaacctggatcagttccatgacaagaccccttatacgattatgtttggtccagataaatgtggagaggactataaactgcacttcatcttccgacacaaaaaccccaaaacgggtatctatgaagaaaaacatgctaagaggccagatgcagatctgaagacctattttactgataagaaaacacatctttacacactaatcttgaatccagataatagttttgaaatactggttgaccaatctgtggtgaatagtggaaatctgctcaatgacatgactcctcctgtaaatccttcacgtgaaattgaggacccagaagaccggaagcccgaggattgggatgaaagaccaaaaatcccagatccagaagctgtcaagccagatgactgggatgaagatgcccctgctaagattccagatgaagaggccacaaaacccgaaggctggttagatgatgagcctgagtacgtacctgatccagacgcagagaaacctgaggattgggatgaagacatggatggagaatgggaggctcctcagattgccaaccctagatgtgagtcagctcctggatgtggtgtctggcagcgacctgtgattgacaaccccaattataaaggcaaatggaagcctcctatgattgacaatcccagttaccagggaatctggaaacccaggaaaataccaaatccagatttctttgaagatctggaacctttcagaatgactccttttagtgctactggttcggagactggtggtccatgaacctctgacatttcttttgacaactttatcatttgtgctgaatcgaaagaataatcgatgatgggccaatgatggattggggcctgagcaaagttcttgattcggctgctgatccaaggcgtgt

SEQ ID NO: 701452 - DNA, 215 bp, Homo sapiens
aatcgcagcaatactcgtcggcgctggtgaagtcttgtccaacctcgaaggtgtgacggtagcacccggtggattctcattgggaacgacgatgtcttcgtctgatgcgggaaccggtatggggtaattaatgttgaggtaagccggacggccaaatgggtgcgtttcctggcttgtgtcgaccgatctgccagtgactgatggcactgacgagg

SEQ ID NO: 701453 - DNA, 1192 bp, Homo sapiens
  misc_feature (1137)..(1137): n is a, c, g, or t
  misc_feature (1141)..(1141): n is a, c, g, or t
agcggagggcttcgtgcggtggggctcgctcgcgcggcagcggtggccgaggcctcttggttctgcggcacgtgacggtcgggccgcctccgcctctctctttactgcggcgcggggcaaggtgtgcgggcgggaaggggcacgggcacccccgcggtccccgggaggctagagatcatggaagggaagtggttgctgtgtatgttactggtgcttggaactgctattgttgaggctcatgatggacatgatgatgatgtgattgatattgaggatgaccttgacgatgtcattgaagaggtagaagactcaaaaccagataccactgctcctccttcatctcccaaggttacttacaaagctccagttccaacaggggaagtatattttgctgattcttttgacagaggaactctgtcagggtggattttatccaaagccaagaaagacgataccgatgatgaaattgccaaatatgatggaaagtgggaggtagaggaaatgaaggagtcaaagcttccaggtgataaaggacttgtgttgatgtctcgggccaagcatcatgccatctctgctaaactgaacaagcccttcctgtttgacaccaagcctctcattgttcagtatgaggttaatttccaaaatggaatagaatgtggtggtgcctatgtgaaactgctttctatgtttggtccagataaatgtggagaggactataaactgcacttcatcttccgacacaaaaaccccaaaacgggtatctatgaagaaaaacatgctaagaggccagatgcagatctgaagacctattttactgataagaaaacacatctttacacactaagtaagaaaaagcattagtttgggggcttatggtattacatatatatcatccatttaatttaaagattgtatatctggccgggcactgtggctcacgcctgtaatcccagcactttgggaggccgagatgggcagatcacctgagatcaggaattcgagaacagtctggccaaaatgttgaaacttcacctctactaaaaatacaaatattagctaggcatggtggtgcacgcctgtaaccgaagctagttgggaggctgaggcaggagaattgcttgaacctgggagggagcncaangatcattgtgccacagcattccagcctgggcgaaagtgagactcaatctca

SEQ ID NO: 701454 - DNA, 500 bp, Homo sapiens
  misc_feature (500)..(500): n is a, c, g, or t
agcagcaatttgctgttggccaaggtgggagggggtcaggggtcctcccactgacaggctcagcagcacgctactgggggccacaggcccagctgtacagaatgtgactcccaagaacacgaggcctgctgaggggcagagatgagcagtcactgctaaccctggcaggaactaactgcagggaaaggggcctctcctttaaatgactgtaattgggaactcctgagtaaaggcacagacttccacacggccagcatcctgcaaagcctgagctgcgcactgcctggatgtactttcagcccccaaccaatggcgcctctcccctgaagtattcataacgaggttgagagttgctgactgtgacaccagggacttgagggctccttgcctccagctccaaccatggtgcttggccctggacgcaggcctggcttcctcctaaccacgagccacctctctgatgctgctttgatttttaatggcttaattttaattgattn

SEQ ID NO: 701455 - DNA, 377 bp, Homo sapiens
  misc_feature (169)..(169): n is a, c, g, or t
  misc_feature (211)..(211): n is a, c, g, or t
  misc_feature (255)..(255): n is a, c, g, or t
  misc_feature (311)..(311): n is a, c, g, or t
  misc_feature (325)..(326): n is a, c, g, or t
cctgcgcgccaacccccttgcacagcaagcccgggccgcgtgcgcaagctggtcatcgacgtggtgccccccaagttcctgggcgacttgctgctgctgcttcaactgcctgtgcggagcttctccaaggaggacgcaagcccctcttcgcctggtgaagccgccccgngcccgccgccttgcctgcagtaaacgcgtttgttccaacccnggggccgcggtgcctcctgcgcgttccccggaggggaaagggcncgtcccccgcgccgaggccagagaagccccgctcccaccggtgctgggccccgacnccagcccgccgctnnccgcactgcggagtgcttctcacccctcattaaaatcatccgtttgcttga

SEQ ID NO: 701456 - DNA, 900 bp, Homo sapiens
  misc_feature (52)..(52): n is a, c, g, or t
  misc_feature (176)..(176): n is a, c, g, or t
  misc_feature (242)..(242): n is a, c, g, or t
  misc_feature (317)..(317): n is a, c, g, or t
  misc_feature (350)..(350): n is a, c, g, or t
  misc_feature (384)..(385): n is a, c, g, or t
  misc_feature (407)..(407): n is a, c, g, or t
  misc_feature (431)..(431): n is a, c, g, or t
  misc_feature (437)..(438): n is a, c, g, or t
  misc_feature (440)..(440): n is a, c, g, or t
  misc_feature (586)..(586): n is a, c, g, or t
  misc_feature (614)..(614): n is a, c, g, or t
  misc_feature (672)..(672): n is a, c, g, or t
  misc_feature (679)..(679): n is a, c, g, or t
  misc_feature (712)..(712): n is a, c, g, or t
  misc_feature (716)..(716): n is a, c, g, or t
  misc_feature (742)..(742): n is a, c, g, or t
  misc_feature (747)..(747): n is a, c, g, or t
  misc_feature (749)..(749): n is a, c, g, or t
  misc_feature (758)..(758): n is a, c, g, or t
  misc_feature (761)..(761): n is a, c, g, or t
  misc_feature (886)..(886): n is a, c, g, or t
gggagggaaagaggcagacacaaacatgcgacaggcaggccgtgtgcccganggcagtcgggctccaaacaccaactctgtccggcgaaaccagggcgcagtcttcactgcagcggggccacaggcgcgcccgagcagtggaagtgcacattctgccacttgccgtcgcggcggtnccacacgcgggtctcctcagactggctggtgcggggccggccctgcccgtcaatgtactgcgtgancggatgtaagcaatgcaggcggcatcctctccaatgacgtgcacgtgtgggttcaggatggtcgtgtggattggnttgctgttcttggccagcaggttctcgaagtanaatctgtggaagtccatcccttcaaccaggttanncagtgcttcaggctcaaacgangtcagccctgggtcacagattttngcgtanncntcaaagtcaccgttgttgacggcctcgatgagctgctccgtggtcttaatgatctcctgcttccgggctttagcgtcttcatcctctatggtggtattggcactgtcagaagaatccttaatcccgtccactgggttatggatganggtggtttgaagatccagggcggcaggnggaagcgtccctttggggctggtggcggctgcactgtttttagtgctattcgtctggngcttgantccatctgctttcttgttgagtaaactcttggntganaaattccgtgtggccagcatggaagnaaagntnaaaaaatgnccnttctcctggcattgaactttttcagacactccacagtctcctgtctgtgcatcatggatgctaccgtggagcgttggcagacccacgggtgcttcagggccctcatgggctgtgatgcgcttggnagggttgatggtca

SEQ ID NO: 701457 - DNA, 224 bp, Homo sapiens
agaggagcgacttgatatcatgaaggatctaataactggtccagcggcaccccttatgcaaatcgctgctttgagtttcatgtgtattttcctcaagattatcccagttcaccccctattgtagaatctagagacaactggtggtaatagcgtgcgattcaatccaaacatttataatgatggcaaggtttagtttaagatattaaacaagtggcatggaagac

SEQ ID NO: 701458 - DNA, 1359 bp, Homo sapiens
gagcggctggctggtggcggcggccatttatgttcatcctcctcctcctcctgctcctcctggttggagcgcagtgtccggagcgggctggggggagatgatgcccgagagcagggttcggtgccttttcctcatgatccccagaccggatgacgagagcacagggaattttttcagaggacagaacaagaaagccagacagccgtacgcacaacacgatatgaaatagaacaaaaaacacagaagccgaacagaacaaaacaaaaccagatagcaccaaagagaaacaggagacaggaggatgagggataatacgcatgagaattaggtaggagatgaagaagagagagagggagatagagaggtgaagaagcagaaagtaacggagtcagaagaataagaagaagcacactgcaggcaggtgctgagatattagaagacgagagagcagacgaaagagaaaagtaaggtagatgagcacggagagtacaagggagtatagggtcggcagataaagagagacgtgggataagagtagaggcagacgccagagaggagagaagggatgagtagtgggagagagagtgcgacatagaactggcgaaacaagtggatagttagagcacaggagagtaaggatgcagaagatgggcataagagtaggggagggaaagggggtaataagagagttaaggagccgacgagagaggcagagagcagtagaggagcagacgacgacaggcagaggtcgacagaggaaaaagagggaggcaaaatgaggggaaagagacaagcaaaagaagactgagaagagcagcgcgaacgcaagaagcgaacagataacgcagaaggaaaagaaaagaggtgtggcagctggacatagacgtagacggggagtatagaaaaaggagaggcgaggaagacgcgctgagggtgacgaggccgagaggggaataagacggcgacgagaagagaagagaggcagaagacgagcaccgagatcgggctcagccgaggacaagcgccgagcgaacgaaagtacaagatacgatgatgcagagaggaggatagcagagacaggcgagcagagagagaagagacacgatactggacgagacgggagagacgggagcgaagagaggaggagagcaggtggaaaagggagaggagaatagggaagaacagacagggggggagggggaagggtgacggtgaatggagggggaggtggagaagaaaagaagagaggggaaggcgacggaggggacaggaaggcggagaggcggaacgggggggagagacgaggatagtgaggagggggagggggctgaggagtgacgcagaggaggacgagaggaa

SEQ ID NO: 701459 - DNA, 131 bp, Homo sapiens
  misc_feature (7)..(7): n is a, c, g, or t
acggatnacggactgggtgtgcacgactttgacgagggaaaaatctatggatagggctgaaatgtttccttgtattccttttataccaactggaactggcggcccaagttcggcttgtccatttccccttt

SEQ ID NO: 701460 - DNA, 999 bp, Homo sapiens
gctctttttccggctggaaccatggagggtgtaaaacgagaagacgaaggaggttcctgctgtgccagaagacccttaagaagaaacgcgacaggaattctcgcagatgctgaagatctaagctgcctgtagtaacatgaagtttgcccagacagatgcttcgaacaggcaacggacggagcgcttatctatgatacccgcaaagcactatcacaaggcatactataggccgactgttagcagaactgtaaattcgaactggcgaggatggcatgcacatagcgctgtcaacttctatgtacctgcagtaagccaaattggacgtactgtcactccgaatcagaggtatcaatggagtgacgcccaaaggttcgaaaggtgtcgcacgcttcttcgcctttcgtcaacatctttcaatggaaccctttgctgaagctcaaccaagggcttcgattaacattgctgaggacttggtacgagccaatatatttgccattggcgggtaaccccgaattcttgcaacgttcacgtaaaaattgcaaccttaattcgtatcaaagcgttgggttcactggccataaacatcaacttcacggaaagcccgacactttgccttctcgaccacgacttaaactgactcttgaaatttggcctcggagtcctcttggcgtaaaattaccggccattcaattctggccatggcaaggactttggatttcaatgcaggatcgtattactagtttgggtaaaaacggccttctcccacacacagggccccgatattgtaaccgtgtccccttgggtggggcccaccttatttccaaaacgttgggtcctttccataccacacggaaatggtgtgccacacttgcacgcaacaaacaagtgatcccaacccccaaattgcttgggctaaaaacaccgttttgtcaggacttgctctggcacaacacacggtatgcgtacccagcacatcaacacacggcctttactacgaag

SEQ ID NO: 701461 - DNA, 147 bp, Homo sapiens
atctaaattacagctgctttgaataaaaacgttaactaacaagctcacgctaagggtctcataggctgattgcttagcttaacgctttgttattcacaacgcagcctgtaatttacgttaactaaaactaacttatgcatcttataa

SEQ ID NO: 701462 - DNA, 246 bp, Homo sapiens
cggataggcctgaaaggtagaatcatcgggtacaatggagcagcagaggataaggcttaccttcatagtggatagtttaaagcagctctggcagcctctggctcgttttgactatgctgcagctccctggagcatagggttttccaggtgtgacagcagagactcaagtgatcaagtgatttggccaagggcatgcgggcagtgaagggcaaaacctgggcccacgtgttgggttaggtctacctg

SEQ ID NO: 701463 - DNA, 720 bp, Homo sapiens
cggaagttttatatcgtcgatccacgcgctccggtggcagccagcgaggccgccaagatttgtgcatacaatggtagcatccactgagctatggagaaagaagcagtctgatgtcatgcgcttacttctgagggtccgcctgctggcagtaccgacagctctctgctctccacagggctccccgccccacccgagacctgataaatgcgcgccgacatgggactacaaggccaagcaagggttacgtgatatatagcgattcagctgattcgacgatggatggaccgaaaacgcccaagtatcacataacggcgtgcaacttacgagacaagacctagtccaatcactgagtgtaaaaccaggactaagagatcagctcgaaacgcctttcagatccgattgcagacggagccgagcttggacgaccaacgtgctggcggctcctgaggagatacctgacgttctttacatggggttgggcgaacgattcacagcaatacaacattcaacatgagaggaacatccgtcattaggatcacccaatacacaatacaaagcactatcaaaaaaagcaaaattcatagaaaaccccagcatggcatcaacaccagaacccagttccaaccaaacaacacgctgcagattcagtagaaactagcacatacttacacagccatacacagccacaggaacttaaacaaaggacacgaaaatacacca

SEQ ID NO: 701464 - DNA, 167 bp, Homo sapiens
  misc_feature (38)..(38): n is a, c, g, or t
ggaaaacaattttactggtcagatgtggtggctcatgnctataatcccagcactttgggaggccgaggtgggtagatcacttcaggccaggagttcaagatgagtttggtcaacatagtgaaacctctctttaccaaaaaaaagtaataatgataataaacatttaa

SEQ ID NO: 701465 - DNA, 231 bp, Homo sapiens
cctcatatgatagtatcctttgtctcttatgaccgcatgcaggaagagaacaaacccatcaatggactgttggaacgacattcctacggacgtagcattaaggctgagcgatcgtggcttcatgacatgtagtctccgtactttgccacgctagtgatggtggatagcttaagcccaggaatttgagaccaggctgggcgatcatgacattacctcaccatgtagtgacct

SEQ ID NO: 701466 - DNA, 394 bp, Homo sapiens
  misc_feature (394)..(394): n is a, c, g, or t
tcccccgggctgcaggaattgggatcaagcctgtgtggagctcggtgagaagtgcgcaagatgcgtagtggacattgtggatgatgtgccaggagctggacgcctctatgcaggagcactctcgcaattaattgaactgatagctttacgggactgctgaaaccaacgagggaatgacttatatgatcggatctgactgcatggatgctagagtggtgcttcatgtatatgctgcaattagtgctggacggaccttctatgcagacagtggactctgtaggataggcgcatgcgtccttgtcacgaggtcatgtgatcatataatgggctagagaccgttattgaggctaggatagattgatttagtcacaatgtggttgcggtgttttttcgn

SEQ ID NO: 701467 - DNA, 755 bp, Homo sapiens
gattgtggacgcatcagaatgtactgattgaatcaagatgccttgtccaactcttgctactgattgaatccgtgaatactactcccaggattgtcggacatcatagtcccagtctgtacgtatcggcgacagcaggtatgagtcccgagtagaaattgtcggcgacgcatcgagctaatgtgccggtccgagatggttcacccgttcaacatccgtcaacaccgagactatcggcgtttgctattacagttgggcataaagtgctcagctccatccaatacgctgtatctcagcaggatcaatactctggaatcaagcatgtgccattctttagtatatgtcattaacgtttctcgacctgtcttcactgtaagtttcctgaggcctcaccaagaagctgagcagatgccagcaccatgctctctgtactgccctgcagaaactgtgaagacaattaaaacccttttttcacgacactaaccaaaagaaagcaaaacactacaaacaaacaaacaaaagagagtggttgcggggcaccagcaacagggaccacaagaaaaaagcgcgtgtcaagacaaacccacccgcgacgagaacagcggcggggccaacaaaaaaggtaaagggtggagccagtacgccccacagacaggtgacccacagagagaccgcggagccagcaaacagaaaaaagcactagcacagcaggatcaaaacaacgcccgggggggaaacccagaaggtatgaaacaacc

SEQ ID NO: 701468 - DNA, 279 bp, Homo sapiens
gataaccgggaagaaccatgaagtgtatgcatgttgatgggtctgctggcacgtcatctgaggtcttattgtacaatggtccccctcatcagaaagaagtccttgagacgcaccctgtccgagcgtggcctgctgaaggacttcctgaagaagcaacaacctcaacccagccagaaagtattacccccagtgaaaggttcccacactgggtagatgaacagcccctggaagaactacctgaatataggagtacttcggcactatcgggcatcggaactc

SEQ ID NO: 701469 - DNA, 367 bp, Homo sapiens
aaactttattaaaccctatcaaggttgtgttttccctttctgcaggtatgtttatcatactcagctttgcttgatcatagctctttctggtggtctttgggattatatgaccagcttcaatgtgccattcaaaccatagaatcataccatttaactctgattatttcaaggttaggtaatatttctataactgttcatttgttcttatagtaacattctgtggactttttcaacataactatattcttgatcaatatgaagggggttaaataaaaactttatttatttgtgaaggattttgtctatactttgaaaaaatctgaaaatcaacaagaaacagtaagtttacaacttacccctattacaa

SEQ ID NO: 701470 - DNA, 274 bp, Homo sapiens
agatgtgagagaaacagaagaacacccaatcgtctatcagggaactggtattaatcagccagatttaaaattttatttattatttttttttgagatggagtctcactctgtcacccaggctggagtgcaatggtgcgatctcagctcactgtaaccgcctcccggattcaagagattctcctgcctcagcctactaagaactgggattgcacacatgtgccaccacgcccggctgatttttttgtatttttagtagagacgaggttttgccgtg

SEQ ID NO: 701471 - DNA, 886 bp, Homo sapiens
  misc_feature (68)..(68): n is a, c, g, or t
  misc_feature (141)..(141): n is a, c, g, or t
gtttttcaccctgtggcggtttacgaccccccgctgggtgaaaactttagcggggttaatggtaaacntgccacgacgctggtgattgaccgcggaaagccgtcgcattagggagggattttggggaacccctttgccccnccgggggtttgcgagattacgcgcccccgcccttttagtaactgaacccgcgctgtaattttgtcccccggagagcccgcgtttccgtcgtgccccaggagtgcggggccccagagctctgcccaaaatagtcggccttctcccccgggcaaacatccaggacattggcgcgcagcaactggtcacgcccgaagtgtttgggcccctaaaacgcgggatacacccccccgaagtgacaccgctggccccaagagaggtaaaaagtattggcagtaggggaaacaaccgggtaaaagccaacactggaggcagagaaacacaatgggggatcactccacacacgagcatagtgtcccacacaacctattagaaatgcttacgctgcaaagatgctcaaagtggtgacggaggaaagattaaccactctatgcgcaacgttccttcggcaaggcacatggacagccaccactagtatatgaaacgatacatgaagtaacttcgctcccccacgtcattagtacaaaagaaagacagcacagggttgtcaaataatgggaggcggaaaccacccagttgtcggcaacacgcactccatggggcgccagcccttcgggagagcgggtgtaaagatgcttggtggtaacagattgcgtcgttcctacttttgcccaagggagcttgtgtgaaagtcaatcgcaccccgcataatcccaaaaagcccccttcacctgttcaaacatagaca

SEQ ID NO: 701472 - DNA, 161 bp, Homo sapiens
cgttccatggctccccatcgccagcccccccacgcccaccaggtaccgcctagccacactgcactgtggccccttgggaagagctcttttctcaactacttgaatggtcctaccaaagtgtttgatatgggcaagcaagggtttaacttaagcctaattcc

SEQ ID NO: 701473 - DNA, 579 bp, Homo sapiens
taagactccagcctgagcaactgagcaagacttttcacagtggtgaagagagcaagagttgtgcagtggtgccatcacagctcatgcagctttgaactcctgggctcaagcaatcctcctgcctcagcctcctgagtaactaggactacaggtgcatgccaccatgcccagttaattttaaaaatattttttggccgggcaagctggctcatgcctgtaatcccaggagttcaagaacagcccggacaaaatagtgagacccagggtctacaaaaagagttttaaaaatttgccaaacatggtggtatgcacctgtggtcctagccacttgggggctgaagtagggggctcgcttgagactgaaaggttgaggctgcagaaagccttgactacgccactgcactccatcctgggtaaaagagcaagactctgtctccaaaaaaaaaaaataatccaacaaacaaaccttttttttttggtagagaaagggtctatgttgtccaggctggtctcaaactcctgacctcaagtgataattccgcctcggcgtcctaaagtgcttgagccaccgtgccaggc

SEQ ID NO: 701474 - DNA, 431 bp, Homo sapiens
gagagagagagagagagagagagagagagagagagagagagagagagagagtgagtgagatatatctgtctactcgctccgttctcttactcgtttttgtttctctctttcccctaactctttccttctccttctcttttttcttcctccttctttcctttaccctcctttttctcctcttttctccccttttcttctctctctttcctttcttccttcttttctcttctctttcttctctttctctctcttcctctccttcctctctctcctgctgcctctttttatcctactctctttccttctcttccttttctcttcactctctgtacctccttcttatcctttctttccttttctctctctctctcttcccttctctcttctccttctcttcaccttttctctccttctatcttattattcgttcc

SEQ ID NO: 701475 - DNA, 447 bp, Homo sapiens
tacacagctattacagggctgctattttcataatgtacatgaacaatgtcagaacttttttaattttttggattattattagtattagtaaaggaagtgaaagacaggattgccttttatagattaaacgtttaggccattattgaaccaaagaatcctggcatatttcttacacttatggccatttacttattgtatttattttcagtagtaaagaccccgcttggatgttaattttgtattgtgtaagtattaagaacattagtgcaactgtacaggttgtcaccagttattgtgatattgattaattatttggctattttgatgaagaaaactttgttcatttgtttctactttcttagagaaattggcacgattcctcctcttttcaacatttcgtatgacttttttttcgggtgggaattaaaagctgtgaaattgttcaaa

SEQ ID NO: 701476 - DNA, 351 bp, Homo sapiens
  misc_feature (348)..(348): n is a, c, g, or t
attttcctttttatggtgatgttgaattgaggagagattgttccctgcctacatttattaaaagttaaaagaaaatccccagcacccttgggaggccaagacatgtggatcacttgaggaaggcccaggagttcgagaccagccctggccaacatagtgaaaccgtttctgtactaaaaatacaaaaaaaattaggctggcatggtggcgcatgcctgtagttcctagttccagctactcaggagtctgaggcacaaaaatcctttgaaccagaggaacaggtttcagtgagccaagaatgtgccacactgcacttcaagcctgggagacagagcaagactctatcangac

SEQ ID NO: 701477 - DNA, 184 bp, Homo sapiens
ggaaacaaaggagacgaggacgcatgcgtttggtgagtccggattctggtgggtcttcgctcaggctgggtgaagcgcttccgggtcgccgccggcagcagccttccggcgcgatgaagacaattaggctcagagaggttaagtgactcagccaaggtcaaacagctatctaggagccatgtcc

SEQ ID NO: 701478 - DNA, 753 bp, Homo sapiens
  misc_feature (358)..(358): n is a, c, g, or t
  misc_feature (392)..(392): n is a, c, g, or t
  misc_feature (401)..(401): n is a, c, g, or t
  misc_feature (419)..(419): n is a, c, g, or t
ctgtatccggggagtctgggtaggaccctgaattggctttcctgtacctggaggttgtgatttaatgtttttctggttgttgagaagatattgatttgggagttccatcctgctgaagcggatccctaccaggtccttgctgcttaggaatcggcttgggtggctgttgttgtaaaggaggttttatgatgtcctgcaggttttccttgctccttctgaaccactttttgtttcttggtggtttcttcctgggatgcctcagagtctgatatcaaatcaaaagggttgaatttatttacaacagaggaaacagcacttaaagcgttaacctctgagaggaagccaggcatcatactanacttgtgctcttcctttaaatcagttctggactntgattcttncaagctaatatggaaggnctcctcccaggcaatttctgctctgacctgaaagtgtctgtagttctacttttactgagaccaggttgagctggacgcccagggtccgggggtcttcctgattgctttggaggatgactactatccaactcttgtttcctgtgcatggaaggcgactccgcagcggccggggggacgcttcccttgggcagcccctgcgcccttgacatgacagcggcgatctgtctcctctcctcttcgctcagctggctcaaatccgcctccatgccggccgggatcgcggtgtgagaggggctccccgccccgctagctcctcctccagccgctgcggccg

SEQ ID NO: 701479 - DNA, 135 bp, Homo sapiens
  misc_feature (63)..(63): n is a, c, g, or t
gctcactacgctggtcccgacgatggggccgtgccttgacaccgcgtcgcggttccgcggcgntcggtgacgctctcgctggcccttgacaaactccgggggacgacgggtgtacacgctcgcacgctgcggccg

SEQ ID NO: 701480 - DNA, 616 bp, Homo sapiens
tccggtaggaaacgtctcgtggacagctcaaagcttaaaaaaaaatttttacccttttttaaaaaaacatttctgccccctcccccattgaacgggctccagggcagctcctttcctgcagggggcaggggaagagggccaccagggcagtgcctgttttcttgaaggcaccgaccctcctcctccccatgtccctgcctccagttccaattgcaggggtccaggtggcaggcccctctggaaaggaatgggtcttccccaagtttccaccccacccttggattggggccgcaggtgtggagggcctcatcaaactcttggggacccccaaccccacactctccggtccatggtccatgccgaaaccgcaatgtgcaaaatgtgggtgggggtgggcccaggctggcccggtcgcgggctaaagtctggataagttcgctgcccctggaggaggacccccaagggcgctagatgtctctagaggctgcaaagtcctggcctggggctcctcacagccccttaccccacaccgaattttttttttttttaaacaacacaacacaaaccgtgggcaacgcccacggcgggccaagggcccaaacttgggcgcaacaca

SEQ ID NO: 701481 - DNA, 685 bp, Homo sapiens
  misc_feature (365)..(365): n is a, c, g, or t
  misc_feature (388)..(388): n is a, c, g, or t
  misc_feature (395)..(395): n is a, c, g, or t
  misc_feature (457)..(457): n is a, c, g, or t
  misc_feature (555)..(555): n is a, c, g, or t
ggtggcgatctgaggtggaggcaggctgcggtccatgacggcagacagtagagcagtgcgtgcgccatggcagaggcttgcaggatccctgctgccttggtgatcccgggctgacagccagagagcacaacggctcaggtcctggatgaagtggacgggttagaatgaaagcaggagagtgcgacgcctgtctgctgcctcagcttgggttccactacttaaggtgcggttcctcgctatcgggtgccctggacagccttggtgaatggcccatgcaccgtgcagtagatcagtcgtgattagctcatcctaggtagtgatagcttgccagtctcatccctcggatcctccgaagaccgccgtcnaaccacgcgacccttgtctgtgnttcagcnctgcttcccatgtgttctatgggggctatcctaccatgctctcagtgtatccttcgcttggnagactgggacagccgtgtgccggcacatcttggtggcctttgaggtgttgtccctgggtcaagcgctcgtgttctaccgttatctctcgctagtatgnctcggtggcgcgaagaactgtgttccctgttaaccatctggcatcgcgagttaccaccggcgttccgagaactcgagccgacagtgaattccccgggtcgattgttggtgaacatacctaaacaggacaa

SEQ ID NO: 701482 - DNA, 743 bp, Homo sapiens
gctatctgtgcgtgatacaggtccttattggtggacctgatggcatgtcttgcccgtgatcaggtcctccattggtggccctgaggcgatgtcttgcccgtgatcaggtcctccattggtggccccccaccacgcccggggcatgcttttggcggggggggctgatgcaaccttttgttccaatagcatcagcttagcctgggttccaacatctcctccctttttctttaaaaaaagaggaggcggaccttaaccagctaggggaggtagaggctgtgctcctcctgagccttaattttcaggcttacaggtaccttttagggaggagaggatttttcgagtaccaacctctatgcaagccagcttacctctcaggagactcgacagtagccttagtaaggactctccttgcagtgccttgctttgcacctagcggtgtccattaccttcgtaaaagcatagtgtcgagcggtatgctgctcccgtaggaggggaaccggctacagtctgccatattctagatcacgtgttgctagttggtgatagtggatttgtatgggctttcccagtagggaattgagctgatccctgattaacgctgttactcgtcttaggatccaaggggcaaaagagaagaacaggatgatagcgaataagggtccaaggaaggggaggaggtaagggagaagtccattgaggccggtgaggaagggattgtctgcaagtgccttgcgtctttgttc

SEQ ID NO: 701483 - DNA, 135 bp, Homo sapiens
ggactatttaacagaaacccaggccaagaccgaagtggaaccagagagataggagttgtctgtgatcttctacccagccaaacggcaggactcgtgaaattgtgatgccttctaggaactacacccatacacaag

SEQ ID NO: 701484 - DNA, 652 bp, Homo sapiens
ttgcactgtaagtgctcggagacctggtgtggcaaatcatcttacctcttcatgctagatccatagaggtactcttcagcagatctttcgttcacacgaagtccacactcacctgttctccatgcagttctgcactcggagaatatgctgcctcaaagaaaatcagccttttgctaagatcaagcctagaggttagcattctcgttacaaccttacaggcgcctaatgcattcaagtttgaagtcgactgcctgatgaggccctagcagagaggcagcacgccccagtcaggtatatgggaattttcatcccatgtaggaatctagtgccatcctatgtctatctgtccaaccaggccttcatctccagttgtactacaaacctccttgtgtaagaggaaatatactttgcacgattaaggcttacacagtagtgctttttcctgtcacttggatttgcattcgaacctgcatttcgaagattttttatagcatgttttctgatcttcgctgacaatcgtcaggaggctgtcattgacgttgtagtctgtgcttaataaacttgcgtatcactctgctctgatccccacggaattaacttagcaaatgaaatgatatgttgggactttggcataatttgatatagcattgtt

SEQ ID NO: 701485 - DNA, 674 bp, Homo sapiens
  misc_feature (422)..(422): n is a, c, g, or t
  misc_feature (450)..(451): n is a, c, g, or t
tcggtacaggttgttattactgtcggtattctcttcatgtggaccattctctcagacacacaagacagaaacagtagcctttttgaaggaggaggtaaggattagattaacaagccctccatttatggtggaggtgcctgctccattaatccaatcaactcaacctttaaataacacttgtgcaaatatatcctggatgacacttgtgagggaaatgtggtaatctttctggacttttacaacacaaaaaattggaatgcgttttatcacaccaaagcaagctggaaagggtaatttggatttcacttgtggcatgctccatagtaattttctgtaaacgaagatccaatttttagggtgggggcaaatatacaaggtccaatgatttgaaagatgtttaatatttttttctccatgccttncaatttttcagcccaatgggaattcttnncttggaccagtctaagaattacagaattagagatggaaatattaggtatttaagctatctttctgtgatgaggggtattcctggagtccaattataggcgtttctgagggtgctttgacaatgggctttatagatgaaccgcgtggaaaggaaccctttgtgggtttagacaggctaacttgggagaccgggaactttggtaccttggcaggccgcggtggtt

SEQ ID NO: 701486 - DNA, 1161 bp, Homo sapiens
attgttttcgccgatgtggttgttttccgtgtgtgcctctcacttttggtcggtcctctgctcgacgtgttggcagcccactggggtcttctccacacactgccttgtgatcttgtgtcgcccccgtctcagcagtttttcgtcgcctgtagtgttgcgccgcgtccgcgtggtgtttttaaggggtcgccaccacactgtgtcaccccacagtaccctctcctttgccggggaaaatagcccctggggggctcctgcccccccccaagggccccctttcgcgggggtatcctttgtgggctgtgttgctgctactcgcgcttcctcggtgcccctcccttgtcgacgctccctgtagtctgcccaatgccgggtttttacctgattgggcccaaaggtggctcgtggaagtggaatcttttctgcctgcgcaccaaccaaaggggaagctcgcgggcccttaggaaattggacccacatggcccatctagtcaaacctgttgtccacccagtgtccgcattgttttgcttcgtttttttgaggtggaggttggagtgaaccgagatcatgcgtactgcgactctccagcctgggctacaagagtgagactttccacagaaaaataattatatataatatagaggaaatagaccacaggtttcccggctggtcaaactcctggcctcaaatgagtcctcccaccctcagcctcccacagcacaccgggagctacacggcacaacactcacccaatgtccacagctgtccccacgctttctaattctggtctattctttgtgccccacgagaacctcaagaaaggcactgataagccacgcccctgcagtgccgtccacccgcccctttgggcctgcctgtggctcttgttgccctcctcttgtggcggcaggaccctttgttggggcttctgtgcccatgcttttggggccccaggcggggctggtccacaattctccaggcgcccaacagccttcaaagatgggtataaggagcttgcccgtcccatgggccacccacaccattggtgactctgcgcccaccaccacccagccctgtccctgcacaaccctcctagtggggactagtgaatgacttgacctgtgacctccaataccaataaatgtgatccccccacccca

SEQ ID NO: 701487 - DNA, 385 bp, Homo sapiens
gctagatagtctctagtcttgtaatctggctcttagcaccagcttaccttgaactataaacactcaccttacttaatcatccttctgcaggactctgatgacacagaatagaggagatgttcgaagtctctaatctcatgatttcatgggtatagtaaaccttaacatgtgccaagccctcagcctgtccagactcactgcactctggcagtcccaagggcttccatggaattagtcaatggtatctaaatctcttagccaacatctaactctactaccttaagaaggtagttacggtcaggttgcagtgcctcatgcctataatacccagcactttgggatgcctagatgggtggctaaactttaggtaaggcgtttgagacta

SEQ ID NO: 701488 - DNA, 1223 bp, Homo sapiens
  misc_feature (1)..(1): n is a, c, g, or t
ncgtcgctgtgctcactccgtcttcctcacgcgtcgtctgcccgattcttttctttcggtctctgcccgtctttgtttgtgtcttgcgctcgtgttgtgtgcgtcttgtgctgtcgttcttgttgtctgcttccccccccttcgtgtgtgtttctgctgttgtctcttgtggttgtcgccctcctttcttgctctgtttcgctcgtgtgctgtgtcctggtcgcgcgtgccgttggtgtctcggccacccgtattttctccctttgtgtcggttatatttggtcctggtcgctcctgtgtgttgcgagtgctgcctgcttcgtgttggcatttgtgtctggggctcgtgcttgagtcatgttctggagtggggttctcggatagagctgttcaccatgtctttccaggtccgttcatgttgggccttggtgtattgctggatgattgtctgcttcttcccttcttttcctatcactgtaattattgcttttactatttgagtgcctttatgaatagtttactaattactatgtatgtatgcatttctgtttaagtctcatctgttatgattggatacttggtcttgtcaagtagtggtcagcattgggttgtgagcttgtcctactccatacgtgtttatcctgctatgcagttttacattgtgtgttcactatctattccaaggagccttgctagattactactactggcggttcctgctaggtcctaggctaggctattggcccttgtctgtgtccctataggtagcctatgattagttacgttagcttggtctgcttagcctagccgtgtgtgttgtgcgctaggctctaggcagcctctgcaccagagtcctagcacctgcccattccccagtcacactaatcatactcttctttcatagagattttattaccgacttagacctaccctagttttcctctctgttagtgtcctgagctcttttgcaacaataatgtaggtacagaccatatccctgtcccttccccaatcaggagctccactaccatgtagttgtttggttttccagaagctgccagtgggttcccgtgaattgcgttaagatatcgatgattttttttattgtttttcttcttgtttttttaaataatatatttaaaggcagtatctattgtactgtgaatttgcagtagaagatgcagaatgcactttaatataccttgggatgagtgtgtaattgg

SEQ ID NO: 701489 - DNA, 493 bp, Homo sapiens
  misc_feature (23)..(23): n is a, c, g, or t
  misc_feature (114)..(114): n is a, c, g, or t
  misc_feature (161)..(161): n is a, c, g, or t
  misc_feature (174)..(174): n is a, c, g, or t
  misc_feature (186)..(186): n is a, c, g, or t
  misc_feature (199)..(199): n is a, c, g, or t
  misc_feature (219)..(219): n is a, c, g, or t
  misc_feature (224)..(224): n is a, c, g, or t
  misc_feature (236)..(236): n is a, c, g, or t
  misc_feature (268)..(268): n is a, c, g, or t
  misc_feature (278)..(278): n is a, c, g, or t
  misc_feature (283)..(283): n is a, c, g, or t
  misc_feature (307)..(307): n is a, c, g, or t
  misc_feature (312)..(313): n is a, c, g, or t
  misc_feature (317)..(317): n is a, c, g, or t
  misc_feature (331)..(331): n is a, c, g, or t
  misc_feature (333)..(333): n is a, c, g, or t
  misc_feature (335)..(335): n is a, c, g, or t
  misc_feature (350)..(350): n is a, c, g, or t
  misc_feature (363)..(363): n is a, c, g, or t
  misc_feature (376)..(376): n is a, c, g, or t
  misc_feature (380)..(380): n is a, c, g, or t
  misc_feature (388)..(389): n is a, c, g, or t
  misc_feature (418)..(418): n is a, c, g, or t
  misc_feature (486)..(486): n is a, c, g, or t
tcataacccccatctttttaaancaagcccctcctattgtactctttgtaaaaatgcattggcttacctcgggctcttcgctaggaagaaaaatgtatttcatattttttaaanaaagccacgcccaccccctataggaaccagcccaccaagtggttatnggtgtaagataantttacataaccnctttttttttttngcgcgtttggtgggctgggngtagnaagggtggtgtntagtgtaggtgtatcccgcaatgaaggtgtanggccccgggngcccnagactacctgtgtgtctggttttnaaaannaaanggcgggtgggtttngngngcggatgggctgtgnggaaacgcttagngctgaagggaaangggngaaagtgnnttgcagaggctcgagatttacggggaggncggggatacgcgatgtacccgctatataaaagaaaaaaagagaacccgcatttattctccgcgcgggngggcccc

SEQ ID NO: 701490 - DNA, 202 bp, Homo sapiens
gcgggcacactcaagattatggtggacccacaggaggtgtgcccatcccagccctcactgggtgcacgctctctctttcttctatcatcctatactgccgcagacggcttctcgtcaattgtatgttagcttagctcttcaccagtgggcaacagcaacacactcattgcacgcaccttccaccactcgcaccatcagcaca

SEQ ID NO: 701491 - DNA, 296 bp, Homo sapiens
tccccaggcttggcagaccccaagttgagaacaataatgaacaattattgtatgaacaattgttagagacagctaatcacaaacaacctgcgggcacaatgacctcattccacacgtagcacccttcaacaggaccctataaaactttcctccagcccttgcctctttgcaggtagccccttctctgctgagctgcccactgcaacatattttcacaatttctctaataaatctgcccttctttacctacaactatcttggtaaatggctttaccacctgcaaaactgaccctagg

SEQ ID NO: 701492 - DNA, 384 bp, Homo sapiens
ctcagcctgggtgagagagtcagactccacctcaaaaaaaaaaggagagagagaaaagaagaatcggcatacctgtaactcctccctctcaaggtttcagtccatatctcgaaaggacggtatgttactctacacaaccacaactcattaccagatttaagaaaattacccctccaccgcgcggtggctcatgcctgtaatcctagcatttggggaggctgaggcaagagggttgcttgagcccaggagtttgaaacaagcctggacaacatgggaggaccctgtctataaaaaattagctgggcatggtggcacacgcctgtggtctcagctatttgggaggctgaggtggtaggatcactatagcccagaactccagcctag

SEQ ID NO: 701493 - DNA, 919 bp, Homo sapiens
  misc_feature (120)..(120): n is a, c, g, or t
  misc_feature (610)..(610): n is a, c, g, or t
gaaaaaagtggccgggcgcagtggctcatgcctgtaatcccaacactctgggaggctgaggtggacagatcacttgaactcttgggctcaagcaatctgcccaccttggcctcccaaagngcctggcctcactcccctttttttaaccacacaatttgttcaagggtatgttcttgtacaagattcaaggggtgcagaagtaaaacatggaaattcgccctccccagagctcacctctgtggccagcggggtgcagacttccagccctctgcgtgctcatggtcgtaacatgtgcacctaaacacacgtgtttgtgaaacattgtcctgccgtggggaacgcaatgggcacttccagggcgctgtgcccctgccaggctggaatcttgggcccctcttgttcacatacagatacacccctgatgcctgatgtccagtgaggaaccaaggctgcggggaagggtggccccaccttcctcttgttatcaggcctcagacacactaggaggatggaggcgagttctctcagctgcccatcccactgaggggtgcccggcgtcagtgtcttgtctgcacttacgtcccagaacctctagagcttgcccccaggngggcactgctgggagggtgcgagcaccgctgcggcaccagaggccggttcttggctgatcttctggggctgggactgcctgaggtggtggggacaggtgtgggctgggcctgtggggggtgctagggcaacggacctacacaggcgccgaaactggaagtctcaggcactgggtcacatagtgatgaccattgttgtaataccgccttcgtctaataactaccggaatttccaaatgcctggccaagaaaatttggagtttaaaatcttgtctccgggatgagaaagcgagtggagtttgaaatcccaa

SEQ ID NO: 701494 - DNA, 945 bp, Homo sapiens
  misc_feature (146)..(146): n is a, c, g, or t
  misc_feature (636)..(636): n is a, c, g, or t
ctgctccgcccctctctgcctcccaaagtgctgggattacaggcgtgagccaccacgcctggccggagacggggtttcactatgttaccctggttggtcttgaactcttgggctcaagcaatctgcccaccttggcctcccaaagngcctggcctcactcccctttttttaaccacacaatttgttcaagggtatgttcttgtacaagattcaaggggtgcagaagtaaaacatggaaattcgccctccccagagctcacctctgtggccagcggggtgcagacttccagccctctgcgtgctcatggtcgtaacatgtgcacctaaacacacgtgtttgtgaaacattgtcctgccgtggggaacgcaatgggcacttccagggcgctgtgcccctgccaggctggaatcttgggcccctcttgttcacatacagatacacccctgatgcctgatgtccagtgaggaaccaaggctgcggggaagggtggccccaccttcctcttgttatcaggcctcagacacactaggaggatggaggcgagttctctcagctgcccatcccactgaggggtgcccggcgtcagtgtcttgtctgcacttacgtcccagaacctctagagcttgcccccaggngggcactgctgggagggtgcgagcaccgctgcggcaccagaggccggttcttggctgatcttctggggctgggactgcctgaggtggtggggacaggtgtgggctgggcctgtggggggtgctagggcaacggacctacacaggcgccgaaactggaagtctcaggcactgggtcacatagtgatgaccattgttgtaataccgccttcgtctaataactaccggaatttccaaatgcctggccaagaaaatttggagtttaaaatcttgtctccgggatgagaaagcgagtggagtttgaaatcccaa

SEQ ID NO: 701495 - DNA, 588 bp, Homo sapiens
  misc_feature (109)..(110): n is a, c, g, or t
  misc_feature (113)..(113): n is a, c, g, or t
  misc_feature (121)..(123): n is a, c, g, or t
  misc_feature (137)..(137): n is a, c, g, or t
  misc_feature (152)..(152): n is a, c, g, or t
  misc_feature (158)..(158): n is a, c, g, or t
  misc_feature (160)..(160): n is a, c, g, or t
  misc_feature (163)..(163): n is a, c, g, or t
  misc_feature (172)..(172): n is a, c, g, or t
  misc_feature (185)..(185): n is a, c, g, or t
  misc_feature (205)..(205): n is a, c, g, or t
  misc_feature (209)..(209): n is a, c, g, or t
  misc_feature (216)..(216): n is a, c, g, or t
  misc_feature (230)..(230): n is a, c, g, or t
  misc_feature (248)..(248): n is a, c, g, or t
  misc_feature (262)..(262): n is a, c, g, or t
  misc_feature (278)..(278): n is a, c, g, or t
  misc_feature (312)..(312): n is a, c, g, or t
ggctccacttgactgcagggtgtgtgacgtgagaggaaaagattgatctccgttctgggtaaaaaggtggcaagaggccctaaattcttggagtctgggagagctgccnntgntgatatgnnncctggaagccatgngtgttgagagctttncagacnanccncctttgggncgctttgctgttngtgatattaaacaaacgttncggngggggtnatcaaaacagtggncaaaaaggctgctggagntggcaaggtccccnagtttgcccagaaagntcagaagggtaaatgaatattatccctaaaaccngcccccccccttttaatcagtgggggaagaacggtttcagaactgtttggttcaattggccctttaagtttaggagtaaaagactgggtaatgataacaatggctcgttaaaccttccaaaggaaaggagaatgttttgtgggcccccttgggttttttttttggggggggcaggtttaaggtattaggttttaaaaacaggactttttaatgggaaccacttggcccaaaatttgtcccagaatttttgggcccctttaaaaaggttaatgggga

SEQ ID NO: 701496 - DNA, 1053 bp, Homo sapiens
ggtcttgcttgcctcaaatccaagcagtcttgaacacttggaggcaattaatgagtatatcttagtcaaaagaattgttggagctttttattaaagctgcagtttcagttctgctttggggaatgtgctatgaaagcagctgccaaaataagctcatttattttcttcaatcccactcagtgctcagtcactatattctgtttccttttttttttttccaagtggctttattgggttcccccttatgatggggaaagatgattttccagcagaaaacagggttggtccactttcaaagagtgatagtttctaaaacttttagagcaataaatattcatcagaggtcccaagtaagccagcagaagagttacgggttagagaaatcccttattccatgtctggactctaaatggatcaaggtactttccctgtgtaagggggattcttctaatggggatatgcaaaaacttcagttatacgtagtaagtgctagcaggtaatttcaggggcctttcttataacaacgtgtcacttgtgtttgtgccacattgtcgagttggtccagctatttccaaatatttccccaaaaaagggggcaaagggtaccaagctttccaatgagcattaaccctatttaactgggcgcaccgcatgtttgaacgaactcctattaaatcaggtcccatttggcactaagggttggaccttaacccacccattggggagaattggggacggcaagtttttaaggaaaatctcgttaggcttagtaggagtaccccctcatgtgggagcttgggtacttccaactacgctttgaaacgcggcttgggtgcggctattaaaaagcgctagggtgagaatgggcggacaatgggtcgtagactccatatacgcaaagaaaggggcagaacacacttcgtctttttccacgagacaccacacgcgatatggtggtacaccccacattgtagaagacgacagttgatcgcccttgataatacaccgtgcgttgtctctgagggcaacccactctatcacagggggtggcgc

SEQ ID NO: 701497 - DNA, 778 bp, Homo sapiens
gacatttgtctctgaaggaagagaatgaactcagccctagtctgacagtcctagattttgctgtgacatagagagtagttcttcaagcattatgtgctcacacgtcacataccagtgagggttctctgcaggggtataggggttatcgtgaattcgaaagtttatttcaaggcctcttttggggtagaaacaattgaagaggcagatgagcaacagagtctggcaagattagctggtccagattaacgaatattaaggaggctggtgaaaagttagcttgtagaagatggacgttatccttaagtttgaatagagttaggaaatcctagaaatggttaggcttcctgcacaagtggctatgttcatttaatggctagtgaaccatgggaatgtattttaatcctcctagctggtggtacgtgttgggctaaacgagactagaagtgatttgagaggggcgaagagaataggcaggacattccttctatagctttacatattgtagaatgttaatacttaagtgacgattgaagttacctgtgcagatgatagagtaagaggcattattagtatcagtgaggggaatagggaggataggatgcgggccttcttcaggcagatcttgctccgaggacatgagattctatgtgtgataggtgggaagacagaaaggactcggaagaagaattgggcatatgcctacagagcataagatctgtggaactagaatggttttactttgtgaagctgctatttaacggaaagattggatatacag

SEQ ID NO: 701498 - DNA, 1001 bp, Homo sapiens
gcgcggagcaaagcgctgtcactgtggaaaggggagcaagctcggtgaaggcccagtcgtagaccggacaccgaggcgtgcaggaagacccggcttctcgggtctgcagagggtcgggggcggtagcggtgtccttccgtgaaaggggacagtgtcgcgcttgtgcttccctggtggtagctccaggctaccctgaggttcggagattcttaatttcgacacttggtatattatatccccccaaaatgtgaacaaggatcactgttgcgacaccgtgttatacccttttctaactttaagggtcaggcggtaggctggctcgttggacacttattcttctctccgcggcacattggcgctcttgtgtagtgcgtgttgtacgggtccattcccaggcgactggttgacaaggcttcaagaaagaccatcaggcagggcccttgttcctgagaaacttgaccatttcttcctcacacaagccaacatgtgtcattactcatagctggttttaccgcaattcattaggtcattccccaataaagtgtgtcacctttgaagttgattacacaattactgggggagacggactcagaattgtaaaggcaggcaacggcccccttcctgtagggaaactccagcgccaaccacttgagattacgcacatgtgacttggctgcaaaaggtggacttttccacctctggtgggcgactgtcaggtgcatccaagcctgttgcttcatgtggtgaccgaaacattctgttatcaggaagtggaacctcgccaatttggatcatgggcagatttgatcaggttcgccaatgagtcattgatgaagatttgtgagaatgatccaacctttggctaataaggagatccgttggaaataacacataagaagtatcacaatgagcaaagatagataaaaaaaaagggggttcaaaataacaggagagaagaacgttttagtaggagcagagagtgataaaaaagagcgaggaat

SEQ ID NO: 701499 - DNA, 530 bp, Homo sapiens
ttcaagccgattcttgaggatacccgctttggatccgtcctattgtgaacaactggtttctgttgagcttggaaccacacatgttccggttgttcagaagaaacgttcccacacacaatggaagtgtcaagagcagccggggtgggtcagtactcttcctgctgcgggggctgctgttcgtgggcttgctcctctgctaccggctcttctgtgtggccctcgtgttctgctgaagcatacaggatgtccattagtctctgcacgaggtcatcattttcctgcccgtgttcttggcagagtagctcgatctctctcaacttcccaaagtagaaatccctttccttttccacgccttcaagggcaagttttaatgaatgtacctgttcattaagctgtatgacctgcgtttctaaatctttatcggatttggatgctgagccactgaaagaagcccttttggctgatgagggtcgagaaggtgtggatccctggtttagctgctggacttgatttagctgcacctgctgtgg

SEQ ID NO: 701500 - DNA, 138 bp, Homo sapiens
tggtccgtcgtttacaacgtttgtgactgtgacgacctggtgaggcaggagatggcttgagccaagaggttgagactgcagtgagccaggatcatgccactgtactccaacctgggtgaaagagtgagatcttgtctc

SEQ ID NO: 701501 - DNA, 342 bp, Homo sapiens
aaaagaaacaaccgattgaaaacataaccattacaggagctgggacacttaacagatgcaaatgtgctactgattgttatcatagcagaatctttattatagacataaaatttactactctttttgttttttgtgttttgttctttaaagtcaggtccaatatgtaaaaacagcattgctttctgaaattagggcccaattaataatcagcaagaattagatcgttccagttcccacttggaggcctttcatccctcgggtgtgctatggatggcttctaacaaaaactacacatatgtattcctgatcgccaacctttcccccacaacttctaaggttaag

SEQ ID NO: 701502 - DNA, 142 bp, Homo sapiens
attatgttatagcccatatgattatcaatgatgagtatggattggaagtattggttatggtcatggtccggagagtatatcgtgaagaggatagctattagaaggattatggcatgcggttcgcttgcgtgaggaaatactt

SEQ ID NO: 701503 - DNA, 209 bp, Homo sapiens
acacgggggaagttgtgagtgtatatagatgtaataatgattataacaccgggggaagttgtgagtgtatatagatgtaatgatgattgtaacaccgggggaagttgtgagtgtatatagatgtaatgatgattataacaccgggggaagttgtgagtgtatatagatgtaatgatgattataacaccgggggaagttgtgagtgtata

SEQ ID NO: 701504 - DNA, 1058 bp, Homo sapiens
  misc_feature (225)..(227): n is a, c, g, or t
  misc_feature (382)..(382): n is a, c, g, or t
  misc_feature (1047)..(1047): n is a, c, g, or t
gcttctctttcccatcttgcaagatggcgggtgaaaaagttgagaagccagatactaaagagaagaaacccgaagccaagaaggttgatgctggtggcaaggtgaaaaagggtaacctcaaagctaaaaagcccaagaaggggaagccccattgcagccgcaaccctgtccttgtcagaggaattggcaggtattcccgatctgccccccccaaatttgggttannnttcccctaaaaaaaaaaggggacaaaggcccaagtttgggttttacaagaggaagtactcagccgctaaatccaaggttgaaaagaacaaagaaggagaaggttctcgcaactgttacaaaaccagttggtggtgacaagaacggcggtaccggntttaaaaccccccccccgggagggcgggctttggcgggtggttaaacttcgcaaaatgcctagatattatcctactgaagatgtgcctcgaaagctgttgagccacggcaaaaaacccttcagtcagcacgtgagaaaactgcgagccagcattacccccgggaccattctgatcatcctcactggacgccacaggggcaagagggtggttttcctgaagcagctggctagtggcttattacttgtgacctggggaaccccttccttgggggggtttccccctttccatggacctctggtcctcaatcgagttcctctacgaagaacacaccagaaatttgtcattgccacttcaaccaaaatcgatatcagcaatgtaaaaatcccaaaacatcttactgatgcttacttcaagaagaagaagctgcggaagcccagacaccaggaaggtgagatcttcgacacagaaaaagagaaatatgagattacggagcagcgcaagattgatcagaaagctgtggactcacaaattttaccaaaaatcaaagctattcctcagctccagggctacctgcgatctgtgtttgctctgacgaatggaatttatcctcacaaattggtgttctaaatgtcttaagaacctaattaaatagctgactacaaanaaaaaaaaaaa

SEQ ID NO: 701505 - DNA, 1017 bp, Homo sapiens
cgccccggggctccttctgtggcgtcgcccccctctctggccccgtggtccccagtgtacccgatcgcctcgcccctcgctctcgtatcgcttgtctcgtcggatcctcgtccttggcgcggttctccgctcttccgcgcttctgtggcggccgctctccaccttggtccgaacccatttcctaagtggcccctattcgtgcgcctcgtacgcttgctatgacccatatcctcccacagggcataccttgggatgcttctttcgcgaccacgacgatgctcgtgtccaatgtctcgtcgtgccttggatcggggccatggaagcggtcagctgcttgcagcggatctcatgcgtggtcacatcgccgagaccttgagatggacggcagccttggatcgcagggtccacgagccctgcggtccggttggagtcgccctggaccgggtccatgcacggtgctgtcgctggagtgcctggtgttgtcctccggaatgctggttgccggaactctgctatcccctggttgtctacctgcctgcggggcacctgaccatgctgagatgatacgcagcacaagctgctgcgacggaggcgaatggagtcgtcagaccctgattggggccgctcgatgtctggtgggcagcctcattggagcagtagtgtccccgtggcaaggtagcgcaagcaccatgtacgtgccgcacacctgggctcctggggaacagctgggtgcagaaggtagtcacctggctatgggtcttgctggacgagtgctggcctagagctgggggaggacacttcccaacagtgtgttgggagccgcaaggcccaggtccgcatgtgtgcactatatgcctccctggcactgctatcaggactgagccaggagcaccaatagcatgtgcccgggcatggcctggcagctctccatgacagggcagagtgtttgcccaccaagctgctagccctaggaaggtccaggagctcataatatcgatgtggccagtctgtagcgcc

SEQ ID NO: 701506 - DNA, 859 bp, Homo sapiens
atgtgctactgtcttgtgtacctcctttcaattttggcctgctctgtgtgtctccgttatttactgcgggtcattgggaccccgtggtttccccaaatgggccggcgcctcattgtgggaccggccccttccccgggaagccccattcccctttcggcccaattaaggcacattttttcttgggacacacccagttgaccattgggcagtacacatagttggcaacctaaacagcgttggacacccccgggggacaaaataatgccggggggaaccaaacaattagcccgccaactatatggtgacggaaaacacagcctgaaccaggggggaaccaagtgtcagcagccaaatgggggacaaagtggcaaatgagtcccgcgcgtaagcccggaccccgcgagccgcgggcccgctgcggagaataatgcgtggctcatatcctccgcgctccgtggaacaaccaacggacatggacacatgttcagagcccccgccacagtgcaagcacctcatcaaaaagctgtcgccaggaaaaaatcaggaggccccatttgttccgtctcataaacaacaatgtgccccactcgtccgtgccagagtatttgagaaaatcattatagctctccccgagaagcgagagtttatcggtgagaagagcacccaacccacagtattggtgaccccttctgtagaaaaatttgtatttcccgctgagcattttctcccaaagtcgagtattggaggaacgcagatctccacaaatagcggccatggggcgagtaatatcttcggccttcgtttcaaacacctcttttttttccccgaaaaaacaaacaccttttcatcaaaaataaca

SEQ ID NO: 701507 - DNA, 519 bp, Homo sapiens
ctgggctcctcggggcgcgccccaggtggtccgaagcccggtccgccctccacgcaggtgccccgcgctccccgctcagccatgtctgtcctacatgcctgcgtggctgctggtgacctggggccaacaggtggcatctggcgttggcccatcgctgctgcgaacttgtgtccgacatgttctcctgcgcgcgactgggtcgcgttgcatccacctggctgctggtgacctgttgtgctgctgtgtgtgcccattgggccgtggccctgttgcccagggccaggcctttgcccactgtggcctgcggaaccgtggtgcccccattagactgatccccgccagacctggcccgttttccccccgaagccccggataagcctttagggaggaacccgaggttttccgtagaacctcctcggaaaccggtttatttcggcccaaatgtggaagacgggcccaaagtttcacccgatgggcgccggcccaccacccggtttttggcccgaggcccctggcgat

SEQ ID NO: 701508 - DNA, 103 bp, Homo sapiens
aaaccctcagggggggggggtttcccccctcctagggggttcaaccagggtttgtgaggaaagccctcaaaaggggtttaaaaaaaaaaattttttttagcca

SEQ ID NO: 701509 - DNA, 1372 bp, Homo sapiens
  misc_feature (484)..(484): n is a, c, g, or t
  misc_feature (1328)..(1328): n is a, c, g, or t
tctcttttaatttttttaatggggtctcaaaattcctgtgacaaatttgtgtggctcaggttgtgtttcccatttaaaagttgttacgtgattttacaaaacttaattaactttaaaagctgtgccagcacgcataaaagagaaacaccaaagtgggctccccaagaacatttctctccttttccttctcgtgagaggctttacggaagcgccattgtgttattccaattatacaccaagtctcttttacactatactataacactttaagagtgcgcccaattgtgaacaccaacacagagtgtttcttgtagacaccgggtccttttcacaccccacgtgtatttaaagaagtgtggggtgtggcagaggtatattgaggggtataatattatctcctatttgacgcccttctctgtggagacttatctctgtggggcgagacctttgtggtgtgcatctgtgtgctcaagacctcccgagncagagccctttttctgttgttccccagctgtgcttgtgtggtagtgaaccccccccccacgcgcgaaactgtgctcgtgttcctcctatatatttagcgaaaaccaagggacaaagaggcgggaaaccccagagagtggttgggcaatagagatccgtgaagaaaaagctccttctcccaaacacaccaatcttgttgttgggtcctgtgcccccgagggaaaacccccctatatttatttcgacagcgaagtggggggacagctacttattaccaaccgagaaaatctttcccagagaaatattcttatgggcgcgccccgactacttctccccaagctcgttttttatacccccgagaaacagcgggggcgaaaatcaacaatccgtttttccacttctaaaagctcaccaagaccaaacaatcttttgcccatgtgtccaaaatgtgttttgaagcccccgggtgtgttgggcacaaaattaccccaaatatatcaccgcaggggggggccaaatttatggacacagggggagcaccataataattattagggggacccccgagcgaagatgtgcgttcgccgaaggagaaataattccacaccctgtgtgaaacactgatgtgataaagccccagagtggtgtatcacacagtgggagggcggcgacatacatatgagcaaccggagtccacccaagcacaaacgattgtttgcccacgaccacagaacacattcctctgtgagaagaaaaacacttatttttggtcatctttgtggacccccatgttttgttccccacggaagaagaattttctccacaaggagacgtccatgggtggnactttcgtcaacgagatatatatatcccagatgagtagaaatac

SEQ ID NO: 701510 - DNA, 232 bp, Homo sapiens
tcgggctctactagccctattcacgttcttggggaagaggaatgcatcaacttcaatttcctatttctataataccgggagtattgtggggaggggtcccacagaagggcagcgtgctgaagcgccggctggtgaagctggtggtgaatttcctcttctactagaaatacaaaattagccaggtagtggtggcaggcgcctgtaatcccagctactcgggaggctgaggtgg

SEQ ID NO: 701511 - DNA, 339 bp, Homo sapiens
caggacgtagagcttattgctttggagtggggggatgttgactgggttggcggatctattcgcattgttcgcgccaagacgcgagcgggaatgcgcatagatcctgaagacgcgagtgtcagacggacggtgaagttgttgaagcctgcgctggatgcactgacccagcaaaaggccataacgtttttggccggcgggcggatatacatgaaccctcatagtggccagccatgtgaagagtctggccgcatccgtaaaatactttggctgccagccatgaagaagtccaggagtgcgctgccggcggcccaataccaaaaatcgcaaaacctacgcctc

SEQ ID NO: 701512 - DNA, 153 bp, Homo sapiens
atatttacgtattgtaaccgattagtatcactaaatgattagaaataaaggtaagaggtacacaataagttccatataagagaaagcaacaatacgtgaaataaaatcttgggtttatggtcaaacacttccctattagagacaaagtgtact

SEQ ID NO: 701513 - DNA, 924 bp, Homo sapiens
ctcctcggtctgccccctcattaaaattcacgttcccaaaaaaaaaaaaaaaaaaaaaaaaaaaaaggggaaaaaaaaaaaaaaaaaaaaaaaaaaaatttggggggggcccggcccagagaaaagagttttaacaaacccatggcgtgggggcgccgggcgcccccagagtgagtataggagcgacacgagtggtcaaatggagttggtaccccagagagacaactcggggaacagaaacacgtgggcggtgggattctccccacacaaaaaaacagcgccgcggggcggagaccgagcggtgtgtgcgaaaaccaacactcacagggagggaagtgctgaggagacaagaggcgggttcaccacacaagggggtgtcaccagagaggcgcagactgactactacaaaaatataggagccccgcgcgggggggagtacagcaagctgacgacacaatgagagcagatacatacacgagaccaacgaacgatcgacagaagagcgcaggagagaagcaacatagagagacggaaaacagcacgaagcgtgggaatagcgtgcacgaggagagccaggaagagaacagacagactacgagtaccagtacagagcaggcagcggaagagaggcaggacgagcggagacgagccgagggagagagacagcgccaagacgacgggaacgagcgacaagagagtacgagtgacgacagcagacgacgactgcagcgaaagagagcacagcgacgagacatggcgagacgcggcgagcgagcagaaagaccagacggactgtagcaggaagagcaggatcagagcacaacgcagacgacgaccggtcagcagagagcgtacgggagctaggcgcgacgacatagacgacaagtgcaacacagagacacaaccagcagacagccgacgaga

SEQ ID NO: 701514 - DNA, 137 bp, Homo sapiens
ttttattttactcaacattcaataaagttctttttaacacacgccggctccgtcactgacctccctcaggactgggcaggaggaaaccccagggggcatctctgtccttgtcctcacttcagcagacaactcaacct

SEQ ID NO: 701515 - DNA, 364 bp, Homo sapiens
aagatgagtagactgaaaactgttggaggctgtgctgcagggctggggtacgtaggaccgtatgggctgtgaggtcagcaaaatgaaacagttcatgctgggggacaacgtagagtaatttcaatgagctaaaaaaaaaagagttgggggcttgctgagtggctgaaacgcttgctgccaaggctgacaccctgagttcgaatcctgggacccatatggtagaagcagagatccaactcctacatgctgtcctctgacctacgtacacataggtgctatagcatgcacacatccacacctatacatgcataccccaaacaaataaatgtaataaaaataattttcttttttttttcactttaac

SEQ ID NO: 701516 - DNA, 137 bp, Homo sapiens
ggactatcaagatgtctctcagtcataccataggagaatgaaagcgactcactgctccccatgcaagaaagtgctgtcgagctccagtggaggtcccatcacaagcacgaggacaagcacatgacttgcttgtaaag

SEQ ID NO: 701517 - DNA, 510 bp, Homo sapiens
  misc_feature (510)..(510): n is a, c, g, or t
tagctgcaggagcttttattttattttatttttccatatcccagtggcacctggaacgccagcgagacagaactgttcactcccctggaaagggggcctgaagccagggagccaagtggtctggctcggcggttcccacccccatggagcccaggaaagtaagatccactggtttgaaattctcgcttccagcacagcagcaatctgagatccacctgggacggtggcgcttggtagggggaggggcgtccgccgttgctgaggcttgagcaggcggttttaccaccacagtgtaagcaaagctgctgggaagttcaaactgggtggagcccattgcagctcaacaaggctgccgtgttcaaactgcgagattgctcctccctggacagggcatctctgtaaaaaaggcagcagcccagtcaggcttgtagcagacttaaacgtccctgcctgatggctctgaagacagcagcggatctcccaacacagcatgcgagcctgctaagggcn

SEQ ID NO: 701518 - DNA, 864 bp, Homo sapiens
  misc_feature (4)..(4): n is a, c, g, or t
  misc_feature (61)..(61): n is a, c, g, or t
  misc_feature (75)..(75): n is a, c, g, or t
  misc_feature (91)..(91): n is a, c, g, or t
  misc_feature (102)..(102): n is a, c, g, or t
  misc_feature (104)..(104): n is a, c, g, or t
  misc_feature (106)..(106): n is a, c, g, or t
  misc_feature (111)..(111): n is a, c, g, or t
  misc_feature (118)..(118): n is a, c, g, or t
  misc_feature (128)..(128): n is a, c, g, or t
  misc_feature (137)..(137): n is a, c, g, or t
  misc_feature (140)..(140): n is a, c, g, or t
  misc_feature (179)..(179): n is a, c, g, or t
  misc_feature (188)..(188): n is a, c, g, or t
  misc_feature (190)..(190): n is a, c, g, or t
  misc_feature (217)..(217): n is a, c, g, or t
  misc_feature (251)..(251): n is a, c, g, or t
  misc_feature (278)..(278): n is a, c, g, or t
  misc_feature (291)..(291): n is a, c, g, or t
  misc_feature (293)..(293): n is a, c, g, or t
  misc_feature (506)..(506): n is a, c, g, or t
  misc_feature (570)..(570): n is a, c, g, or t
  misc_feature (657)..(657): n is a, c, g, or t
  misc_feature (681)..(681): n is a, c, g, or t
  misc_feature (696)..(696): n is a, c, g, or t
  misc_feature (769)..(769): n is a, c, g, or t
  misc_feature (771)..(771): n is a, c, g, or t
  misc_feature (778)..(778): n is a, c, g, or t
  misc_feature (782)..(784): n is a, c, g, or t
  misc_feature (855)..(855): n is a, c, g, or t
tttnttcttattacaaaaatgtattaaataatgcagtttctggtgttactttgttgcatcntgccttccaccccnttgacaatcacaaaantattctccacnangntggcntattgcnttatcctcanttttatcangantgggtaaactgaggcaccaaggtagatagttgcactaantggttacanantgcagtggctcttgggagttgcccttntctgcctggccgtggtgggttgtggtggggaaangggctcagggcaggaccacggcataantgggaaacatctnancaggagatgggaaagtctagaagggaagacactcaaagtctggaagggaaaagtctttgggtgaggcagagattccactgccagctttagaggtgggtagaagaaaggccagttctggtgaggaagccctgatctggaggcctagtcggagacttcgctgtagtaatacttgtgggcagctggcgttgtcttccagccggccgcccggaactnaatgatctccagcagcagcagctgggccagggagctgaggccagttgggagcaggaagccatcncggatcagcacaaagagctcatccatgcgctgcccattcattttctccagctgctccccaacccggtgcagctgcagcaccaaacantccacctcctcctccttgctcaanctgtctggctgggcngccggaagaggcagtcatagacagggttcaccagggccatcatgggcatgttgttccccctccggtcgtcccngntgttgcngatnnnggtgacatagcagacccagccctgcagggagcgtgctcgcagctgctcccgagcctggtactcctgctgcngccggttgc

SEQ ID NO: 701519 - DNA, 109 bp, Homo sapiens
tgctcctgccaagtgtcttccctgatatgtgctgaggttgttgcttctctcccctagaaatcggaggagagactccacactgaggtagtgtttcttctcctccatgctt

SEQ ID NO: 701520 - DNA, 381 bp, Homo sapiens
  misc_feature (226)..(226): n is a, c, g, or t
  misc_feature (229)..(229): n is a, c, g, or t
  misc_feature (232)..(232): n is a, c, g, or t
  misc_feature (242)..(242): n is a, c, g, or t
  misc_feature (260)..(260): n is a, c, g, or t
  misc_feature (335)..(335): n is a, c, g, or t
  misc_feature (348)..(348): n is a, c, g, or t
tgtagagactcctcagaatctcggtactgcaacatgctgttggaggacctgagatgcaaccttgaccactttttggagaatgttcattctcccttgcttttggagatgcccgcccacttcttcgatgccaccggcatcccgttaaggccttggccgttctccaatgttcatggtaatcacttcgtgcagtgtgcagaacagctgtcactgtgtcatccgacatggnctngcnttgcagtgtngtgctgttgttccctccnggaagcctgtggactaggtctcgcatggcgtatttgccgatgagctccttatttctgacgtccaaggccatgttncgcagcgcagtgncaccgcgcacaccacaggtcattgtctattacg

SEQ ID NO: 701521 - DNA, 117 bp, Homo sapiens
tccagctggccccaaggcctgacgtatatactgtaaatgaaacttggttggggtcaagcttccttctttctaacccccagacttgggcctctgagtgaaatgtctctcttggcccgg

SEQ ID NO: 701522 - DNA, 555 bp, Homo sapiens
ccaggcgtcggaaaagagtacaatattggtgtcctaagacaccttcaggtacatcttaggtcatttacgctgctatctcgactgtcaatactatgtgcccagaggatattggaaacagaatcaggctttggggtgagccatagtaatctgcgtgaacaacacgatgcttaaaatataattcatggtggatatgtttacgatgaacgctttacacagctttagggacatccagctatgctaagtaaagtcttaggcggttcctttgctgatcagaagatctgccaaggctgcccacataggtacgaatgtgaagacatcttttacgaccctaacacgtagacacttagaaaatcaccaaaatcttcttgattcttatggaacagtctgtcacaaggagatttactagaaggtgcaaatgcactatcaatatgtgaccacatgccaataaacacggttgataccagttaatagcgctatgactgattacaagaacataccctcctgatcattgctataccacctaaagcgaattgactactgactggggaaagagca

SEQ ID NO: 701523 - DNA, 764 bp, Homo sapiens
  misc_feature (496)..(496): n is a, c, g, or t
  misc_feature (527)..(528): n is a, c, g, or t
  misc_feature (624)..(624): n is a, c, g, or t
  misc_feature (634)..(634): n is a, c, g, or t
  misc_feature (641)..(641): n is a, c, g, or t
  misc_feature (648)..(648): n is a, c, g, or t
  misc_feature (662)..(662): n is a, c, g, or t
gggtgtggtggctcacgcttgtaatcccagcactttggaaggccgaggtgggcagatcactggaggtcaggagttcgagaccagcctggccaacatggcgaaatcccatctctactaacaatacaaaaattcgccgggcatggtggcaggcacctgtagttccagctactctggaggctgaggcaagagaactgcttgaacccgggaggcagaggttgcaatgagccaagattgtgccactgcaccccagcctgggcgacaagacctcaaggcaggtcctttaggaggtattccagaagaaggctttgttaccttaggagaggcagcttcctgcatgttactgcctgtgaagacattcagtgggacaagatgtggaggtggaagacagtgatattaatgatcttgaccttgtgtaggcctaggctaacatgtgtgtttgtgtcttagtttttaacaaaaaagtttgaaaagtaaacaaacaaacaaaaaaccacanaattttaaaaataggagcttacaaaggccgnntgcggtggctcatgcctgtaatcccagcattctgggaggatgaggtgggcagatcactcgaggtcaggagttccagacctgcctggccaacatggngccccgtctncactaanactacanacattaggcctggnagtgtcgggggtgcctgtaatcccagctacttgggagcgtgaggcaggagaatcacttgaacctcgggccgagggttgcaggagccgagatgaggccattgc

SEQ ID NO: 701524 - DNA, 180 bp, Homo sapiens
ccacctgagtccaaaagctactaaaaggactggtgtaattttaaataaaaactaaggcagagaggctttgggcaagagttagaagaattgggaaggccttaaatataggtagcttagtaatgaaaaatgtgaagtgacctttcgtaacggacgtcatcccaagatccaagagtaattcac

SEQ ID NO: 701525 - DNA, 222 bp, Homo sapiens
gaccagtcctgtgggagcacaataactgcggtgtcgcgagacataaaccgctctatgaggcaggctacaggcgacctgccaggctgggattgctgcgcatgtcagacagttcaccaaatgtgctgtctagcagccgcaggctctcccctaccaagtcgaacaaccgctgagcctcctcccggccctcgtgattgttattgtagtccgtggtggcagcagcac

SEQ ID NO: 701526 - DNA, 514 bp, Homo sapiens
tcgtgtgtaccaccgactctcacactcgacttacgttactggatacatcatattgccacaaaaagtgggaaaactgtggccaattttagacatcatttcactgacaaacacaaaaaagcatctatcatccatccttggcctcttccaattcgggaactcaacacaccactacatctttattgccctggccttaaaacactagtgctatgtctcgggcacacacgggttggctgggtcagtgggaatggtacctctggtagcaccactcttcaatactctggccctccttcggtgggagcctctaagaagcaaaggcttctcaagggtggatacagctcctacagatcaagggtcactaacctctacagacatgggagccctggaagtctggtatttagggccaagctcccttcaagcaaattcttcaccccacactcaggatcatacaaagttctttgggcaaataacactcttctcccctctcggtcctttctgagtagtgacaaccagcccc

SEQ ID NO: 701527 - DNA, 293 bp, Homo sapiens
  misc_feature (3)..(3): n is a, c, g, or t
  misc_feature (12)..(12): n is a, c, g, or t
  misc_feature (19)..(19): n is a, c, g, or t
  misc_feature (29)..(29): n is a, c, g, or t
  misc_feature (38)..(38): n is a, c, g, or t
  misc_feature (46)..(46): n is a, c, g, or t
  misc_feature (59)..(59): n is a, c, g, or t
  misc_feature (70)..(70): n is a, c, g, or t
  misc_feature (73)..(73): n is a, c, g, or t
  misc_feature (76)..(77): n is a, c, g, or t
  misc_feature (81)..(81): n is a, c, g, or t
  misc_feature (99)..(100): n is a, c, g, or t
  misc_feature (113)..(113): n is a, c, g, or t
  misc_feature (117)..(117): n is a, c, g, or t
  misc_feature (126)..(127): n is a, c, g, or t
  misc_feature (134)..(134): n is a, c, g, or t
  misc_feature (154)..(154): n is a, c, g, or t
  misc_feature (156)..(156): n is a, c, g, or t
  misc_feature (159)..(159): n is a, c, g, or t
  misc_feature (172)..(172): n is a, c, g, or t
  misc_feature (177)..(177): n is a, c, g, or t
  misc_feature (183)..(183): n is a, c, g, or t
  misc_feature (196)..(196): n is a, c, g, or t
  misc_feature (200)..(200): n is a, c, g, or t
  misc_feature (205)..(205): n is a, c, g, or t
  misc_feature (208)..(209): n is a, c, g, or t
  misc_feature (217)..(217): n is a, c, g, or t
  misc_feature (224)..(224): n is a, c, g, or t
  misc_feature (238)..(238): n is a, c, g, or t
  misc_feature (249)..(250): n is a, c, g, or t
  misc_feature (269)..(269): n is a, c, g, or t
  misc_feature (271)..(271): n is a, c, g, or t
  misc_feature (285)..(285): n is a, c, g, or t
canttatgggancagtaancacagtagtntgattatanctgggaanggatctacagttntacagctgtanccnccnnaaangccggtgaagaatgctanntttctaggctgancttntgttataannttaatantcagaaggcaagggttatgngnctnatgtgtccttttnttttncatttnttaattctgaatnttanttttnaannaaaatganttttttngaccttactaattntaatttgcaannttaaaaataaatgaaaaantncttaagtttctganccatccct

SEQ ID NO: 701528 - DNA, 129 bp, Homo sapiens
gattctagtattagagatcaggttcgtccttcaatgtcgtgtctggctatcacctgtcgtgaggttagtttgattagtcattgttgggtggtacttagtcggttgttgatgagatatttggaggtgggg

SEQ ID NO: 701529 - DNA, 332 bp, Homo sapiens
taggataattgtagattcacatgcagttgtaagaaataatacatagagatcccatgtactctctagccacattggcatagtagtgacattttgcaaaaatatgatgcaaaatcacaaccatgatattaacattaacacagtcaaaatataaaacaattccattaccacaaggatgccttctgttgtcctttcatagacacaaccaaactcctttcgcacccatccccaacttcaagtcctgacttcgggcaaccatttcataattttgtcatgtcaagaatcttatataaaggtattcacttgggacctatgggcattaattttctttgatg

SEQ ID NO: 701530 - DNA, 1454 bp, Homo sapiens
  misc_feature (1454)..(1454): n is a, c, g, or t
ggagaaactttcagttttttttttttgggtggtttggtctttgtacaaaattttattaaaggttctttagaaaagcaactattccagaacctccagaaattaccagctgtgccaaggaacacccgtgtttatgctggtggggacgtggcgtggggcatgtggcaggcggcttctgtggctttcccaccctttcgtgttcgggaatgcggggtggtgggcagatatctcattcttggggtttccacaagtgcctcacgtgtggctcaggcaggggcctctctatagggccaatctttaccaggtggggtctcccagggccagcatgtgactctttcacctgtaagtgcccagaaaacccgtgtgtcgtgaagcaaccaggtgtgtgccgcaacagcagttgtctcaaagcgatacagatagttaacacacaggggctcttccgacgtggtggatctcatttcaggggcccattccaaaaaactttcagtggattttatagccctctgatttcccctcggaggtttttccccaagaaacccacaaaccttctgcagcccttttgggccccccagttcttccattagagtgaacccggaagaaacacccatatagcagggccccttccggaaacaggcaaaagcccctcctataggaggttttgtgtaagcgacagaaggacctctgtgcccgtgggccacatgtgggccacaccagaaccctcttagtttggcccaacctctttttcccgacatttaaaagccttctaccaacttgccctttcttgggaaaaggccaaaaacctcttttcttgaaccttacgcggcagttcagattccccgaaatcccggcgcgggcccctttccctccacaaagaggaaaacactttctggggccttcactgaggtgggactacaagcagtaagtgaattccgtgctcccctgtgtatgggttttaactatcggtcacacctacaaattcccagaaagtatcgcccatttttcagcacaggacccccgaagttaagaaacactcattcgacgtacaacccttttagaatatttccccttcagtgaaaaagctgtcccctttcttgagggaatctttggccgtgcgcctatttgcagcgcggggtccgcaagaaaaccactatctctcgcaccaatggctgtgttctccccccagtggtaatgtgcttgcacccgaaacagggggcgccacttgtgcaaaaaagacacaacacgcggggtaaacagggctcctcttcgaacacaagtggttcgtgtcccccccttgtggcacaacaacagcccttttgctgagtaaaacgcctacaacagtacgtttgcgatcaaagtggtgcctacaaaacaagactgaccgccgttcaatgatgtagtactaccgcgtcacatcctactatctccaaatacatcatcttcttcctctcgagagn

SEQ ID NO: 701531 - DNA, 928 bp, Homo sapiens
agcggtgttgctggatgacgactggctgaatgctcggctcgcgaaggaaggaggcaggcatgttaagatagttgtcagctttcaggaggaaatgacgtggaaggaggattccgagaacgcgactatctcttatcttattggctgcattgggagttcagtggcaagacgaagtgggatgtgctcgaatggggtggttaggagggctgtgcaatagaatacatcattcgatgtcgacccagttgagtcagactagggctgaattcagacagctggttcttgactacgtgcgtcggagaagatcaacgcgcatgaaacacgttccgaaacacgcggaggctgcattgccatggtgggcgtactcatggttaggcacgacgaacatcgagtcaatcttcaggtggagctggtgcaagagagggctacgtcaattcacatagacgagactctgggaagctactagcttgggatgctcattggagttacactttgaatttgcccccaaaggctcccgatcactggccagaggggcttgatcgatgtacgcgcaattcgctgggcagttaggcaagaccaatccagatactgaggaaatccagtttatcatcgtgttggggacacacaccaaggtggtgtacttacatgggagataaataaccatgcgttcaccacatgtgtgccgagaccccgggccgtggttcgtgggaggttacttaatagagtctggcggttttcaggacagaaagggggcaccgtgcgcgaaggttttgggatgcaagaaactggggggcacttgtagtcggacccaacgcgtaagtacacccggttgtgtgagatccaaatttaaggttgcccaaaggcacagggcaaattgggcgggccccaggtataacccgtgaattcactaaatcccattggtgctggaaccaca

SEQ ID NO: 701532 - DNA, 288 bp, Homo sapiens
gcactctgcgttgtcttaagtcaccctgcattccatagccctgtgctaatccctgtgctctcacggtatcccagggccaggctgagagcacacagccatcccactatgccgcatgccgcctagccaccttcaggcagactatgggacgcagggctcccatctgtcccgtcggatcgccgtgtgaccagtagtggatccgtcatccccaacactcgtgctcgctcagacactttgataggatgtctgggtgccatcaccagcaggagcgcgttgcacgccgggccggcg

SEQ ID NO: 701533 - DNA, 124 bp, Homo sapiens
ggaaccggagctggaagcaggccaaagaagaggttcaggttgaaattgaacagtaccgcctgcagagggggaagatttcaaggccaaggaagctgcggcattgggttccgtgcagttgcagcac

SEQ ID NO: 701534 - DNA, 499 bp, Homo sapiens
gggtcggagggagagcggatatgtcgatatgaatatcaaggaaatcctcaagatatatatattatttagtgggatgaccctgtggatggggatgtgaattactttactgtggtttccaatctgtgaagtaggaagtgttgtattttaaagagcataaaacaaattcacaaaaggttaagtgattggctcaatgtcacatagctaataagagcactagacaggatgtgaacccagctagactgactccagaggctaagacattagcaactaaactatgctgactaatggttgtttatttttatgtcaccaaagtccaaacaggacagagtaagatgaggatggacaagccacagtgcaaatgcagaaggacctaaatgtgggaaattaatccagatagcaaatgatacctaggtcaaagagtctcggcactctctggtaaatatttttcccagaaggtttcaaacataattcaagtttatttaaaagtctaaatcagttt

SEQ ID NO: 701535 - DNA, 187 bp, Homo sapiens
gacatctggttggacggtaccacggacactgtgtcgttacggacagcctaccgaccgacaactacgtaccgttccttgttacgtactttacgaccttacggtggacttacctgagtgactactttctgacacgtctcaacctactacgaccaccagtctgctaacacacccctggtgtgaacaacgt

SEQ ID NO: 701536 - DNA, 710 bp, Homo sapiens
gatgggactaatacaagtatcgtttgccaaaacttctagagagcaatttcaacagaagctgataaaataatggagaaatacagacaacttcactgggccagatggagaacagacaatttggatgaactaaataaaagcaagatcatctgtttgatcacagatacccataacgaattaaactccgatgttcagtggtaaaagtagagtcatgaagttttaagacaaaggatatattggtggaatgatgatacgttttcagtctgcaatcggtgttggtccttgtgtcatagactatattacagaaagtggatgagctgtcactgagaagacaatcatctggggttcagactgaaaagacgtatctaaatgtcccactcttaagccctacataagagaatccagtagaacaagaaagtctttatctcattaggcaaggttcagtagatgagcagagtcatgccacctattcattggattgccttgacaattccgattggagcagatcaagcaaatattctggtggaagatgcaactattggtatagtcgataatagaattagctgatatcaagccaaggatcgtgaactattagaatatagcaatacgtaaatctctccattgatagacgatcatagttctcttgaacagcagacgttcagtctagttggactcgttcaaaccaggttctgtgaatacgtaagttagtaaaa

SEQ ID NO: 701537 - DNA, 877 bp, Homo sapiens
  misc_feature (169)..(169): n is a, c, g, or t
  misc_feature (218)..(218): n is a, c, g, or t
  misc_feature (220)..(220): n is a, c, g, or t
  misc_feature (229)..(229): n is a, c, g, or t
  misc_feature (231)..(232): n is a, c, g, or t
  misc_feature (235)..(235): n is a, c, g, or t
  misc_feature (243)..(243): n is a, c, g, or t
  misc_feature (258)..(259): n is a, c, g, or t
  misc_feature (274)..(274): n is a, c, g, or t
  misc_feature (283)..(283): n is a, c, g, or t
  misc_feature (335)..(335): n is a, c, g, or t
  misc_feature (407)..(407): n is a, c, g, or t
  misc_feature (423)..(423): n is a, c, g, or t
  misc_feature (426)..(426): n is a, c, g, or t
  misc_feature (439)..(439): n is a, c, g, or t
  misc_feature (445)..(445): n is a, c, g, or t
  misc_feature (451)..(451): n is a, c, g, or t
  misc_feature (489)..(490): n is a, c, g, or t
  misc_feature (500)..(500): n is a, c, g, or t
  misc_feature (602)..(602): n is a, c, g, or t
agcgggagtgggacagcgctggtgcggagactgcttccggactccaggtaccgcgcttggcggcagtggccccagacttctgtcttttcagctgcagtgaagctcggggctgcagaattgcaaccttgccaatggacctgatcggttgggttatgcagccctcgtgacntttggaagcattttgggatataacggagaggtggtgtcccgtctttgantngctggtctntnntgnggatgttnggccggctatggagnnttacccgtgtctccnatgacaaangagatgtacaccgtgtcacctgtgtttaagcctcatgatgatccctgagacnttgtcttgtggctgctctgagcatctggaggaaacagaaaaactaagttcatgtcatcctgctgtaatgggncagagcatattttttngtntttaaaagataancttcantatggnatgctagaaacacaaatagcatgtcacctctaatatgnnacattagttngaggtaggttttttctaaagcaaaaattttaactgtgtttctaattgtcaagcactattttcacttaaaaggtgtctaatgaatcatgatatactcttccanttgtggtgtcctcatacatatcatggctactgtgaaaatccaatcctcatgtctccaggtagctacctacactgtcacatcaggacgcctcagtggtccccgcaagcacatgtcccatccgccatcggttctctttgcaatcttcagaaatagcttcccatcatgttgcgccggccattttcttaaatttttgcccgctgcccgcagttccctcccacgattgggcgccaaaaacaaacctgtgggggcgaagaaacacggcgcagagaaattta

SEQ ID NO: 701538 - DNA, 682 bp, Homo sapiens
  misc_feature (278)..(278): n is a, c, g, or t
cgtatgggaccaaacggtaacgggcccggtgacaatgccacggggagccccaacggccacaatgccaaacagttcggccagccaaaaggcgaaaagctgctcccccagggtgcacccgagttcggcaatggcacttaacagcccaactctcgtcgcacgaaattcgcccaaaagcgcttacgccaccgaggcgcacaatcgggagccccagaacgcaacgtcccgtggcagagaaaacaacctctggagaccccgcccgtgtgcccggggctgcatgntgcaacaagtccaggcgaccccttgggcaaaataccgcgaaaatctgtttggaaagctacaaggacacctgcgctgaaacggctaaacggcggccagcacgggtcgggcaatcaaagggcccccgggtgggggcccagaaagaagacaccgcgtcaaaaaattggtatacacagctggtgcgaccaaggctttgagaaagaggggcttgacccctggatcttttgaaaccggtcaccgccctcatactgatcgagacaagttgggaagactcccgttcgcactccagcgaagcacctgtgtctataaaggcaaaatgttcccgagggggtccacatatggcagacgcttctgccgaagacaccttctgtcgcccggagaatgaccaaagagaccaaccatgaca

SEQ ID NO: 701539 - DNA, 981 bp, Homo sapiens
  misc_feature (169)..(169): n is a, c, g, or t
  misc_feature (218)..(218): n is a, c, g, or t
  misc_feature (220)..(220): n is a, c, g, or t
  misc_feature (229)..(229): n is a, c, g, or t
  misc_feature (231)..(232): n is a, c, g, or t
  misc_feature (235)..(235): n is a, c, g, or t
  misc_feature (243)..(243): n is a, c, g, or t
  misc_feature (258)..(259): n is a, c, g, or t
  misc_feature (274)..(274): n is a, c, g, or t
  misc_feature (283)..(283): n is a, c, g, or t
  misc_feature (439)..(439): n is a, c, g, or t
  misc_feature (511)..(511): n is a, c, g, or t
  misc_feature (527)..(527): n is a, c, g, or t
  misc_feature (530)..(530): n is a, c, g, or t
  misc_feature (543)..(543): n is a, c, g, or t
  misc_feature (549)..(549): n is a, c, g, or t
  misc_feature (555)..(555): n is a, c, g, or t
  misc_feature (593)..(594): n is a, c, g, or t
  misc_feature (604)..(604): n is a, c, g, or t
  misc_feature (706)..(706): n is a, c, g, or t
agcgggagtgggacagcgctggtgcggagactgcttccggactccaggtaccgcgcttggcggcagtggccccagacttctgtcttttcagctgcagtgaagctcggggctgcagaattgcaaccttgccaatggacctgatcggttgggttatgcagccctcgtgacntttggaagcattttgggatataacggagaggtggtgtcccgtctttgantngctggtctntnntgnggatgttnggccggctatggagnnttacccgtgtctccnatgacaaangagatgttgtaagtgtcgctgtgtacagcgtttcttccctgggctaccactaaatgggtgtgagaatttaacgaagggtccccagaaaaataattgccctggccggggtttgggtgcagcggtttaaagccctcactgagtggagtccctgagacnttgtcttgtggctgctctgagcatctggaggaaacagaaaaactaagttcatgtcatcctgctgtaatgggncagagcatattttttngtntttaaaagataancttcantatggnatgctagaaacacaaatagcatgtcacctctaatatgnnacattagttngaggtaggttttttctaaagcaaaaattttaactgtgtttctaattgtcaagcactattttcacttaaaaggtgtctaatgaatcatgatatactcttccanttgtggtgtcctcatacatatcatggctactgtgaaaatccaatcctcatgtctccaggtagctacctacactgtcacatcaggacgcctcagtggtccccgcaagcacatgtcccatccgccatcggttctctttgcaatcttcagaaatagcttcccatcatgttgcgccggccattttcttaaatttttgcccgctgcccgcagttccctcccacgattgggcgccaaaaacaaacctgtgggggcgaagaaacacggcgcagagaaattta

SEQ ID NO: 701540 - DNA, 259 bp, Homo sapiens
aaaaggaaaaaaaaaaaaaaaatcaaaaaactgctatataaatggagtcacacaggctgttaccttttgaaattggccttttttcactcagcataatgcccttgagttccagcaaagctgttgaatgtattaccagtttgttcctttttattttgtactccatggtatgtatggatgtaccacaatttgttaaccattcatttactaagggtcatttaatatttcaaaataaacctgctttaaacatttgcttgtaaaa

SEQ ID NO: 701541 - DNA, 399 bp, Homo sapiens
ggcaaagaacttactgattcttgagaaacagtagctcaagaacacatggatcctgggaactgaagcctatctgggccgggcgcagtggctgacgcctgtaatctcagcactgtgggaggctgaggtgggcggatcacttgaggtcaggagtttgagaccagcctggccaacctggtaaatccctgtctctactacaaaaaaattacccaggcatggtggcagtcacctgtaatcccagctactaaggaggctgaggcgagataattggagtaatcccagctatgaaggaggctgacgcggaggttgcagtgagccaagatttcgccactgcactccagcctgggcgacagagcaagactccatctcaaaaataaatttaaaataaaacaaagcctaaaa

SEQ ID NO: 701542 - DNA, 371 bp, Homo sapiens
gtaggtcgaggtgggagaatcacttgaacctgcgaggcggaggttgcagtgagcagagatcatgccattgcactccaacctgggcaacagagcaagactctgtctcagaaaaataaataataaataataaattaattaaataaataactcagaatcatggggctgaaggaggtggctcacatctgtaatcccagcaagttgggacaccaaggcaggcagatcacttgaagccaggcgttggagaccagcctggccaacacagtgaaaccctgtctctactaaaaatataaaaattagtcaggcatggtggcgcaagcctgtaatgccagctactccggaggctgaggcacgagaattgcttgaacctgggg

SEQ ID NO: 701543 - DNA, 1041 bp, Homo sapiens
aagagttcagtcgttgatctgtatgcaaatcggagtcccaagtgctgggcgtgaatcttgacagtttctacagaccttcctgggtgaaagttcctaaatcatgccctgcttcctccaataggagaatgggagcctcacctgtaggacctacaggctctctaaggaatgcaggtctctctctgagcctccacagccaggcaaatacatatatatatatttattttatttagatgaagtttattactcatgtgtggcccaggctggggtgtaatggcatgatctcaggtcactgcaacctccatcccgggttcaagcatttcttctgtctcagcctcccgaatagcggggattacaggcaccgtgccatcacaccagactaatttaggtataatgggtggagatggggtttcaccaggtggaccaggctggatgtgagctccgtgacctcaggtgatccaaccaactcggtctcccaaggtgctggggttacaggcctgagccagtgagcccggcccagggaaaatgtctgtgaaccacttctcacatcccggtcactttcaataaggggtctttgatgtcttcactgggttcttgggacggagggactttcgaactttaagggtgcaacaaacagtcagaaatatacttcacactgagactggagcgcaacaaagggaaacgagcaaagagaaaatgtcacaaacaatacatacctcccgggggacgacctccgaaggacaagacaggaaataacaccgggggtggaaccaataaagacttggatcacccatgggggggaccaaaaattggagggcacaacaaaacaggggaaggactaacagatcaccgatgaggcccgaagtaagaacacagatggtacagggcccatagaagacaaaaacacgaccggccaacacccgcgctgaaaagcaatgcaatgggaacactcgggtgacctggacacacagaagaaagcaaaaacggcgtaacacaggaggcgagtgtaacaacacatcgaaaacaaaatgaagagacgaaaag

SEQ ID NO: 701544 - DNA, 189 bp, Homo sapiens
agagccctctaagaaaaaatgtttttaagttacctgtgtgcaagactgaggtaggaggataacctgagcccaggaggctgagaccggactggtcaacatggtgaaaccttgtctctagcaaacatacaaaaattaaccggttgtgatagtgtgcacctgcagtcccagctactcaggaggctgaggtgg

SEQ ID NO: 701545 - DNA, 407 bp, Homo sapiens
gcaaggctcgtcgtagagatgccaagctacagtcatgccaagagcctgaagcaccaccatctcagcatgtggtccttatgcaagggagggcaaatgatttgatgaagtacctatgggctaaagaccatacgacgattcccatcaagcgctcggacatgctgaaggacatcatcaaagaatacactgatgtgcaccacgaaatcattgaacgagcatgctattccttgaagaaggtatttgggattcaattgaaggaaattgatcagaatgaccacttgtacagtttactcagcaccttagagcccactgatgcaggcatactgagaacgactaaggactcacccaagctgagtctgctgatggtgcttcttagcatcatattcatgtggtaggacagtgaggctgtc

SEQ ID NO: 701546 - DNA, 199 bp, Homo sapiens
ccatcacatatacacctgcctgtgtgctaaacattctgtactgttctttaggtgacttgctccctattagataaacaatatcatcaataaagtatactggtcagactgatcagatttcctaaagtcattgattaattacttcataactctgaatccggtctaaacaattcttcattgactcatatactccatcaatatc

SEQ ID NO: 701547 - DNA, 780 bp, Homo sapiens
gtgtgtgtgtgtgtgtgtgtgtgtgttggatctactaacatgtttagcaaatgtctctgacagtgtggccatgagcagatgagaccagctcttgcgttgggtggaaggccacactgcagttggcagtatagcctttggtgtctcagtgcgctcgttgcttattccatgctttctctctcccactctctctctcgtgtgcgccttccctgcaagtggcatgcctttgtgcacaagtgctgtgttgtgttcatcactcactttgcttatactcctggaaatgtgttgtgagtgagttaggagaatggatggtgctatattacatgtgctctctcattatcctgtcaaataacaagtggttggagcactcgtggtgtcccaagcacttctgtgtggtggagaggaattaagatcattagtaggatgctaaataagagggggtcctctatgttttcattacttgattaaagtgaattaatcaacccagaatagtgtgtatatgagtagttgtcaactaataatcacactactcatagtgtcattctgtggacaactttggtgtaataacacgaggtagttttggctacaaaatctctcttccgtgagtcataccatacaagcaatgacagtgctctcctgtccagtacaagcgtgggggaacatttagagtggaaactggtggggacacaccccccattatcttaattattataagacactacagacgcttagtgggggcctgccaacagagtgctagttactaaataacgtgaacacatacat

SEQ ID NO: 701548 - DNA, 1741 bp, Homo sapiens
  misc_feature (479)..(479): n is a, c, g, or t
  misc_feature (1003)..(1003): n is a, c, g, or t
  misc_feature (1040)..(1040): n is a, c, g, or t
  misc_feature (1068)..(1068): n is a, c, g, or t
gacctcttgattgtcatggtgggtacttgttacctgttccgctatcgagtcttggaagggagaagtgatggagaagtgttacttgtagagaaataccactacatctacactagatccgaagatattctaatctagaggcctcgacgtccacacgcacgggtgacccatggcctagcaggggggacttgattgcatggacctgtgtgtgcgtctctgcaaccacattgtagtgactggacctccattgtaaggagactctccttacgacactcgcgagtacgcaccataggctctactttactaccttgaaacaagagtcgcgagaggagtaaatacgtgtccgactcgttgctggcgcaactagagttacaggagggcccctcatgtcagggcgtcgctcctgttctgttcctcaccactagctgggtgaatcccttcgcaccgtgccgcgtacaccctttgctttacccttcccgaanccgcctctaataggcacactgcctcttggagtctcccttcacgcgtactcctccggtgtgcctagccaggcataggtaaaccacacaggcacactatgaccgctttcccccatttcccaaaggtgcgattggggaaggggtccaagaagggtggaccatttttggcctcacgagagtctgcgggcatgtgtgggttgctaagtgccatccccacttgtagtatctttttaccactcgacctagattgggtcttgtttccatggtccattttacgttttcgcttttcgacactggttaattagacatggcactttactatagaagtcgggggattgtccttgtacgatgtcccctttggcacacgttatgctacgtggcccataaggattatataaacatttacagcaacacatgttccccgacaaaggttccgtggcgtaggctgtccaaaggctggcggaaaaccttccatgcattgggcattgtacctccagcgccatcgccggtagatcaagggggctganaggaaattccttgttgtaacacatgacaccactttcncctatacttttatatccgattttgtgcnccaaacatccccctattaaaccgtaatacgcttcagcgcgtcctcattcaatttttggtcaaccctatgtgagccaatcttaaggcccgtttggcagattggttccgttcacacgttggaacctggacagggctgggggtcctgtcactttcatatagtgccaatatcccgcgttgcccaagcgccaatgtgggcccctgtctcttttaataacccgtcccaaggtgttggagagtcccacaacaacggccagtaacacattttaattttccccacaattcgccttgggcttcgcgcagatttaagaaaaccccccccgcgtggtgtgctacagatagcataattgagttcaatgcaggttcgcaaacaaccccccgtgggggtgtaggcggccactaccaccaacggcgttccgctggatgtccccccactgcgatcccgcccattaccacctggacgccccacaacaatttccacttttcaaaacagggcgtataacaggcaactgtacaccaagaggaacccctacagcagctggcactcacaagggtacaccacagcgggccgtcacccatagccatgcgccagcgcgctgtttgatgttgtcgcaacccattcggagaccatacgcgacatcgcgcagaccggcacccacaaccacaatagctgatgc

SEQ ID NO: 701549 - DNA, 202 bp, Homo sapiens
  misc_feature (26)..(26): n is a, c, g, or t
  misc_feature (32)..(32): n is a, c, g, or t
  misc_feature (130)..(130): n is a, c, g, or t
  misc_feature (156)..(156): n is a, c, g, or t
cagagaacagggaaacccgtgaaacnggagcngggagcagcaccgagggcaaccaggacagctgtgtgaagaagacctcatgtgttgggttctctcccctccttcctgttcctcttagagaccagtttanccccattctttttttttatcaacgcncaaaataaatcaaggctgcaatgcagctggtgctgttcagagggta

SEQ ID NO: 701550 - DNA, 130 bp, Homo sapiens
ggtgttctggaggatggtagcacgtataacacactggggaatggagcaaaacagtcttatgaatatcgaacacgcaaggctgtgagactacctatagtagatatttgcaccctatgacattggtaggtcc

SEQ ID NO: 701551 - DNA, 189 bp, Homo sapiens
  misc_feature (81)..(81): n is a, c, g, or t
  misc_feature (104)..(104): n is a, c, g, or t
  misc_feature (110)..(110): n is a, c, g, or t
  misc_feature (118)..(118): n is a, c, g, or t
  misc_feature (140)..(140): n is a, c, g, or t
  misc_feature (151)..(151): n is a, c, g, or t
  misc_feature (175)..(175): n is a, c, g, or t
  misc_feature (183)..(183): n is a, c, g, or t
acggggcaaatgtggatccaaaaaaccagggccatgaccaggtcccctgtggagcagccatctatttacctgactcctganccaggctgccgtggtgtcatttntgtcanccgtgctntgtttccttttggagttttttntccccattatntttgttcctggggaataaaaactncccttggncctaga

SEQ ID NO: 701552 - DNA, 163 bp, Homo sapiens
agatgctgtgaacaatgaaaggaatatgtgggcccgagcttaaatcacatagctgaacgacagttatcccttcctccctattcactctaactaataaatatgaagggctgttgaagctcagggccctgttgccctaatatcaaggagccgcccgacctttcgt

SEQ ID NO: 701553 - DNA, 353 bp, Homo sapiens
taatgatgtgcatcaaaatatgtgcccttcctcacagaaaggtttaaatgctatctgaaccgagcacatctggtcctctccacttcgtggtttttcctagtagcctttctttatccagtaaaaatagatttcctattcatgaagtgaaagtggatcatcataaaggtcttcatcctcatcaccttcatgttgacgcaggccaagccatgacctgtgttgtagtctatgtcgtgtcccatacacatatgcaccaaaatgagcacatgctatcacgcgaggccacctagaagatctagttgtcaaggggcacagaagagctctcgtgtgcctccttaacagcaccatatccatct

SEQ ID NO: 701554 - DNA, 403 bp, Homo sapiens
ctttgggcaaaacagagtttctacaatcatgttgacatgtttttaaagtaattacagcagtttgtcataagcaccaaccagatattcatttataggtgaaggttatttctaagaacaaggatgttaaaaaagaaacaagagaaaatagtaaatggtcttataaagacagtatgacacatctttgaagtggtgattgcaactccacataactttcgacttccaattttcacttgtatgtaggtgttaatgaatctcctttatataaactgtatgacataagattaagaaaagtcataaaaatagtttgaccctaaagaaatcccctgcaatattttttctcaaacattgaaagtgaaaaataagcactattttatggtagatggaccatccatccaggggaaga

SEQ ID NO: 701555 - DNA, 590 bp, Homo sapiens
  misc_feature (486)..(486): n is a, c, g, or t
catttaagaaatgccatttccttgaaagaaaaaccttttcggctaaaatttctaaaaattactttggctacctggctaattttatgctgtgccattaattaatgaagacccttcccttggggagcattccaccttttttttgccagacttgttggaatcctaggtgttacccatttagtttaggacgctcttcttcattggccgcaattaattaaattgatggcttttcccttgcttgactggcgaaagggcattttatcccccctggagatgagcctattttcggcctgtgaacccccacgcctcaccatgggtacctagaacccagtcaccctgattaggaatttttaagaacgagttcttaacacgcgaaggacagatgattaacactgatgctaggcattcattggttagccacacgttttctgagaattccctcgcccggaacaactgcgcgggcactgatttatttttgtcccgcagtcngacggaaatatcctggcctcggacaggctttttagggtgaaaacctatggtgcacggaagtggtcatacgttgcctttcttgaaggcaaactggggggccaaat

SEQ ID NO: 701556 - DNA, 958 bp, Homo sapiens
tgggtggtctctacccggatcaaataggaccccaagcgggggagggaaaaaaaaaaacccccagggggagatatccccccccaccccatggggctgctcgtgccagccaccatccgcgggtgtcgcgcaaaacgagaacacccagttagcagcgaggggagtacgagaaaccaccaccacaagactatttttctacgagtatcctcggggtgcctcaccacacgaggaaacacctgggaagaaaaatcgaagtttctaagaaagcgcggcgtgtacaccctcgtggggctacacggtcttatatatattattatgagatgacgattatgagacagatcattatttttatcaacaagggtgacggggtgcaccttacgtggtgcccaccccggcacttctccatcatgtggggtgggcttccaaacacagggggatgcatgcgatgtaacaaaactatcacgctccctacggttgcggccttctggcggcaaagggggttctccaccacggggtgggcagaaggcggacgacagttttgacaaagagggcggcgtccaccagcggggggcctactcccccctctgttggtttggttacgagcaacggtgaagggcaggaacagctgggcagccccagggttcttcccctggccaaacagggggtgttctacatagtggtggtgtcggcccctagtgaaacccgctgagaaggggggtacacaccacagactcatggaaaacccccttgagatgtgctccaaagagaaaccccctcgggaaaagtgcaaggagtcaggagcatacagacccagatgatatttataaccactacagcgccctggtggtggcacacacacctcgctggggagaggcagcaaccgccgtgggataaacaattacacgtgcaagacacaataaaacacccgtgtggcgggaggagagcggcgtgcccttatatc

SEQ ID NO: 701557 - DNA, 462 bp, Homo sapiens
tattccacggggaacaccagacgagctacttaagaacagctaaaagagcacacccgtctatgtagcacaatagggggaagattatagggtagaggcgacaaacctacggagccgggtgatagcgggtggtccaggatagaatcttagtacagctttaaattggcccactagaaccctctaaatcccctggtaacttgagcggttagtccaaagaggaacagctcttgggacactaggaaaaacctggtagagagagtaaaaattttaacacccatagtaggcctaaaagcagccaccaattaagaaagcgtccaggctcaacacccactacctaaaaaatcccaaacatataattggaactcctcacacccaatgggaccaatctatcacccgggggaaaagtagctgaacagagtagggtacacaaaaatgtcctggatgatgtaatcaatatcctccagc

SEQ ID NO: 701558 - DNA, 1018 bp, Homo sapiens
gtctccgagaacgaagcggcctccgggttcgtgtgctccgagcccgagtactgtttgcggccgtcgtcccgtcctggagcaggattgaggaagcgcctctcacttccccgcgaacccgcagaacaggccgccggcgctgtggagaccggcggagcttcccgctccttcaccaaggggccctgacgcgcagttgaaagcgcggattttgccgggcgcggcggctgcgtccggagtcccagcgccttgggaggcgaggcgggaggatccccacggcccgggagctcgagaccagcccgggcaaatattttgaaagtcatgagcgggacggaaggtgggactgggagagctgttctcgggcaggtggacgctgtggattagcggagagggaaggcactttcgttctcggcaccgtgaggctgtcctggtcaatcctgttttcatgcttgagggtctctggtgcagcagctccaccagccttgacaccaggacttctgtggaatccagacggagtcatgctctgtcacccaggctggagtgcggtggtgtgatctcggctcactgcaacctctgcccgatcacgcgattcttctgcctcagcctcctgacaagtggggattaccggcgcccgcagcaagccctggctaatttttggtaaagtagaggtgggtttcccatggtgggcgcgctggtcttgaacccctgacctcaggtgagcaccccttccagctcccaaggtgtgggattcagcgttgagcacacaccggttaggctggttactcttttggcctatccacgctgggtgccggcgattgggcactcttgtgggccgtggcgcgtttccccgtgcccggggggccccacagggtgccgctgttgacccccgcgcagcgaggtctcttcttcggccgcgagtgggccctttctctccatcgggctggggctcagcgatggcgtgggcagacagcgctcgcgcgcttggcgacggcagatcgtatgcgtcctgtgttttgtgcggtcg

SEQ ID NO: 701559 - DNA, 413 bp, Homo sapiens
  misc_feature (2)..(2): n is a, c, g, or t
tntgtccttccatctgttggatagccgagagtattcggatggagtcccacagacaattagcggatactcagcctcgcgggactcaactgcagccttcgcaccgattgccgccgagatcttctgtgcagcagataaggcgcggcgcccgatttcgttagttacccaactcgtctcgcgcatttcgccattttcgagcttgtaggtgaagcctcggactagccaatgacgctttccgccatgctcaaaagagacgaggctgtctctcggtaggttgagcgcttcgccaaggcgcattcctgtaaaggccacgcatagagctataagagtcgtttggcagtcaaggatccgggagcaaagaaaatgtggaccgtgccagtcgacgcggccgcaatttagtagtagtaggcggccgc

SEQ ID NO: 701560 - DNA, 329 bp, Homo sapiens
gccttggtccgagagaaagttaggatagttgacgaaagctgccttttggctggagggagaggcttatggcgggaatgccctattagctttgcaagggggcccttcagaagtcgctgggctcggaatgctctataggtcgtgcttgggagtgaccctgttcgaagagatactcgcccagcccagcctccgggccacccagcctgtggaggttggtcaggtggtcacccatcttcttgataagcttcacttcctcatctaggaagtgagtctccaggaagtcacagagatggaggtccgtgcgggcagaacccagggcatgaagatccaaa

SEQ ID NO: 701561 - DNA, 500 bp, Homo sapiens
cctgcaggctctacctaccgaatagaagtttggcgcacccgggagtaagcaagtctatcggtttcattttccaacagcatgtgctcacttagagactcttggtcccttttggtaattctcatattatttcacacattttcattattatatctgttatggttatgtatgatccgtgacctttgacgttacggtgaggtgaagtaaataaatgtggtatgtgtccggacggcggtaccagcgggcggtaccctcatctctctctactctccttaggcctcctggttccctaagacacaacaatatggattgtaggccaattagtaccccttggacaaggtcacatagtcacctaagagctcggttgaagatgtacaagaaaatgtccttttcataccggctaacaacatccatccggcagtcggtggatccaggagtcaattggacatagaagtctgattaaagaaacacctttcgaaaggctagggcggctatacagagga

SEQ ID NO: 701562 - DNA, 323 bp, Homo sapiens
cagttccccactccgctgctgatgagcattgcgatttgtgggaagataatatatccgtccttttcactgagataggtctaacatagccagaatcactatcagatgtgcacctcactttcttaaccatttcttaacattgctcagttatgttaaaattagcttgtttttaattgattattttacattatctattttatttcatagttaggttacgctacaggatactgttatgtacactggttaggaatcctttcctccctccatatttttataaaactgatgctaatgaatcttctacctgctttttgtgatttctttttctt

SEQ ID NO: 701563 - DNA, 105 bp, Homo sapiens
  misc_feature (8)..(8): n is a, c, g, or t
  misc_feature (60)..(60): n is a, c, g, or t
  misc_feature (84)..(84): n is a, c, g, or t
gagtctgnccgtattcgcactcattcggacatgcagtgcagaagggacagttagcatgcngggagaatatggaggtcaggaagngagccgagttccagactccca

SEQ ID NO: 701564 - DNA, 1008 bp, Homo sapiens
ctcgacccccatgcaagccatcgtcatctggaagtacaagtctttactgccgggaccgccatcggccgatgtccttctccccggccagcgtcggacaaccaggctcaatgcccagtctggcagacgggaacccaggctaccaaccccgtacttcgagtgccaggacagcgtgcgcaccgtcagggtcgtggccaccaagcagggctaacgcgtgtgaccctgggagattactaccagtgccggaggattaccatcaccaggaaatgcatgacctgaccttttgaccagacggcgtggggggacagtggtgtgtattactgctccgtgggtctcagcccaggacctccacggggaactactgagtgcctacgcatgagctcatcgtccttgactggctcttcgtggttgtggtatgcctggctgccttcctcatcttcctcctcctgggccatctgctggtgccagtgctgcccgtacagcttgctgctgctacgatcaggtgcccctgcttgccacagacaatgtgctgcctgcccccgaggccctgtatgccgccggcaaaagcaggcacctcagggtgttcccagcatttttatgtgccacgatgacttatgcccaccatgtcatcccgacaaagaccaaaaccaaacaaccgtatgattcccattgagacccgagccatacagacgccgatacgcctgtgacggtgtacaccgggatgaccctagcacagcggtgataactcaagcctgaagtccaccagccttattgtaccccgtgtcctcacgggaaaagtaggtaccaaggacagtcaattgaccccacagattacgacgccgggctaccagtgaacttgaacgccaacccaaccagtgatagactccatgacggactcatgttcataaattctaataacgatggatggacacattacgaaccacctgtcttaacctagtctccccatttgttcgtttttacgcatggtctatacattgaagtacgctcctg

SEQ ID NO: 701565 - DNA, 213 bp, Homo sapiens
gggttcccttttctgctcgagtgatcgacagccttgacttgtccttccttgtctcagaggggaccaaggaattggatttcctcagggtctggggcctgggctgtggcttgaggttccgagcctgctgcctccaagctctgcttgagggcctggtccggggtcctgcgccgcgcaggttcccataccaaacaccttctgagaacagtacggttg

SEQ ID NO: 701566 - DNA, 972 bp, Homo sapiens
  misc_feature (332)..(332): n is a, c, g, or t
  misc_feature (382)..(382): n is a, c, g, or t
  misc_feature (384)..(384): n is a, c, g, or t
  misc_feature (405)..(405): n is a, c, g, or t
  misc_feature (411)..(411): n is a, c, g, or t
  misc_feature (440)..(440): n is a, c, g, or t
  misc_feature (456)..(456): n is a, c, g, or t
  misc_feature (472)..(472): n is a, c, g, or t
  misc_feature (481)..(481): n is a, c, g, or t
  misc_feature (496)..(496): n is a, c, g, or t
  misc_feature (509)..(509): n is a, c, g, or t
  misc_feature (532)..(532): n is a, c, g, or t
  misc_feature (546)..(546): n is a, c, g, or t
  misc_feature (556)..(556): n is a, c, g, or t
caaccaatcgtgtagaaggcaccgcacgtggtatgtggtctacactggggatcgcacttgtgatgggaagaatgccacacttgacttctgggctggaaggaggtcagacccccattgctgcagcaaatcgaacattttatccacatcatcacgggtgtggctgtgttcctgggctgtgtcttgtcttcatcctttgctctcatccttggagtacacctggcttgaggcgtgtcatcttcctcatcggtagtcaatcgtagccaatgtgccggaaggtggcgtgggcactgtcacggtctgtctgacacttactgccaaacgcatggcaaggnaaaactgcttagtgaagaacttagaagctgtggagaccttggggtccacntncaccatctgctctgataaaantggaantctgactcagaaccggatgacagtgcccnacatgtggtttgacanatcaaatccatgaagntgatacganagagaatcagagtgntgtctcttggacnagacttcagctacctgcttgctntgtccagaagtgcnggtcttgtancaggcagtgtttcaggctaatcaggatgaacctacctattcttaagcgggcggttgcaggagatgcctctgagtcaggactcttaagagtgcatagagctgtgctgggttccgtgaaggacgatgaggagaagatacgcaaatcgtcgagatacgcttaactcagcaggagtacagttgtgatcatagaagccaaggatcgaggccaaacctgttgtgattaggggccccgaaggtctaaacgggcggcctttccctccggaaggcaacccggtaagggaaaacccttaaaccatatgggggggccaaaaaatctcaggttggccttgcgagacacgcagggcctgaagaaaggaacacaacagcgggggcgcaaagcacagcggtctgcggacggattagagggcccatgagtgg

SEQ ID NO: 701567 - DNA, 184 bp, Homo sapiens
  misc_feature (172)..(172): n is a, c, g, or t
atcagatttgaatacatcggcccacagccataggacatactgcagctacggtagcgcgaacactcatcccgtctacaaatgaagtttccgatctgtgtgttctgaattccaagagcctgagctcctcaagagaatgggtctgaggaggggctcacctcacgcccatcccgancacatgtagatc

SEQ ID NO: 701568 - DNA, 888 bp, Homo sapiens
gacccggagcagccctcaactcactcttcagcttccctgctgtgttgcagcccggccgctccatcatgctttttatgttcctagattcaacaagtctcctaaggccaccttctaatgccaagaacctacatagcttcctacaaatctcagagcacccagcactcattcttctgtcaactgccttcgaccgcgtactagtctcttttttctttctttctcttcttcgccatgcagttccttcagtgctgaccagatgctgcattccacggaggcatttctcctgttgacagcacacaggtgattccaagatcaccttcagccaggtcggtgatgtccttcgagctctgggcacaaatcccaccaacatgcagaggtccggaaacgttctgggaacaccccagcacatgaaagagtgaatgccacagaacaatgcgtggcacaattctgcctatgatgcaagccatttccaacaactaggacaggccacctatgcacgacttgtggcgggtcctggtgtcttgaccacggcgccactggccccagtcatgcttgctgacactccgcatgtctacgccccctgggtgacaccagttgcaacgcggacgaagtggaagtctgattggcaggttcagaagatccaatggtgcgtcaatacgacgtttgtggtcagaataagttactggtgggtctaagaccagcttgttaagagatggtgacttattatccacatgaaatttcagattgtacatcctcggaacagaattggtgtcaatggacatatttattaaggttgagatcacaaaagttgtatgagatatgataaaaaaaatgggggaataatggggaataaattaagatggaacggaatgtcaccgtctcagcatctga

SEQ ID NO: 701569 - DNA, 929 bp, Homo sapiens
  misc_feature (85)..(85): n is a, c, g, or t
  misc_feature (237)..(237): n is a, c, g, or t
  misc_feature (277)..(277): n is a, c, g, or t
  misc_feature (279)..(279): n is a, c, g, or t
  misc_feature (281)..(281): n is a, c, g, or t
  misc_feature (305)..(305): n is a, c, g, or t
  misc_feature (317)..(317): n is a, c, g, or t
  misc_feature (336)..(336): n is a, c, g, or t
  misc_feature (342)..(342): n is a, c, g, or t
  misc_feature (353)..(353): n is a, c, g, or t
  misc_feature (359)..(359): n is a, c, g, or t
  misc_feature (377)..(377): n is a, c, g, or t
  misc_feature (379)..(379): n is a, c, g, or t
  misc_feature (385)..(385): n is a, c, g, or t
  misc_feature (391)..(391): n is a, c, g, or t
  misc_feature (393)..(393): n is a, c, g, or t
  misc_feature (395)..(395): n is a, c, g, or t
  misc_feature (399)..(402): n is a, c, g, or t
  misc_feature (404)..(405): n is a, c, g, or t
  misc_feature (408)..(408): n is a, c, g, or t
  misc_feature (410)..(410): n is a, c, g, or t
  misc_feature (412)..(412): n is a, c, g, or t
  misc_feature (414)..(414): n is a, c, g, or t
  misc_feature (421)..(421): n is a, c, g, or t
  misc_feature (424)..(428): n is a, c, g, or t
  misc_feature (430)..(435): n is a, c, g, or t
  misc_feature (632)..(634): n is a, c, g, or t
  misc_feature (646)..(646): n is a, c, g, or t
  misc_feature (649)..(649): n is a, c, g, or t
  misc_feature (735)..(735): n is a, c, g, or t
  misc_feature (809)..(809): n is a, c, g, or t
  misc_feature (818)..(818): n is a, c, g, or t
  misc_feature (833)..(833): n is a, c, g, or t
  misc_feature (895)..(895): n is a, c, g, or t
tcctccggggaacaccgggaaggctcgacgctccaggacaggaccagccacgctgacaggtcgatttgcccaggcccgcgcccgnacgcacgcacgcacacggccccgcacacagccccgccccaccccgcaaccagccctgtcgactgccttatacacccgcccccgcgctggccggccgacctagtgccttgttctcacccccgtgctggcggagcggacgccgcgctctgggtnccagaggggccgggtggctcagacgacccaccactccccnancntgaccgtgctgaacagaccccccnacacgagagaanataaaggagcaataaagtnacgagnactttcgtccnccaatngagagcccgaggggcacncnagcccngcgtgngntncccnnnncnnggncngncntcggggngcnnnnngnnnnnngcaagccagcctgggccagccccgcttcggcccctcccgggagatccgtgcgcccgaccagcaccagcatcgcggaccgcaaaggccgcccgtcccgtcaaacaagtttcttcttaggctaagaaacgcagtatatacgagtatctctatatatagtactaatggatttggtgtgcttcccccttagcgtccccctnnntctgctcctccnccntcagcctggtctccccctcttctctgccctccacccccgtctctgcactgagatacataagaaacaagggtagtttactgtctgtnttgttttctgggttttcagtgtcctagcggaatgcaagtaggcagccagcccgtctgttccctctccgacccgncccgtcccngcccccgtacactgngcttctgttataccatctttgcctgactctctccggcttctccattgaatggctaatgtgtntgtgaaataaagaaataaagaaaaacaaacgcga

SEQ ID NO: 701570 - DNA, 104 bp, Homo sapiens
atcactgagatgggcatttcctataattaggttattccaatgagttgctgaaatcaagtgtgccattgaccaatggatgcacttggttagccttaattttttta

SEQ ID NO: 701571 - DNA, 348 bp, Homo sapiens
acaccctccttaatatttatattccttactgtattactagatattaagtgtacttatgacaatcaatggtgctcatgtgttctaggggacaaaagtgaaatgaatctgtcattataccaggaaagtcaacatcctcagatcaaatgtgccttaataaatttgttttcatttagattacaaacagtgatagacaagaccattataatacacgtcattggagggctgcgtataaagtaaatagcctgatgctcattaggaaaaataaaccagtgaacaatatttctctattgtacttatcagaaccattttgtctcattatccctgttctagctgaagtcttgtctcacg

SEQ ID NO: 701572 - DNA, 175 bp, Homo sapiens
attatccccatatggcagaaagattttctttaaaaaaaaagatagaataacacaagaaaccaatttaggattatgcttcactcagaggaggcaggcagggaggacacaccaggtgcttaaatacactgggcatgtattctatctccaattgggcaatgggtacattgacgttcac

SEQ ID NO: 701573 - DNA, 300 bp, Homo sapiens
gtgcggcggctggttctagtctagaatctcagtgctacatgaggggaggatgatgtgcgtcgccacagctctgcttaatctcctctcacatataacacacaagcacactctgcctaatactagcataagattttgtgtaccgtgggaggggcttaagttgttaggggtgtttatcgttttcttgcctttataaagctttttttgggaaaaggattcccagaagaacactttaagagtaatgtcaaacatcggtgcagcccagccccggcccgggggtaacccgaggctcggaattccggt

SEQ ID NO: 701574 - DNA, 335 bp, Homo sapiens
tacggttgcaaaaaaacaacggagggggcctttctgtccgacatcttgacgaggctgcagtgactgctgctatactgcgagcttctcaatgccggctaaggactacaagaagaagaaggacgctggaaagtctgccaagaaagacaaagacccagtgaacaaatccaggggcaacgccaaaaagaataactggtccataggcaaagttcgggacacgctcaatagcttaatacttgatgacaaagctacctatgataaactctgttaagaagttcccaactataaacttataaccccagctgtggtctctgagagactgaagattcaaggctccc

SEQ ID NO: 701575 - DNA, 1157 bp, Homo sapiens
  misc_feature (1063)..(1063): n is a, c, g, or t
ggtggaggaggtccttcgggagggggctgagagcctcgagcagacaactgggtctggaggcacgtgagtgtcctctgggcgagtatacaacctggcagtggtgatgggcctgcgaccctgacgtactttaaacagctttcgtgtgcgccttgcgacgtactctgcatgctgcgacaacaggcatggtccctttgggctagctccgtggcagccagtacgattgccaatcagtggctgcagtcccgccgattcagtgttcattaccgtgggtaggctcccagcatggcgcgagtttactgcagacgtggtggtgacccgtgagtgtgctgctggagcctccacgcggtgcccccgtagaagcgtgcgcaaatctcagtcgacgatcagacaaggttggcttgtgcgcagtctggcccatgagctcagtcagccagagtgaagcagcatcgcaggaccttgtgctgacagacacggggaagcaacactttggatacccttggtcgaaggcgtcatatcatggcgtcttggatccttgctacaagcacagttgacgcacttcgacgtctaccgtaccgttacgggtgtattggacttgttgtgacattccgtccacttgagcggccgggagttgccaagaagttgggcgatggaccattggatcgcaccgatgatgcaacgactaatcactcacacgcgtaaaggtggaacccaggaggtcgacggcacacacccgaagtgcgaggagggaaaccaccggattggaaacacaagcttcattggagagcgcctatatggaagtctatgccctgacggaacggtgggatgggccgacatgaatgtgacgacgcaattgcaagagcaggagtgtaatggaaggatgcatggcttgcaggggattgaggggggaatgttcccaagggaggtaagaatggagagacagtcggacatatcggaggcgatgggccacacaaatggcggagcacagacgcgactagagccggcgagaaagcccgaacgtacaatggaatgaccacgttccagggggagacccgaacgttgcagnagatcccgcgaaacaatgacaagggacgataacagtcgaaaagtacaccgaacgtgatcggagcagtaacaaaggaacacgcacatcgagaacg

SEQ ID NO: 701576 - DNA, 535 bp, Homo sapiens
acctttgaggatgtggctgtgtacttcacccagaatgaatgggccagcctgcaccctacgcagagggccctatacagggaggtgatgctggagaattatgcaaatgtgacttccttgttttcacttctccgaaccctgaggcagtgtgtgaagctgggacgccagccatgttccagaccgcttggcgccaaatggagtcttgctctatcgacaggctggagtgcagtggcgcgatcctggttcactgcaccctccccctctggggttcaagcgattctcctgcctcagcctcccgagtagctgggactacaagcacgcgcccccacacccagctaatttttgtatttttagtagagaccaggtttccccatgttggccaggatggtctcgatcccttgacctcgtgattccccccccttggcttcccaaagtgctgggattacaggcgtgagcccccgtgcccaccctctctttgttaatgtggtgaattacatgatttttctttcaaatattaaaccacctctgcggtgggata

SEQ ID NO: 701577 - DNA, 446 bp, Homo sapiens
gcgtgatctctactaaacatgtcaagttatgcttagcatgggcatagtgattcactatctgtagtcccagtttacttggagagggggtgatgctggggcagcaggatcgcttgaacccaggaggttgaggttgcagtgagccaagatggtaccagtctaggtgacaaagtgacaccctgtctcaaaaaagaaaccaaacaaacataaaaaaaaaaaaaaaggcaaatcagcccaaatttgggcatttcccctctctcgctaaacagctgcttatcccgagagagcatttgaactggaaacagcaggaaacagtgggaaaggcattccaaagacaggcttggcggtcgtaaaggccgggcttagtcatccaggcttcacacttcggacaaaagggccattacttcgcattactctgcaggaccggaatgtgaactaaaatggtgctg

SEQ ID NO: 701578 - DNA, 234 bp, Homo sapiens
  misc_feature (147)..(147): n is a, c, g, or t
ctgaggtcccgacgacatcacactcatagcatctcgcaatcgtactgcgagagcggaggccagtagcactagcctctgcgctgaggtgctggacgatatcagcagctgtagctacaaacccaggcttctcacagctacagcatgaanaatctcctgagtcacaatcctaggagagtctggagcagtgaacgtcacacgcggcagagggcctgccacatgcctagagtcagagct

SEQ ID NO: 701579 - DNA, 334 bp, Homo sapiens
  misc_feature (49)..(49): n is a, c, g, or t
  misc_feature (130)..(131): n is a, c, g, or t
  misc_feature (133)..(133): n is a, c, g, or t
  misc_feature (136)..(136): n is a, c, g, or t
  misc_feature (315)..(315): n is a, c, g, or t
gaattcggcacgaggttaaatgttgtattggctggggattttaattgcntacgagaccgtagccagataaggtgtttacgctgatcaggtaacaaggcgcgccaaaaagcaaaacgcccgcatatgcgcnncnagngaacacgtcgtagagggaagattattcttcttcgtcgcgcaggaaccaatcagcatatcaacgtgaacggtgttgatcagctgacgtgcggaagacatcagtttgctccagaagtcctggtggtgaccacaaaccaccaaatccatatcgtatttcttgattgcatcgaccagaacctngcccaggtcgccgctgccg

SEQ ID NO: 701580 - DNA, 222 bp, Homo sapiens
cagtccaacatccggggggtggactacacatgaataggtctagggcttttattttaataattaattgattggttaacttttggagagggagtttccctctggtggaccaggctgggagttgcaaggtcacgatctgggctcaccgcaaatttggcctccggggttcaagcaattctctggcctcagcctcctgagtagctgggatggcaggcgcccgccacc

SEQ ID NO: 701581 - DNA, 1396 bp, Homo sapiens
gggcggaccttgacttcgcctccgaatgctgtcagtggtgtgcagcagcctgtctgagggggtgggcgtgtggcgctgctccgaaatctccgctgagctcattctgctccctgacagagctgcaggagctgtgaggctgtatacgaacggctctgcaggcgcaggagccaacagtggtgtgcagagcagcagctggcatgctccttttggaaccagtaaaacaccatatgaaagtaagcattgtgtccactctccaccgaatgggtcctaatctcgccagctgcattgaggggcagcatgcaaaagccagctggctggcacatgatcacctttacctgcagctgcatgggcatgagaaatgtagtccatgacaacacgttcagtcaagacgttgaacctgtgccaaggaaaccggcctcatatcatggccattcacgagagctgactgacactcttggacacctgaaagattactgcatggacatggcgtacatgacatgcatatagacggacgatgcacagaactataatggccacgcactgggtctttgcgaagacaacaatacttcgcactctgcatacatatgatagcaccattgggcacccgacgctcggggatcaattggaagcctcccagcaccagaacacggcgccaccagcaagcggagaagcacatgcacttgaatcgcgcaactccacgggcacaatctgcgcagagcagagaccagtccatagagaccacaccagatacatacacaaagcaccccaaatgtaagtggaccacgcagaaaaagaatttgatgtccccaattggggccccaaacacacatcgagaaccagcgagtcaaaatatatgcaccacaaagggcaagggaccgacgacctacacattacgaagaaattctttcccccacccatgtgaccgtgagacaattatgacacaatgaaagatcgaaggagggaacgatgtgaagaaaaccggtctaccatagagaagatcacgcatatgctgcaatagacacagctagggaaccagtcgtagccacaccataaaatggaatcaaaacaatggcatacaaatcgaaatagaaaatagaaaatactaaaccaaaatctcaaacatctgaaaccacacaaacccattgacatcaccaaccacatatcagacagaacataacaccatataaacttctactaatatcagttaaaaactagatcatttaaactcccccacaacattataagaataaaacaccacactaaaccacacaaatacctctcacaacacgacaatatcataatacacacacaatatagacaacacataaataaacacataactacacaactactcagtagaccaaactagtacatatatcgacaccacacaaaacag

SEQ ID NO: 701582 - DNA, 278 bp, Homo sapiens
ttgagctcggtacccacaatcaccaccttcatgatataataatggtacttacttatgttccttcaagctaagactgggtgcacagtgatcccttttgcttctctgaaccctatcttggacgacaataccttggtgacatttgacacactcttggatggttgactattatggagtaaagctattacgaagtctactctggggaggatacaagaaagggtgtgtcctccaccaatgggtacctggtgatgtattaaatggcgagggggaatggactatga

SEQ ID NO: 701583 - DNA, 393 bp, Homo sapiens
atgagaattgtaatcttgtgcttgtagttgcggagggtggatttgaattctggaatttaggttccggagacaataagtcacataacactttctccgatagggtacagcatgtcctgaataggctatagtaaatcacctcagactggtcataggtgttgcatgcaaacatttctccattttactccctttggtaatgaatctagtaatagatggaaattttccctagattcactgtgttagtcagttggggaagtttggaggcaaagatacaggagtttatggggaggtagtgtacataaatataatcatatgctatataaggaagtttgggtcagcagcaggaccatatataggatatgattatatttatgtacactagctccccataaactc

SEQ ID NO: 701584 - DNA, 283 bp, Homo sapiens
aggatagaaggaaaccagaacatggactggtccaaaccaagaaatgtacagtaagtctcatgtaaaccatctgatgtagtgatacttgaatatataagctctgtagtattggtttgctagagtcaccaccttgagattacagatagttagcatcagttatgtagctataatatgtctatagtatataaatctataatcaaaaataacagcaactacggaatcagataactgactctaagcttataacaaggagtgaatatataaatcagtgtaccctcagtcc

SEQ ID NO: 701585 - DNA, 215 bp, Homo sapiens
ggggggttttttttccccccaggggccccgtttccgggaaaaggggtgtccccccccggggcctggggggggttttaaccccattccctttcccctggggccgggggggggaaagggtccccccttttttcccctttttttgttccccccgggttccccctccttggggggggggggggccggtttttttttttccttaattgggttttttttta

SEQ ID NO: 701586 - DNA, 589 bp, Homo sapiens
  misc_feature (29)..(29): n is a, c, g, or t
  misc_feature (137)..(137): n is a, c, g, or t
  misc_feature (152)..(152): n is a, c, g, or t
  misc_feature (164)..(164): n is a, c, g, or t
  misc_feature (168)..(168): n is a, c, g, or t
  misc_feature (170)..(170): n is a, c, g, or t
  misc_feature (172)..(172): n is a, c, g, or t
  misc_feature (175)..(175): n is a, c, g, or t
  misc_feature (180)..(180): n is a, c, g, or t
  misc_feature (186)..(186): n is a, c, g, or t
  misc_feature (191)..(191): n is a, c, g, or t
  misc_feature (196)..(196): n is a, c, g, or t
  misc_feature (198)..(198): n is a, c, g, or t
  misc_feature (200)..(202): n is a, c, g, or t
  misc_feature (204)..(204): n is a, c, g, or t
  misc_feature (211)..(211): n is a, c, g, or t
  misc_feature (213)..(213): n is a, c, g, or t
  misc_feature (220)..(220): n is a, c, g, or t
  misc_feature (228)..(228): n is a, c, g, or t
  misc_feature (230)..(230): n is a, c, g, or t
  misc_feature (240)..(240): n is a, c, g, or t
  misc_feature (273)..(273): n is a, c, g, or t
  misc_feature (288)..(288): n is a, c, g, or t
  misc_feature (299)..(299): n is a, c, g, or t
  misc_feature (303)..(303): n is a, c, g, or t
  misc_feature (319)..(319): n is a, c, g, or t
  misc_feature (325)..(325): n is a, c, g, or t
  misc_feature (373)..(373): n is a, c, g, or t
  misc_feature (384)..(385): n is a, c, g, or t
  misc_feature (401)..(402): n is a, c, g, or t
  misc_feature (404)..(404): n is a, c, g, or t
  misc_feature (406)..(406): n is a, c, g, or t
  misc_feature (424)..(425): n is a, c, g, or t
  misc_feature (434)..(435): n is a, c, g, or t
  misc_feature (438)..(438): n is a, c, g, or t
  misc_feature (448)..(448): n is a, c, g, or t
  misc_feature (454)..(454): n is a, c, g, or t
  misc_feature (464)..(465): n is a, c, g, or t
  misc_feature (474)..(475): n is a, c, g, or t
  misc_feature (483)..(483): n is a, c, g, or t
  misc_feature (489)..(489): n is a, c, g, or t
  misc_feature (491)..(491): n is a, c, g, or t
  misc_feature (493)..(493): n is a, c, g, or t
  misc_feature (495)..(495): n is a, c, g, or t
  misc_feature (506)..(506): n is a, c, g, or t
  misc_feature (511)..(512): n is a, c, g, or t
  misc_feature (523)..(523): n is a, c, g, or t
  misc_feature (529)..(529): n is a, c, g, or t
  misc_feature (560)..(560): n is a, c, g, or t
aaaatgcagacacactattacaggctgtnaagtaacaaatgagtgttacacaattaaaatattaacacatacttatgggatttgttgaatgactaacagacccataaaagaaattaaatctgagacgaaatccagtnttagcacctacaatntctctgacagtnaaantntnaangtggnttctcnctccntaatngnannntnaaactcncncccaaanacagcgcncncaaaccccanggataaacgaaaggcataagccgccccgatccnaggtacggacagccnaaagctgagcnacanatatggactcagactngtgagngttacttgagatgtacttactgtactttagccaattcattagatttcngggcgcggaannctggagatgagagaanncngnggggcagaaggggggccnnagggatagnnaanaattagtaanttacantttttttccnntcatttttnnttctcagnagtgantngnanaacaaaacganaagtnnaatagtgtttnccggcnttttccatatccaggggcacagcggggactnttaggtggcgggggggggggcggccactt

SEQ ID NO: 701587 - DNA, 935 bp, Homo sapiens
gaaaacgcacaaaaccagagacaaccgactcagcgtcagtcagagcctgggtgttcaataggacagaggccggaggcaggcggcttagacgctcgcagtgcccgtgccacctgccctgccctgccctgctcgctcgctctgccctgcctgcgccgcggtgcactgacctgccagcatgctgcctgagagtgggcttgcccctgcttgctgcctgctgcctgcctgcctgcctgctgctgcctgctgctgcctgctgctgctgctgctacttggtgctgctgagatggctggctgagctgtgcgtgggctgctgcgcggagtgtgctgttcctgcttgcccgccctgcacacccctgagctgcctgtgccgcctgctgggcccccgcctggttgcgcctgccctgccgcggtggcctgcagttggccggacgtgcgcccctgcatgccatgcgccgtggcggctctgtccggggatgcctgtggctagctgtgcttgctgctctgtgtgttgcgcccgtgcttggatgtgtgcgatgttgctgttgctggtgcggtcttaacaaccccctgcgctgctggaccagtggtgctgcggctgctatccccacccgggctccgagcttgcccctgcaggcgctggtcattggtgcgatttgcacttgtgagaatgcgccgggacgccgaagtaatggcgccagcccggagcaggttgccgacacatggctgatgaccactcagaaggagtgcctggtggcagaaccacgttggacagccccgatgaacgtgttgggcggtggagtgcagtgctggcctgacgcccctcaagtcgggtatgatgagctgccgtgttctggagcaggtcctgacagcacggcgatggccaggtgaactcacttggctgagcccacagtgaccccctcagctctccacgctgc

SEQ ID NO: 701588 - DNA, 1002 bp, Homo sapiens
  misc_feature (44)..(44): n is a, c, g, or t
  misc_feature (56)..(57): n is a, c, g, or t
  misc_feature (64)..(64): n is a, c, g, or t
  misc_feature (67)..(67): n is a, c, g, or t
  misc_feature (70)..(70): n is a, c, g, or t
  misc_feature (79)..(79): n is a, c, g, or t
  misc_feature (88)..(88): n is a, c, g, or t
  misc_feature (99)..(99): n is a, c, g, or t
  misc_feature (118)..(118): n is a, c, g, or t
  misc_feature (142)..(142): n is a, c, g, or t
  misc_feature (166)..(166): n is a, c, g, or t
  misc_feature (177)..(177): n is a, c, g, or t
  misc_feature (184)..(184): n is a, c, g, or t
  misc_feature (206)..(207): n is a, c, g, or t
  misc_feature (211)..(211): n is a, c, g, or t
  misc_feature (215)..(216): n is a, c, g, or t
  misc_feature (220)..(220): n is a, c, g, or t
  misc_feature (222)..(222): n is a, c, g, or t
  misc_feature (224)..(224): n is a, c, g, or t
  misc_feature (236)..(236): n is a, c, g, or t
  misc_feature (238)..(238): n is a, c, g, or t
  misc_feature (244)..(244): n is a, c, g, or t
  misc_feature (252)..(252): n is a, c, g, or t
  misc_feature (269)..(269): n is a, c, g, or t
  misc_feature (271)..(271): n is a, c, g, or t
  misc_feature (281)..(281): n is a, c, g, or t
  misc_feature (288)..(288): n is a, c, g, or t
  misc_feature (294)..(294): n is a, c, g, or t
  misc_feature (297)..(298): n is a, c, g, or t
  misc_feature (300)..(300): n is a, c, g, or t
  misc_feature (306)..(307): n is a, c, g, or t
  misc_feature (309)..(309): n is a, c, g, or t
  misc_feature (354)..(354): n is a, c, g, or t
  misc_feature (366)..(366): n is a, c, g, or t
  misc_feature (956)..(956): n is a, c, g, or t
ttttccacatactttttcaacccactattcttcctattttccanctcatccccttnntttttanaanaanaaaaccttnctgaaaatncagacaaattnggcattatcttgagaaatnaactcatgaagctaccttctgatnttgtaactgccgtaagaggaaaangattattaaangctattntcattaaagaaaccaaagattnntatncttnnaagntntntctactacttcnanataatngacttctngccaatccaacccatgncnacattatcanttttgcncctccnctnntnatcaannangatgagcttcgagagtccattgaaattattaacaagaccatcttntctttctgaggntagccagctgttttcagtggtccctgggagccagctggagacaggtggtcctgtaaaagctttattcctaatgtgggcacattccactcccatgagtcttcaaaaactttttttttgaatatatttttttcagttgatacataatagaacaacgtttatgaacctgccgtttgctttgtaacgtaactaaataatgtaatggcatctatattcagttgaagtgttttgatgtgcatgtgtacttcctaaggtgaaatgcatctatatacagacagcctctaaatcaagtccttcagtataattgatatatgtttttataatttcctcactggtataagtgtttcatatttgaaaaagttatctctgggtattgcataaaaggcttcatcttataaagtgaaatcattgttattgaattttaggaaggattaatggttaagtgtatataaaatactaatattaagtaaacttcatattggccaacaccagggttgtattctatggatgtcattattttgaattaagaattagtgtttaacattcctaaattgttttgagtgcttgattataatttgtaaaaaatgtttatntcaatacttctttaaatttaaaatatcatcttatatttcaaatgtc

SEQ ID NO: 701589 - DNA, 900 bp, Homo sapiens
  misc_feature (784)..(784): n is a, c, g, or t
cctcttgccgctgctcttttgcgtatcaaattcttgccgggccactgttgctaccacccccgcccggaatgcgcgctctacgttgcgaggttccgcggagcccattgaaccaaataattgaagttagtatagggcaccccggctggacgtgcacacacacgatctgggtatctcatgtttgtttggaatagtacgcacatgtgttcaaccaccctgggccaaatttttccattcgggaagcattttgttttctcaccacgagcgtgcgcacacgctatgtctctgccatacgccttccattaactcttcggtactgggtcttgagtatcaatccgcgcgcatttattttgcgtgaccactcggtgggtgacaaccctcggcgttgctatgttctctccccctgattgttggatccgcctctcgcttagtccgaaataattcgcaccccctcgtctcgcacaccaggcactctccccaccaaggtcggtggttagcaagtgcacccaagcgtcacacacacacacccctttgtggagtgagaccaccaacaaccggcgctagttgagagacacacgctgctcaaacatacgcccccgtttcgctacaaaaatgaaagtttcccacgtttcttttacaaatgcatctattatatctggcacacacgagtacgatacatagatacaacatatactctccttactgacgaaccatgtgagcacagacgcagagacattctcacagttctctaattatgtagtcaacgcacgcaaagtcaccccccctngttggataacatactccgaaccacacacatcgttggatcttcctagaagtaacatcttgttcttaccacaacgccattccaaaaaaccaccttctttttccccaaacccataacaa

SEQ ID NO: 701590 - DNA, 1356 bp, Homo sapiens
  misc_feature (1)..(1): n is a, c, g, or t
ntctattcgtgtccctccttattcgttttgctttttgtttcctcgctgtcggttgttgtctttctgtcgctccttgtgtccttcttgttctcggttggttttctctcttttgctggtggttactgtttggtcttctgcggtcctgccgtgtgatatctattctcctttgtgtgctttgcccgtctttctgtggctctgtgtgtgcttttctcggtttgttccttccttttaacgtgtcgtgcaacgttggggggctcttcgtctctgcgttgggtgttcttgtacttttgggggtgcctaccatttctgctgtctcgcctgtggttgtttccttcctcttctcagtggtggcccgatgtgtgttctatattggcgccctcgtaagttgttttgattgctttgggtttttcctctttgcctcttgtgtgcctcatgcgggctttctctgtggtggtccccgttttctctctttcggggcttcgtccttgttggtctgcccctgtattttctctttgggtgtatcctggtccccgcttattctgatctgcgttcttacgttgcctttggcggctagctcagtctttttgtgctggtttgtcggttacgctggttaagctgagctgttggcgagctcctatgcgccccttatgtggtctcttggcttggtatgtgatgccgtatgaatgcgctcttagggagctctaggggtgtgtcagtatctctctggaggctggttcccttggtaccgactgtactagttcttggtttcctctcgtctcctactgtcgcatccctctggctatcatagtaacccgtagtgccgcatgcgtggcacatcatctctctcagggtccctttcgacgcggtgtctatttcgaggaagatgctgtcatcctgctggtgatggggcgttgaactctctgctcgcctgcactgggtatcctgggtcactggcccatgggctgatgttcattcactgtgttgattttatttgacaccctgtgtagtggtggtgtctcatctttctccatctgcgcctgagtagtctggtctgtagggcctgcctctactgcatatatccttccccaacagtcgttctagtgataagtcgttccttagttctcagttatgatccaggcggcctagccagtgtctgaccataggtgcataggggtcaggtgcagaggtggcagggatggtctccagatagaccagaaatgcacttaaactgcaacgtcccgtctccttccctcaccccctatcccatccccacctcccagccccagcaccagtcctcctaggagcaggaccctgatgaagcgggcggcggtggggctgtactcgtgggactaactt

SEQ ID NO: 701591 - DNA, 1002 bp, Homo sapiens
  misc_feature (44)..(44): n is a, c, g, or t
  misc_feature (56)..(57): n is a, c, g, or t
  misc_feature (64)..(64): n is a, c, g, or t
  misc_feature (67)..(67): n is a, c, g, or t
  misc_feature (70)..(70): n is a, c, g, or t
  misc_feature (79)..(79): n is a, c, g, or t
  misc_feature (88)..(88): n is a, c, g, or t
  misc_feature (99)..(99): n is a, c, g, or t
  misc_feature (118)..(118): n is a, c, g, or t
  misc_feature (142)..(142): n is a, c, g, or t
  misc_feature (166)..(166): n is a, c, g, or t
  misc_feature (177)..(177): n is a, c, g, or t
  misc_feature (184)..(184): n is a, c, g, or t
  misc_feature (206)..(207): n is a, c, g, or t
  misc_feature (211)..(211): n is a, c, g, or t
  misc_feature (215)..(216): n is a, c, g, or t
  misc_feature (220)..(220): n is a, c, g, or t
  misc_feature (222)..(222): n is a, c, g, or t
  misc_feature (224)..(224): n is a, c, g, or t
  misc_feature (236)..(236): n is a, c, g, or t
  misc_feature (238)..(238): n is a, c, g, or t
  misc_feature (244)..(244): n is a, c, g, or t
  misc_feature (252)..(252): n is a, c, g, or t
  misc_feature (269)..(269): n is a, c, g, or t
  misc_feature (271)..(271): n is a, c, g, or t
  misc_feature (281)..(281): n is a, c, g, or t
  misc_feature (288)..(288): n is a, c, g, or t
  misc_feature (294)..(294): n is a, c, g, or t
  misc_feature (297)..(298): n is a, c, g, or t
  misc_feature (300)..(300): n is a, c, g, or t
  misc_feature (306)..(307): n is a, c, g, or t
  misc_feature (309)..(309): n is a, c, g, or t
  misc_feature (354)..(354): n is a, c, g, or t
  misc_feature (366)..(366): n is a, c, g, or t
  misc_feature (563)..(563): n is a, c, g, or t
  misc_feature (571)..(571): n is a, c, g, or t
  misc_feature (582)..(582): n is a, c, g, or t
  misc_feature (589)..(589): n is a, c, g, or t
  misc_feature (599)..(599): n is a, c, g, or t
  misc_feature (602)..(602): n is a, c, g, or t
  misc_feature (610)..(610): n is a, c, g, or t
  misc_feature (618)..(620): n is a, c, g, or t
  misc_feature (623)..(624): n is a, c, g, or t
  misc_feature (626)..(626): n is a, c, g, or t
  misc_feature (629)..(629): n is a, c, g, or t
  misc_feature (632)..(632): n is a, c, g, or t
  misc_feature (634)..(634): n is a, c, g, or t
  misc_feature (646)..(646): n is a, c, g, or t
  misc_feature (648)..(648): n is a, c, g, or t
  misc_feature (654)..(654): n is a, c, g, or t
  misc_feature (956)..(956): n is a, c, g, or t
ttttccacatactttttcaacccactattcttcctattttccanctcatccccttnntttttanaanaanaaaaccttnctgaaaatncagacaaattnggcattatcttgagaaatnaactcatgaagctaccttctgatnttgtaactgccgtaagaggaaaangattattaaangctattntcattaaagaaaccaaagattnntatncttnnaagntntntctactacttcnanataatngacttctngccaatccaacccatgncnacattatcanttttgcncctccnctnntnatcaannangatgagcttcgagagtccattgaaattattaacaagaccatcttntctttctgaggntagccagctgttttcagtggtccctgggagccagctggagacaggtggtcctgtaaaagctttattcctaatgtgggcacattccactcccatgagtcttcaaaaactttttttttgaatatatttttttcagttgatacataatagaacaacgtttatgaacctgccgtttgctttgtcccgtccctccctaatgncctggccnccctattccgntgcagcncccccctgcnccngtgccccncctccggnnnccnncntcnctntnccgccccccccncnctcccncccctccgtctcattgatatatgtttttataatttcctcactggtataagtgtttcatatttgaaaaagttatctctgggtattgcataaaaggcttcatcttataaagtgaaatcattgttattgaattttaggaaggattaatggttaagtgtatataaaatactaatattaagtaaacttcatattggccaacaccagggttgtattctatggatgtcattattttgaattaagaattagtgtttaacattcctaaattgttttgagtgcttgattataatttgtaaaaaatgtttatntcaatacttctttaaatttaaaatatcatcttatatttcaaatgtc

SEQ ID NO: 701592 - DNA, 434 bp, Homo sapiens
gcccttgggcatatgtttttcaaaagagaaactacttttcatttggtaccatagcgtgacgagcaggggccaatgactgtaaaacatgctgtggcacatatatttatagtctgttatgtggaacaaatgtaatatattgaaactttatattatatataaggaactttgtactatccgcatttcgtatcagtattatgtagcatgacagagactgtgaggtctgagcagctggtggctcaggacgttgagaaactcgaaggaatcctttcgtgaggatgcgcagctatccctacccatctctctcacctcaaacggaggagaaaggggaatcagagataatgtgagtgtgtccttgttctctgttcttaggaggaatgttcttaccaactgttcatacgctttataaaccaataaatgtattctgagtaaagaga

SEQ ID NO: 701593 - DNA, 410 bp, Homo sapiens
atcgactcgccgtacgaaaggtggaatagtaccagcctgcagtggagactgcaagcggaggcgatgaagcgagctgcattgtaaaagaaggtctggaaagctcatttgcaggaaccgcttattagcacaggacagtgaaccacacgtccacaacagcccaagatcagactatctgccagactcatcatgctgggggattacacacagcaggctcatgtttgtgcacacttctactagacggcagctggactgtactatgccagaataagacaatgtactgcatcgccagaggatcctgactgtctatgcgacctgcattacaacttatggccttagtgctaccgtcgatagtctatgcgatgactaccagcccagaattgagtgaactgtgttatcattctatatgacct

SEQ ID NO: 701594 - DNA, 474 bp, Homo sapiens
  misc_feature (257)..(257): n is a, c, g, or t
  misc_feature (270)..(270): n is a, c, g, or t
cctctagagcggacgcctactactactaaattcgcggccgcgtcgacgctcgaagcgcacggcggagtcaaggctgttggggttcaggccatagttcgggatgtcatccgcaacgcgtgcgatgccgctgctgccaagcgtttcctggcggcccacgttggtcaaaccgacgtcgctacgggccacaagtgcgccgtcggccctgacgacgcttgaagcctcgccaaccttggaaacctgcccaaatcggccggaangcgcgatcatggncaaaccatcagtcattaactcagtgacttgcgccgctgactcatagctgttgccttgcaagctcgagacaaattccctgcccgtctgcctggtgatcatttgaccgccgcggtccaccgtcgggtcggcaatcggcccagcaggcgtcggtcatttccagtgggctgctattacctaaaagcccaccggcagtcttggcaagac

SEQ ID NO: 701595 - DNA, 207 bp, Homo sapiens
cccgtctcggcgtaaggtgatgccggcctggcggaataagccccagtcgtcttgctcgatggcagattgatcccccacggacaagcctgccaggatgcccgctgcacgccggtctgacacatgggcaaaaatcgcggcccgtatgcgctggcgccagcggtccatcaccccttgccatggccactcggcctgttacgccgatgcggg

SEQ ID NO: 701596 - DNA, 256 bp, Homo sapiens
gtcgacactaattggagaccatttgaatgacagacttgtggaacctgaaatcactccatcctctggcaccaactcatgactccttaatcatctgactagagccccactagggttgccccaccagtcccggctaatttttgtatttttagtagagacggggtttcaccatgttggccaggttggtctcgaactcctgacctcagatgatccgcctgcctcagcttcccaaagttctaggattacagtcgacgcgggc

SEQ ID NO: 701597 - DNA, 803 bp, Homo sapiens
tctctttgataatatctgtgtattggtccacggaccgagtcgatggctcaagaagtgatacaagagcgatcgagagaacagtgcgcagatctgcctgggtcaactttatcaagcactctcgtggttggtggtcccacagcagccgcgaaggtcgtcagaactatcatattccagcgaataacacacaggggcttccccttccaccacaagagaactccaacagcggtaaaccaaaagtcaaccagagccttttaaatttagcggcagccaagtctccaactatttctcgtgtaatacctatatcaagccaagagatttgtgacaattaatctacacaacgtggtacacactttatatattctctaccacatacatccgtgggacctgtgcctgtgacaagggacgtgacacaaccatatgcgcagcacaacacgcacgcttgggtggcgtctaagaaccccatctacacattattaacaatttctacacaccgtatttgtcccacaacagtgggagaaacgccctttctataaaaaaacacatcactcatgtactatataacttggggcgccaacctaaaattttatacttgtggtcgacacagccgctcacattacgagaaaggcctggcgctattttccccattctgttgcgtccaaagacatgttgggcccaaaacacgcgggggacctactaccatttcctatataaaacacccccgttggcgtaatcatgcggtaataacacccatgggccctcaccaagaaccaacagggggcttttacaacgacagtgacacacca

SEQ ID NO: 701598 - DNA, 398 bp, Homo sapiens
cattccattccactctggttgattccattccattccattccattccattccattccattccactccattccattacattccacacgcactccgtttaattcagttccattcctttccaatccattgcactccattccattccattccattgcagtccattccattccattccgttccgttccgttccattacattcaattccattccattccgttccattccactccattccattccattccattccattccattccattccattccattctattccattaaatttcattccattccattccattccattaaattccattccattccattagtttctaatcgggttgattccaatcctttccattatattcaagtcctttccattccatgccattccc

SEQ ID NO: 701599 - DNA, 1320 bp, Homo sapiens
  misc_feature (1320)..(1320): n is a, c, g, or t
ttgtcagtgccataggttatcctcgtggtcactggttacaagtgccgcaatggcccatcatctcatgtgcattggcgcatctgtgggtggcagcccatggtagcaggggccacgtgtcctgcactgtcacaggcacagtgcattgcgtggccaccacaatccatcactcctggcacaagcacagcaacccagctctgtcttcctgcacacatggcatcggcagccgcagcgcatgcatgcactgtgtcgtgaccacgtgccgacacgcaaccgtggcatgcacactttgcacggcagcatcccaggtggcatgcatcgtcaggcaagcatgggtcacaccgacatgcgctcttaagcgccgtcggccgacttgacactggacgttggtggcacagacatccacatacaagtggcacaggcacacatgcacagcgtcgcgcattatgtctccagtgtactccagtcgcatctcttcatcagcggcttggtcgcgccatgattgggctataccgaccatgatacatcaccaaggcaactattgacggagcgcccgagtgccacggcgcgcatcacctgcaggtacagggagatatcgagtacccagccgtgacaccaacactgcgccgcaaagccccagtcgtgctactcaacacaactaccaacaacattcacgcctgggacgttcatggccgcggcgccctagtagataccgcagactacataggagacggctcgacggcacgcacgcaactcgcattacaacccacggacggcgcgcaggttgacagtggacgctgaggatccatcgccacttgcacctaccagatctggagcgcacagcgacgcaacgacaactggatcctcaagaacaacacacaagagcaatgccaggacacggccaaagacaccctacagtacacggctccacctgatacaggggctcacccacagcattgtggccacgactaacgccgtggcgcacaaggtacgcagcgtaacatccagcaacggaagccaaggtaacacatcgagcccaatcaacggacacaacagggccgcaaccggaaacagaaggggaccacaaaaggggaccaaaaagggaccaggagacacatcgggagagcgtcaccactcggcccggcaccaagcagcacatgaagcacagacagacagagacgatagagcagacacaccgaagcgaggagcaagcacaaagaagaaaacccaccactgaccgacagacgaaagcaacagcgaagacacaggacaccaaccagtaccactccgcgcgcacgtacacgactgcggtgagcagaagcn

SEQ ID NO: 701600 - DNA, 100 bp, Homo sapiens
cactgttgttcatacctagtcgctgtatcgggggggggggtatgaacaacagtgcaggtataaccaacagtgcaagttataacaacagtgcaggtataaa

SEQ ID NO: 701601 - DNA, 130 bp, Homo sapiens
atgactgatggtagttggaacgggtacatgtcaagatagtgggatggttaaattgtctcacggttagtaattttgcagagggcgctcagtactcgcctgcccactgtgtccattgctgtctcacaactgg

SEQ ID NO: 701602 - DNA, 276 bp, Homo sapiens
ccagataatttccgaatacccttatgttaacttttcactagtcataagaatgacattacgtcatttgtaaaaaatgtcatagagaactcatggagcactgagactatctcaatatcccacattgagaatacgttatttaggattctatgagtttgtatgtgtgctgtttaatgagaatgatgagcctgggcattttcacatctcttattatacttttacatgtttagaatatttgcccttctgtctgatcattatctgtttgggaaagtcttattc

SEQ ID NO: 701603 - DNA, 117 bp, Homo sapiens
ccaagagtccttttataccacgaaccacgttcgtttgaagtaggaatgctagtctggcataaacataaaaaataccccttctggccagcagtggtcaaaagcgtcaggcagagagat

SEQ ID NO: 701604 - DNA, 1388 bp, Homo sapiens
ccacgcgtcgcggacgcgtggggtcctaaaacatctaaaaaaaaaaaaaaaaaaaaaaaaaaaaaaaaaaaaaaaaaaaaaaaaaaaaaaaaaaaaaaaaaaaaaaaaaaaaaaaaaaaaaagaaaaaagaaaaaaaataaataaaaaaaaaaaaaaaaaaagaataatctgagatgggagagtgagggagtgagatgtttgtttattgttgttgtggttggtgattttttgtttttatttttggtatggtggtgtgacggtcggtggtgtgtcgcgcgtcggtgatgtgtggtgtatgcgtgtgtaatatctaattatgaatgtcgtcgtcgtagttcgacatgacgtcgtatgttataagatagagtacagatacagcagggtgcgcgcgagggaagataagcaggcaatacgatgccaccgcacatagtagagtagcgaagcagtcttgggctgtcggggggcgggaggagagtgagggagagatcgtggaggcgcgacggcaagtgcaggagtagtgatagcgagggagcggagcagcgccgctgcagcgatgggcggtggcagtgtgtcagaactaccacaggggggcgtagtgcggggatcgtgcggcggagtgaggatgatgcagtttactgagtgacatgctccattcgcaatctttgaatctcatacacattataaaataatatgacacacttaaattagtattagtttcatcttttacttattcatcccacacacaagaaagataaacaataacaaaaactcaaacacaaaaccacaaaaaataacaaacccaccaccccaccgcgggagcaggagaggcaggcgggggtggaatggaggggggggaggggggagggagacgggggggcgcgggggagggcatccggacggaggaggggagagagagaggcgaggcccggcggagggagcgggcggaccggggcagggggaggccgggggccgaaggagagagagagaaggcaagcggagtgagcgagggaagagagcgaggaacggagcagggaagccggcgacgacgatggggggcggatgaggagcggagagggaagcgaggaaccaacgggcggggagttgagggtgggggaggcggcagggaggggaggaggcaggggcggggaaccacttggcgatatacgaaacataacccaatcgagtcgagaataaataactaaacataccaaacacaacaataacacacacccaacccaatcaacaaacctacacgaaataaacaaaaataagcgaacaacaaacaaagtcaaaccaggcaaccactaaccgccctcctatcgacaagccagccaccacaaacagaacagaaacaaccaactccaaccaaaccctatcaccatataac

SEQ ID NO: 701605 - DNA, 255 bp, Homo sapiens
gtcatcaggtgaacggggggcacgtcaccgctgatcacatgtctttactgatgacaacggtgcctacaggtgtgggcccccgttgcacagtgaccgggagtacacggtgacctcacggagggagggctatgtccggagggcgggggaaggaaccatcggagacttcaaggcctatgcccgggcgggcgtacgcttggacgatagaggcggaggatgaccagcccctcgggggagtcctcttatcccggaggcatg

SEQ ID NO: 701606 - DNA, 91 bp, Homo sapiens
cccgggcgcctcctggagagcaaggacgcgggggagcagagatgatccgagccgcgccgccgtcgctgttcctgctgctgctgctgctgct

SEQ ID NO: 701607 - DNA, 1164 bp, Homo sapiens
  misc_feature (930)..(930): n is a, c, g, or t
ggaagatggcggaggtgggggagataagttcgagggctgccgactacccgtgctgcggcgtggaaccaggcacaacgagagatgagtggcccctgggcgagatcctgagcgtgaaggacatcagttggccggacagcattttctacgtccattacattgactttcgaacaatacggtctggagtgaatgggtgacgcatgagcggcgtggacctaaagaagatccagttgcccctggaaagaggccagagaacccgctactaatgaacggacttcctgggtcctcgtccttggctctccagagagagaggtgacacgggaaggtggtagggtggtttctaccagcaactcctagtgcccagcagatgacagaccctggtcttcggagttcctcgcccgagaatggaatgctcggaccagtagggctagtggcatgcctcgagacaggatcggaatgcgaaccatctgaatggtttagggctagcgtgatgaggactcccaggaccacgtctgctgcatcggcatactaaccgttcaggtatccaatcgctatgtacgtgggccgaggactggctgatctggatcggaagcccacgagcgaacatgcgtactacctcgggaatgaaagaacccttgagtgctttgagctgggggccgggagccggcctcaaggccgtgggggttccgttgctcccctcgtgacccgacggaggctcgaccagattgccctgtcctcctaactgttggcgagttctggctcaagtacggcgcgtaggttcccgtgttcttccaggcatgtgaccagtgtggaactaggacttcctcctggcagaagattaacgcaagggcaccatgtcctcttggagaattgcgggcgctaaaaacacgaggtttcccggaaacgcagtccctgggcccgggtttccttgangcacaagaaccggtgtttgaaccaaacctatcacacatgggtacgaataatcgatgaaggcccctcggggggatcccgagaaagaacggacacaagggggggaacagccacaccggagaaaacagcatgtagaaccacggaggaacccacacaaagctactaataaaacacaacaatgttaagggacataacacatcctccccccttctgggcccctcccctccctccctcccc

SEQ ID NO: 701608 - DNA, 824 bp, Homo sapiens
gcttgaccgtgctacctgcagaggggtccatacggcgttgttctggattcccgtctggtaacttaaagatgaaacttcacacaatgtcacgtagcccttgatgtcctgcaaatgaaggaggaggagtgtccttagatgtttcctatggcagacaggaacccacttaggttgggcaccaaacatcttgtaactatccaagagttggtaagctagataatcgagtcatatgtagagagggtaataagccgtaatggctagtctagtgagtacattaacatcatcgacatggagggactctgtgtggaggaagccttgctgcatggactagatcgttgccacttgttgcgcatttgaaaattcctgtctagatgctcagtagttgactagtcctccagagaatactgggccagagggactgtgcttgaatgcttgtagcaaggtcgtagactcttctagtggagccgaccatcaccaaattgcatggaacgcgataactcctggaaccttcactaaccctagaatccaggcgattctcttctcggtgagccacgtgcttcgttgtggttactgagccccggggcttagcagcagcctctccacgtgggcatcttatgttgaagcctagcctatcgcatgtgcgctgttgtgaacacagattttccgtcctgcgctaatgtggactttgccttccccatgcaagcaactagggagctcactcagtgggttgatgtggtggatgctggtcgggaagttctgcgctggcgtggcatttcccggaacagcctgcgaggtctgcctgttcttgtgcttcttgagatctgaaa

SEQ ID NO: 701609 - DNA, 409 bp, Homo sapiens
agagaactagtctcgagtctttcttttttacccccatttcttcctaataggaaatcaaggataagcaagggacacccatgtttggtcttattcctgttgcaatgaaacttctagttccacagactttgcatgctggcttctctaaccctgtgtgctgcatgagcctgatactcatccttaattctttttaaacttcatgcttaactactgtgggataataactgtctgcagctctagttaaatcatacttataactatgtccttatattccactctatgcttttggtattgatgatctttacactattaaatggcatttgatactggatctatattgtatggtcttaataagacctacttcttgtcatcccattctttatcctctactttcatgcttgatatcgatgtt

SEQ ID NO: 701610 - DNA, 141 bp, Homo sapiens
cgttatcagcagacaagccacaattaacataggtacaattggtcatgtagctcatgggaaatccacagtcgtcaaagctatttctggagttcatactgtcaggagaatcgcttaaacccagaggcagaattactatagttg

SEQ ID NO: 701611 - DNA, 131 bp, Homo sapiens
tggccagtgtcccggtcaccatgcaggagttctgtcctttgaactccatagtgacccctttttaccttgttccagatgaggacaggtgttgggtattccgatgacctcatcagctcaagtacacctgggca

SEQ ID NO: 701612 - DNA, 322 bp, Homo sapiens
aagatcgtgccactgcactccagcatgggcgacgaagcaagactgtctcacaaaaaaaaaaaacaaagttatcttaagtttctatggggaaaccagatatcccttgattcggacttcctgggctatggtttaaagctaactataactttctggctaatggagtggctcattggcttctcggggatagctaggtgctgggaatttcatgaggggactcaagatttgccttaatttccatgctggggggccttgaggcccttagagaagccctggctctctctccatggtcagcaggggcttcagtcggccctcaagtgtcccc

SEQ ID NO: 701613 - DNA, 664 bp, Homo sapiens
ctgggtggttcttgcttgtcttggtcttccccgcaagaccgcgccaccagtgcctcttgggccaagacactggccgcgcacgtttccccctgggaacaagaggtcttctggtagaaatgtgccctctcggccggcctttgtgggcaaaagactcccacacttgtctcccggaacttccgaggtctcacacttcaggtgtcccattcccaggaagaccatgcggtagttgtccctcgcgtcttgcgccttttcttgttttcaaacgagggccagtgccccagagctcccacaacacccgctcccgagagcgccctctgatgggaccagcccttaccccaccccaaccttgggcgccaggccacggtgccccgcctggccactcaagtagtttattgcgctccgtccgttccgtccctgggcccactggcctggcgcctgttcccccacgggctttcatgtgccacccaccccccggcaggcctttccctgtgccacgccacggagccaaacaaggggcccaagtgcaggcaaccacttgctgagaaccgtttcctgtgccctcccccgccccatccccggttttctgtgttgtgtctttcccggctcaggcagaggcgcctgtccctgctttttttttgaccgggaaattaatgcccctgaagga

SEQ ID NO: 701614 - DNA, 404 bp, Homo sapiens
gtgccaataaatgtgatgataacatacatttcatatataactcagcctataatacatttaatgatatatgaactattttgaaccataaccaccttaaaatgtttgggcatcctggattatgccagtcctaaaatacacacacacacacacacacacacaaacatacacacgcacacatatatacaaatatggtgaaatactatcaaatctgaaggtcatacatatggactgccccttatctgaaatgcttgggcctagaagtggttcagttgtcagattttttggggatggggaaatatttgcgtatacatagtgagatatctggggaatgggacccaagtctaaacacaaaatgggtttatgtcttatatggacctcgtacaaatagcctgatagatgagaga

SEQ ID NO: 701615 - DNA, 281 bp, Homo sapiens
agttcctgaacgacggccccaaaccggggcagtcccgattttgaatattcagcagctcgctgaagtttgtccctaaaggcaaaaaaacttttgcctcccagggtcactaggcgggcagcccccaccccccccagacggcccccccactgaggccccacgttggccattcccccttggagttggaaccctgggggtcgaaacaggaaggcagggggcagtggttgaaacatcaggaccctcccaaggccccggctttgaacaagacctttttgttttttgga

SEQ ID NO: 701616 - DNA, 218 bp, Homo sapiens
attaaagcagccggtctaaatgttgagcctttttggctggcttgtttgcaaggacctcgcaacgtcaaattgggagctcatctgcatgtaggggccgtggcctctccagcactggtgctcaccacaggaggtcctcccctcactctctctcactgaggaagaagtgacaaagaagagtcagagtctatataatggctttgctttactacctcttataa

SEQ ID NO: 701617 - DNA, 316 bp, Homo sapiens
tctctctgggcagcgacgcacctttaccattcactggtggctgctgcatggacttggcagcttctagtatctgctcctcaagttcaatgactcatctgctccttgggcttgggccgggcttccgctgctctagctttttggctgcagcctcaatggcggctgcagctcccaagagctcattctcagcaatgactgtggggtcctctgggtctaccccttctgttcccttcatggcttcagcagcctggatgagctcagtgacggaaccagccacacgctttgaatgtcctgtcaactgctgcttcagttctgggct

SEQ ID NO: 701618 - DNA, 467 bp, Homo sapiens
gaaaacgtctgcaaaataggctactttctgtagtcatttttcatttccaaagcactcagcaaaagctggctgttttattgtaagtactctggcaattcacctttcaattcaaatatcctgtagagaacgcttcctctgagaagccactggatgtctgtatggtgcaggaggttcatgtgctgtctgtccaggtttttgttttgggtgtttttttttttttaaacattttggcataaatgggtcttggatacaggtaaccagtttggtaacattatccagaacttcactgtatcttcagagtttggatatcagcatctcgtggggagaaagcaggggtgctataagtgtcaacatcgggatttctttttttttttaaaaaacgcaaagggctttagggggacacccacggggggggccccgggggggtagataccagacctcgggtaatcgagatttgatgtcccaac

SEQ ID NO: 701619 - DNA, 106 bp, Homo sapiens
cgcggctcggatcccgcgttgctgtggctctggcgtagaccagtggctacagctccaattagacccctagcctgggaatctccagcatgccatgggcatcagtccg

SEQ ID NO: 701620 - DNA, 501 bp, Homo sapiens
actaaaggtgttaacagctctatagcatccatgctacctatttactacatatagggactcatgccgagaagtacgacttaaaaaagctattctgctacatttcgtgtgtcaatgcatgaagtctagccttgtacataatacattttgtcgtcgtcttgtatgctatactaatgcagattgcttgattatgctaatgagtagtctcttacctcattctgatccattgtaatatagcacatttcagtctcagtcagtgatctagcaagaataaatcctggagatggaattgcatattttttcttttaaagaccatggcttttcccatttgttggtcacaggtaattttgtaaacagaaaaggaaacatattgctctcagtctctactgcaactttattctgtctctaaaaacaagagcctgcgaggtattcttcaaagaatgtatcactatatatgaaatctaaacaagaaacagagtcaacactgaagtgctggatggaaag

SEQ ID NO: 701621 - DNA, 819 bp, Homo sapiens
  misc_feature (8)..(8): n is a, c, g, or t
  misc_feature (17)..(17): n is a, c, g, or t
  misc_feature (75)..(75): n is a, c, g, or t
  misc_feature (148)..(148): n is a, c, g, or t
  misc_feature (166)..(166): n is a, c, g, or t
  misc_feature (176)..(176): n is a, c, g, or t
  misc_feature (181)..(181): n is a, c, g, or t
  misc_feature (195)..(195): n is a, c, g, or t
  misc_feature (214)..(214): n is a, c, g, or t
  misc_feature (223)..(224): n is a, c, g, or t
  misc_feature (228)..(228): n is a, c, g, or t
  misc_feature (248)..(248): n is a, c, g, or t
  misc_feature (253)..(253): n is a, c, g, or t
  misc_feature (256)..(256): n is a, c, g, or t
  misc_feature (258)..(258): n is a, c, g, or t
  misc_feature (260)..(261): n is a, c, g, or t
  misc_feature (267)..(267): n is a, c, g, or t
  misc_feature (271)..(271): n is a, c, g, or t
  misc_feature (280)..(282): n is a, c, g, or t
  misc_feature (286)..(286): n is a, c, g, or t
  misc_feature (289)..(289): n is a, c, g, or t
  misc_feature (291)..(291): n is a, c, g, or t
  misc_feature (295)..(295): n is a, c, g, or t
  misc_feature (311)..(312): n is a, c, g, or t
  misc_feature (315)..(316): n is a, c, g, or t
  misc_feature (325)..(325): n is a, c, g, or t
  misc_feature (350)..(350): n is a, c, g, or t
  misc_feature (354)..(355): n is a, c, g, or t
  misc_feature (363)..(363): n is a, c, g, or t
  misc_feature (412)..(412): n is a, c, g, or t
  misc_feature (433)..(433): n is a, c, g, or t
  misc_feature (443)..(443): n is a, c, g, or t
  misc_feature (448)..(448): n is a, c, g, or t
  misc_feature (470)..(470): n is a, c, g, or t
  misc_feature (479)..(479): n is a, c, g, or t
  misc_feature (481)..(481): n is a, c, g, or t
  misc_feature (509)..(509): n is a, c, g, or t
  misc_feature (558)..(558): n is a, c, g, or t
  misc_feature (595)..(595): n is a, c, g, or t
  misc_feature (614)..(614): n is a, c, g, or t
  misc_feature (623)..(623): n is a, c, g, or t
  misc_feature (675)..(675): n is a, c, g, or t
  misc_feature (688)..(688): n is a, c, g, or t
  misc_feature (692)..(692): n is a, c, g, or t
  misc_feature (704)..(704): n is a, c, g, or t
  misc_feature (817)..(817): n is a, c, g, or t
atgattancttctcatntggtggtggcaagcactaaaatcctgattttaacagaatagtagtaaaaatgcctcantgatttaagttgaaagccgtacactggtacatggctcttgtacccagtatcaggcatgtacaaatccctttcnttcaaaaatacaaaatanattatctgtnggcanggccaatgacagcngttaaccattatatatttngtgaactgnnaccngtaactgatggttatagtgnttttnagncngnntttttnttcnttttctccnnntggnttntntggngttattggtgagggcnntgnnttgggcttnctgtcacagttcattaataaaggtnaagnnctagtttnggtgttagaacatgccacctcccataccacctcccattccacccattgntcccattccagggtccttctnttctttaggnatttntgtgactacaacttctgctgtngttaacagngnggccacaccagcagcatccaataaagcngttctcacaacctttgttgggtcaatgattcctttttccaccatattcncaaaatctccagccatagcatcataaccaacttctgngggactttgcataattttntcaactatnaaagatccttcaacacctgcattcttagcaatggtcattgctggaatttttngtgttcttttaanaatntctataccaatnttttgatcttcattagctggagtcaatgagtccaaggctggaatgcatcgaaggagggcacaaccccctcccaaaacaatgccttcttcaacagcagctcttgtagcattaangg

SEQ ID NO: 701622 - DNA, 408 bp, Homo sapiens
cggagtggagtggaagtggaatggaatgtaataggaagaaatggaatcgaacggagtgcagtggagtggaacggattgcaaaggaatgggaaggaatggaattgaatggactggggtggaatggagtgaagtggaatgcaatggaatggagtggagtgcagtggaatgcaatggaatggaatggaatggattcgaatggaatggattcggaaggaatggactggaatggaatggactcaaatggaatttactacaacggaatgaatccgtatggaatggaatggaatggactggaatggaattgactctaatggaatggatcagaatggaatggactagaaaggaatgaactcgaatggaacggactccaatggaatggaatagaatggaatggacttgcaaggaatg

SEQ ID NO: 701623 - DNA, 446 bp, Homo sapiens
gggaataaaggatcatttgacaactggtgaaaaaaaaaaaaaaaaaaaaaaaaaaaaaaaaaaaaaaaaaaaaaaaaaaaaaaaaaaaaaaaaaaaaaaaaaaaaaaaaaaaaaaaacccaaaaaaaaaaaaaaaaaaaaaaaaaaaccttgtggcccccttggcccaagccgaattttaaattgggcaaggtttttcctgggggccgaatttgggcctaattggccaattcccccttatggggggccttttaaaattcaatggcccgggttttaaaaacgtgggactgggaaaaccctggggttccccaatttaaatccctttgaaaaaaatccccttttcccaagtggggtaaataccaaaaggcccccaccgatgggcctttccaaaaattggccaaccttaatgggcaatggaaattggaagccttatttttggttccgggt

SEQ ID NO: 701624 - DNA, 237 bp, Homo sapiens
caaatgctgctttattcttacaaatactgtaaaaattaatttaaaatatttgcatgctcagtcttttcctcttatctacaatacaaatggtttgtcttaaaagtctggttttttttctttttacaaatgtaccttatctgcatcaacattagtaatatgtataaaaatctaccattacaaaaataatttaaggtaaaataaacacgtttagcttctctcgcagtttagtggtggtaa

SEQ ID NO: 701625 - DNA, 288 bp, Homo sapiens
  misc_feature (5)..(5): n is a, c, g, or t
aattntgtatttttagtagagacggggcttcaccatgttggccaggctggtttcaaactcctgacctgatccgctggccttggcctcccaaagtgctgtgattacgggcgtgagccaccgcgcctgcctagactccccatttctaagtgtacagttaattcactagtgttaagtacatttacattattgtgcaaccaatctccgtaacttttttcatcttgcaaaactgaaactctgtatccattaaataagaacttcatattcccctgtcccttctgtcgtcttctc

SEQ ID NO: 701626 - DNA, 765 bp, Homo sapiens
ctaattttttaattttttgtagagatgggttacccaggctggtcttgaactcctggatcaagcgatcctcccacccctgcctcccaaagagctgggatcacagatgtgagccacagtgaatggccaagaaaataatttacttaggaaaccagtatttttttcaaacagaatatttaaagcaaaaagtctgaaaaaaaaaaacccataatgttaacatgtaattaaaatcataaattaacatttcttaaagcaaatgtttgacactgaattgaatctattccattattaccattggcctttaattattttcacttttgaaataaatactggcttttttttttggaaatgggagtttcgctcttaattggcccaggctggatgtgcaatgggcgcaatctgggctcactggcatactctgcctcccctgggtccaagtgggtcctcgtgcataagccacctgagtagctggggcgctcccccaccaaggcccagctaattttggtggtatttgggaatagggtttcatcatgtgggccaggctcgtcttgaactccgtggcctcaagtgatctgcccatctgggcctccaaagtgctgggatacgggcatgagccacagtgcctgaccagtctaggcttatcttaccagttgaggaatcggacaacctgtttgacatagggcggacatgggccaacggaacacctgcttacttccaatgttaatcaattccagcactatttctctattaaaactacctgcattatcc

SEQ ID NO: 701627 - DNA, 151 bp, Homo sapiens
gccatcgtgagccttaaggcaccaaggaggctaaaggtttgccactttaagaggggacctgagatctgcaactacagctactccaccacgttcttggctgtaagctcaacaggcagaggctgatagtatgcctggaggagtcctgtacatc

SEQ ID NO: 701628 - DNA, 255 bp, Homo sapiens
gtgattacaggatcttacagctctctctgatggttcttctggtatactaaggcgtggaggcaggtgagcttaccgaaaagtggaaagctacaggaaagtggatgaagagtgaagaagcggggaagtagagcatcccaagttgggctggagcggcagttgggaggagaaaacagcaagagtgcagcccgactgcaggacgctgctggagaggtgaacgagggaggcagcaggggtaccggagctcagaattcggta

SEQ ID NO: 701629 - DNA, 1207 bp, Homo sapiens
gcgggcagcaggaggacacgtggaaacgcaaccgccaggaggaaaggcgggacacagcgggaagggaggtttgcctcccctctcttcctgtggtgacccccacctcacttacaaaaatcaccaccgacgtttgggaaccgtgcacgccgacgtttgggaaccgtgcacgccgactgaaagcaaagctcagctgacctgcgaggagtccccggggagctgccgcggtggtcgccgttgagtccgtccgtgccgctggggccgaggcagctggagatgtggtcaacgggctgatgggcacggctgtgggaccccatcattcccctgccccgcatgactctgctctcccagctcgactgctcacttcagacttcccttatggaaggagttgccagatagagcaagtaaaatacagtgtgccagacacaggtttatttcaacactgggaaggctccattcctacttaaacccagcagggaacagggagcggtgtgcagaggaggtggcctgcccgggaagccggccttggtgctgggactgcagggagagggctgtgaggaagagcacaggcttcatgcacattgcacagaggaggagattcatggggacagcaggcactggttaggcacagcgggaaggttatcgaagacaaaacacatttctacccaagtttaaatgacctgctatgcccacagagcttgatccagaagtgcacaggtaagtatttagcaggctggccgatgttgatttgaacaatctcaagaatgtgctctttagtgcattaaacatatgtgacgagagctgagcacgtttaaaatctcagtaactttggggtttgtaagtgttgtagctcatagtgtcggttaaggttagacatctcagtcacatgctgtcttggcaccagctgtggactgtgctgtgaaagagatctgtgaccttgcaccctgagatctcaggctcaattaagagacaaaacaggcaatgcagtatcagtgcagatgggaaagagaaagcagaaagtatgaagagggaaaggaggagcacaaaggagttagcattagtctctactgagcaattcctattccaaccacgccctaaatgatgagttggatcctagcagaaagggaacacatgttatttttaactgattttaacttgatttattgtaacctatcaggagctcttaataaatatggctctttatgttgtt

SEQ ID NO: 701630 - DNA, 825 bp, Homo sapiens
gcgggcagcaggaggacacgtggaaacgcaaccgccaggaggaaaggcgggacacagcgggaagggaggtttgcctcccctctcttcctgtggtgacccccacctcacttacaaaaatcaccaccgacgtttgggaaccgtgcacgccgacgtttgggaaccgtgcacgccgactgaaagcaaagctcagctgacctgcgaggagtccccggggagctgccgcggtggtcgccgttgagtccgtccgtgccgctggggccgaggcagctggagatgtggtcaacgggctgatgggcacggctgtgggaccccatcattcccctgccccgcatgactctgctctcccagctcgactgctcacttcagacttcccttatggaaggagttgccagatagagcaagtaaaatacagtgtgccagacacaggtttatttcaacactgggaaggctccattcctacttaaacccagcagggaacagggagcggtgtgcagaggaggtggcctgcccgggaagccggccttggtgctgggactgcagggagagggctgtgaggaagagcacaggcttcatgcacattgcacagaggaggagattcatggggacagcaggcactggttaggcacagcgggaaggttatcgaagacaaaacacatttctacccaagtttaaatgacctgctatgcccacagagcttgatccagaagtgcacagtagagacggggtttcaccatgttagccgggatggtctcgatctcctgacctcgtgatctgcccgcctcaggctcccaaagtgctgggattacaggagtgagccacggtccc

SEQ ID NO: 701631 - DNA, 482 bp, Homo sapiens
tgcacctactgcccaagtcacgattgaagccgtagcaccaaagtttccgagtggaaggatgttcttctacttgtacacaattttgccccataatcttaccggctacatctggtacaaacgggcaaatgacaggacctctaccatatacattacatcattatttagttacacggttaaataagttatatatacggcctgtatatagatggacgatgaaacagcttattccaactgcttccctgcttgtatccagacgtgttacccgtggtggacgcagtgatcctacatcctttacacatcataatagggagatgatgggcactagaggcagtaactggacgtttcaccttcaccttacacctggagactcctaagccctccatctccatcagcaacttaaatcccagggagaccatggaggctgtgagcttaacctgtgaccctgtgactccagacgcatgctacctttggtgtattaatgg

SEQ ID NO: 701632 - DNA, 455 bp, Homo sapiens
  misc_feature (26)..(26): n is a, c, g, or t
tggccaagaagaagaagaagaagaanccggggccacccaaggcccccgccaagaaaccgaagaagccagccgcgaagaaggcgtgcattaagccggtcggcgctaccgccaagcgccaaggaaccccgggcccgaccggccaccacaatggccgaaggcgcatccaccggaaggccttaatgcgcgtgtacgtggcccagttggtggccaggccagctttcaaggtgcccttcctggtgggccagtacctgctgtacggcttcgaggtgcgaccgttctttccctgcagccgccagccctgcccgcacgtggtggactgcttcgtgtcgcgccctactgaaaagacggtcttcctgctggttatgtacgtggtcagctgcctgtgcctgctgctcaacctctgtgagatggcccacctgggcttgggcagcgcgcaggacgcggtgcgcggccgc

SEQ ID NO: 701633 - DNA, 328 bp, Homo sapiens
ggttttttttttttaaaaaaaaaatttttttcacccccgggggtttttttaaaaaaattggtttttaaaaaattttcccgggggttccgggccccaacccctttttttaggacccaaaatttttttaaaatttcccccccgaggggggggtttttttttaattcccccaaccctgggggggtcccgggggaaagaccctttttttaaagccttgaaaaaaggggcccttcccctttttttttcaaaaaaccttttttcctttttttgggggtccccccccttttaattgggggttttggggggcccaaaaaccctctttcctttttta

SEQ ID NO: 701634 - DNA, 732 bp, Homo sapiens
  misc_feature (339)..(339): n is a, c, g, or t
ctgggttcgggcatcagccaccacctccagaacaatgagctactccgtgacatctttggcctgggccctgtgctgttgctggatgccactgccctgaaggcctgctatgttccacgctttgagaagcacctgtacaatagctagcttgccttcaaagcccggaccaaggctcgtaagtccgtgtgcgggacaatgtcgggtcagacaatccgtgtgaagcaggacctgtctgaagaggagactttgctatgcccttgtgatccgtattctttaacgagaagacatgtgcaacaactggtctccagcctaagtatttgtcatcttgtattttgttttganatgtagctaaaacacaagatacacagtacatggggtgggtagctagggtggcccggacacttgggacccgtgacccctttgtccctgcagctcagcccatgtggccccttcctgtcctgtctcaggccaggctattatatgtgccattcctcaggtctgtggggcaggcgctagggggcctttcctcttcctttcctttctcaggccttgctcccccaggatgatcccactcttaggggggtggtggcatctggacgaatgccaccacagcaggtggtggtggcaaagctacctggaatggattcgcgtgctgatctgtaaggatgattacatgctattaaaccagaacggtcatgccttcaagattaattttcaactatagggccgttaggg

SEQ ID NO: 701635 - DNA, 476 bp, Homo sapiens
  misc_feature (335)..(335): n is a, c, g, or t
  misc_feature (385)..(385): n is a, c, g, or t
ccgggtccatgcacagttaaaagccatatagcgcgccacctaatagattctacaattaacatttggctatacagacagtccccaacttatgagggttggacttacaatttggaccttactatgggttatcgggggcatggaaggcattttcaacttatgttattttcaatttatgaggggataactaggatgtaacaccatggcaagtcagggggcatctatactggctagaataatctcttaaatttataaatcaggtctggtcgcttccgtatttaaaaccagccaatcattcccatcacactcagagtaaagttaaagtcttgccaggcggngtgcggtggctcaggcctgtaatcccagcattgggggaggctgaggctgncggatcacctgaggtcaggagtccgagaccagtctggccaacctggagaaaccccatctctattaaaaataccaaattacctgtgcgtggg

SEQ ID NO: 701636 - DNA, 116 bp, Homo sapiens
tgtgtagatcaacaagaaatgttatgaaatggcctcccaccttcggcgtcccagtactgacctcgatctgtcccattccccttcaccgctccccacagctttgcacccctttcctc

SEQ ID NO: 701637 - DNA, 378 bp, Homo sapiens
  misc_feature (17)..(17): n is a, c, g, or t
ctggccaaggggcattnttgcataatatgattagggtgggatgaccagccttccccgtgcagcatgtaaatggcacacctggccaaaccaatctgtggaccctatgtaaatcagacaccacctcctcaagcctgcctataaaatctgctgtgttggccacttttcccttttttgtcagaaacctctctctcaagagagagagctgctctgctgtctcctttcttctgcctattaaactctgctccttaacccactctgtgtgtgtgtccatgtccttaattttcttggcatgagacaacaaaccccaggtattcaaccccagacaacaatgtcacttcattatgccagagtcagggtaggaaagtaaggttcatggat

SEQ ID NO: 701638 - DNA, 994 bp, Homo sapiens
  misc_feature (31)..(31): n is a, c, g, or t
  misc_feature (89)..(89): n is a, c, g, or t
  misc_feature (196)..(196): n is a, c, g, or t
  misc_feature (204)..(204): n is a, c, g, or t
  misc_feature (320)..(320): n is a, c, g, or t
  misc_feature (335)..(336): n is a, c, g, or t
  misc_feature (355)..(355): n is a, c, g, or t
  misc_feature (364)..(364): n is a, c, g, or t
  misc_feature (368)..(368): n is a, c, g, or t
  misc_feature (370)..(371): n is a, c, g, or t
  misc_feature (378)..(379): n is a, c, g, or t
  misc_feature (384)..(384): n is a, c, g, or t
  misc_feature (391)..(391): n is a, c, g, or t
  misc_feature (396)..(396): n is a, c, g, or t
  misc_feature (398)..(398): n is a, c, g, or t
  misc_feature (401)..(401): n is a, c, g, or t
  misc_feature (409)..(409): n is a, c, g, or t
  misc_feature (442)..(442): n is a, c, g, or t
  misc_feature (444)..(444): n is a, c, g, or t
  misc_feature (446)..(447): n is a, c, g, or t
  misc_feature (449)..(449): n is a, c, g, or t
  misc_feature (453)..(453): n is a, c, g, or t
  misc_feature (457)..(457): n is a, c, g, or t
  misc_feature (463)..(463): n is a, c, g, or t
  misc_feature (472)..(472): n is a, c, g, or t
  misc_feature (475)..(476): n is a, c, g, or t
  misc_feature (510)..(510): n is a, c, g, or t
  misc_feature (512)..(512): n is a, c, g, or t
  misc_feature (517)..(517): n is a, c, g, or t
  misc_feature (526)..(526): n is a, c, g, or t
  misc_feature (529)..(529): n is a, c, g, or t
  misc_feature (537)..(537): n is a, c, g, or t
  misc_feature (554)..(554): n is a, c, g, or t
  misc_feature (566)..(566): n is a, c, g, or t
  misc_feature (611)..(611): n is a, c, g, or t
  misc_feature (659)..(659): n is a, c, g, or t
ttattaacgtttattgtcttttttattattnccttttatttttctcacgtttcccagttaaatttatgttaagacactattaaatttcngacaaaatatatatatttcttttaaatctttacaataaatcaagatgtagaagcttacatagggcacatttttgtttatttaggtactcaattccagctcccttggntgcaaatnaccctggtgacagtgtgtacaaagtcttctctttgctttttataattttaaagcaaataacacatttaactgtatttaagtctgtgcaaataatccttcagaagacatatccaagnctctctttgccgagnncattttctctctcaaagangattccctncctntnncttcagnnaaccncctcctntccancnganctcaaaangccttcaagctgttcagtaagtgtagttcaganangnntncgtnatangggttngagcttccngtnngcactgtacatgccccagtgaacaggcgagaggntnttttngttgctgtngtntgcttgtnttatttttttacaggtnagttagcagttnttgtgcccactgaccggcaccatgcattccaagtttaactttgcnacctgcccctttttggaatggtgtccgtgaaagctgtagtgcaaacgngagagcatctgttgccgctgatcctgcagcctcttattttcacttcgaagcatcctcagggccaacataataagcaacactaaaatcagccctccagcaatgggcacggcaatgaccgctgcccggaaccacaactctttggaagaagtcagctcctgcaccttggtgataaggtttctgctaccatcatgctgatacctgtttccttgtcctgaggcctcacccctgggaggagagagaacatcgtgcagccctctgtaattgcacatgtcttcatgacagcattcaatgtgggtatggtggtgccagagtggtttcgggcctgtttggcttgg

SEQ ID NO: 701639 - DNA, 669 bp, Homo sapiens
cagtattacagggagaatctcctggggtatattattccttaacagttccctggaatgtattaaactctggacaaatagggatgctgggatctcagggtggagtttttggttactggatggtcacatggattgaaaaccaagttctggtcctgggctatgatggttggttcctcagaaaggcttctgggtctaaccacaggctcccactctcactggttggtggttctctctttggatggtatttctttctttagatcacataataatttcataatatcaatttggtttacttaattatagtggtccccccttcatttgggtttcaactctattttcactttttttttttattttgagacagagcctcgctctggtcaacccagctggagtgcgaaggggtgaccttggctcactggaatctctaactcccaggttcaagcgaatttcggggctcaggctcccaagtagctgggattaccgggtgctggcaacatggccaggtaatttttggattattaatagacctagggtttcggcctatcaggcaggctaatctccaactcctgatctccagtgatccattggctgttattccagaactatggaggtctaggggaccggaatcagagtcgtgacagaagggcactaggactcttggacacacatcgt

SEQ ID NO: 701640 - DNA, 448 bp, Homo sapiens
aagaattcggcacgaggcagctcggaggcgctggggtcctaagttcctggccccacggcgcacagcttccccaccgcacagcccccagcgtacagggcccctgccggccgccgcctgcccaccctgcttgccgcccaccggtccccgctcggccccatctcagcctcatctctgggttctttccctcgtcgaggcctcttcgttcatttgtttgtttgttctctttctctctccttccctcccctcctctttctctcccccttttttttcttttttccttttttttttttttttgtctctgttctgtgtacccaggcagcccattgagtaacttctttgacgtaattaaacaacttttttcagacgagaagaacgggcaggcggcccaggcccccagcacgcccgccaagcggagtgcccacggcccactcggtgactccgcggccgc

SEQ ID NO: 701641 - DNA, 1035 bp, Homo sapiens
gggatcggtcgcctgaccaggtatcagctcttctgggctcaagatggacaacaagaagcggctggcctacgccatcatccatgttcctgcatgaccacgctccggcacgggggcctcttcgtccgatgctcaggaaaacttggaagtcgccatccagttgcctggagactgcgtttgagggtgacgtgtagaagacagtgaccttgcagctccctcatactctgtccggacgatatttagaaggctggactgccacgggcaaggagatgcctgcaggacctgaaggaagccccgcgcggaaccccgtcttccgaggaggactcagcagaggcagaagctgcctcaaaagccgaaggaagacgagcagatgaaacgtgcgaaacactttggaatgctgccgtagcgattctctacgggacaatagccgatcgacgctctagtcactactgcaaacgccgtgctaattgtctgctagacaggaagggcgcacgcgcttacagcggagacatcgggccaacctaccgcacggcacgcagttggccagtgacttgttgagccgagggcccaaatctggggcacttggaccccgggacccgtaccagccaaaggccctacgggccagcggcaaggggccctggcggcccctcccagcccgccaagcagccacgtagggaggcccgtggccttccacgtaacaagaggaaggggcatctgggcagcctgtgaagacccggaacagaggcaaggaacattacgagggttccccaaccctgcaaggactgggcgggagcctggaagacctgccacgggaagggccgccaaggccccacggcggagggccgctgggccacgcaattcgaacatccgcgggggcctgctttgaaagcaacccgctgggggttccattgaacgcagtggatatcgaccctaaattgaacgtaagggcccgcagaattcaggacaggtctagggtccgcgcatgaattccccgtgggtaaccagccaccgttgggaaatccacgggaccggaccatg

SEQ ID NO: 701642 - DNA, 440 bp, Homo sapiens
  misc_feature (112)..(112): n is a, c, g, or t
  misc_feature (375)..(375): n is a, c, g, or t
  misc_feature (421)..(421): n is a, c, g, or t
  misc_feature (430)..(430): n is a, c, g, or t
  misc_feature (432)..(432): n is a, c, g, or t
  misc_feature (435)..(435): n is a, c, g, or t
caggctgttactcaaaattcactctccagccctgctttggagcagttgggaacttcagcattttgatccacctttttggagccacctcatgtgaaagatggatgagaccttngtcagcaaacctggtaagacctcaccagtcctgtcctgaggaatgggtgttagtttttgccttgcccttcaccctggagagttaagcatacgttctttgggtggaggtaaaatgtgactactctctccacaccacggggaacatcagaaacacaagtatgcaaacacacattcttgttcacctatacacaaataaattcccttttagagtgaaaaccagacactgtttaaagcgcccactttaaaaatgaaaactaagacttntgaaaacaagtaataacaactgatctttggacttaatttttttttngagactgcntntcnaaaaa

SEQ ID NO: 701643 - DNA, 636 bp, Homo sapiens
gctgcttccccagctccagaacttccggccagtgcatgacattttggcttcctgaccttgtgctacggctgcatccgttatcctaagtagtgtgtactccggtgccatacatggtcctgtcgctgaacgcctgctgcttgcatgcgtggtgcttgacaaggcttctggctccggtggtgtcccagtgaccgcgcgcctagatcccattcgttgaccgccggaggggtacagcttgggatcatgggaattggtcggtatgcggctttacctcctgcattccgtgacccttcactccgtgtccacgcgggtcgtgtgactccgtgtcagcaccgtggaggatcgcttacagggatggccagatgtgaacggggtccgtttctgatccctcagactgtgacctgaccagaccccaccggacccaatccgtggtacatgttagctgccactttagtaggcgcgtgccgtcccctgcgtagtcatgtcacttcgatacttgccagtcagcctcttctgcactcatgacctcttgatgtctccatggtgacctccttgggggtcactgactcctgcgtgtgtggcggtcccccttgttaacaatataactctatttaaactttaaaacaaaacaaaaaaaaa

SEQ ID NO: 701644 - DNA, 492 bp, Homo sapiens
ctatccaagctgtacaggctgagcctgggacactaacagatcaggatgatcgagaacgggagcctgagcttcctgcccaccctccgaggagctccacattggaccacaacacgttggccaggatgccctcaggactcccagaactcaagctcctccaggtggtctatctgcactccaacaacatcaccaaagatgggtgtcaacgacttctgtcccatgggcttcggggtgaagcgggcctactacaacggcatcagcctcttcaacaaccccgtgccctactgggaggtgcagccggacacttatccgcatgcgtcactgaccgcctggccatccagtttggcaactacaaaaagtagaggcagctgcagccaccgcggggcctcagtgggggtctctggggaacacagatagacatcctgatggggaggcagcgccaggaagctaagccagggcccagctgcgtccaacccagccccccacctcgggtcc

SEQ ID NO: 701645 - DNA, 606 bp, Homo sapiens
aatgtgaagatatcagactttggctttgccaagatggtgccttctaaccaccctgtgggttgtagcccttcttaccgccaagtgaactgcttttcccacctcagccagacttactgtggcagctttgcttacgcttgcccagagatcttacgaggcttgccctacaaccctttcctgtttgacacctggagcatgggggtcatcctttacactctagtggtcgcccctctgccctttgatgacaccaatctcaaaaagctgctaagaaagactcagaaggaggtccctttcccagctaaccataccatctcccaggagtgcaagaacctgatcctccagatggtacgccaagcccctaagggggccccccttttggacatcatcaaggatttctggggggtcaagttccagcctgagcaacccccccatgagatcaggctgcttgaggccatgtgccagctccccaacccccctaaacagccccaatccttgcaaatttcgccctgaaaatggctgagggaggggggtaaaaaaggagcaaaacaggaggttttgggctaaaaatcttttttaccaaaaataaatttaagtttgatttagtttcca

SEQ ID NO: 701646 - DNA, 136 bp, Homo sapiens
aactattgaacagtgggtcttagtgtgtagtataactttgctgtatacaactaattttgacaagttttcatcctaagcctcaaatcatgtaataaataatttgcctgtatattttctttaattgtgtaaactgatt

SEQ ID NO: 701647 - DNA, 336 bp, Homo sapiens
agctgaatgctgatccgcgagtattggctccgtgaacaacgtgaggtctggcgggtctatttaccctggccaagatccgcaaggccggccgggatctgctgatggcttgtatgagaaggacccacggcgtctgtacgaaggcaacgccctgctgtggaggctggtccgcattgggtgtgctggatgagggcaagatgaagctggattacatcctgggacctgaagatagaggatttcttagagagacagcctgaagacccaggtcttcaagactgggcttggccaaagtccatccaccacgctcgctgtgatgaatccgcagcgccgtcgcctacg

SEQ ID NO: 701648 - DNA, 395 bp, Homo sapiens
  misc_feature (297)..(297): n is a, c, g, or t
ggtatgagggtgggagtggcttgttttgttgctggcttagttagtatctggtgggggaggctgtggagtagctgtgggtatagtagggcctttatttaatgttagtggataggggctctaggccttttaggagtagttatgctggggctgagattagggacttacttttgtagggggtttagggttagggagaggataaaggggtctttgggggagatgggtgggggcccactttgtagaaggagtccatggatagcaagaccactcagggcacatccagggctttgatgatcattntggccacagtggtcttcccagaggcactgccgcctcccaagccgatggcgaaggcctctatggattgcgtgccgtgttcattgtaccagggcggccgc

SEQ ID NO: 701649 - DNA, 280 bp, Homo sapiens
tctagaggatccctgctggaactcttatgatccagagacagtttatttttttagagacagatcttgctctgtctccgaggctggagggcagtggtgcaatttcggctcacggcaacgtctgcctcctgggctcaaacaattcttctgcctcagcctctcaagtagctgggaatacaggagcccatcaccatgcctggctgatttttggattttagtagagatgggtttcatcatgttggccaggctggtctcgaactcctgacctcaagtgatctgccca

SEQ ID NO: 701650 - DNA, 105 bp, Homo sapiens
gcccacctgaagttgaatttttaaatcactaacaagcaaacaaaaacagaaacttctcaggaaattagatcgactggagaagaaaaaaaaagaaaaaagatagaa

SEQ ID NO: 701651 - DNA, 305 bp, Homo sapiens
agaattcactaatgaaataatgtgagtctggggttttctttgtgagaaagcatttgataatgaattcaatttctttaacagatataaaatctattacaatttcttattagtttttatttatgtttcttcatctgcatcctaataattttgcatgttgtgtttttattattagtcaattcaaactattttctctttccccatgtgatttattctttgccccgtggattatttggacatatatggcctaacttccaaatagggttttctaaatgtctaattgttatcaatttctaacataattccat

SEQ ID NO: 701652 - DNA, 925 bp, Homo sapiens
ttggcccctcggttcctgcctctgtccgccgctgtgcgaccccttctgtgtctcctggggatttccctctggcgttccttgtaccgtcactatttcttggctattggtttcctcttatcggcatatgggtcctcctactgtgttgtctgtgctcctttaccggggttatatctggttgtccccttgtcttctgacggcccctgttttacctcgtccacgcttcagatgcgctcgttttgtaacccccggcccatctgttgctcgcccaagtcttcgccgttctaacatcggccgtcctggacccttagctctcagacatcgctcttcttacgtaggtacccccctcccctgtacccaagcccccgagtcaacgcgtctagcgcaggcgttcgcttattgtattcctagcgcacgctctagccttagcacgtttactcaatcctctggatacagggtgagtcatctaactcttaactacgccctgaatcggcgcactgcgaggcagtagccctattacaatgcttcatatgaagtcaccctagcgcatcattctactatcgaccattactaactaagtggctcctttaacctctccacccttatcactgaccacaagaacacctctgattactcctgccatcatgacccttggcacataatatgattgatctccacactagcagagaccagaccgtaccccgcttcgaccgttgcacgaaggggagtccgaacgttagtctcaggcttcaacatgcgaatacgcgcgcaggccccagtcgccctattcgtgtcatagccgaatacacaaacattattataataaacaccctcaccactacgatcttcctcggaacaacatatgacgcactctcccctgactcatacacaacatattttgtcaccacgaccctattgcctacctccg

SEQ ID NO: 701653 - DNA, 231 bp, Homo sapiens
atcagatcaaggagctcatccagtcgcgaccgatctggacgtctgcaggtagcctgaaacgaagcgatgccttttcttcggcctcgtcgcggctcttcacgagcttttctaattcttcccccattgctgtgttttactggtggtccaggcacaacttgtgataacgggcggcgtatttgttgacatcctgcaggtgatgcaccgcggccgaattcgcgcccaggaaagctg

SEQ ID NO: 701654 - DNA, 872 bp, Homo sapiens
caactgcttcgatcccgccggaggaggagaccccattctatactgaagacctattctgattgatcggtcaccctgaagtttatatccttatcctaccaggacttcggaactaatcgtcccatacttgtaactgtagcgttactccggagataaaaagaaccatattggatacaataggtagtggctatgagacttatgactattcaagttggttttccttagtggctttatcgttgtgagcacaccaatatattgtgcagtaggaagtagacgtagaacacacgagccatagttgtcacctccgatagccagtaatcgatcgaataatcccccaccggacagtcaaagtattctaggcggactcgccacagtccaacggaatgcaatatcgaaatagatctgctgcaagtgtcttctgtagacccctaggatacactacttcactatattcaccgaaggtggcctgagtggcatggtatcatgctactcgcatgactagacatcgcgcgtacacgaacgtactacgttgtagcccacttccattatgtccgatcaataagagctgtgttcgccatcataggaggttcattcactgatttccctaatttctcaggtaaaccgtagagcaagcgtacgccaaaatgcatttcacttatcatgttgatcggggtaacagctaaggtgggcccaagaacactttgtcggctatacgggaatgcccgacgttagttcgggactacccgatggataaccacattgaagatcctattattggaggcaatcattcctaagaagcggaataaccatctcagtggaaaacttcggtaaagaaagccaaagtgaagacccaacgggaggatggggcccccaag

SEQ ID NO: 701655 - DNA, 638 bp, Homo sapiens
  misc_feature (220)..(220): n is a, c, g, or t
  misc_feature (325)..(325): n is a, c, g, or t
agcggagcgtcagagatcagaggaagaggaacgggcggagctgctttgcggccggtcagaggagacagcgcagttcgactacagagaagggtaatcgggtgtccccggcgccgcccggggccctgagggctggctagggtccaggccgggggggacgggacagacgaaccagccccgtgtaggaagcgcgacaatgccccgctacggagcgtcactccgncagagctgccccaggtccggccgggagcagggacaagacgggaccgccggagcccccggactcctttggatgggcctggcgctggcgctggcgctggcgctggcnctggcgctggttctgtctgactctcgggttctctggcgctccggcagaggctcacacctctttctcccacaaggacatcctgccaggtaacatcgcattagtgtcccggactcccgacgatgtctttggactgggggaaccctcacctgacccaatcatgaaaaggtctattcaacagccatcaacctcgggctgacagaaggaagcgcaatgtggctcgcgtgggctccgtggcacatcaagctgtgcaatcatgctgacgatagcaacaactggcgtgtgccaatccattgtccactcatatgagggatga

SEQ ID NO: 701656 - DNA, 293 bp, Homo sapiens
  misc_feature (9)..(9): n is a, c, g, or t
  misc_feature (55)..(55): n is a, c, g, or t
  misc_feature (152)..(152): n is a, c, g, or t
  misc_feature (267)..(267): n is a, c, g, or t
aagaaagtnacctacaaagacttggaagctacctctgcagcattcctggtattcnttgaaaatctcctgtttcagaaccaagttgctccagccttaccttgagaactggcatgagtgtagtttgaaatttagatgtcttttattttttcctntttactaataaagctcataaggtattttcatattctagttataaaactgaaaagtctgcaagtagtgatccaggaaggtaggaaattattccctgggagacaggaaagcacacanggtagtaattcagtttttgattctct

SEQ ID NO: 701657 - DNA, 549 bp, Homo sapiens
  misc_feature (220)..(220): n is a, c, g, or t
  misc_feature (325)..(325): n is a, c, g, or t
  misc_feature (337)..(340): n is a, c, g, or t
  misc_feature (343)..(345): n is a, c, g, or t
  misc_feature (349)..(349): n is a, c, g, or t
  misc_feature (351)..(351): n is a, c, g, or t
  misc_feature (353)..(353): n is a, c, g, or t
  misc_feature (364)..(364): n is a, c, g, or t
  misc_feature (375)..(375): n is a, c, g, or t
  misc_feature (403)..(403): n is a, c, g, or t
  misc_feature (426)..(426): n is a, c, g, or t
  misc_feature (431)..(431): n is a, c, g, or t
  misc_feature (438)..(438): n is a, c, g, or t
  misc_feature (443)..(443): n is a, c, g, or t
  misc_feature (445)..(445): n is a, c, g, or t
  misc_feature (454)..(454): n is a, c, g, or t
  misc_feature (458)..(458): n is a, c, g, or t
  misc_feature (462)..(463): n is a, c, g, or t
  misc_feature (488)..(488): n is a, c, g, or t
  misc_feature (515)..(515): n is a, c, g, or t
agcggagcgtcagagatcagaggaagaggaacgggcggagctgctttgcggccggtcagaggagacagcgcagttcgactacagagaagggtaatcgggtgtccccggcgccgcccggggccctgagggctggctagggtccaggccgggggggacgggacagacgaaccagccccgtgtaggaagcgcgacaatgccccgctacggagcgtcactccgncagagctgccccaggtccggccgggagcagggacaagacgggaccgccggagcccccggactcctttggatgggcctggcgctggcgctggcgctggcgctggcnctggcgctgggnnnngcnnngcantntntacgcttagangccctattaantcatactaccagaaatatagagtggagnaaatttcaatgaagcgtatccgnaatgncaatacngcaanancagaatacngctngggnnctgcctcctaaagataaagtcaaanttgagcaaaactcgtgaggataactanagataaagaccctgctacaactaaataaaagtgc

SEQ ID NO: 701658 - DNA, 150 bp, Homo sapiens
ggactttgtcttgttctcgtctctctctctctatacacacgcacacgcacacgtgactgtaacagtgcctggtgcacaattaggggtcggcctattgttggctaattgaggttgaatttattcttgtccggacctgtttacaaggagagt

SEQ ID NO: 701659 - DNA, 825 bp, Homo sapiens
tccatgccagagggcatgtcctgtgtccgactatctgggtagattccagttccgcgcagctctaggtctgaaactgcctctgtaacacgttctgatccactgtgggtgatacttaagtgctggcatgattaacagatggaatttggtgtgtaccaaagagacgcgaatgtgatgatgagacgcagtgattcttgcttacatagtgacctagagagttaatcttaattgctagattgtgacgtccgtgtccttggtagggatagactttcttcagattccatgtgctctcttaaatggcaaattacagttaaagaatagtatggctccattcccctcacttattctccagttaatgtgcttgtcagttccatttcaagagagcagtgatgtcccaggttcgattcagttttgactgtgcgcactattgccaaatggtcttgagcaaagattctgcactggaacgtagacgttgggaacagtactacctagctagaggttatgtgtgggctcttactccccgttttcacctctttgctttcccaattcaagaacagcaagtgagcgctgtctggtattcgaatcattagcagaacaaggagggagtggtggccgagttgtccttctttgcagtagggacatgctgtgatgtgtcggtttgtacagctattctttgtggtgccgcctgaagattggtccacaggtagatgtacgggctgcagatctgtgtaaacctgaacattgttctggcggagcggcggtgagggaaccaagggcctgctgggcctacctgggtgacctgcactcccagcggttggaccttttcac

SEQ ID NO: 701660 - DNA, 728 bp, Homo sapiens
  misc_feature (42)..(42): n is a, c, g, or t
  misc_feature (58)..(58): n is a, c, g, or t
  misc_feature (108)..(108): n is a, c, g, or t
  misc_feature (141)..(141): n is a, c, g, or t
  misc_feature (146)..(146): n is a, c, g, or t
  misc_feature (230)..(230): n is a, c, g, or t
  misc_feature (344)..(344): n is a, c, g, or t
  misc_feature (355)..(355): n is a, c, g, or t
  misc_feature (361)..(362): n is a, c, g, or t
  misc_feature (365)..(365): n is a, c, g, or t
  misc_feature (367)..(367): n is a, c, g, or t
  misc_feature (379)..(379): n is a, c, g, or t
  misc_feature (384)..(384): n is a, c, g, or t
  misc_feature (391)..(391): n is a, c, g, or t
  misc_feature (409)..(410): n is a, c, g, or t
  misc_feature (412)..(412): n is a, c, g, or t
  misc_feature (414)..(414): n is a, c, g, or t
  misc_feature (421)..(421): n is a, c, g, or t
  misc_feature (424)..(424): n is a, c, g, or t
  misc_feature (436)..(436): n is a, c, g, or t
  misc_feature (449)..(450): n is a, c, g, or t
  misc_feature (463)..(463): n is a, c, g, or t
  misc_feature (473)..(473): n is a, c, g, or t
  misc_feature (483)..(483): n is a, c, g, or t
  misc_feature (490)..(490): n is a, c, g, or t
  misc_feature (502)..(503): n is a, c, g, or t
  misc_feature (505)..(505): n is a, c, g, or t
  misc_feature (514)..(514): n is a, c, g, or t
  misc_feature (536)..(536): n is a, c, g, or t
  misc_feature (547)..(547): n is a, c, g, or t
  misc_feature (553)..(553): n is a, c, g, or t
  misc_feature (562)..(562): n is a, c, g, or t
  misc_feature (693)..(693): n is a, c, g, or t
gcacgagggtggagggcgtcactgggtttcggcgtctggcangcggttcagctgtcgntccctagcagccggccttcgggtcgggcgtctccgccggtactgccgctncagttctcccggtgtggccacgagtcgggttgnactgntgtgatccatcctcatctcctaaagatgcatcctgacttatctccacacttgcacactgaagaatgcaacgtcttgattaactngcttaaggaatgtcacaaaaatcacaacattctgaaattttttggttattgtaatgatgttgatcgggagttgagaaaatgcctgaagaatgagtacgtagaaaacaggaccangagcagggagnatggcnntgnantgcgaaagaaanttttnaatcctncagaggaatccgaacaannantngtatttncantcgatgcctggntgagagaagaccnnaagactctgggtngatacctganagaatcctgncttattnggtctccataanncntttgatggnaagtgacctgtgagagattgancatggagaatntgaaancctggatcngagtattgtgggcaggcgttaagactggctcccttaccagaaacctgacttacatgttaatcctttgctacaacaagtatatccgaggaactatctcctcaataaattattaaataataatcacacttacntccattacttggccggcgttttcaccggcgggctg

SEQ ID NO: 701661 - DNA, 143 bp, Homo sapiens
aactcaaggtagaaaacttactcattataaaggacaggaaaccattatccatcatagagcaaaaaaatcaacagcaaacttatttctttgctataaaactcattaggtacatatgtgcattaaggcttgggtacagaccgtcg

SEQ ID NO: 701662 - DNA, 260 bp, Homo sapiens
  misc_feature (3)..(3): n is a, c, g, or t
  misc_feature (40)..(40): n is a, c, g, or t
  misc_feature (200)..(200): n is a, c, g, or t
  misc_feature (226)..(226): n is a, c, g, or t
  misc_feature (248)..(248): n is a, c, g, or t
ctngtcatatatggagcgtccggccagagttggaagcgtnagtcagttcgaaattcattttatagcaattgacaatgtttctatctgaacctgagagaataaaaggtagttttgaattagacaaaatagacctaaaagttcaaacaaatggtggaaggattgtaaaaatcgtgcaaaaaattccatgtgtcgttatattnactaaattcaaaaaggtactacatgntttttctgtaaataaaaaattnaaataaaaacac

SEQ ID NO: 701663 - DNA, 115 bp, Homo sapiens
acttctcataccgagacatgtaatatgcctgcgtaactgtatacaccaattccgctctcatgaggtgaagttcctacatccgagttatcctgagagaagcaccagctataggtac

SEQ ID NO: 701664 - DNA, 259 bp, Homo sapiens
gggcaaaggaatttttttcatgaataagttcaaggaaaggttctttgcccaaatgtgcccgtaggccaaatttgttttacgttacacaaacattttagtgtagcaaagagtaacaaagcagttttgttgccagcatattttgcctttagccacaaaggggtttttttcttttttaaaataaaacgaatgggaatggtcggttttacactgaaacattcctttcccagggacgagcaggaaacaaatgccttccttttat

SEQ ID NO: 701665 - DNA, 593 bp, Homo sapiens
cgggaggcggaggttgcagtgagccgacattgtgccactgcactccagcctgggtgacagggcgagactccatctcaataaataaataaataaataaataaataaataaaaaaaaaaaaaaaaaaaaaaaaaaaaactgtgtgtgcggcgcgcgccccgcggccccccgaaaaagctcttctaaaccccatcgcggtggggcggcccggggcccccaaggagaggaagagggaaacgatggggccaaaacgcgtggttccctaagagagagaaccgcggggccagagaaaaaggggcggggacatctcccccccaaataaaaacagcgcccgcgggggccacacgcgagaggcgttccgtgaacaaaaacccagaaggggagtcccggaaggccccactaagcgggggacctatcaccacacgggggctcccaaaggggagagccgctcggaaatcttcccaaaattaaaacgccccgagcccccggggggaggcccccaacgccaagcaaacaaacgccagccaccaaacacacaaacacacacaacacaccgagacacagaacacaacacaccacaaaaccccagaacaca

SEQ ID NO: 701666 - DNA, 170 bp, Homo sapiens
  misc_feature (4)..(4): n is a, c, g, or t
  misc_feature (7)..(7): n is a, c, g, or t
  misc_feature (21)..(21): n is a, c, g, or t
  misc_feature (44)..(45): n is a, c, g, or t
  misc_feature (47)..(47): n is a, c, g, or t
  misc_feature (49)..(49): n is a, c, g, or t
  misc_feature (54)..(54): n is a, c, g, or t
  misc_feature (72)..(72): n is a, c, g, or t
  misc_feature (90)..(90): n is a, c, g, or t
aagnccncatggagatttggnggacactggttaaagaatttatnncntngtatngtatactatgttcatggngcagatactacaacattntggcattttagactcgttgagtttcttgggcaactccaagggcgttggggtcataaggagactataactctacagattgt

SEQ ID NO: 701667 - DNA, 143 bp, Homo sapiens
tgacaacacagaggagggggcagccagagggggctgaagaaaatggcaacagcgacacgaagaagaaggccaagcgagactagcggtcatccagacccctgcccacctagactgtttcctgagccctccgcctcctctgtgct

SEQ ID NO: 701668 - DNA, 572 bp, Homo sapiens
tctttttattatgatcttttggtaaatttgtattcatatgttgcatctggatttttttctactataccttttagaaagtaggaacttaaaaaaaaaaaaaaagaaaaaaagaaaagaaagttccagagaaagaaaggggtgatatgaaaaagtcatgatgtggaaaataggtccttcaaagagggcaaattaaaaggaattggggttacttttctgaaatggggaaagggctaagagaagtggcagcataatttttaaaactaggctaagaatcaacagctggttatttctagttcaaggtgcgtctttggccttagacaaatccaatggatgatgatgatgatcgatgatacggatatttctaaaatgtgacactaatatttatagaggactaatggttaccatttacatgggcgtggtcttatttaacttcataatcatattatgggggggaatacttaaattagctccattttccagaatagaaacgtgtatataattttcctcagatgaacaacggggctataaaattgtgtcctacttacgtgcttcaggggggaaccttgacctgt

SEQ ID NO: 701669 - DNA, 735 bp, Homo sapiens
ctggtttagataagacgaggtggtttgagaagcaccagagcacatgcaagcaggtctggctgcagatgcctgggctgctcccatcgacgatgcagatctacaagaagcacctggtgcctggtgccagctggcctgctgctgcctgcaccgccgggccaaaaggaggcctcctatgacccagtgtgtactgagaggctagatgaagctgcagggcagtgtgtgtgctgggtgtgtgccctgtggcattttggaggcctccagctgcatccccccttccccgcagtgagaactcctacgtgtccagcactggcagagcccacagtggggctgctccatggcagcccctggcagcgccatcatggatgccatgtgcccatgtgcatgcaggagcatgctgcagagatggccccaaccagccctgtggagagtgactgagagcctaggctggactctctgctgccctgctgctcctggcacttgactccaagcttgccctctgtgacccaggcacccctcatgtggagtgccggcttgtcctcatgggtggacactggcgaggacgaatacgatccttggtgggatgttggcccacgggatccctggaaccagaaggcctgtgggaaggactttgccctttggaggatcttgcatcatccgtcgtcagagccaccgcagattattcatcaaagccttgccgacagaagttgtccagaagctgccctgtacaggttgtga

SEQ ID NO: 701670 - DNA, 206 bp, Homo sapiens
ccgaatggcccatgaatgggctgttgccaggccctagcaggtcatacctcgtacccatgatccagaaactgtggggcagcaccatccgtctacttacctcccttcgacccaagcacaaccaggagaactagagagacctggggtagtaaatagtgagacgggtacttaggtcgcacatacagacacctgggcatatggccgccatt

SEQ ID NO: 701671 - DNA, 136 bp, Homo sapiens
gtaacgtcatcacatttcctcctttacctttcagtgcagttacttttcacataaggctgtggttcaaactttctgggagcacggactgtcagttctctgggaaggtggtcagcgcatcctgtcgggctagtcgggg

SEQ ID NO: 701672 - DNA, 402 bp, Homo sapiens
tgtcatagctgactctagaggataaacggactcggccaaaggctgcagtgagccaggattgtgccattgcactccagcctgggcaacaagaccgaaactctgtcttaaaaaaataagaataaaaataaaaacaaaaagtaaataaaaaaacaaaaagtggacaaaggatgtgaacagacacctttcaaaagacgacatacaagcagccaacaaacatatgaaaaaatgcttattatcgctaatcatcaaagaaatgcaaatcaaaaccacaatgagataccaccccatgccagtcagaatagctttcgttaaaaagtcaaaaaagaacagatgatggcgaggctgaagagaaaatgaggcacttaaacaactgttgatgggaaagtaaactactccaactgt

SEQ ID NO: 701673 - DNA, 447 bp, Homo sapiens
ctggagccggttttctcggactctacgacaggagcacatatatataatgatagattgtaggcgtttttacattatcaaggtctgaacctcgtgattatggtatggttaatactacaaatgtattttcatcagttatttagttagaaatgtcctagagacttagattgtaccaagtaatcccttttgcaacatcctgggaccatattctctccaactcttgcagcacttaaaagaaatggctctatctttgggattgcaccaaatcaagaaataaactaacatatgagtgaatagagaagcttgtctcattctgggcatattttcaattttcataagtttgtgaagatgataaaatgaaacactgaaagtaatacttactaagaaaatgatacttaggtcaaactgtattcagtgaaaattggtattaagtgactatgggatgtggtt

SEQ ID NO: 701674 - DNA, 938 bp, Homo sapiens
ggcgtgcaccctggtattctaactgtagggctaacccgcaacgtgatactttgacatgcagtcgctgtgactgtcatccccttttggtcctaggacgtgccgccattcgcttactcctccgtgatgcacgtcaggttcccgagattacccgtctagacaacatgcttcgacgacttgcgttcactcagaggctgcattgaaacggattgtcgtacttactagggcgtctctacatgccgattcacgtgaaacattatatgcaatggacacaagtgcgcggttgagtgagggtgcgcatggacgctactgcaactgctccgagatatatgtgttcagcagctttgaggactaagtctgccctagtccattaatttgcatgcgcaacaacaattgggtatgcctagttgcatggacagccttttacacaactcggatagacgtgactcatgaggggacatccgagtgtccctctacaagtagttccgcaatatggacgaaaagtgagccctagaggaaccaccaaagtcattccgaatactcgtagtgttcccccaacggcacataacgcacgtactatagtacccttggaaccatacgacacgtctacgcttgggttggcgaaccaataggtagcacagaaaggcagagttgagtttagtttggtatcacgccaaaacggctgtagcacacctccagcagaggggctccccagacccacttaacttcctggtaagggaaccgaggccaccaggaggatatcgcactgaccctacaagtggtgctttgtcacaagtacgcatagttggcccgcccaaaaccaatttgcgccgtacccatacgacacgtcaagtcacaaggggagacgctcgagacaacagagtggcacccccgatcaatgcgcaacaaccagggataagacggcgcaatgggaaagaaca

SEQ ID NO: 701675 - DNA, 451 bp, Homo sapiens
  misc_feature (150)..(150): n is a, c, g, or t
  misc_feature (287)..(287): n is a, c, g, or t
  misc_feature (313)..(313): n is a, c, g, or t
  misc_feature (405)..(405): n is a, c, g, or t
  misc_feature (438)..(438): n is a, c, g, or t
cgtggtgaggacggaatgagtcaggttcagagggaacagtgatgagagatgagggtggagatgggagctgggtcgtctaaatccaggtaaacagctcggactttgtcctgactggcagtgcaggagtcagcgcagagggtttaagcagtngtagtagagggaggtcaggtctgcccacgggaggtgggtggtttcccgagatgcccgacataggaggcccttttgagacagtgtggtttgacggacaacgtcccatgcgtggttgtccatactttgcccccacctgncctggccatgcctggaattgaatccntgcccagcaggagcaggtccaagtgcgggacagcgaagggttttagatttacgctatttgcaccaaagtacaagagcaggtcttcaatcagnggagccttagggggctgcccagtagtccagggncagatgcccagac

SEQ ID NO: 701676 - DNA, 970 bp, Homo sapiens
  misc_feature (477)..(477): n is a, c, g, or t
gagacgcccacaagcttcagtgtccgaatactgcctactggtcgcacacctcacctggatggacatctgactaggcgctcgcagaagcaggtgtaccgaggacatcggtgaagagatgcgtgcacgaaatgccattggagagagattacaccacgggtgtgcagtcgttcgcgctatggagcaaagcggggtgcctggcaatgtcctacatgcagtgactggcgcaagctaggagaacggaccgacgtagggcatcaatccgcacaagtttctgcgaggaccttcttctctcgtgatctaacgacgacggaccaatagcgaacgagacgatgtacctgactcccgctggaggtcaggtacgatggagattgactgtgacgcgcgtccggtgcacgctcgctggaatcccacaacgaactagagggctaaccgttcgcgtgagggagcgaccgacgtggcttggtggcgcctagcagntcgcgaagagactcttcatcacatagcgcttgcgcgtgtctagccctctctacaaagtgacagtccaaggacctcagtggactcagggaacaaggccaggagcgtggcggacaccaagatgaatgagagcagcagtcgctcccacgccgtcttcaagcatcatcttcacccagaagtcgccatgacgcagagaccaatatcaccacggacgaaggtgagcaaaatcagcctggtggacctggctgggatgcgagcgggctgactccacgggagccaagggcactgcgcctcaacggagtggggccaacgatcaacaagtcgctgaccagaccttggggcaagcggtcatctcccgtccctggcctgcaaatggactccggaagccaagaaggaaacaccgtgaaacaaaacatgtacaggggattaaggtaccgggctgcggcgaaaaagagtgtactgcacatggccaacagggaaaaagatgagagcggac

SEQ ID NO: 701677 - DNA, 216 bp, Homo sapiens
tagcatatcagttaccaaacatcttcatacattgcatgacctctgtattgaggattactatccatgtagtatcaaacaaatcccaccactatctatattcagatagacgtatgaagtggatcgacaggatccaggtcatatcacataagtcaaactttttggttgtctgataatagactgtctgacatctgtgggacagctaccagagggattatg

SEQ ID NO: 701678 - DNA, 180 bp, Homo sapiens
caggaggttttgggcctttgaaccccctttccccccccccccccctggtggtgttgccccagggtctttacgggagcattggccccttagcccaaaaaagctggaagcccccccaaaacaggagcaaatggggttttataaatttttttttttaaaaaaagctctgggggcctgggtcca

SEQ ID NO: 701679 - DNA, 155 bp, Homo sapiens
ccttttttttattaaaccccgggcttgggggttaggtaaaaaattttgtagttttcagaccagaattaaaattttgtgaaaattccggcttaaaaaatgtttattgtaattttgtgggagggccttttaaaaaaattttcatcccttttccccca

SEQ ID NO: 701680 - DNA, 442 bp, Homo sapiens
  misc_feature (31)..(31): n is a, c, g, or t
  misc_feature (67)..(67): n is a, c, g, or t
  misc_feature (108)..(108): n is a, c, g, or t
accccccacgttccaaccacccaattcatgnctccagctcgacgtgtattcaccactgcggtgcatncctccctgtacaagctccttggacacgtgagctccgtgctnacctcccaatctcgcaaacatggagcctggtttagaggatcctccagtacccgagcatgcatgcatgcctccagctcgacgtgtattcaccactgcggtgcatgcctccctggacaagttccgtcgacacgtgagcaccgtgctgacctccaaatatcgttaagctggagcctggtcgacgtgtattcaccactgcggtgcatgcctccctgtacaagttccgtcgacacgtgagcaccgtgctgacctccaaatatcgttaagctggagcctggtcgactctagaggatcctccagtacccgagtcgattcactggtaccgagcgcatgtata

SEQ ID NO: 701681 - DNA, 150 bp, Homo sapiens
  misc_feature (27)..(27): n is a, c, g, or t
  misc_feature (49)..(49): n is a, c, g, or t
acttggggggagggggtgtggcaacgngccccccgcagaggcacgcatntttgaccaaagccctcattgtggtccgaggacagccttttccccaggctcagagcattgctcatccgtgccaaactgggtaggtggatttgagcggaaaga

SEQ ID NO: 701682 - DNA, 532 bp, Homo sapiens
cgctgctgctctggcgttctagaggatcccgacatgacccaagcatgcatgcatgctgcaggtcgacgtgtattcaccactgcggtgcatgcctccctgtacaagttccgtcgacacgtgagcaccgtgctgacctccaaatatcgttaagctggagcctggtcgactttagaggatcctccagtacccgagcatgcatgcatgcctccagctcgacgtgtattcaccactgcggtgcatgcctccctggacaagttccgtcgacacgtgagcaccgtgctgacctccaaatatcgttaagctggagcctggtcgacgtgtattcaccactgcggtgcatgcctccctgtacaagttccgtcgacacgtgagcaccgtgctgacctccaaatatcgttaagctggagcctggtcgactctagaggatcctccagtgtagtcaccagtgtcggtgcatgcctccctctcgacaagtgtcacgtcgacagcctcgagtcaccaagctgacatccctacagtctcgacatgctag

SEQ ID NO: 701683 - DNA, 2213 bp, Homo sapiens
agtcgcaacagaagcaggtccgaggcacagcccgatcccgccatggagcagccgaggaaggcggtggtagtgacgggatttggcccttttggggaacacaccgtgaacgccagttggattgcagttcaggagctagaaaagctaggccttggcgacagcgtggacctgcatgtgtacgagattccggttgagtaccaaacagtccagagactcatccccgccctgtgggagaagcacagtccacagctggtggtgcatgtgggggtgtcaggcatggcgaccacagtcacactggagaaatgtggacacaacaagggctacaaggggctggacaactgccgcttttgccccggctcccagtgctgcgtggaggacgggcctgaaagcattgactccatcatcgacatggatgctgtgtgcaagcgagtcaccacgttgggcctggatgtgtcggtgaccatctcgcaggatgccggcagatatctctgcgactttacctactacacctctttgtaccagagtcacggtcgatcagccttcgtccacgtgcccccactggggaagccgtacaacgcggaccagctgggcagggcactgagagccatcattgaggagatgttggacctcctggagcagtcagagggcaaaatcaactattgccacaaacactgagggacgctcaggtctcctaagacctcatcctgctggggaccccacgaggggacatccaccctctggggtgtggccaggaaaagacaagctcttcagcttggggatccgatctggaagagagattctgatctgcccacctcctcttccttcttctctacaaaagctccggttgattcgagggaagtggtgaaaatttttttttctcccattttcctccctgcatctggggacacagctgccgtgaccagggaggccagcctgggaggtccagatgcccagggagaatcttggtctggtgaatccatgagctgagataccacggctggggccatatgttcacctgctttcctgtccgttggtgaaggaatttcagaattcattttatatccaagactggcttttaccaaatttaaaagcctctcaatgcgtcctcgaccttgaactgtgctcaacagcctggccctttctggggccaccctgggatatggctggctggctggctggctttctttctttctttctttctttctttctttctttctttctttctttctttctttcttgctttctttcttgctttctttcttgctttctttctttcttgctttctttcttctctctctctcttttttttttttttaaatagtgctagtttgggcacagagtaatttatattccctttggttaaaatgcaggctttttagccaacaacaaaagtgttttccccccacccccactcgcccaccagggtgatgccacttttgcctcctgccctgaaaattggacttaagatgccatgtcttggctgggattacaggcatgagccactgcacccagcccagttctttcttaaaacagctgagagttttgttttcttcagcgttcaccttccttgtctccagttccgatgctggcagtggttcctacctctgttgggtttctagatagtttgggaacggggttgatgggtttctgtgaaacacattttccaagtcttgggctttctctggaggggaaggtggatgctggcgggtgacttgcagtgggcgcctggcagtgggtgtggactgtaactgacaggtggaaatgagtaggggcactattgttccctccatgccagctttttttttgctggaaatgccccctccacacccctggtagctctgtgtcctgagaaatccagagtgtgggagacatcactgcatctgtccccccagcttctgtgaagggaagctgtggcctcttttgaatgtggggaacaactgaagactcaggggtcacccagaggtctggtggaaagcaacttcaggtttcatcttgctctattcctcaaaggtctggtctgtgggcctctgaggagaaaacaggtctagccaagacagggacaaaatggggaagggggtgtgccaggcctgaactgagctaagcacctgccccgggctccacacttccatctttcttttgtcttcatttcacctctgtgtttaaagcactgtgtgacatagctccttagagatataacctattgtctgctcattgtc

SEQ ID NO: 701684 - DNA, 571 bp, Homo sapiens
  misc_feature (213)..(213): n is a, c, g, or t
  misc_feature (215)..(215): n is a, c, g, or t
  misc_feature (218)..(218): n is a, c, g, or t
  misc_feature (220)..(220): n is a, c, g, or t
  misc_feature (231)..(231): n is a, c, g, or t
  misc_feature (306)..(306): n is a, c, g, or t
cgctgctgctctggcgttctagaggatcccgacatgacccaagcatgcatgcatgctgcaggtcgacgtgtattcaccactgcggtgcatgcctccctgtacaagttccgtcgacacgtgagcaccgtgctgacctccaaatatcgttaagctggagcctggtcgactttagaggatcctccagtacccgagcatgcatgcatgcctccagcncnacntntattcaccacngccatgcacaccttcctatacatgctccttgaacacaggagcaccgcgctcatgacccaagcatgcatacatgcntgcaggtcgacgtgtattcaccactgcggtgcatgcctccctggacaagttccgtcgacacgtgagcaccgtgctgacctccaaatatcgttaagctggagcctggtcgacgtgtattcaccactgcggtgcatgcctccctgtacaagttccgtcgacacgtgagcaccgtgctgacctccaaatatcgttaagctggagcctggtcgactctagaggatcctccagtacccgagtcgattcactggtaccgagcgcatgtata

SEQ ID NO: 701685 - DNA, 144 bp, Homo sapiens
tgccgccaagtctccgacctcacaatagaggcctgcttgctgtgctgcgctctgagctcctgctggaggcttcttctccaacccagctcactcacctctctgcctgtgactggagcatcccttcccacctctcccccacttctt

SEQ ID NO: 701686 - DNA, 129 bp, Homo sapiens
tgagctgcccagttcacaaaactaccttgaactatcccttagaatgccctcacaacctcaccgcaggcccaggctctccgtgtcctctccatcccctccggcctcccttcccctgcacccacacaaccc

SEQ ID NO: 701687 - DNA, 298 bp, Homo sapiens
gtggtacctagatgatcccggctatcacattatccataaagtctgagaggaacacaaaaagaaacttatcctttaaaaccaagcttcattgttttcggttttgagccacacggcacacaatgagagaatacgttctcgcttccttcgagactttacctgtttgcaagagcctttgttagtggtgcatagtgtactagttcccaagcatttagttgatggtacaacactacatggttaataggcacaacgaaacactacccttcttggtgatggaacacctccagtaacaatcaccagt

SEQ ID NO: 701688 - DNA, 1604 bp, Homo sapiens
taccacctgctgcctgtcgcctgcctgccatttttgatgtgcacggaatgagtcctggttcttgtggacatgctggatgacatgtgtgttggttgacttgaagactaaacttatacacaacatgtgacacacgctactatctttgctgaacctactcattcctcccatgctgtgatgaattgtgccaatcttgttgccttactgtaaccatgatgccaggacttgtgtcttccctaatcgtcaccatgcgcaatatctttgcatacgatctctacgatctacacacacgcggctctgctccacactcgctccaaaaggcccttttattcagaccattgcacagggaattcaatcacagggtctccgggactggaacgctcctccactggctgtgccctgcttggcaaccataccaatgaattactatcttgcatccattctgaacatcaacggtgtggttgggctctcttgcgttttgggcacacccttacattgggggaacactctatattttgggaaccccttccaaacgaactcccagggacgtggttttccccagggctctttcccttctggggaccacccaccttaagggcgctttttctctcggacccttcttgtttccaagcgccttaccaagaagttggagcgcaagcccttggcctattccaacctagggcaacagtgcgaaacgacagcatgggcccccgttggtggcttatgcacaaaggttaagacgagcaacacctttatgtggaccgccattgggagacttgtgggtgctgccgttaaacgggcgcgaatagataaaagacgcgccagttgtactaacctacccaaccaaggctcttgtgcacaccacgtgacacccacctgggtccacggcccttttcctgggtcgggcacacttgtggcgcagctcaggaccccacaacctcagacttgggcttggtgcccacccctggcgcacaaacttttcctcccaagcgggtgccgctcacacgtcggcaaattgggcccaagcccaagtgactttgtgggtactgcaccaggatgtccaacacgaacttgtcacagccccgaggcgctgtgcaccaggctccaacaccacctttctaaaccctcttcgtggcaaaaacagggctgtgtcctcaagtgaaagaggatacacgcaacgcggtggtctgtcgccaacagcttacacgcccaatgggaacccaactggtgtttgcccacagtcaaaagacttgcggcccactggcgccgatcacacgcacacggcaacgtatctctggcgacaacgtaccaaccgcgtgggagctagtcaccccacagagcacaggcggctaagccggcctaaaatcagggggcgcacaaaacgcctaacacacggtgaactcatccgctggaggacccgctgtggctgcagcacaccgcagaaacaaatagagccctacagggagacgtgggaccatcagtagcccggcgacttgggtgcagctggtgtaacacgcacagggctcgcgaacacaatcggtcgcaaccgcaacacaacacgcgctgtcctcagcatcgcgagcgcaggggaccatacgacccacacg

SEQ ID NO: 701689 - DNA, 648 bp, Homo sapiens
  misc_feature (31)..(31): n is a, c, g, or t
  misc_feature (67)..(67): n is a, c, g, or t
  misc_feature (108)..(108): n is a, c, g, or t
  misc_feature (290)..(290): n is a, c, g, or t
  misc_feature (292)..(292): n is a, c, g, or t
  misc_feature (295)..(295): n is a, c, g, or t
  misc_feature (297)..(297): n is a, c, g, or t
  misc_feature (308)..(308): n is a, c, g, or t
  misc_feature (383)..(383): n is a, c, g, or t
accccccacgttccaaccacccaattcatgnctccagctcgacgtgtattcaccactgcggtgcatncctccctgtacaagctccttggacacgtgagctccgtgctnacctcccaatctcgcaaacatggagcctggtcgacgtgtattcaccactggcggtgcatgcctccctgtacaagttccgtcgacacgtgagcaccgtgctgacctccaaatatcgttaagctggagcctggtcgactttagaggatcctccagtacccgagcatgcatgcatgcctccagcncnacntntattcaccacngccatgcacaccttcctatacatgctccttgaacacaggagcaccgcgctcatgacccaagcatgcatacatgcntgcaggtcgacgtgtattcaccactgcggtgcatgcctccctggacaagttccgtcgacacgtgagcaccgtgctgacctccaaatatcgttaagctggagcctggtcgacgtgtattcaccactgcggtgcatgcctccctgtacaagttccgtcgacacgtgagcaccgtgctgacctccaaatatcgttaagctggagcctggtcgactctagaggatcctccagtacccgagtcgattcactggtaccgagcgcatgtata

SEQ ID NO: 701690 - DNA, 543 bp, Homo sapiens
tgcctgcaccaggttgtgtagatgctgccctgtgttttttgtagaagctttacagtggtagcttttgtatttaggtctgtcatccatctttctctttttaacagctttattgagataaaattaatatgataaactatacatgcttaaagtataaaatttgataagttttgacatatgtatacatttgtgaaattgtcactatagtcaggatagtaaacatattcattgtccccagaatttcctcatgcgccattgggattctttccttccactctatcctttccctccttctctaagcaactgctgatctcttttctgtatgatccatcttgctttaatttttgtgtgtgatgtgaggtggggtcaggatgcatttttctccatatggatatgcaattattctgccatcatttgttgaaaggactctcttctccattcaattccattggaacctttgttataaattaattaaacatgtctgcaggcttatttctgttttttctgttccattggtttattttctatcctgtgttaacaccgcgc

SEQ ID NO: 701691 - DNA, 242 bp, Homo sapiens
aagacggcggacattcagactgagcgtgcctaccaaagcagccgaccatctttcaaaacaaggaagagggtcccgcctggggagaaacttggcaaggaagaagcttccgcggtacttcaagaaccatcgggtcttgggcttcaagaacccaaggggggctattaaggggcacctacattgcacaggaaatgccccttacactggtaatgtgcccattcgagggcggatctctctggcgtggt

SEQ ID NO: 701692 - DNA, 347 bp, Homo sapiens
tccaccacgccggggcagacgtcccgggacaagctccgtcaacacgggagaaccgcgatgacgaccagagatcgcaaacatggagccttcgacgtgtattcaccactgcggtgcatgcctccctggacaagttccgtcgacacgtgagcaccgtgctgacctccaaatatcgttaagctggagcctggtcgacgtgtattcaccactgcggtgcatgcctccctgtacaagttccgtcgacacgtgagcaccgtgctgacctccaaatatcgttaagctggagcctggtcgactctagaggatcctccagtacccgagtcgattcactggtaccgagcgcatgtata

SEQ ID NO: 701693 - DNA, 855 bp, Homo sapiens
  misc_feature (60)..(60): n is a, c, g, or t
  misc_feature (188)..(188): n is a, c, g, or t
  misc_feature (215)..(215): n is a, c, g, or t
  misc_feature (346)..(346): n is a, c, g, or t
  misc_feature (390)..(390): n is a, c, g, or t
tattagaaagtagggctataaaaagagtatgccacaaacagagtttggttgttggcagcnaagccccaagctgcctctgctgccatgtgctaccatatcaagcgagttgcccgggaatcccctgctgacatcggtctgtctcacatgcgtgatatttggaaggtagttttggtgtgtatttgtgttgntcattatagtaatgacatgcatttacnacagttttgtaggagagcgactctcagctgtggtttagagacatagccctttggatctccaggtatctcaaaggctgtaaaacttctcaagtcaaaactagttttaattttactgcttgagagatgcagtntgaaacatatgacagcaatgagtgtctatttctgtagcaactcnagcacctgcttttttaggggaagatttataataaaggcacataactatagggcttttaaccttgatttaaaaagaaaaaaaaagactttcctgttcattatcatatctagctctggggagatagacaggttagtgatgatctgcaccattttacagatgagatccctgaggtggcttgtggctttggtccaagaagccatttatttttgattgctggcttcacatggctcctcccttggctggctccttcttatccctaatcccctatctttgttgcttgtctgttacctatcaaaagaagccatgcctgatttctctattggaggttaaactgcttttcccacctctggtttcccttcaactccttatttatttcattatcgcattagccactagttttatttcttgggttttcaaatggtaattattatttaattttattgattagtctgtctccagcattag

SEQ ID NO: 701694 - DNA, 282 bp, Homo sapiens
catagcatctgatgctggcagtatcgacgtgtattcaccactgcggtgcatgcctccctggacaagttccgtcgacacgtgagcaccgtgctgacctccaaatatcgttaagctggagcctggtcgacgtgtattcaccactgcggtgcatgcctccctgtacaagttccgtcgacacgtgagcaccgtgctgacctccaaatatcgttaagctggagcctggtcgactctagaggatcctccagtacccgagtcgattcactggtaccgagcgcatgtata

SEQ ID NO: 701695 - DNA, 231 bp, Homo sapiens
  misc_feature (216)..(216): n is a, c, g, or t
ttatcgcaaggtccaagagggacacgtgcagccttgctggtcccacagcctggcggcacgcctcactctcttcccaagggctcatgctctatgatgctcgattggcacacgctagttctatgccgcatagcggagctcctcctcgacatacctctgtgccctgcccatatgcaaccggtactcgagctcgaacctcgctaaatctctagtcatagnctccttccctgctgt

SEQ ID NO: 701696 - DNA, 312 bp, Homo sapiens
tctagaggatcccgagcacggagcatcgcatcgtacatctgtgtcagtatcgttcgacgtgtattcaccactgcggtgcatgcctccctggacaagttccgtcgacacgtgagcaccgtgctgacctccaaatatcgttaagctggagcctggtcgacgtgtattcaccactgcggtgcatgcctccctgtacaagttccgtcgacacgtgagcaccgtgctgacctccaaatatcgttaagctggagcctggtcgactctagaggatcctccagtacccgagtcgattcactggtaccgagcgcatgtata

SEQ ID NO: 701697 - DNA, 313 bp, Homo sapiens
  misc_feature (18)..(18): n is a, c, g, or t
  misc_feature (23)..(23): n is a, c, g, or t
  misc_feature (27)..(27): n is a, c, g, or t
  misc_feature (30)..(30): n is a, c, g, or t
  misc_feature (34)..(35): n is a, c, g, or t
ctgcatgccctccgggtngactntgangantccnnacctaccaagcatgcattggtgcctgcaggtcgacgtgtattcaccactgcggtgcatgcctccctgtacaagttccgtcgacacgtgagcaccgtgctgacctccaaatatcgttaagctggagcctggtcgacgtgtattcaccactgcggtgcatgcctccctgtacaagttccgtcgacacgtgagcaccgtgctgacactcctaatctcgttaaactggagcctgctcgatctatagaggatcctgctataacccgtttccgagtttatagta

SEQ ID NO: 701698 - DNA, 189 bp, Homo sapiens
tcggacgcatttatgccagcttatagaagcaggtgcaacagcatttagagtgttctgtgctccacttgactgcctcattgaatctttggaaaatcgatgcaacgagctgagctgacgtggtcttgagaggcctgacagtgcgccggttgccagcggttcaagtgctgagaagcctgatgcccctcagag

SEQ ID NO: 701699 - DNA, 306 bp, Homo sapiens
cacgacatctagaggaaacccgaccatggcccaagcatgcatcccgcccccctttaggtcgacgtgtattcaccactgcggtgcatgcctccctgtacaagttccgtcgacacgtgagcaccgtgctgacctccaaatatcgttaagctggagcctggtcgacgtgtattcaccactgcggtgcatgcctccctgtacaagttccgtcgacacgtgagcaccgtgctgacactcctaatctcgttaaactggagcctgctcgatctatagaggatcctgctataacccgtttccgagtttatagta

SEQ ID NO: 701700 - DNA, 458 bp, Homo sapiens
acaattaggtcaagtggctaattgcacccggagacaggtcttgcggtgcaatacgctacacagtgcattattcacccgagactactagctcccaaagtaaggagatagggattggaaatacagcactgaatgtatgtgtggttattgcaagcacctgtgattttaatagtcgctgccccccccacccccgcagaaacttgtagtgtggtggccttcctttggtctttatgcatacgtaaattgcttacctccttctgtaatatttattctacagcattctctttccagtagggtatacttttccctacttagaccctgtttcttcagaatttatttattttcttctggaacccctggctattataaaggccatatattcctccactgtttacctgtatctacaacttctcagcctcttcagtaagcaacatggtccatcaacttgaacagcttactgg

SEQ ID NO: 701701 - DNA, 511 bp, Homo sapiens
accagaggtctctctcttccctgtcaacctctggggcctttggcgtaatgggcagatacagtgcatcagcttctctaactctgcagcactggggcttctgtcttgattgcgtctgcttttcaggcacagttttcttcttgaagaaagcgtgcttgtgctctagcttcctgtcctctctaggtgtcctcagcctttctcggggtcttctttttcctcctgcctctgacatcggtatcctcctcaggactcatgggagctgtctaggggcttctcagagccatgagagctgaggaccatcgttgcaacgatgtgtcctcagttgtagtctgtgggagaccgacatccatgggctctgaaaggtccttgatgagaccaatatcagatgagtgcagctggagacatgagatcgagtgtctcaaggaggagctgtcttcatgatgaagaccatgatgaggaagtacatggctacaagccagattgcagcctgggttgcggtggggagatgcccaat

SEQ ID NO: 701702 - DNA, 598 bp, Homo sapiens
atttggtggtattcgtaaggtcacagactactcctcaagggggtccctgatccccattcctcctgactgggagaaacctcctagcagtgatcgacagaccacctcatacagagagctccaactggcatctggtgggtgccgctctgggacaaagcttccagaggaaggaacaggcagcaatctttgctgttctgcagcctctgctggtgatacccaggcaaacaggatctggagtggacctccagaaaactccaacagacctgcagcagaggggcctgattgttagaaggaaaactaataaacagaaaggaatagtaagaacatcaacaaaaagcacgtccacaccaaaaccccatccgaaggtcaaccaatgtcaaagaccaaagttagatacatccacaaagatggggagaaaccagcgcaaaaaaggctgacaattgcaagaccagaatgtctcttctcctccaaaggttcacaactcaacaacaagggaacaaaactggacagagaatgagtttgacaaattgacagaaggaggcttcaaaaggtgggtataacaaactcctctgacgaatacccccgaataccaccaatcagg

SEQ ID NO: 701703 - DNA, 290 bp, Homo sapiens
  misc_feature (1)..(1): n is a, c, g, or t
  misc_feature (42)..(43): n is a, c, g, or t
  misc_feature (164)..(164): n is a, c, g, or t
naaaataatgttaaaaacagaatgttgtggggggagaaaacnngctcttttctctcgctccgccggtggggtggttgcctgttgctcccctaacaacggcggtgtggacacacttctcttggggccaactagacacgggggctgggggcgaacaacaccctaantgtcgccttccccccgggagaccacaagcgggggcgcggccggcggtgggggtgggcaccccccccttgagtgtgggggagttaataccccgccagatttttacacggggagcgaccagccccacc

SEQ ID NO: 701704 - DNA, 249 bp, Homo sapiens
cgtaccccgatatttgtggttctggccctggctctggactctagagacatgctagctacagcagattacatgactgagagggactaggggagagcggcctttcatggcttcaggaagcagctagctttttgacttacgatacactcactcgctcgcctgctgcagcctccccgggcacctcaggcataaaacgggagctcatgtgcctagacaccctggaccacagacccgttaggagctgtccgagga

SEQ ID NO: 701705 - DNA, 332 bp, Homo sapiens
  misc_feature (27)..(27): n is a, c, g, or t
  misc_feature (47)..(47): n is a, c, g, or t
  misc_feature (84)..(84): n is a, c, g, or t
  misc_feature (113)..(113): n is a, c, g, or t
  misc_feature (123)..(123): n is a, c, g, or t
  misc_feature (128)..(128): n is a, c, g, or t
  misc_feature (148)..(148): n is a, c, g, or t
  misc_feature (160)..(160): n is a, c, g, or t
cccaacctcactctacttggcttctgnctttcaccctgtgatgtggnctgctctgaccttccccttcccattatgattggaagntccctgaggcctccccagaagcagatgcnccatgctttnctggncaacctgcagaaccatgagnccaattaaaccncttttctttgtaaattacccagtctcaggtatttctttaatagcagtgtgagaatggactaatacaatattgattaataaaattatattgacttatgaatgcccctacttgaagaataacagaaattgattttcagggtggcagctggtagaactcttgatttatatggtca

SEQ ID NO: 701706 - DNA, 1393 bp, Homo sapiens
  misc_feature (195)..(195): n is a, c, g, or t
agcggcgtttggccggtcaccatgtagctgggacttctattggtttgctttctctttggggcacctccttggagctcattccccagcagtgaaaggcggactgtatcccgtgtgacctgcttggcttgcttacgagtgccggtggtgctgctcttgttcggatctgctggtctggtcctctctgtcctcggtggnccggaagtgtgtccgtggccctggcgagcgtgagtgagctcagctgacgcttggctgtgacagaagcattgtaactcgacttgcctactccgcgccgtgcggagacatctggttcccctcgccggtcacgctgacgcatgggcagcgtcccaagacgtgtaatggccgaggggttgcgcacaaactacgcgtttagcggaagggccgatggggttctatttctgcatcgtagctaatttcctaccggaaagcccctaggccattgtgcttacgatgctcctttgtgacttcgaggaagggcgctagggctccccactgggaaaccaccgcgctctttgcaatgtgacccctagcgatcgcgtttctccccactttcgcgaaggaggcaacgcccagaagtcctctgcctttcccgggaataccgttgggtacgagtcctcaccacagctagcactttacacacgtgtaagcctctatgtatgtcccaactatggacgcatcttgcgctccggttgcttctctggtaaaacccttctgctggtaaacccgctcacggtgtgcctggtttgcgcgcagttactttggccctgggtggaaccccccgggggggaaaaaccgtttcattctcctagggcgcctgcggaaaatcgcccgggaaacgcgtccatgcggggaattgcggggcccccgccacaacgttttctgccgcacctttggcttcactacttttagaaactttcccagcacaaagatatttctccccttgtccccgtgggggaaggaaactaaaagagcgcttgtggttggcgtccaaggggattgcaggacagggggacttggtttgaaaaccttatgtttggggccctggaaaaggaacgccccaatgacagactttaaggccttccttgaggccccaacacgaagccttgtgggcgaaccggggttcatatcccccttagggatcccccacaaccttcacctagagccacccaaaatgttttccttacacagggtctatctttttccaggaaagccggttaggaaagagggttgttgggggacacgttgaattttggggcttagagcttcttcactcaacatatgggtaaccttgtcgcataacgggttgcggctgtggccaggaacaggctaatggatcccttatagatggggttcgttccccttgtggcatgggaaa

SEQ ID NO: 701707 - DNA, 333 bp, Homo sapiens
gatggacagtatacaggtgcttgctgctgagtgtttggggcacagatggaatcgtagtgggttgaagctgtcctcctgttgggctgaattgcttttgggtggagccataaggtccaggtggagtcatgggtgtcagacatgcaaaaaacctggaaggatatttcaaaaggccaatctgtaatagtagtgttattcacaggagcaattggtatagttgcatatcttataaccttcggaataatgtctgcagctaagtaggattcaggctcttctcctccccgcaccctgatgtccccctaacagctttacaaagagtggtgagttttgggcaag

SEQ ID NO: 701708 - DNA, 443 bp, Homo sapiens
caaaggccttaagctaaggtccatatactacttgggcaacactggttatgtggcgtagagtagaattactagcttagcagaaaacatgtctcctgcaacataggattcaccaccttcttgtttcctctacattatatgaaatcatggttagtgtcagccccaaattagtgctataccatatcccaaataatataaaacggcttctgacatactcaggtaggatagattcttcctctgtaggatgtatgtgaacagcaactatctggaggaacaggcgtcatatgaggtacgtgtatagagaaaactaatgactcacacagaattagcctatcagcttggctacgatactgccatccctagatccacatcagttcaacactccatcggatgatgttagactgtttactacgcatcaccaggtgtctaaatgcaatcgatctaaa

SEQ ID NO: 701709 - DNA, 917 bp, Homo sapiens
cttttaccaaggtcttacagggatatgttacgtgctttccaggtatctcacttggtgctgtattaaaaaaagctccatttgaaaatctacgtgtacagaagcacatgtctttaatgtcttcagacaaaaaagccttacattaatttaatgtttgcactctgcaggtgcaacttaccagggagggcctgaggaaagagaaggggagggggctattaattatttttagcacaaagtgtgccttggtctgtgtgcaaacatgtagaatatgctctttaatttagtaaaatatttttttaacaaggtagagaatgctctggttatggtaatcataaacttccggaaattctggtaatttgttgtcccatacttatcagaagtgtgttctaccaacttattgttggttggaaagtgtggattctttttttccttcccaacctctctttgcacaaaaacagaaaggggtttctgctaatgaatggagcagacatctaatattttatatggcctttggagctgtgtaccttactattcgggatactgtgacaattggttttaattcatgtaactgtgatacaacatggtgatgtgtatcaatgttagtcaaagcatatatgtaatactggtcggggatgtgtggctcaataggtcctgtgggggaggaaatacattggcagggaccccagcttgttaaacactcaggcgagagatggaacattaaaagtaacttagacaggcctaactaccactggacagggctacaaaaaacttattgggcaaacaaactgaaaggactccaaaaggggggccagtgtacaaacgaaggaaaacgcgtgacgcatacaaactagaacaagcgggcacagcagtgcgcaatacaccagaaatcaagaagcccaatgggcacgagtgacgcacaa

SEQ ID NO: 701710 - DNA, 391 bp, Homo sapiens
  misc_feature (160)..(160): n is a, c, g, or t
  misc_feature (176)..(176): n is a, c, g, or t
  misc_feature (366)..(366): n is a, c, g, or t
agacacacacgccagagacagtgtctcactctctcacccagggtggaatgcagtggcataatcatggctcactgtagcctcaacctctcctgctcaagcgaaatgcccacctaagctccccaagcagctgagactacaggcacgggccaccatgcctggntttttttttgtatttncttgtagagatgggtttcgccgtgtcacccaggctggtctcaaactcctcagctcaagcgctccacttgcctgggcctcccaaagtgctaggattacaggcatgaaccacagcgcctggccttgcaggtattattttcgaagctcagttaggtggggaacagagcagctggtagcctacagctaattttncccaatactaaggcagtattcttct

SEQ ID NO: 701711 - DNA, 143 bp, Homo sapiens
  misc_feature (123)..(123): n is a, c, g, or t
tgtgtgcactgtacaccgacgaagtgcgcctcacgcacaactactggggcgtgctgctgtcgctgatctgtgtcgggctttccgttcgcgttcctgctgatgctgtcgtacatcagcggcatngacccgatgctcgcgcgcgc

SEQ ID NO: 701712 - DNA, 100 bp, Homo sapiens
aaaattttgggttttttttttttaattgtctagttttaaatttggcccttttgtttaaaaaatgaatgtttccccaataaactatgaatgtttccggtta

SEQ ID NO: 701713 - DNA, 154 bp, Homo sapiens
gtgtggaaagtaggaagaatgcttttgaacaggatatgaaccactgacttattaaaaattgctgatctgctgtacgtgccagctgaaactacatccatgtctccataaggcatccctcaaaggcccaggcgctgccagggggtttgtcctggta

SEQ ID NO: 701714 - DNA, 531 bp, Homo sapiens
tttcccctctttccaagcttacctttagcggtttcccttgcctcttgggcaggaactgcacactcagctttttctctcttcatcatctttgcacacactttctcccgcccgagtggcagattacagataagcctgttctacatttggaccagactggctggtcccatttttgtactgggcctgttacttacggcctagatttaggaaagtcagcctcatctgcaaagcagggtaataatttccaacccatgaggttgttgtatggacccagttgagaatgtatgaaaacatgcaacaactatcaagattgttaaaatgtaagttattcactgtgtgagcattattctgctaaatgtttgcatgtatgtatgtgtgtgtgcgggagtgttaccccccgacagcctctcttggcctttttcatcccccgtttttttgtaagcggtggtgttcccattcttgttaaccaattcttgtccttcctatgtttccgccattttgctttggctaatccaattcttctgtcaactttgt

SEQ ID NO: 701715 - DNA, 874 bp, Homo sapiens
agcggagtgtggcatctgtgaagagtgcgtgtggtaacctccctcacgcggcggtggctgccgtgacccataccaggtttcagactggcaccggcggaggcgtgctacatggcagcagactcgtgggtcggagttgggccgcttctaagaaccgagactactgccttgtgagacggcgcgagacatacttgagtccctttgctaccaacggcgcggaacagaggcatagcctgggaccagaacctgttccacgcaccgtcgtgtctgcggtctgttcggcatcagacctcgaagatctggtggaaagtctgcgcctcgtggcctgacgatgcttcgcggaggtcatggtgaccggggagcgagcaggtagtgacatctacctgtgctttggacctacaagaccactgagcaaacgaaggtagctaggtagacattgcccaggtcgcgggctattgacatggataggctgcatgataggggcactggacaaagcatgggctaggtggtgtacccttcgatcgtagtggaatgggttgatggttgacaacgtgaccgcattgttggggacagcgcactgttgccttttcgaatcccaagcttctcaacttcgtgccttattccccacaaggctgggctagtagatagcgaggcctctgtggcgccggtacttggagcgatcgagtctgctgggaggcacttagcggggaacacaaacccgatgtttccagatgtgctccggcccgggatgtctgttgcgcacgtatgttgggccttgcgctccgtggcccgtacatgcctgactgcttcttgcttcgctcggccctcgtgatggcctgtcctctccggcgtgttggtccacctgtggagaacccgg

SEQ ID NO: 701716 - DNA, 495 bp, Homo sapiens
  misc_feature (19)..(19): n is a, c, g, or t
  misc_feature (73)..(74): n is a, c, g, or t
tgcagtgttctggccttgntccctgtattctgttgcgctgattcggtcgtgaaggaaggtgctgccaggccgnntcacctgtatcgccttggctttgggaggtggggctgagtgggcatctgggttggatctcaggcaggtggcagttcctctgattcatggttgtcagtttcctgttgcctggccctcgctcctcgcccagtaggtgtggtgggacaaggttctgggagctggggtagaatttggactcttaacgggaagtgcctcgtgctgccgcagacacatctggatgggtgctgagctttccttcccaagcctggtcctgatcggggtggggtacaggcaggagcagcccggccttgtcagccgttgaaagtgtggtatctgctgggttgccagtaagctcgcttcgaggtcttgagaggcagtgcaggggaggctgagtatgaaccgtgtccagccagtacttatgtctctcttcatctttctgctcca

SEQ ID NO: 701717 - DNA, 746 bp, Homo sapiens
agcggaggaaatggcgtgaaccccggaggcggagcttgcagtgagccgagttcgcgccactgcactccagcctgggcgacagagcgagaccctgtatcaaaaaaaaaaacaaaaaaaacaaaacaaaacaaaaaaaaaaatttacttttccctttcgggaccagcctgtgggcaacacggtgaaatcccggtctcttacaaaaaatacaaaatttagcccatcgtgttggcgcacgccttgttagtcccagcttcctttggggcgctgaggcaagaaaattcgctcggccccaggaagtgtcaaggcttgcagttgagccgtgtttggcattcacttgcacttccagccttgggcttaccaagttgagacccttgtcttcacaaacagaacaaaaccaaaatttccccatgtggaaacaaccagtttcatgaattcctattttccaaagctcttcaacaagactacaaacctgaattgcacacgatggcattacatttcaagttcctagtcgtgacgcactgtggtgagttgcccattacccctgttttcccgcgaggggaccccagcgagcgacccttcaccattattcacttgccctggttgagaagcccccgtgcggggacaccgggatcccgaagcagtggcacgcggaacgctcccgcaagccggccccggaaaagccgactgtgggcacggcgtggcgcccaaggctgcgctacagtcgggtcgacagcgcggccgcaaa

SEQ ID NO: 701718 - DNA, 901 bp, Homo sapiens
ggtatgtctcactgtgatgtttgcatcggggttagtccgagtaacgtcggggcattccggataggccgagcaaagtgtgtgggaagaaagttagatttacgccgatgaatatgatagtgaaatggatttggcgtagttggtctatggtgtacctgagaataggggaaaatcagtgaactgaagcctcctatgatggcaagatagcagctcctattgactagggacatacgtgggaagtgggctacatatgtagatatcgtgtcgtgtagtacgatgtctagtgatgagattgctcatacggatgccatgtcagagccagctacggtgaaaagaaagatgagctcctagggctcagagcgctggacagatcatgttcaatatagcttccggggagtgtgggagagtcagcataaatacttgtgacgccggtggggaataggcgagtcgattatggtcagcggacgagttgacaaatagtgactacggagatggacttacgtgtaatgccttacggtaaaatataatggtggtgtgtcatcacgagtaaactcctatgaaggccaatctgagtatagagctaacaacacatactattgtatcagaaacgaggtgcattatcaacaccgggagatacgtagacgtaacagtaatgcggagaagtgagacccggcaaaaccagggtggactaacgagctaccacactcagggcagacagaaggaaaagagacacgtgtcgacatacaaaaaggcgcatcctcaacgcaacgggacaaaacaaaagggcagggagggtaagcccagacccacacaccccaagaaccaaaggcacagcaagagacacaaacagaggccgaacccacaacaccgagaggacatacaaacagtggcagacgaccggaaa

SEQ ID NO: 701719 - DNA, 2265 bp, Homo sapiens
  misc_feature (999)..(999): n is a, c, g, or t
gtagagaacattggtggatccccaggggtccaggtagtcagctctatagatgagtgcgggtgagcgcccacgagtccttgtgcttgccctgcatgtctgcgtgtgcttgggaccacggtgtgtcaacaatacggacaggtggccgtgcgcgtccgtaccgctggaaacggctgtgacgcaaggaccagaaaagcagcagcgagaaacagctaacaaggatgctataatagcgttctgggaaaactgaacgaatattcggtcactactaatttgtcagggacacgactgcggtgtgcatcccctttgagacgaggaaactagcactaggcatttactcgccaggtacaactactaggcacacgaaccacatgaacggcaagcacggcctacgctcacagcgcacacggcgtacttcagagcaacacactgcaaccactcgcaccactggctctacttgccttaggaacaccacgtatacatacaccaggcactcggactcttgcggaacactggcgatacaggcaccccacacacacggtcctgccaacacaaaatcgcctgagcatcctcctttcacaataacacacgcgacaacaacgtcactccaagactacagcaggctcgcccacccgggctgacacggcaactcctcgccgggccagcctgggcgcaaccacacgtcatcttcacatcccgaacagcgccacacaagggaactccactcggcaccccccacacccggatgccgggacacaacacaacaacactaggaccagaacaacttcacggctaatgactaacctgatccaacaccaggcctcttgtcctgttaactacacctggcacctacacctggcaaccagtctgacccctcacctagctgacaacactcactccgtccactcgtccccctacacgtcactagatccctccgtccacgcctcctagaccgaccctcttcaccaacgagctctctaccccacactctcactgcaacgngagccagcgaccctagaccccgacacactcctctgaacgcctacaactacacaacctcgcacacgctacacgctacacaacattagtaatactgcacgccactacacatactcacacagcgcacacgactcaaaccaaccagcacaacatacttatctattctgtttgctacccccacgtgcacctactaggcccaaccacgatcgctagcccccctcactcgcctcacgcaacgacacgcacgacccgtacctcgctccagccacacccacctacaacacacacacgacccatacaaccacaccaccctcacaccccacccctcccacccgcccactcccacccacctcacacccccctccagcctcccccaccacctcctcccacctcgccagccgtacaaccacctacaatcctacgatcccttcattccaatatcaactatccttacaacaagatactatcatagcatctaagccgctcgatttcaaaaacataaagacataacattcgcaacttcacatccatctacgcaccattacacgaacacttcctcagacaaccacaaccccatcacaccaatacacaacacctaccaccacgaccaccactacaactactccctcccccctcccatccatccaacccatctcaccaccctccgcgcattcacccaacataccagactcacatcgctcaataaactacgacatataagcccgcatgacactaaagcaatcgcgaagaagaaccaaacacgcacgagcatcgaccacagcaggattaccaagtacctcgctcatactaacgatctcgcacactctcacacaaccatgagagtcactaatcatactctcaagatcatgacaatctcctgacacatcaacacatcggtgccaagcttccccagatactgcatactgcttaactgctcagtccagctcgacctcacccatcaagcaaatcaatatactcaaaccacaacatacccacgtgccgccactagactaatcacctaacatatctattactactactctatgaactatccaactgacacgctacgataccttatcatgcacagctctgccgcacctccctacaccccgccacacacctcctcctcaccctcctccgacaacatcacaatcaagacactcactcactatcacacctctagttatgtctactacactcagtactctgccacaatctcctactcaacccacacaccgacaccacaccaatcccacctacacaacacac

SEQ ID NO: 701720 - DNA, 684 bp, Homo sapiens
cagccataaaaaaagaatgagatcctgccatttgcaacaacatggatgaaactggagaacactgtgttaggtgaaataagccaggaacagaaagacgaacttcacacgatctcactcatttgtggaagctaaaaattaaaacaattgaactcatggaaatagagagtaaaggatagttgccagatgctgggtagggtagtgaggtggtgggggagaaatagggatggttaatgggtacaaaaaaaccagaatgaatagtcgggtgcagtggctcacacctgtaatcccacacttggggagactgacagggggatcatttgagaccaggagtttgtgaccagcctggggaacatagcaagacatcatctctacagaaaagtttaaaaaattaaccagacttgatagtacatccctgtagtcctagctactcaagaggctgaggcaggaggatcacttgagcctaggagttcaaggctgtagtgaggtatgatagtagctatgtagtaatgccactgtactccagctggggcagcagagcaagactctgtctcttaaacaaacaaaaaaaccttccttggttcttccttccctacctgtgaaataaaccccaaatcatagattcatcataatctggtgcagcctatcttctagcttctctccatgttgttctctctacatttagct

SEQ ID NO: 701721 - DNA, 413 bp, Homo sapiens
gctctgctttaccggagccgagtagtaaacggaacgctagtctaaacgaaccactgactccactcgtatccagagtgttaaccggggggcctactagccatcaccgagaccctctccttccttagcataaaaaagtatatataaaaaaatgataatcaccactacaatgtaaccacacatctatagatgacagtatagccgaatgtatggagtctggaggcaaactgggttcacctgctggctctgccataaactagctgtggagccttgggaaaaaaactacaaaagctctctgggcccctctatattcatttgtaaaatagagatacttaaaattcctacaacatagcatggataaagactaaactaggttcttacatgtaacagtacacagaataatagcttagcacata

SEQ ID NO: 701722 - DNA, 496 bp, Homo sapiens
atcatggcttggggtatcactctccgtcgggctgcgttaactcttcccatagcccgctcttttacactgtatctaccgattcgtgtcataatgctcgtgatgtgacttgactagacaccgtcatccttagtagcatcagcacctgctccattatccagtagttccaaggtaactgtttttccattcactgattcaatcagggctgtgacactggccctgagaattggggaggctccttggcgaatatttgcataaactaccagagggctggggaatttgctggtgtccttgttcgttttggaagtcactgtaattggaggcagggtagcattggacgcacgggacgtgacagtcagggtcaaggtttgtgagcttgcttgcagactgtatttccaagtgccaaccttagcaatgcctgggatttggaggtaggccattttggtgtttttgtccactacaaagccaccttgcttctgtcactgggatcccagagaag

SEQ ID NO: 701723 - DNA, 372 bp, Homo sapiens
  misc_feature (4)..(4): n is a, c, g, or t
cttntggtcaccgtggtcccgggcccttttttgaaaaggggcatccccagcccggagggtgatggaccaatgcgagggcctgagcccgagggtgcggacagtaaaccgtttatttctgtgtggacccagaccccgtggggcatgacagacagttttaaccccatgagcgctggggacggagctgtgcctggacagcttttcggtgtgtggtggggccccgctgggccggctgtccccgccagcttaggggctaacagggtcccctgggagaaaacctggaaaccgtttaatgaagcaggtgacttaggggggtttttagaaacccaaagaaatggcccttaaataagcaaatattaaacccaaaaaaggcga

SEQ ID NO: 701724 - DNA, 211 bp, Homo sapiens
tgttaggccttctttctcttgtcctttctgtccagggcaggcaatttgcaagtagcatagaaacctgacctggattactccgggtcatgcaactccagcatccacgtcagcgcactttcaatctgtttgaacaaaacggaaaccgtttcaatcagcaggctgcaccaatcggggcatgtccttgcatcccaaccatcggcagggtcggtca

SEQ ID NO: 701725 - DNA, 401 bp, Homo sapiens
cacaagggtttccacactgaatctagactgcccggactaagtttggctatataccagggcagaaatcaacaaccttactagtgcaatgagcacactgagtgtctaggacagactccatggcacaacaacatatgaaaaatatttgggaccacagtatgtcgcaggcattagtaatctgaaaaagtgctcaagctcccccctcctggaagcctgtgaattcctcaggaagtagaagcgaagaagatggcccagctccccaagaaagcctcagccattcactgcccccagctcttctccccaggtgtgttggggccttggcctcccctgctgaaggtggggattgcccatccatctgcttacgattccctgctgtcgtcttagcaagaagtaaaatgagacat

SEQ ID NO: 701726 - DNA, 757 bp, Homo sapiens
gccacgtgtgcgcctggcttcagccccagactcgtcagcctcccgtcgcccatgtcccgacgccgaggcagttcggccgcgcccccgtgcctcccttttgcgcagcccttcggcgctgagcccgaggccccgatgtgggctcctcctcgactcgttcggccatcgaagagcgtgtaagcacgctgcactggttgaaaggtctgaagatagttcatcttccgtgatgacacagagagtatcaggtaatgcacccagaacagaagtaaactcctcacccgaagaatccggagaacaagtcaggatagcgcagactaagattctcccagcaccgagtccgacccaacgcatttaacagcacgccatggtgacaacaaacatcgactcgttcccaggggcatcaccggtgcggctgtcgactgtcctttgacacgctcaagcatgcagagcccaaaggcgataccccacgaacgacgaaaattgcacggcgcacatgtcaacgcacaaacgccacctgaattccacaacgaaccgcacctgccttcagccgataacgacacaataacgttctcgcattctgacgcaagcccgcaacctgcatgggaactcacgacctaactcgaacgtaacacccctttctccgcaattcactcccaacctctgggtttccaattgggctacgcaccacattggggcttatcccgttcacaccgaacgaattaacattgctgagggacaccaacgggaaagactccattgc

SEQ ID NO: 701727 - DNA, 484 bp, Homo sapiens
gaaaaggaaaagctctcaaaccaacaacctaaccttctaccttaagttattagaaaaagaacagcctaaacccaaagataggagaaggaatgaagtaataaagtttagagcagaaataaatgaaatagaagatggaaaaaacagacctgtaactaccaaggagattgaatcagagaccaaaaacttggcaggaaagaaaagcagaagatcagatgccttcactggtgaatcaccaaacatttgaagaatcaataccaatcctgctcatattcttccaaaacattgaggaaagaatacctccaaactcactctgtgaggccagcattactgataccaaaggcagacaaagcaccagaggaaaatagaccaatgttcctgataaatacagatgcaaaagttctcaacaaaatactaataaggagaatttgacagcatcataaaaaggattacacaccatgatcaagtgagatttattcctggaatg

SEQ ID NO: 701728 - DNA, 291 bp, Homo sapiens
cccaataacttgaatgaccgcattccttccgctacaatggactgattcaccgcaagactgtgggctgttgagcctggcagcctgacttgcaaatggtgtcagtggtggtcattaaagctggagatcctggccacgtggaatgcctgccaccgtcctatgtagctggaccacacatcaacaacgaatgctcgctggcactgctcatgcagcatcatgacacattgatcctgcaatgaacaatgtacctgcccctgacactgctgcattgtgcatgccatcctgctgtgtgtg

SEQ ID NO: 701729 - DNA, 227 bp, Homo sapiens
ccccccccttttttggtccccttcctcccctgggcagagtcattttcaggggttaacccttctgatttgccctgatttgtttgttccctgagctttttaaaaaccctgtgaaaattttttttccccccttggtcctcatgcatctaattgtgggggaatgtttgtccaaccccccctccaaacagcctggggttgtttagaaaaataaacaaaaaagactgggtgga

SEQ ID NO: 701730 - DNA, 404 bp, Homo sapiens
  misc_feature (1)..(1): n is a, c, g, or t
nacccatcccgccacccacagcaattctgccaccctacaggcctgattttgtgttttctgacttttttatttattaatcttaagggtctataaagcgtttccatttttccccagctaaaaatgtaaaaaagactgcattgacatggttaatgcaggaccctcagttctttaaggatggactaaatatgtgttattattgcctacaggtgtcttgaccttgatggagcttatgttgagaaataaagtttatactttctattttcatctaattccattttttccacaaactttttggagtccccttgtatttccagaatacttgtgaatggctttttcaaattaatttagcctaaatattatcccaatttattaaccttaattggagaatgttgaaaatcttgtct

SEQ ID NO: 701731 - DNA, 920 bp, Homo sapiens
ctcctacgaggcttatcctggcaatggggtagtcactgccatcccttccacacacacacacagacacacacacacaaaaaaaatcccttccttgtggagattcttgggcatctcctgcctccctcactctcacggtaattaagtgtcttaattggctgttgcctggggaacatggagagctgcgtgcgagggaaggactgactcatcagtggggcggtgagacgggagagatgacggtgcccatcggtgtcgtatattgccctgcaagagctgcggatgtattcatcctccgcaacctcccgactcgctgttcgtcatccgttaccctttgggcgatccttttggctcatggatgcgacgaaacatgaagcgcccagggttggacgacctgaaacgcggagtattaagaccaggtggcctgctcctttgtacctgggctctagcacaggtggggtaactcccctatctcgaagccactatgctccgtgcttgcttgtcccagatcttagggactagggagcctgcgaagagagggaatgagtgctgccatggcgtgcttggggatcacgaccacgcttgtagctacttgatgaacccctatgattacactttgccaaggcatgggcgtagctaagactacgactcgtccatgttgaagtgggctgccttagacggcgcaacgtccacaagaagcacgttgcaatggtaacggcaggcctggacccatcaacattcagttccagcgtccaacagatggactacctgggaccagttgtgctcccaacctcaatgttgcccagggtggggaataaggggagctagaaacgaggccaatgcccctttccaggggtggtcaatgaccgcgaaaggggatttccgggaatgtggttagcttggtggccaattttgttgttacatcc

SEQ ID NO: 701732 - DNA, 332 bp, Homo sapiens
ggtatcacgcatctgtagcccagattgccaacctggagtaccgtggtagcgaactatggatcaatgcaagcaccaactcccaggttctagccaaactgccgcctaagcctcccaaagtgcagggaaaacaggtgtagaaccaaacgtgacccggccttagatagtaagaattatcacaaaagagaatactttgagtacctagtaacagttatttttgagtaagacaagtttcatgtacctacataggtatagtatgcataagctgtaaaactctagtaacgaatatacaaatagatttgaagagtatagctttagtgagggtttatagcggg

SEQ ID NO: 701733 - DNA, 105 bp, Homo sapiens
aggatcccctcccaagtctgaggaattgtacactttaatattatgtgaccaagaaagttatacccagaatctcgaatttcctcaccttcaaatatggggcagttt

SEQ ID NO: 701734 - DNA, 347 bp, Homo sapiens
cacgaggcgtacggaccgcggcttcagcttcagctcccgcatcagctcgtggaacgcgtcctcgggaaaggcgccgtcgcgcctgtagcgcaccgagacgtcgatgatgttgctggccggcatgtgctcgtcgatccaccggaaggccaccagcaccaccagcgtcgccaccgtgccgatcagcgccaggccgaagaaggagacgccgtatagcgtgccgagcgccgaggtgacccacagcgaggcggccgtcgtcagcccgtgcaccgacaggccctggcgggagatcaccccgccgcagaggaagccgatgcccgtcaggatgccgtgcgccatccgcaccggat

SEQ ID NO: 701735 - DNA, 309 bp, Homo sapiens
  misc_feature (19)..(19): n is a, c, g, or t
  misc_feature (105)..(105): n is a, c, g, or t
  misc_feature (305)..(305): n is a, c, g, or t
cgcccggagcggcagcacnttcggctggaccgcgccgctgttgcgctcgtgcttctcgctcgggaactgcgggaagcgcgggttctcgcggtactcggcaagcgnggcgtcgatcgcgtcggggcgaccctccatcttgtcgtggtcctgcgtctggctgatcttgtagcgctacgactccgcctcgaacggatcgtccggaccggtgcgaccgggcgcgggcgacgggccgccggcaaggccggggcgcgcgagcttgtccttgatcgcttccttctctgcaagggagagcttctggaccttcncgca

SEQ ID NO: 701736 - DNA, 345 bp, Homo sapiens
agagcatacccctgctttttaaaccatctatttaattgccattgtaatcctcacggataggatcaattttgcacttccctttttcacactttttttccttttactaagaaaataaagtaataaagtgactgccgagatggccgaaaagctgacactagtccatgaattattaatgtgctatgagtcagaaatagagtaagagcaacataatcgtcactgataccaaggtatgatcttatgaatcaaaacacctagcgtgtagtattattagccctgcctacttatctagctcatatagacagatgatcaatgctattattatcctcttctggcttgacaacaata

SEQ ID NO: 701737 - DNA, 306 bp, Homo sapiens
accggacacggaaggtataggtagcacggcccgggttctccgttctcttcctgcaggctatgcttggatgatctacggaatctgaccttggaggcggtgcggagtttggtttggtggccctgtctgtgaggaccaaatattgtctctatttcacagatgaggaaactgaagccaattgaagtagacacctgccccagaccatcaagctggcatgggaattttgtctcccctcagacgcttcctcctatagccttacacgctgcctcaaatgctggcgggagatagggacgctgtccagtggccttt

SEQ ID NO: 701738 - DNA, 463 bp, Homo sapiens
gaaaacaaagaaaagggcggggggtggtggctcgcgcctgtgatcccagtacttgggagggcggaggaggcacatcgcctcaggttaggagtttgaccaaccgggccaacatgacgaaagccggtctctactaaaaatacaaaaattagccaggggtgggggcgggtgcctgtaatcccggctatacagaaggacgaggggggagatcacttgagcctaagcagtcgcggctgcagtgaacaagatcgcgccactgcactccacccgtgggtaacggaacaagaccctgtctcaaaaaaaaaaaggaattccattcccaatatgatagccaggggaatctggagcaaactggaagggggatcagatggggtaaccttgcccaaaagggtctagcatcttccctcctacggttataataaattcccaatcccggaaggtggcgccatgttttggggggcccctg

SEQ ID NO: 701739 - DNA, 949 bp, Homo sapiens
gtgtagtgttgggctctatcgtgtcgagatggggtattcatgtattagttctgttgctagtgatagctacatgtagtattcacaagtaggttgttaggctgaatgcccttggattatgtttcatacctggtagacagcttagtgttaatctggctgcataattccttggagtatcggcctcagtcagttccttgaggtgaaacgatgagctgagagtctaggacttcccgtgggatgttattgaaccttggtataggaaagtgcccatcatatgtcccttggctgtgtatgcttagtattcatatgtgtatacgttgcgtgcctgatatgtacatgtaactggccatcaagatgagagatactggaggtgttccttgatctgtatatacaattaacattatttgtacatatgtgaaatgaaaattatgccatagcaagattgcttaaaatagcatacactctatatttagattgttaaaaatgactagtgttgcattggactattatgaatgtaatgcatgttaggaaaatttcacagtcggatatttgctgatcagctgacctttgtcatctttcttgctattttattccctttcacaaatattttattcctatatagtttattgacaataatttcaggttttgtaaagatgccgggtatttatatttttatagacaaataataagacaatagggagcatatgggttgactttcaggtacataaatacctctaacatatggtattatggttgaactgggtttcatctgatatagtacatggcatggtacggtagatgatttcacagaagtttgttcatcagactcctgtgctactttcccaatgtggcactaaaatgaaacttcagtttattttcttcttagattttactcgtagataacatccctcggggtgttacttagcacaagaagaaacacaaaacaaaatag

SEQ ID NO: 701740 - DNA, 163 bp, Homo sapiens
ggtcacgcccattcccgcatcgtggcctggtcggaccgtcgtgcactccgagcgtttctgtccggtccctctgggtccgtctggttttcggaggctttccctggaaaagccagactttgtggtactcctttttaccctaagtgatggaggaattaagaaggcc

SEQ ID NO: 701741 - DNA, 133 bp, Homo sapiens
gacggcgctcgtggatcggagcacaccatgagtagccacggtcttcgcctgatccaggggtcttcgcctgatagccacagtcttcgcctgatagccgagagtcttcgcctgatagccacagtcttcgcctgat

SEQ ID NO: 701742 - DNA, 186 bp, Homo sapiens
tggctattttggtacttttagtagagaggggatttcaccacgtgggccaggcgggtctccaactccttggcctcaagtattctacctggctggcctcccaaaatgctgggactacaggcgcgagtcaccacgcctggctgctctacctacttttttttttccaagtcataaaacagtagtagaggg

SEQ ID NO: 701743 - DNA, 234 bp, Homo sapiens
atgtcttattctgcctagtaaagtcaaattacgaacgcacgcacagtcgcatcataatcctctctcagggacttcaaactctactcccactaatagctttttgatgacttcttgcatgcctcgctaatctcgccttaccccccactattaacctactggtataactctctgtgctattatccacgttctcctgatcaaatatcactctcctacttcacaggattcaacatacta

SEQ ID NO: 701744 - DNA, 518 bp, Homo sapiens
  misc_feature (467)..(467): n is a, c, g, or t
  misc_feature (485)..(485): n is a, c, g, or t
  misc_feature (490)..(490): n is a, c, g, or t
cgcagtgtcacggggggaatgttttctgtgtacctagagaacagtaaaaaggttgtaggcatttccagtgagcacttggagcctatccccccccccaagaacacaagggtaaaagtgatcctgggcgaggatcgggaacccacgggcgtcctactgagcattttgtgaggatggcattgtccgtatggaccttgatgagcagctcaagatcctcaacctccgctttctggggaagctcctggaagcctaaagcaggcagggccggtggattttgtgggatgaagagtgatcctccttccttccctggcccttggttgtgacacaaaatcctcctgcagggctagggggattgttttggatttccttttgtttttcctttaagttttccattttttccccccctggggctcattggaatttgagtaaagtttgggggagggtcccccccttcctgtacctcctccccncagcttgcttttgttgtnccgtntttcaataaaaaaaagctgtttggttta

SEQ ID NO: 701745 - DNA, 212 bp, Homo sapiens
  misc_feature (44)..(44): n is a, c, g, or t
gttcccttgtctctttttttttattttaatgaagatctctttantgagcatgtaaaactttttatatcagccttccgccatcaaattccactggttgtgtctgtttttttttttttggggaaacacgagtttggcttggtcccccagttggcagggtgctgaaatcgggcccagggcaccccagcggggttaccagagcgagactcaaaaaa

SEQ ID NO: 701746 - DNA, 481 bp, Homo sapiens
aaggatccctatggctactgctggaggtaggtggtagtttgtgtaaatatttttagttgggtgatgaggaatagtgtaaggagtatgggggtattatggtgggcatatggtagtatttaagttggggcctttttaattcttagagcgagaaagctataatcactgtgcccgctcataaggggatggccatggctaggtttatagatagttgggtggttggggtaaatgagtgaggcaggagtccgaggaggttagttgtggcaataaaaattattaaggatactagtataagagatcaggttcgtcctttaatgttggtgtatggctatcatttggtttgaagggtaggttgattagtcctttgttggggtggtgattaagtcgggtgttgatgagatattttggggggggggatcactagagggggaaatagaatgatcagtactcccagccaggtagcccacaggttacgagctcgaat

SEQ ID NO: 701747 - DNA, 182 bp, Homo sapiens
atcaataggccctttggaatttcctttttgtttttttttctttgctgggggggtgagggggaacaaaataccatttgtataaagtccagtttgtgtccctcaaaatatgccctgtatgggtacacaaaaacagcttgatgaacaaatccccccatgggtcattaaagaacaaagcttcccga

SEQ ID NO: 701748 - DNA, 222 bp, Homo sapiens
aacgaagtttaactaatgctatactattccccagtatttggtcaaatttctgtgccagccatcgcggtcacacgattaacgcgcgaatgtcaatagaagccggcgtaaacagtgttttagatcaccccctccccaatatagctgaaactcacctgagcttgtattaaaactccagtgtgacacaagattgactataaattggtaccgtagctcgaagttctc

SEQ ID NO: 701749 - DNA, 562 bp, Homo sapiens
  misc_feature (440)..(440): n is a, c, g, or t
tctcagaggtctgatggtttaaaagtggcagttgcccttcatgtgctcactatctctctcctgcgcgcatagaagacatgcttgtgtctcctcctccttctgccaggattgtaagtttcctgaggcctccccagccatgtggaactgtgagtcaattaaacctcttttatttatctatctacttatttatttatttatttatttttattttttgagatggagtctctgtctcccaggctggagtacagtggcacaatctcagctcactggaactttcgcctcctgggttcaagtgattctcctgtctccggctcccgcatagctgggactacaggtgtacaccaccacacccggcttttgtatttttagtagagatgaggtttcaccatgtaggccaggatgatctcgatctcttgaccttgtgattttcccaccttggnctcccaaagtgcagggattacaggcgtgagccactggactgggctgagagcacattttttattgccgaatagaccaagtctggttgagaaactgatggcgtttaatgtgggaagtggccagt

SEQ ID NO: 701750 - DNA, 117 bp, Homo sapiens
ggaggagaaaggactaagtgcagggtcagtactccagcgcctctcatcagacaatgaattctgacactggctgtaaggttttctgtgcagtaatacagatccttaagacattgcccc

SEQ ID NO: 701751 - DNA, 385 bp, Homo sapiens
agccacccagtaaaacacaagacccctccctctccctccttactgcctttggcacaattacccagtcctgataatttcagactcctactctctctataaatcagtataccctcttagttatgcaaaatgatccttgctttagattcagggtcccttcatcttgaactattatgataagcacctaaccgttcttacaggctctattttcaacctctcagatccatcctctacagaataacctatctcaaacacaaagctaggtcatgttataccccagctataaaatggttaccctttgtctacaggatgaagtccagtcttctttgttatggtctgcaagacttcttgtgatataacccttgttcatgtctccatcctcatctcc

SEQ ID NO: 701752 - DNA, 1024 bp, Homo sapiens
gtctcttattattggtggtggttagtgatctaccgcgtgcgcagcggttgttcctttggtggtgtccgcctcaatatgattatatccctctcttatcttaggtggggggtttttttttttctgggggggccgcctcgcttgttttatataatgatggggggcccctcccggacgcagttttgttgtgttttctttcctccctcctcatcgcggttgttttggtgggctcccccccttctgtttttcaccccctgttttttggagagagtttgtgttgggtacacatttttcgcctccaggtctgtttgttgatgccatcttttttttttgccggcgccgcctgtggttgttgctctcccgcttgggggtcgttcttcatcactttgtagttcgcccccacaatagagtgggtgttttctgttgtggggtggggcgcctcactcaacagtgttttgttgggtgttgatatacattcgccacggatagttgttacttattattttgtgggtgcctcgtcgcgcgtgttcctacctctctttgtctccctgagagggacctctctggagagagagaaggtgtgttgctccttatacctcacctggtggtagaaaaagaatacaacgtggtgatagagaggcccctctgtttatatcgcgctgtttgaaaacacaaagacacacacagtggggtcccctacggtgggagcaccacttatttttcctcttcgcagagaacctaatatgtggttgttgtggaggaggaggccccccctcccccctttattctttcgcaccgctgtggtgggccctcaagatttggtgatattttgtgcgccggttaaaacaactgtgagccccccctctttgccacccccgcgtgaactcctccctcctcgctccttggtgactaccgctggctacaccccctcttttcgccgccccgtttaagccccccccgggggggtttttttataaaaatgtggggttttaaaaaagcccccccctatataccccgggtgtgttta

SEQ ID NO: 701753 - DNA, 808 bp, Homo sapiens
gccgccagctagccccgccagcctgggcagtgaggggcttagcacctggaccagcagctgctgtgctcgatttctcactgggccttagctgccttcctgcggggcagggctggggacctgcagcccgccatgcctgagcctcccccctcccctccgtgggttcctgcgcagtccgagcctccccaacgagtgttgccacctgctcagggcacccagtcccatcgaccacccaagggctgaggagtgcctttggagcagggcacgggactggcaggcagctctacctgcagcccctgtgcaggatccactgggtgaaagccagctgggctcctgagtctggtggggacttggagaacctttatgtctagctaagggattgtaaatacaccaattggcactctgtatctagctcaaggtttgtaaacacaccaatcagcaccttgtgtctagctcagggtttgtgaatgcaccaatagacactctgtatctagctactctggtggggacttggaaaacctttttgtcaacactctgtatctagttaatctggtggggacatggagaacctttgtgtctagctcaagggattgtaaacgcaccaatcagcaccctgtcaaaacagaccactcggtctaccagtcagcaggatgtgggtggggccagatgagaataaaaagcaggctgcccgagcaagagtgacaaccactcgggtccctttcacaccgggatgctttgtttggtcggcctttgcaaaaaatttgctgtgctcaaaaaaaaaaaaggggggcggcaaaaaacctcgaggggc

SEQ ID NO: 701754 - DNA, 937 bp, Homo sapiens
ggcagctgcgggactcagaggcgaagctggaggggctcaggaaggacgaagaaccacccttgagagaagaggcagcagcagcggggcagagagggaaggaccccaccaattgccactttgtgccaggaaacaatgctgctagcgacattcaagctgtgcgctggagctcctacagaccattgtgcgcaaactatgaagggtgctgacggccaaacagtgcctgtgattggccatcaggccaggagctgaaacgggagggcccctgggtgggggcccccaacccttagccacgttggtattaacacccaggttcggcgcggggggaagctctacatactcgtcccaccggctggaaagggaagactcctctacgaggtcgaacccacggggagcgtgggccttaatctacaaagcagggggggaggaggccttggcaagaaggggctgtgggctttcctttagcacccaaagaggggtggaaaaggacaggcgatgtccagcacgcgaccatcggggcccaacggtcggttgacgaagagtgggtccccaagattgtgggcaatggtgtcccagggctggaagtccgggtggcccacgcccaatggaggagggctcttatggaagagctccgtggcagccctatggacaagcaagtgggggagtgaaccccaagttgtcaaggagcatcagggtcctggcagaagcatcggaaaggattccttcattactcacggaggtggtgccgagccacgaggaacctggtggggccccggcattgtaagcgtgcgctgtcccagacccgaggccccactgtgtcggttggtatgccaagatttggaaatcctgcaaaggttcaccggggcgcggcccattgtggggcaccggggtggacccctaaaacacattggcaccatccccgggggcccaacacaaagtg

SEQ ID NO: 701755 - DNA, 131 bp, Homo sapiens
gtgttacatgccaataccctggtgcaatgatgtcttcaatgtatattccattcatgctcactgatagcctctttcctccctgtcgccaccgaggtcgcacgcgtagattctccgccgcagccgcggccgct

SEQ ID NO: 701756 - DNA, 329 bp, Homo sapiens
tagctgaaggcacgcctctagttacagaggaacaggtgacaacagtcaactgaggaacaaaaaaataattaaacaggcctaagaagaaatcacaacccatacgacacctatcctgctctgttatttcttcactctgctggggggacacagtacattacaaccaaacaaacaaagcagaactaacatattgggaccatggcagagaaacgcaggagaggagcaaaatgaaaattagttaacaaattgttcctcctccctctgggataccaccaccaattagtactgtgtgtgtaaatttggtttatctatcattcatgcttagcttaatg

SEQ ID NO: 701757 - DNA, 674 bp, Homo sapiens
  misc_feature (92)..(92): n is a, c, g, or t
  misc_feature (227)..(227): n is a, c, g, or t
cgcagctgagagtatatatcataacccaaattgttagggaccgaaaaggttaatgatgatgtgcctttggcccccctatagaaaagtggccngggtgttcaaatttctcccttttggtcctttgggttgggttcaacctggtaagaaataataaccaaacacggtctttgggtggttcccgtaagagaattaaagcttttgtttaatggtagtttctcctgaggganctaaggaaatagaaattctggagagaagtctgttggatttctcacagggaatagctattagctcatctaagcaaatgaaagagttaatagtatatgtataaaccacatgtgtgtaattggaacttcttaggattctaagatttttaaaatcttgtttaaaaactgtattatcaccttaatataaaaatcttagcgcttgagcgtacttacccaactgtggttttctttagatgaggaaactgaggtccagagaagttgaagttttcccaaggtcacacagcagagctggaactagagcttgcatttcctgacttccagattagtgttatttttacttcaaactattacttcttggtgagttattgtgggaaaaatcctgtatattgaagatgtctctacacagtatcgtttcctgtttaaattacagataacttcaagagttttcag

SEQ ID NO: 701758 - DNA, 363 bp, Homo sapiens
ttgtggtcgttctgaggatccccgtgcgttgcacggtgccaggggtgccgctcatgcatgcaattggcagtcacggcgttggcggcgcggatcgtggcttggcgtgtggtgcgtgtaggaccatgcactgcccgatggcttcggctcggatcagtccgagattgtctaccggggcgcgggctccatccgggacgccggtggggccttcgtgcccgagtgagcagcgctgaagaggaacgatatgtccgagcacagagtagagaacaactggcagctttgtaaaaacaccatgaagaagacatcgttcatcatgagaaggagattgcagcgtctgcagaaagaaattgagcgccgtcgcctacg

SEQ ID NO: 701759 - DNA, 197 bp, Homo sapiens
aggatcccggtcctttgctatacggcttcaggctgtacacccccagaactgctgtgatgactctgttggacattagtagtatatggaggagccatgcctgagatcattttcaatcgtgaacatccaggatttgtgatgaattacaagagttctctgtgtgtatgagggaaaactgtggattactcgttctacctata

SEQ ID NO: 701760 - DNA, 871 bp, Homo sapiens
agcgggaaggtcttcttaagcaccaatataagcaccttaaatgatacatagaaaagaatgacataacgtttgtggtcttgttctcttaaatatgaatatagctagttagcctaaaatttacacaaaatgtattcaagatcaaattagtgaacaaagcaatggttcatatggctaatttaaaagcaattcaatttaccaatattaaaataattataaaatgtaaaagaaatttcagaggagtgatgaaaatttttgttcagtaattattcttaaactgcattcttaggtttattacaataagaaatagtaagccaggattggccatgggcaaggtgaactggtcttcggtgggagagatatgagttagagatcaaggagtaggcagtcatcatttgtaactattgtgtgtctggctatacagaaaatgtttctggaaaaattccttaagtgtcatctgagtatagagagtaagagactggaggccagacgcgaggaggctcacgcctgtaaaaacccagcactaaaaaaaaccaaaaaaacaaaaacatcagatagacaggaaaagaacgaagaaccagtggctagaaaaaatcagaatgggaaatacccgtaatcgaaaacgaaaagaaagaagccaagagagtaaaggtccaggcagcaagatgctacacatccagtaaggtcgccaggcatcgattagagaaaggccggggagcgggttagaacatcgatatgacgtgagaagcataaggctgtccaagtgaaatcaagtgagagactcaagggacaagtaaagaatggcattatgtgagttcggtcaaagagagcggttgtcaggattacccaggcagacggaattcaaggcggagac

SEQ ID NO: 701761 - DNA, 242 bp, Homo sapiens
gttctatgaggatccccgcgctgtaccagttgcgcaggtcgcgtggcagccgaaaagtagcaacaaccgctagacgggctcgtcacaccctttgccatcactaaaaatcactagagcagtcagacgggacccagctatgaccaagaggaggggaggacagacgcatgaaaagcacatatccatgcgaatgaagatgtaatttgggacgagccatcagcccgcaaatcttacagtctcaagtt

SEQ ID NO: 701762 - DNA, 274 bp, Homo sapiens
gatgccacgatggggatggtgggctgggaagacgggtcccatctcagtgtgagggggcttggtcagaccctcatgctgcacatggcaggtgtatctctgatcctgtccagaagtgaccaccacagacgcccacttctggaaggttccatcccctgcaggcctggtctccacaagctccgtgtcctgggtctggtcctccccatcccgctgccaggtcagttgtgatctccgcagggtagaagctcagtgcccagcaactcaggatgcttcttga

SEQ ID NO: 701763 - DNA, 808 bp, Homo sapiens
  misc_feature (13)..(13): n is a, c, g, or t
  misc_feature (45)..(45): n is a, c, g, or t
  misc_feature (48)..(48): n is a, c, g, or t
  misc_feature (54)..(54): n is a, c, g, or t
  misc_feature (765)..(766): n is a, c, g, or t
  misc_feature (795)..(796): n is a, c, g, or t
atcacttattctntcaccgtgggcgggggagggtgcttctctccntgnacttanatgacttcgcgctacactatgtacctggctgggactcaatccacaaagacccaaaccttcaggaagacctaccccatcatcatgagattgtagaaggctattcatctgagagactaaatccactggccagggaggatggaccattaaagattctctcactggataaatgacagatagaatatattaatctgaacatacactcttgtctttcagcaatgactgatccaactatctcttatactacattgaatgaccctccactgaaaagaactcattatgcctaagcgtgactaccatacaattctaggactagccacgatggttaaagagggatcgggacatgctatcaaccattttagaagtctcaagattccaaatgatgaacgaattgctcccactttcagaacacaaaatttttaaatatgagatacttaaaccctaacactcaattcgcaaaatgttaagtattaattaagacaacctgggcaagaacctgttgaatattcaccccgaactaattaaaacaagggggatgtttcttaacccctttattcacacttaaataatagcaagtgaaaaaccttctggagaggggaacaaggggatttattattcacacttttcagggtggggaaaagtcaaatttttaataacttgccttaaaacccgaaaaaaagttcccttggcttaatacccctccacttccccctnnggaaaaaataagcggaaaataaaaaaaanngccccgtttttg

SEQ ID NO: 701764 - DNA, 893 bp, Homo sapiens
agccagattcatcatcaatgactgggtgaagacacacacgagaaaggtatgatcagcatacttgcttgggaaaggagccgtggaccagctgagcacggctggtgctggtgaatgccctctagcttcaagcggccagtggaagactcccttccccgactccagcaccctaccgccgcctcttccagcaaatcagacggcagcacatgtctctgtgcccatgatggctcagaccaacgagttcaactatactgagttcagcacgcccgatggccattactacgacatcctggaactgcccgtaccacggtggatcacccgtcagcatgttcattgctgccccgttatgaaacaagaggtgcctctctctgcccgtcaccaagcattctgagtgcccagctcatcagcgcactggaaaggcaacatgaccatggctgccccggtctcctggttctgcccaatgttctccctgggagactgtaagtcgacctcaggaagcccctagagaacctgggtaatgaccgacatgtacagacagttccaaggctgacttcacgagtctttcagaccaagagcctctccacgtcgcgcaggcgcctcgcagaacacgtgacgatcgcacggtgaacgcgagtggcacggtggcctcctcatccacagctgtcatagctctcagccccagcatggcccccgaggagatcaatcatggacagagcccttccctcttcgctggtccggctaccacccccaacagagaacgcgccctcttcactggcgccacgtcgctcggaaccctcgcccctgacggcaacgacgcccctcatctgggcacaccaccggcgcatgcatcgcgacccgacacacacccgcacgcacacgaatctaagcgtcccgca

SEQ ID NO: 701765 - DNA, 165 bp, Homo sapiens
cctttttccctttccttttcacttttgcatgtttttaatgatcattcgatatggtaaccgttttcagccctgagccttggaaaggagggctgtaacgccttcagtcagtttttggggatgaaacttttaaatgctttgtatattttttcaattagattttttttc

SEQ ID NO: 701766 - DNA, 313 bp, Homo sapiens
  misc_feature (159)..(159): n is a, c, g, or t
  misc_feature (162)..(162): n is a, c, g, or t
  misc_feature (172)..(173): n is a, c, g, or t
  misc_feature (180)..(180): n is a, c, g, or t
  misc_feature (189)..(189): n is a, c, g, or t
  misc_feature (195)..(195): n is a, c, g, or t
  misc_feature (200)..(200): n is a, c, g, or t
  misc_feature (209)..(209): n is a, c, g, or t
  misc_feature (231)..(231): n is a, c, g, or t
  misc_feature (253)..(253): n is a, c, g, or t
ctgatttccccgtcaaagtcaagctcattccaaattgcgtgcaccagagtggtcccttcagagagtcagttgcatgtgctaagtcccatagcccctcccagcttcttatcctacttggcctgtgtgaaattgctcatcccgaattcttgtttccttctncantgacttcacnntcttcantggctccangctgcngcatnctctctttnccttctacatgggtagtagaangaaactaccaagtgggactgtngctgagccctgaagctcagtctttgagaccctctcctctccagctgcgtttcacttccga

SEQ ID NO: 701767 - DNA, 181 bp, Homo sapiens
ctagggaccgttacgtggtgttacagtccatgaggttgcgggtttgatccctggcctgctcattgggttaaggatctgttgttgctgagagctgtggtgtaggttgcagacacggcttggatcctgcattgctgtggctctggtgtaggccggtggctacagctccaattctacccctagc

SEQ ID NO: 701768 - DNA, 781 bp, Homo sapiens
tccctttttttaaaaagggaaaaaaaaaaaaaagggtgtttgggcttttaaaactaaaaaaaaattcacccaattaataattttccctttcctcccattatttaacattaacacgagctacaacaacacccttatgttgtatataatatataaagtggggagtggtgggctgtggtatttattatctcatcaaaaaaaataacgacgccccggcggcacttatagagaagggaataacctccccacctctcccttccatcgtagacacgtggcagctttccactctacgggggttcaaccaccaatttcttactgtctgagttgtgttccccaccacagggggcacgctaattcacatatttccctcctataattacacggcggggtgtttctgggctttacaaggcaaacagctaaactctctgggcagggcgtagatgcgtcttcctcactggctaggctgtggtctccaacgccgagtgtgttatccctaaccggggccattataatgattgggccgcgccccgggcctttacaacttcaggggcccgtgagggaacagtattgcctcgtcgatttctcgtgcaagccattcctcttacctccctctccggggtgtctccgtggaaccccacctctgcggtcttcgccgctcccccattttctttttctcgcgcagcccctttcccgacggccctccttttccccccccgcttgcctccctccggctccctctcccccggccaagctccccgggctcctccccgccgcccgctctcgc

SEQ ID NO: 701769 - DNA, 157 bp, Homo sapiens
ttatgggagctgtgtgttctgtgacctcctagtcccattgtactgtccaccctgtccccagatccctattccctccacaataacagaaacactcccatggggactctggggagaggctgaggacaaatacctgctgtcaccccacagagagagcgtt

SEQ ID NO: 701770 - DNA, 661 bp, Homo sapiens
ggtagcacattcgggcaatcccagcactaggcttcactcctccacagtctgtaaagatacataaactctaaagactgtggaggagtgaagccatgtgtatggagtttatgtatctttacaggaataagcagcatctttaaaggtcacgcatcttatgtggtagcacattcgggcaatcccagcactaggaaaagagagagggggaggtcaggagtttcaaaggtctcagtctatacaacacgaccaaacctcaaggggaaagttacccatccttaaaggaacagagctttttctagcacaacactgtcacacggaagtgaaggcttcacacccagctgtggagtaaattcagatgagccacaaacggaggactcagaggactggggggtggggtggaggggtgggggtggggcttcagcagacatcgccttcaggggtttcctcagctgcaggatattctgcatttttcagggggatctatgcctgagatggacaagtatggtcacgttgcctaacctggatcaactgtggaaggccagtccaactccaggttagagcctgtttcctaggaaacccagctgtgatgaaaactcagaatcaaggacccctatggtcccaaaactctttaagagattatttgtgctgggggtggtagtcccag

SEQ ID NO: 701771 - DNA, 173 bp, Homo sapiens
atgctgcccacccagcatgcatccagctgtctgctgcttcccagtgccgcgtgcatgcctgtctctccatcccagcccagcatcatgcacattggttgcatgcctgcacacactgtgtggcatccgtcgtcagcagtctgcagcttgccagtgccatgcgactgcgttgtgcc

SEQ ID NO: 701772 - DNA, 672 bp, Homo sapiens
gcatccactcatcgcgggagaaattataatgtccctccctcttccctccccaatattgtatagaccccttttatctgttcacaccccaagaatttggtacaaccacagagtgtgcaccccctaaaaatatactttctcccgcgcataagatatggttacaccccccttaaacaccatgtattcattaggacatacgtactttactcaaacacactcggtgcctcccccacaacataagtggttataagataaactcctctgagtgtccataacccacgcccccaatgttgcggcgccccccccccccctcccccccagcaaaactctggtggatatacataaacgccttaagtagttaacattctgtgaaagaaaacaatagtctttttcgccaagaataacgtctctatgcaatatcacaactcgtgtattatgaaaattctacaaggtgcccccataaattttggatttatgtttaccctaccttacccgcgaagtattgacatctttttgctacgaaagaacaacttggggtgcccgcatgatgagggcgatgcaagataatacacgtttgctacaactatgtggagctcgttgataactcgagtatgaacaattaaaaaaaacggtgtataatcaggcagctgccggccccacaatagacaaagaaac

SEQ ID NO: 701773 - DNA, 89 bp, Homo sapiens
aaggaagatagagccaggtcagttgggaccgtccgtggggccagtccaccccatccaggtgtgtcatcaggcaaaaggaagttgtttag

SEQ ID NO: 701774 - DNA, 334 bp, Homo sapiens
  misc_feature (33)..(33): n is a, c, g, or t
aggccttggggttggcaggggcccaactggggntgggccctgggtttttagaaactcgctggcccccccgtggggccctgggcccggccgggcagctggtgggctgttgggggttctggctggggccagggggttcccggttttggtcccgggcagcagggtggggtgttgtgtttattgctgggggggggggggcggccccccttgggcagagcccggggttttgggggccctgggtgggtttcccgctgaggggggggtggggggggggccggggttgggacgatggtcggttcccttattggggccctttaacctggtcctcccccgggga

SEQ ID NO: 701775 - DNA, 970 bp, Homo sapiens
  misc_feature (800)..(800): n is a, c, g, or t
  misc_feature (822)..(824): n is a, c, g, or t
  misc_feature (839)..(840): n is a, c, g, or t
  misc_feature (851)..(851): n is a, c, g, or t
  misc_feature (856)..(856): n is a, c, g, or t
  misc_feature (943)..(943): n is a, c, g, or t
  misc_feature (970)..(970): n is a, c, g, or t
attaccgccatcaatcttaacgcaagaaagatgctggggctgagttcccccggacggcaatgttgggtaaacccattgttgaagtggtcagcccgccgattttttaccgaacagattgatgaaaaacgtcaggatgtggtggcgaactttaacggtctgagcgttagtggatcccccgggctgctattcgttcaggtgatgatttgctgggggccattatcagctttcgtagtaaagacgaaatttccaccctcaatgcgcaactgacgcaaataaaacaatacgttgagagccttcgtacattgcgacacgagcatctcaattggatgtcgacgctcaatggtctgttgcagatgaaagagtatgatcgcgtgctggcgatggtgcagggggagtctcaggcccagcaacagcttattgacagcctgcgcgaggcgtttgccgatcgccaggtggcggggctgctttttggtaaagtgcagcgcgcccgggaactggggctaaaaatgatcattgtccccggtagccagctttcgcaactgccgccaggactggatagcaccgagtttgcagccattgtgggcaatttacttgataacgccttcgaagccagcctgcgtagcgatgaaggaaacaagatcgttgaattattcctcagcgatgaaggcgatgatgtggtgattgaagtcgccgatcagggctgcggcgttccagagtctctacgagacattgggttgtacttgattgccagctacgtaacgcgctgcggtggtgtattactctcgaagatatgatcctgngtacctatttcatctatttccnnngtgaaacctatgcanntcattaacctnttgangtgaagaccaaacgccgctggcagagatgcatgcgggcgcaaggcccgaatgatatacgagcgttttaaggccgggttaacttggtngataatcattttctggcggtgaagaan

SEQ ID NO: 701776 - DNA, 1028 bp, Homo sapiens
  misc_feature (730)..(730): n is a, c, g, or t
  misc_feature (785)..(785): n is a, c, g, or t
  misc_feature (858)..(858): n is a, c, g, or t
  misc_feature (880)..(882): n is a, c, g, or t
  misc_feature (897)..(898): n is a, c, g, or t
  misc_feature (909)..(909): n is a, c, g, or t
  misc_feature (914)..(914): n is a, c, g, or t
  misc_feature (1001)..(1001): n is a, c, g, or t
  misc_feature (1028)..(1028): n is a, c, g, or t
attaccgccatcaatcttaacgcaagaaagatgctggggctgagttcccccggacggcaatgttgggtaaacccattgttgaagtggtcagcccgccgattttttaccgaacagattgatgaaaaacgtcaggatgtggtggcgaactttaacggtctgagcgttagtggatcccccgggctgctattcgttcaggtgatgatttgctgggggccattatcagctttcgtagtaaagacgaaatttccaccctcaatgcgcaactgacgcaaataaaacaatacgttgagagccttcgtacattgcgacacgagcatctcaattggatgtcgacgctcaatggtctgttgcagatgaaagagtatgatcgcgtgctggcgatggtgcagggggagtctcaggcccagcaacagcttattgacagcctgcgcgaggcgtttgccgatcgccaggtggcggggctgctttttggtaaagtgcagcgcgcccgggaactggggctaaaaatgatcattgtccccggtagccagctttcgcaactgccgccaggactggatagcaccgagtttgcagccattgtgggcaatttacttgataacgccttcgaagccagcctgcgtagcgatgaaggaaacaagatcgttgaattattcctcagcgatgaaggcgatgatgtggtgattgaagtcgccgatcagggctgcggcgttccagagtctctacgagacanaatatttgagcagggggtcagtacgcgtgctgacgagcccggtgaacatggcatngcttgggttgtacttgattgccagctacgtaacgcgctgcggtggtgtattactctcgaagatatgatcctgngtacctatttcatctatttccnnngtgaaacctatgcanntcattaacctnttgangtgaagaccaaacgccgctggcagagatgcatgcgggcgcaaggcccgaatgatatacgagcgttttaaggccgggttaacttggtngataatcattttctggcggtgaagaan

SEQ ID NO: 701777 - DNA, 228 bp, Homo sapiens
tcgagctcggccctactagagagagacgagatgtatcaagaaaagagacgagatgaaattgatggccccctaagatatgaagagacacctggctaagtgttaggagaagatggttaagtctacggaggctccagggtgggagttgttccctgtgctaagggagggttgactggtccacctggttcctgctccgcgcctccaactatatgcagatgccgagccaggagt

SEQ ID NO: 701778 - DNA, 327 bp, Homo sapiens
  misc_feature (8)..(8): n is a, c, g, or t
  misc_feature (81)..(81): n is a, c, g, or t
aattgggncccccttgaaaaaatgggccttttatggcccaaattgccaattggcacgcccagtaatccccagcactttgancggctgaggtgggaggattgcttgagccccaggagttcaagaccagccctggacaacagagtgaggccccatttctacaaaaaattagccacatgtggtgcatttgcctgtagtcccagctgcatgggagagtgaggtgagagggtcgcttgaacccagagggtagagactgcagtgagcccgtgtttgcaccccttgcactccagcctgtgtgacagaagtgagactgtgtctcttaaaaaaaaa

SEQ ID NO: 701779 - DNA, 619 bp, Homo sapiens
  misc_feature (18)..(18): n is a, c, g, or t
  misc_feature (412)..(412): n is a, c, g, or t
  misc_feature (516)..(516): n is a, c, g, or t
  misc_feature (572)..(572): n is a, c, g, or t
  misc_feature (584)..(584): n is a, c, g, or t
  misc_feature (595)..(595): n is a, c, g, or t
  misc_feature (610)..(610): n is a, c, g, or t
ctctagcaggatcccccnacatttgcaggatgatgggtacctggatttaaacaggttctatgagatgaggagtgaagaggaaaaggatgctggcttaggaaaggtgaaatatgattagctcctgtttctgacccaataagtgcaggatctctgtaaactgtaaaatgctcatttttatcaatgataagaggactctttgtagtttctaatgtactgcttcgagtaggaattggatgaaaactgcatcttgatagctcatgttctatcttatttgccaatcttctttcaccagtagcttggctgttcacataagtggccttagactttacagaatcaggagaatgagttattttgggtttaacaacttcaggtgatgggctggattttatcttgtgagtatctactgaagtantaagtttagattttatagtctctggaggtggacttcgcttatgcagcttatcttccatgacagaaactgcacttaaaggagaaatgtaagagacatacttctcnttttccatgttcaagtgatcatttcctgaagaagcatttgtaacacttgattgggntagatccacttnactacatcacngacccagctctgtcngatcttttt

SEQ ID NO: 701780 - DNA, 1712 bp, Homo sapiens
  misc_feature (463)..(463): n is a, c, g, or t
  misc_feature (1293)..(1293): n is a, c, g, or t
  misc_feature (1388)..(1388): n is a, c, g, or t
tggccttttggtgttatttttttaaaacaaaacttttgtgtggccgctatgtgtccagggcccggtcccccaggggcgtgtgggcgcggggcaggggcgccaagctgggtgtgggagaagacgcagatgggctggtcctggcggagaagccatacagtctggggccagtctgggacaagtgtggcgcaggagatatgcggaagacacgctgagacctctggtgtggcgccaggagcaaggggcgccaagaccccccccacaacccccacagtgtggccaaagcctgggtgtgggagacaacgccagatgcgctgagaacactgtccaggtctggagagctactccctctatagcagatgtgagctgagatcgcccggggagagaacctcagaaccgcctatgagatctgagagcgcgtctgagattgtgtgagatatacccaaaaggcgctctatactacccntcttatgagccgcgtagattaggcccccactctcactacctacatagacacgctcatccagcgtagaacacctctcgcgtgttatagagccaacgctacgtgtgttcacacatctctcatcagagcacaggatacttccgggacaaaggagaggaagcccccatatgtgagaaggggccacccacccaataaaaacccctctcacaaacgagaggggggcccactatcatcccgtgagagatacaccactgcgggcgatagtgagctagtgacaaaaaacgcgtcgcagaagaccccaagctggtggcacgacatctccatctctctgtagcacaccctgttgtcccccagactatgcacgatgtgtgtctgaaaacccaaccacaacgaatagttgttcgcgccccaataagcggtcgtttttgcgctcggcggacccccccaagaggcatagtggccccctgtgggggtgaaaacacccgctgttgtgaggggggagtaacccaatcacagagcgacaccgatgacccaccaccaccgcctcacgttgtattgcactggattcacacacacccaatccaacaagaaggacagcgggccgtccggacacggctggtagaaacacccccagcgtcaagaagactcaccaatctcacccaagttgacacaggaagggcaccgcaactgtcggaaagcaggcggccctataaacagtcacataacgcacactatgtggggccccactatgatgcaccgaagtgtgacactcccctgtggcaccaagtttactcccccccccttataaagacggtgggatgtcacttacaaanaatatcaactggtggcgtatacgcaccgagtagttacataaatcttccaaacggcctaccactcataaatgagcgtgcatatacacaaggtgttngtaacacaaaaacatcgggactcctggacgaactcacagagaagacagacaactgagctgcctcgatacatcacacgcggcagtgcaatcatcacccaccttcgttattatccccccccctagttcaaccacctaagcatatgtaattacgcccgcttgaggatcaactgtgtgttccatagccacaaacatcatgttgtgaggctccctctactcgctaacacagacagatcaaatgcagcagagcactaacgtgtactttactacacaacatgttgttgtagtggagcacatcactcgttgtgtgtcaacaacacaacacgt

SEQ ID NO: 701781 - DNA, 351 bp, Homo sapiens
  misc_feature (18)..(18): n is a, c, g, or t
ctctagcaggatcccccnacatttgcaggatgatgggtacctggatttaaacaggttctatgagatgaggagtgaagaggaaaaggatgctggcttaggaaaggtgaaatatgattagctcctgtttctgacccaataagtgcaggatctctgtaaactgtaaaatgctcatttttatcaatgataagaggactctttgtagtttctaatgtactgcttcgagtaggaattggatgaaaactgcatcttgatagctcatgttctatcttatttgccaatcttctttcaccagtagcttggctgttcacatgtactggcccgcacatccgtactggcccggggtaccgagct

SEQ ID NO: 701782 - DNA, 1444 bp, Homo sapiens
  misc_feature (631)..(631): n is a, c, g, or t
gacaagtcggtctttggcttctggcaaacttagccatgcattgaaggaagcacagctaggatatcaacatccagacgatggagcgcatggtcccgtccacagacgactagagtgacagcattctggacgttgatgcttaatagccgtggtctgtgagtaacaagggtaaggtttgacttgtttggaagatcccagattcagttgcatgtaaacagatggcacatggctatgtataatgctgtatgatggggccgggcgcggtggctcatgcctgtaatcgctagcacttagggatggcctgaggcaggcggatcagtctgatggtcaggagttcgtagaccaggccttgggctaagcatggtgaaagcccgtcgtctactataaaatacaaaaacttagctgggtgtggtagtagcgtgcctgtaatcctaggctacttaggaggctgaggcaggagaatcgcttgaacctgggtggcggaggttgcaatgagccgagatcgagccactgaactccagacctgggatgcaatgaaactgggagtgaaactccgtctcacagacaaataaaatgctgtatgaacaagatgagcattctgtcaggtgtcgggacacctgggcaaagacgaatncatgctgtctgtgaaaaggaagtttgcactgtaacatatgccatagcttggcccttgctttgtatgcaaccttagctgatggggaaaattccaaacataagtggcacaggcacaacacgcaggcagaggaggcaggggtctgtgctgtgcaagctcactggtttcttatgactatcattttcattgcaatgcatttgtctgacatcgggacaaaaggaacattttctaaatcagcttgatactcttccatacaaaaacacgctgaatcttcatcttctgcctcacattaattcatgtggcatgccaaaagttagactgaacttttctacatcttcaccttgcatcgatacaggcaaagtcttctctttaagatcttgctaagctataagggggatagtggctcacgcggaagacgcagaaccgggcgctgctctcgcgatcggcaactctcgacacatgccgcactcccactttctattgtcttacggcatacttccgagccttctagcaaggtccctggttgcatgtatctcctaagagcagagttcatatctctttacattccctgcttccttgctcctccatgcagggaccccagacaacctctgggctgttgaatagctctctgactgggtggcaaagcccttctcacataggcacccgtgttgcttaaagcaatacacgatgggtgcaccaaggtggaccacaagaaacgatgtacttgtcacaagcccaattctagcttcaaacctgtacctcatcaagctaaaggagcattccaggtattctgagggccctataccccctgggaga

SEQ ID NO: 701783 - DNA, 210 bp, Homo sapiens
ggggtgctggcggagaggatccaggatgcagcaagtcagtgctcaggacagcctttaaggcagagtcacggcacaggaagctcgccgcggcagttccagttccgggcggcggtcgcgacaccgggagctccggcctctcgagctccgtattcaagtcctggctccaccgcgcacctgccccgtgaccatggagacgacacgaacacaggg

SEQ ID NO: 701784 - DNA, 315 bp, Homo sapiens
  misc_feature (17)..(17): n is a, c, g, or t
ccctgccccgcgctganaggggggcctggccgcgcagccggatttttgacaacttaattgaccattgttaattttttaggaggcaaataattgaatttatttgaccctgtttttggagttaggttgattgacccttcgggaaaattgaatcccaataaatattctctctatatgaggaaggctggattatactcccattttggagtgaccagccccgagattttgttaccaagaatttttacaggatggaacagattcccattgattgggactgtgtgcgaatggatgcccaatgctttttggggtagagaaccc

SEQ ID NO: 701785 - DNA, 260 bp, Homo sapiens
ggatcccaatgcagcgactcggcagctgtttatgctcttcttataaaatctaatgatgtttgtctggagctctgtcatgtcgatggttcattgatatctcactgttctgttggcgggcagtcttgcaggttagaaagtacttgctagattagagggttcagaaactcagtcccttcaaaatgcttcagatcctaaagcttacaaattgtcctcagccttggtgaagaggatcttatcctggggattccgcggcattgggt

SEQ ID NO: 701786 - DNA, 288 bp, Homo sapiens
catatggcacggccaagaactgaactcaacatgtaccagatggatctaatagacctttacagaactttctacccaaaaacaacaaaatacacattcttttcattgccacatggcacatactctaaaattaaacacataattagacataaaagaatactcagcaagtgcaaaatagccaacatcctaccaaacacactgtcagactatatcacaataaaaatagaggtcaaaactaagaaaagagcccaaaaccatacaattacctggcttggccttgccatagtgcaa

SEQ ID NO: 701787 - DNA, 109 bp, Homo sapiens
tcattagcaccaaccaaagacataacagccaatagtattagtgaatcagagaaaggaaaagatcacatgactcagattatgacagcaatccgtgtgtgtgtgtgtgtgt

SEQ ID NO: 701788 - DNA, 556 bp, Homo sapiens
cttccagcactgtcccggtgagcgctctggctcggcttatgaactccccggaatacccggccacgtgggagattggcttcggggcgtctaccgctttgcccctgatagggatgacttccccgagggacttgatactaaatttgggactcttttctcgggagtttggctggcccggagacttgagtgaccttgacctcatggcacctcagcccggggtgtagcccagtagaccaatgggatcctgtgctggacccggatcttcccaagaaccgcctaccatctgtgaccccccccagatgtgccctgatggccgctgaagtttgattcagatgggcacttttcttccccttccctgcctagtttcctctttgttccttgagtccccgcccggattcccttctctggtcagcagacaggcttaagctaaagatattgcctctattctgtaaagattctgtacatagttccccagcttctcacgggggtgatttttgctcttgtcctgagaaataaccgtgctgttttaaaaaacctttgaaattaataccgcacccca

SEQ ID NO: 701789 - DNA, 307 bp, Homo sapiens
  misc_feature (64)..(64): n is a, c, g, or t
  misc_feature (159)..(159): n is a, c, g, or t
  misc_feature (296)..(296): n is a, c, g, or t
ctgtctcaaaaaaaaaaaaaaaattaggcaggcatccgtggttcacacctgtagtccccaattnctcaggaggctgaggtggagggattgcctgagccccagggttcaagactggcctgtgcaatatagcaagaccccatccctaaaaaataaaaaacncctatcagggtgggtgcatgccagtagcctcagctactcaggaggctgaagagagaggatcacttgagtccagcaggttgggacagcagtgagctatgattgtgtctctgtacttcagcctgagtgacagagcaagnccaatgactca

SEQ ID NO: 701790 - DNA, 956 bp, Homo sapiens
ggtccttgctcagtgaaatatcctcgctagtgaactcagatacgtactctcctctcctctcttcttgttgtacttggagcggcactaagccagacaggttccaggcatcgaaccgaatagtggtggtgagcgtcgagccccccagaaacgtgcttgtgtgctatccaccgtctgcctagtatttcggacatcgagggttcatcgagccaatagcgtgaagatagagatagtgcaggaagcgaaccaccgttagggtgcgcacaaagtccctaatgtggctgcgagggaattggaaaattctaagagggttgtccccgtaaaagattctgagaaaagaaggattcccgaatccctgaacgcaggcaggatagccaaagtggcttcgggagacaagccaggagaatagcatgtccttgggtaatctgatcactacatgttgctgaaaaaggaataagaacttactcattgcatctttgaagtaatcgtgcgtcctttgtgtaccctgatattcttagactgttactggacctacagtgtgttgtcccacatttgctttcgttgacaggcggttgaaattaaaaaatttcaggttatgcttggtggatgtcaacactagtgtgaaattgtgcgaatggtacgactaatttatggtacataagctaatcattcagataggtgcatgtgggtccgttaccagataaggggcaactctgtaaaagtcagatctgctggtgtctatcacaggtttcggattggaggattcctgcaatgtgtaccgggcccattaatgggctggaatggaaggcggccatgtacccccaactttaaaacacgattttgtaaaacagggttaaaccaaaaaatgtcccccgcgctcacattgcccaggcaaattagataaggtcaaaccccacatattcctatcaccctattgtcaaccttccccaacaccccaa

SEQ ID NO: 701791 - DNA, 194 bp, Homo sapiens
  misc_feature (17)..(17): n is a, c, g, or t
tcgagctcggtaccganttacgctcctagacggggtttcaccatgttggcagagatctcgacctcctgacctcaggtaatctgcctgccttggacgcccaaagttctgggattacaggcatgagccaccatgcccggcacagaaatttatagctgtaaatgaatatattataaacggaaataaaacttcacaat

SEQ ID NO: 701792 - DNA, 300 bp, Homo sapiens
gaccttgacaaagtggagcagcatgtggtgcacggaagaggaacggacactgttgagtacacaggaagggatccatccgcgctttccctcctcaacatcccctcattgctgttgattaccaactcactggacagccagtgctcattggtggcaccatggaacacctgtagttatgttcttacgtggcactgaacagggcatgattgagcaccttaggaacaacctgtcatgtagcgggccgtgcattgtcccgagcaaaatctcgcagtaattgatatttccaggatgtcttagacaaat

SEQ ID NO: 701793 - DNA, 2081 bp, Homo sapiens
  misc_feature (716)..(716): n is a, c, g, or t
  misc_feature (724)..(724): n is a, c, g, or t
  misc_feature (745)..(745): n is a, c, g, or t
tgcgatatgggcctcaggttgcgagagtggacttgcaatggaaagttctggtgggagccccgccgaacggagggtttgaacgacccgcccgaacaaccgggtttttctggagagtttctaaaattcggcgtttaaccccgctcaggagtttagctggggaattgttctttctgaaggtgagtgaacacaccccatcttgggctgttaaatacctcagggaaatctcgatttcatagtgattaaataattggggtaaaattgtagcttataagccatactacttggaggattcttctactaaattgtatttaaagtggcaagttgtatagttttcacttgaagttaatcataaataatgggaatggtgctcccacgaaggtttatttttcacattttttgcttatacatctctgagttcctataatacacgtgctataagctatgcacccggaatataaatgtttggaatcccaggataatggtttttatctgctaagagggagttatagttattatctaatgagttttgattgggttgcactttttgttgccaatgtttattccaccttgcccgttatgaaatatgaatatgttttaatcaactagtgtggcttaaataacccaacacatttgtgtataaaaaaaaaagcccacgatttcattgtttgttgaatatttcttaagcatctggcccctaaagagaccgcttcttaccnagcctgtnaactatgcatgatggaaattnttgtattttatttaggaatggctgttggtttactcaccacatctgtggaatcatggctataaatgtttgcttacaaactctttgtgacttgtaatttaacttaatctcatctaatgtaaatattagattatgatgttcagtaacatcttccataggtataaactgctgtcattattgatttcagagtaactctgagtaatcaaataggtaaaagcatgttttgagtaaaatagctagatttatactttacttgtatacagacttaacaacaaccggtattgactggattgacagctaaagtatcagaatgaaagcaaggtttttttgatgttacctgactgtcataaagatgaaaatgatttgtattggtatgaaatgcttatctttattctacttcgtaagggtaagttttatttatactctttggactcccatgaacttttgcacactgctttgtgtttttggtttaccctaaactaccatcctttttatctttgctttttttcttcctattcagaaaagagcaaaatgtgaaaagacacaagactctcaggtatagaatgaactgagcaatttggagaatgtattggactttgtcctctcttattcccccctcctagccctgcaagttgctaggtacttgtgaggcagtgtactggagaggggagagcatggatcctggggtcaaagggcctttgcccccacccttacttggccctctacctgcaggtgaccactggcacattctcctgcttgtctcagcttcaggttcttcacctctaagatggggatgatgaaaacagtacctgtcatgcagaattgttgggaggattgataatttagatgtttatacatgtaatgtacttagatcagtgtctgctcttttcacttgatatccagtactatgtaagatagaaggtgcatgtcttctgtattctgtatttcccatttcttttgcgtgcagtctttgattcgtacaatagaaggaacacgtagaatgtatatttgtacattcatgtcaacatagtatttgaaattgctaccaaactcatttaatttggcataagactaacagatgaagtctctcatttgcttgaagatattttacaaaataccaactgttctatatttctttagaaaaagattatagttattaatattgatacctctgataatattttattcttaaatcttcagtgattccttttactatagattcatgacagctaattagtactaactgatttagaggtttcctttcccatcatatggaatgatgtaaagaaatcagatacaaactactgcaattagaaaataaaatatgaacaactttcaa

SEQ ID NO: 701794 - DNA, 2027 bp, Homo sapiens
  misc_feature (716)..(716): n is a, c, g, or t
  misc_feature (724)..(724): n is a, c, g, or t
  misc_feature (745)..(745): n is a, c, g, or t
tgcgatatgggcctcaggttgcgagagtggacttgcaatggaaagttctggtgggagccccgccgaacggagggtttgaacgacccgcccgaacaaccgggtttttctggagagtttctaaaattcggcgtttaaccccgctcaggagtttagctggggaattgttctttctgaaggtgagtgaacacaccccatcttgggctgttaaatacctcagggaaatctcgatttcatagtgattaaataattggggtaaaattgtagcttataagccatactacttggaggattcttctactaaattgtatttaaagtggcaagttgtatagttttcacttgaagttaatcataaataatgggaatggtgctcccacgaaggtttatttttcacattttttgcttatacatctctgagttcctataatacacgtgctataagctatgcacccggaatataaatgtttggaatcccaggataatggtttttatctgctaagagggagttatagttattatctaatgagttttgattgggttgcactttttgttgccaatgtttattccaccttgcccgttatgaaatatgaatatgttttaatcaactagtgtggcttaaataacccaacacatttgtgtataaaaaaaaaagcccacgatttcattgtttgttgaatatttcttaagcatctggcccctaaagagaccgcttcttaccnagcctgtnaactatgcatgatggaaattnttgtattttatttaggaatggctgttggtttactcaccacatctgtggaatcatggctataaatgtttgcttacaaactctttgtgacttgtaatttaacttaatctcatctaatgtaaatattagattatgatgttcagtaacatcttccataggtataaactgctgtcattattgatttcagagtaactctgagtaatcaaataggtaaaagcatgttttgagtaaaatagctagatttatactttacttgtatacagacttaacaacaaccggtattgactggattgacagctaaagtatcagaatgaaagcaaggtttttttgatgttacctgactgtcataaagatgaaaatgatttgtattggtatgaaatgcttatctttattctacttcgtaagggtaagttttatttatactctttggactcccatgaacttttgcacactgctttgtgtttttggtttaccctaaactaccatcctttttatctttgctttttttcttcctattcagaaaagagcaaaatgtgtggactttgtcctctcttattcccccctcctagccctgcaagttgctaggtacttgtgaggcagtgtactggagaggggagagcatggatcctggggtcaaagggcctttgcccccacccttacttggccctctacctgcaggtgaccactggcacattctcctgcttgtctcagcttcaggttcttcacctctaagatggggatgatgaaaacagtacctgtcatgcagaattgttgggaggattgataatttagatgtttatacatgtaatgtacttagatcagtgtctgctcttttcacttgatatccagtactatgtaagatagaaggtgcatgtcttctgtattctgtatttcccatttcttttgcgtgcagtctttgattcgtacaatagaaggaacacgtagaatgtatatttgtacattcatgtcaacatagtatttgaaattgctaccaaactcatttaatttggcataagactaacagatgaagtctctcatttgcttgaagatattttacaaaataccaactgttctatatttctttagaaaaagattatagttattaatattgatacctctgataatattttattcttaaatcttcagtgattccttttactatagattcatgacagctaattagtactaactgatttagaggtttcctttcccatcatatggaatgatgtaaagaaatcagatacaaactactgcaattagaaaataaaatatgaacaactttcaa

SEQ ID NO: 701795 - DNA, 755 bp, Homo sapiens
  misc_feature (331)..(332): n is a, c, g, or t
  misc_feature (342)..(342): n is a, c, g, or t
  misc_feature (344)..(344): n is a, c, g, or t
  misc_feature (346)..(346): n is a, c, g, or t
  misc_feature (350)..(350): n is a, c, g, or t
  misc_feature (373)..(373): n is a, c, g, or t
  misc_feature (434)..(434): n is a, c, g, or t
  misc_feature (464)..(464): n is a, c, g, or t
  misc_feature (481)..(481): n is a, c, g, or t
  misc_feature (512)..(512): n is a, c, g, or t
  misc_feature (568)..(568): n is a, c, g, or t
  misc_feature (573)..(573): n is a, c, g, or t
  misc_feature (593)..(593): n is a, c, g, or t
  misc_feature (612)..(612): n is a, c, g, or t
ggggacttcttttggttttctttctctttggggcacctctggactcactccccagcatgaaggcgctgagcccggtgcgcggctgctacgaggcggtgtgctgcctgtcggaacgcagtctggccatcgcccggggccgagggaagggcccggcagctgaggagccgctgagcttgctggacgacatgaaccactgctactcccgcctgcgggaactggtacccggagtcccgagaggcactcagcttagccaggtggaaatcctacagcgcgtcatcgactacattctcgacctgcaggtagtcctggccgagccagcccctggaccccnntgatggcccncnancttnccatccagacatgccgagctcgnctccgggaacttgtcatctccaacgaacaaaaggagcttttgccactgactcggccgtgtnctgacacgctccagaacgcaggtgctgggngcccgttctgcctgggnaccccgggaacctctcctgccggaagccggnacggcagggatgggccccaacttcgccctgcccacttgacttcaccaaatcccttncctgngagactaaacctggtgctcnaggagcgaaggactgtgancttgtggctgtaagagccagagctagtctctggccaccagctgggaagtcacctggtccacccacccccagtctaaggttcttcaagcgtggaggtttgagatggtgcctccactttcaagggggaaaggctctgatcctgaa

SEQ ID NO: 701796 - DNA, 2366 bp, Homo sapiens
  misc_feature (716)..(716): n is a, c, g, or t
  misc_feature (724)..(724): n is a, c, g, or t
  misc_feature (745)..(745): n is a, c, g, or t
tgcgatatgggcctcaggttgcgagagtggacttgcaatggaaagttctggtgggagccccgccgaacggagggtttgaacgacccgcccgaacaaccgggtttttctggagagtttctaaaattcggcgtttaaccccgctcaggagtttagctggggaattgttctttctgaaggtgagtgaacacaccccatcttgggctgttaaatacctcagggaaatctcgatttcatagtgattaaataattggggtaaaattgtagcttataagccatactacttggaggattcttctactaaattgtatttaaagtggcaagttgtatagttttcacttgaagttaatcataaataatgggaatggtgctcccacgaaggtttatttttcacattttttgcttatacatctctgagttcctataatacacgtgctataagctatgcacccggaatataaatgtttggaatcccaggataatggtttttatctgctaagagggagttatagttattatctaatgagttttgattgggttgcactttttgttgccaatgtttattccaccttgcccgttatgaaatatgaatatgttttaatcaactagtgtggcttaaataacccaacacatttgtgtataaaaaaaaaagcccacgatttcattgtttgttgaatatttcttaagcatctggcccctaaagagaccgcttcttaccnagcctgtnaactatgcatgatggaaattnttgtattttatttaggaatggctgttggtttactcaccacatctgtggaatcatggctataaatgtttgcttacaaactctttgtgacttgtaatttaacttaatctcatctaatgtaaatattagattatgatgttcagtaacatcttccataggtataaactgctgtcattattgatttcagagtaactctgagtaatcaaataggtaaaagcatgttttgagtaaaatagctagatttatactttacttgtatacagacttaacaacaaccggtattgactggattgacagctaaagtatcagaatgaaagcaaggtttttttgatgttacctgactgtcataaagatgaaaatgatttgtattggtatgaaatgcttatctttattctacttcgtaagggtaagttttatttatactctttggactcccatgaacttttgcacactgctttgtgtttttggtttaccctaaactaccatcctttttatctttgctttttttcttcctattcagaaaagagcaaaatgtgaaaagacacaagactctcaggtatagaatgaactgagcaatttggagaatgtattggactttgtcctctcttattcccccctcctagccctgcaagttgctaggtacttgtgaggcagtgtactggagaggggagagcatggatcctggggtcaaagggcctttgcccccacccttacttggccctctacctgcaggtgaccactggcacattctcctgcttgtctcagcttcaggttcttcacctctaagatggggatgatgaaaacagtacctgtcatgcagaattgttgggaggattgataatttagatgtttatacatgtaatgtacttagatcagtgtctgctcttttcacttgatatccagtactatgtaagatagaaggtgcatgtcttctgtattctgtatttcccatttcttttgcgtgcagtctttgattcgtacaatagaaggaacacgtagaatgtatatttgtacattcatgtcaacatagtatttgaaattgctaccaaactcatttaatttggcataagactaacagatgaagtctctcatttgcttgaagatattttacaaaataccaactgttctatatttctttagaaaaagattatagttattaatattgatacctctgataatattttattcttaaatcttcagtgattccttttactatagattcatgacagctaattagtactaactgatttagaggtttcctttcccatcatatggaatgatgtaaagaaatcagatacaaactactgcaattagaaaataaaatatgaacaactttcaaaaaaaaaaaagaggataaaaaaatttgtttgggggggctggggccctggaaaaacttttttaaccccatttgtgtggggggcgcgggggcccccataggtacgcggaacactggggcaaagagcggtccccaagagaaaacacggggacagaacatgagcgcgcgggatctcccacccatataaaaaaccgcggggggaaccgaacggtttcggaacaccatcccaaagggatcacgagagaccaaacgggggtctatcacaggggtctcacaggacgcgaatga

SEQ ID NO: 701797 - DNA, 683 bp, Homo sapiens
  misc_feature (478)..(478): n is a, c, g, or t
  misc_feature (539)..(539): n is a, c, g, or t
ggggacttcttttggttttctttctctttggggcacctctggactcactccccagcatgaaggcgctgagcccggtgcgcggctgctacgaggcggtgtgctgcctgtcggaacgcagtctggccatcgcccggggccgagggaagggcccggcagctgaggagccgctgagcttgctggacgacatgaaccactgctactcccgcctgcgggaactggtacccggagtcccgagaggcactcagcttagccaggtggaaatcctacagcgcgtcatcgactacattctcgacctgcaggtagtcctggccgagccagcccctggacccctgatggccccacagcttccatcaggtaagcctcgaagtcggggcagaggttgaacaccaggcaaggatgctgcgggacctcggagctcccgattgcctcgcgtaactcttcccgtacttttcctctaattcagacatgccgagctcgnctccgggaacttgtcatctccaacgaacaaaaggagcttttgccactgactcggccgtgtnctgacacgctccaggtgagtatctacctctacttggtagacgcgagggttaaaccgggcaagtccctggagtttggcagaccgtttttgaaacatttggcacctcactcggtatacgggaactgactgccagagatgggccaag

SEQ ID NO: 701798 - DNA, 789 bp, Homo sapiens
  misc_feature (407)..(407): n is a, c, g, or t
  misc_feature (468)..(468): n is a, c, g, or t
  misc_feature (498)..(498): n is a, c, g, or t
  misc_feature (515)..(515): n is a, c, g, or t
  misc_feature (546)..(546): n is a, c, g, or t
  misc_feature (602)..(602): n is a, c, g, or t
  misc_feature (607)..(607): n is a, c, g, or t
  misc_feature (627)..(627): n is a, c, g, or t
  misc_feature (646)..(646): n is a, c, g, or t
ggggacttcttttggttttctttctctttggggcacctctggactcactccccagcatgaaggcgctgagcccggtgcgcggctgctacgaggcggtgtgctgcctgtcggaacgcagtctggccatcgcccggggccgagggaagggcccggcagctgaggagccgctgagcttgctggacgacatgaaccactgctactcccgcctgcgggaactggtacccggagtcccgagaggcactcagcttagccaggtggaaatcctacagcgcgtcatcgactacattctcgacctgcaggtagtcctggccgagccagcccctggaaccacccccctttttgaaattggggccccccccaaacccttttttttccccccccccatttccaagacatgccgagctcgnctccgggaacttgtcatctccaacgaacaaaaggagcttttgccactgactcggccgtgtnctgacacgctccagaacgcaggtgctgggngcccgttctgcctgggnaccccgggaacctctcctgccggaagccggnacggcagggatgggccccaacttcgccctgcccacttgacttcaccaaatcccttncctgngagactaaacctggtgctcnaggagcgaaggactgtgancttgtggctgtaagagccagagctagtctctggccaccagctgggaagtcacctggtccacccacccccagtctaaggttcttcaagcgtggaggtttgagatggtgcctccactttcaagggggaaaggctctgatcctgaa

SEQ ID NO: 701799 - DNA, 207 bp, Homo sapiens
ttttttttccaggggggttttttttcccatccaactcccttttgtttcccggccctttgccatcctgaaccaagccttggttttaccccggcggggcaagttttttgaaacttttcttgctgtttggggggggccccccaatggggtccccctgggtaagggggcctttcccaatgcctttgggtgttaatgattttggatttggga

SEQ ID NO: 701800 - DNA, 286 bp, Homo sapiens
gggtgatctagcggatccttcttatttccggtgccttaacatggaaagggaagatcatatctgctaccacaaaaacacacttaagctcatagcccacagacaatataaagcaattacacaatcaagtctgcaaagcaattcagctggtaacataaaaacaggatcaaaatctcacatatcactactaaccctgaatgtaaatggtctaaatgacccacttaaaaggcagctggataaaaagaaaagtcccaactgtctgctatcttcaagagacccatctcaccta

SEQ ID NO: 701801 - DNA, 218 bp, Homo sapiens
aacactcggcgaagtgccacggtatcgctctgatgccctgtctggagggcagagatgtggtcacagatcactacagactcaacctcctcggttcaggtgatcctcccacctcagcctcccaagtagctaggaccacaggcacacgccaccacatccagctagtttttgtatttttagtagaaatggggtttcatcatgttgcccaggctggtctcaaa

SEQ ID NO: 701802 - DNA, 216 bp, Homo sapiens
tgagcccgaggaggtgctcctactacaagagtgggatggggcatgctggagtagttgggggcagctgggaacactaccgttaataggcgtaggtagagacgaagagggactcgctggcagcagccccagcctgaccgctcggagtgtacttatccttgacaggcaatgcatgttggccaagtggctctgcttgacatactccatcctgctgcatgc

SEQ ID NO: 701803 - DNA, 678 bp, Homo sapiens
ctagattatagtgaggagttcagttttggatgtgtggggtgcatgtagaccatccatgtgacatttactgtgggttactagatacagaatctgatgtctggggaggctgagattacaggcacctgccacctcgcctgggtgatttttgtatttttagtagagagaaagggtttcatgttggccaggctggtctccaactcctgacctcaagtgatccgccagctttggccacccaaagtgctgggattaccggcgttagccaccatgcccggcgaaagattttgtattttatttcaagaggagaaggaagctattgaagtgttgtaggcagggaaatgacatccaaagtaatgacaacagtcatagtttaaatatgctgctatcacgttttcagtaaatgtgattggttttttgtcttaactgggtttctgctgcatcatttctcaatcatttttactcccttcagaatttcttggctctttgtgccagtaattactacaatggctgtatatttcataggaatatcaagggtttcatggttcaaacaggagatccaacaggtaagttattccattaaccaagatctaaggaactgaatgtatagtatgaagaagtgggtgaaagaagaggaattaatacgtggagttttggttgagtccgtcggttataagtctgtct

SEQ ID NO: 701804 - DNA, 1015 bp, Homo sapiens
  misc_feature (25)..(25): n is a, c, g, or t
  misc_feature (86)..(86): n is a, c, g, or t
  misc_feature (392)..(392): n is a, c, g, or t
  misc_feature (433)..(433): n is a, c, g, or t
  misc_feature (435)..(435): n is a, c, g, or t
  misc_feature (466)..(466): n is a, c, g, or t
  misc_feature (605)..(605): n is a, c, g, or t
  misc_feature (620)..(620): n is a, c, g, or t
  misc_feature (709)..(709): n is a, c, g, or t
  misc_feature (711)..(711): n is a, c, g, or t
  misc_feature (740)..(740): n is a, c, g, or t
  misc_feature (769)..(769): n is a, c, g, or t
  misc_feature (877)..(877): n is a, c, g, or t
  misc_feature (906)..(907): n is a, c, g, or t
  misc_feature (1010)..(1010): n is a, c, g, or t
agccatcacaacaaaattcacattnagaggatccagaggactgttttagaaaattctaaagcatatttaattaggttttaacagtnagggagatcttaatataacaaagcacttaaaaagtaaagactactactgaaaattaagtacagtactataaagaactagaaatgaactgcacgcgtagtgtaaacttaaagcagagcttcatgaaaatataatacacttctatgaatgtataagtagcaaacatcattggcttacaaaaaactgaaactaaaggaatttccaatcaaaacacaagcacagtggctttaattcaatatagagctatgataagtatataaagagaacctgaatacttacgtacttgtaatatgattttatgctgtaanaatagtacaaaacacatcaactctaatgcatagatgaagananatgaaaacacgataacaaaggaaagcctttntctatataagaaaatagccaagtactccagtactgtataggctcgtaattactgatccagtaaaattctacgtcctccagcttgagcagtattataggattaacaaatataacatttaatagcctaaaatatgaaactnaacagtggatcagtncattacagtaattgcagaaaatatacacagtaatgtactgaataatactgatggcataggagtatgtactacttcatcatccagctgtntncaatacctggtcatatctaaagcagagtncatacataatggacatctgtagccttctntcaacatttcttcataacacgttctatgtaaaagatgtacacatggcaagaaatgagcaacaacacgggatgtgtgaatattctccaaacatattggacaattctgtngggacacattttcaatacacttgtatatnnccttgaagattcatagctaggcataagtcacattcaaacaatggaaaaatcttcctttggaccatactacaattccacagttttacagtaatatgcttctatntttgt

SEQ ID NO: 701805 - DNA, 94 bp, Homo sapiens
agctttcccccccgggttaaaaaaaaaattttttttttttatgccttcatagggtgcccgtttcaaagggccccataaataaaatgttttccca

SEQ ID NO: 701806 - DNA, 110 bp, Homo sapiens
gatgagatcttcctactgtgtgacaaggtgcagaaagaggacattgaggtgtatttcacgggaccaggctgggaggcccgaggctccttttcgcaagctgatgtgcaccg

SEQ ID NO: 701807 - DNA, 227 bp, Homo sapiens
ctggctaagaaataccaatgaatgcctaaggcacgcctttgcccaaacccatggagttacagccctgtatcaagtatctcaaactcccaaacaaaacccataacaatcacaaacccccacctatggtcttgtctcaaagaagagccgagtgtgttaggagccatttagtagccgaagagagaagaccccaaagcgctgtggaaacctctgtggggctgaccagcagc

SEQ ID NO: 701808 - DNA, 269 bp, Homo sapiens
gcacggcgcagcatgttacgaacaggtgcacatgaggaagaacatggagaggatcggggccacgctgtccagagaggcgataggatgccagtctcgcagataaggactgtcagcagcagcgcccacgtgggctccccgttggccttcccgtggccaaacacctgcagggagaagggcaggaggatggggcagatgacaccacccttttaggagagaagctgcaggctggtcaggtctagcccagattaatcttaaagacacagaccagc

SEQ ID NO: 701809 - DNA, 169 bp, Homo sapiens
tcagtgacactcagcagaggtaggattcatctcacccggtggtgcccgagccgtaagatcctggatcttcacggcatggcgtgtgctgtcagctccagctgcacctgatgtggctcaggccacgtgtgccacagaggatcagctggctggtcaccttaggtagctggcc

SEQ ID NO: 701810 - DNA, 766 bp, Homo sapiens
ggctgcgcggggctccctccttaccgcaggagctcctcatcgagtaaacccaggtggtgtcttttccacgtggtagaagctggctaagcctgccacttccacagttccagcccaagggaaagtccaaggtaagtagatatttctttaagggggatgacctggtaagttgcgcacttcattggtcatctcatccatggcttgaacctagtcatgtgaccacatcagtcaagaaggctggctgcgatcgtatagtctccagctgtcagccatgtagagtgtccctggtatccagtgggggatgggttccaggatgctacctcagaaaattgaaaatgtgcaaagtgctcaagttgcattgatataaaagatgggcagtagtagttgtgcatataacctgtgcagtacccatcgtggatactttgtaatcatctttagattacttataatatctagtacaagtgaatgctatataaatagttgtgatactgtattattcagtacagatgcgactgatagtaggcctaactacattttctatccacagttggttgaatctgctcctacagaagcccatggaaagcccaggggccaaactgtgtgtgtgtgtgtgtattcagctaaaatttggggggaacggattattactaaagatgagtaggactagtgagacgatggctcatgggctcttattagattttaaaatctaggctgggcgtgtgcatcacgctgttatccagtatttgggcgcaggtggggacacctgagt

SEQ ID NO: 701811 - DNA, 302 bp, Homo sapiens
  misc_feature (27)..(27): n is a, c, g, or t
aaacatcctcaatcctcacttagtagntatcagtctttttaaactttagccattttaaatagatatcactttttctatttttatttttatattgaaattggattttttgtcgcccaaactgaattgcagtggcaacaatgttagtattaactgcaacctctgcctcccaggttaaagcgattctcctgcctcagcttatcccagtagctggaactaacaggtgcccgccaccacacctaatctatttttttgtatatttttatgtaaaaacgggttttcatctgttttaacccaggacggtt

SEQ ID NO: 701812 - DNA, 223 bp, Homo sapiens
tagcaacatgattgaatcaacacaaaacaccacagacataattattagcagtcatccctctactagatattaaccgaaactcaacaagcaatcgtatttagcatgtacccctaaacttgtcctcagaaccccctaacaaacccgcgtcctaatactaactacctgaactcctacccctcacaatcatggcaaagccaacgccacttatccagaggaccgtagg

SEQ ID NO: 701813 - DNA, 224 bp, Homo sapiens
gacagcttcctgcggtcaggagcttcgagagtccagcccgggcacatggtcgaaactcgtctctactgaataatacaattaagcttgggtgtggtggcacacgcctgcaatcccagctacttgggaggcggagacaggcgaatcacgaggtcagcgagttctgagaccagcctggccaacttggtgaaaccccatctctactgatatatacaaaaattagctgg

SEQ ID NO: 701814 - DNA, 393 bp, Homo sapiens
  misc_feature (324)..(324): n is a, c, g, or t
  misc_feature (327)..(327): n is a, c, g, or t
  misc_feature (330)..(330): n is a, c, g, or t
  misc_feature (368)..(368): n is a, c, g, or t
tttgatttttagaaaaccagccaagagccacaatgaccaaaaaagaaaatgaatagaaaagaaaagtatgaagagacgtatttttaaaatgatagggttaggctgggtgcgggtggctcatgcttataatccaagcactttggaaggccgaggcaggaggatcgcttgatctcaggagttcgagaccaacctgggcaacatagggaaacccccatctctataaaaagtacaaaaattagccaggtgtggtggcatgcagctgtagtcccagccacctgtggggctgaggaaggaggatcgcttgaacctggaaggctgaggctncantgngcagagatcgcaccactgcaacaatccagcctgcatgncaaaagtgagaccctgtctcaaaac

SEQ ID NO: 701815 - DNA, 213 bp, Homo sapiens
  misc_feature (28)..(29): n is a, c, g, or t
  misc_feature (182)..(182): n is a, c, g, or t
agcgccacattaacggagaggttgtatnntgtctctaggtgcgacgtggcgggcggcacgagggcagatctgagccagcctgtcctctcctcaagggccgactaggagacgcagcccagagtccccggggtgcccagccaccctgcatcacggcccgcagcagcagcgggaggggagcgctnctggacatcattccttctccggtggcgtggt

SEQ ID NO: 701816 - DNA, 398 bp, Homo sapiens
  misc_feature (52)..(52): n is a, c, g, or t
acaggactttagtgtcactgtctctcattcttattctctcctccagatttanctcctccattcaccacacagtcttatagggtcaccaatgagctccacattgctaaattggtgaatacttctcagtacctcactttagttgacccattagcagcatgtgacctattggctttcacatggcccatcaccctcttctcaaaaactggctttatttggtctccaggatatccctctggatttcctaactcaatgagagctcctccttagtctcctgcactgtttttcctcatatactatctctaagcactgagagaaccccaaagttctcctctgacatcttctctatttgaatgcacttcctcagctatctcctctagttcaacagctttaaatttact

SEQ ID NO: 701817 - DNA, 824 bp, Homo sapiens
agcggagtggcctcgcgtggtctgcccagtgtgagccgcggggccgcgagccaccgctcaccccgcgtcggggcgtggggctggcgggtggagcctcatgccccgccccagcggctggtgccctgcccgcgccgctgccggctcctcctcccatccttccgtcctccttcgccttccgtcggctcggtcccttgcttccttgcttcgcctccgcgcctcgcgcctatgggacagagccccgcgcatcccgcagcaccacctgaggatccaggaaacctggcccgagcgatcggacacgagcgatccacggacgcctgcgcaccaggcaaagcaactagaacgaactcgccttaacgcgagcgcaaaacgtgcggcaacacctagagcctgaaagcaactggcgccccattgggcttgcgatcgcacagctgctcctccttgccttagccacccacagtacacaagactttctaagttacacaccaacttaacaaaaccaacgattgcccctgctcataagagacgcaagcgacccagtggacaccaagagaacgacgggcgactacaggaaaccaaggccaaagaagcccagagccgcagcaagagacagcaaagcacccaaacagacacagcacaggagagcgcatccgttaacaaggcacgagctatcccagcgcatcgaagcgttagccgcccaagtatagcgtaccccgggcgaccgacaaggcgcggacccagaccaagagaacaaacgtacgcgaacaagcgggtaccaaacccgggcgcgtgacggctcggaccacaggggcacgaccagccccctg

SEQ ID NO: 701818 - DNA, 800 bp, Homo sapiens
  misc_feature (2)..(2): n is a, c, g, or t
  misc_feature (71)..(71): n is a, c, g, or t
  misc_feature (110)..(110): n is a, c, g, or t
  misc_feature (129)..(129): n is a, c, g, or t
  misc_feature (135)..(135): n is a, c, g, or t
  misc_feature (139)..(140): n is a, c, g, or t
  misc_feature (145)..(145): n is a, c, g, or t
  misc_feature (177)..(179): n is a, c, g, or t
  misc_feature (181)..(182): n is a, c, g, or t
  misc_feature (188)..(188): n is a, c, g, or t
  misc_feature (223)..(223): n is a, c, g, or t
  misc_feature (232)..(232): n is a, c, g, or t
  misc_feature (237)..(237): n is a, c, g, or t
  misc_feature (239)..(239): n is a, c, g, or t
  misc_feature (245)..(245): n is a, c, g, or t
  misc_feature (247)..(247): n is a, c, g, or t
  misc_feature (252)..(254): n is a, c, g, or t
  misc_feature (277)..(277): n is a, c, g, or t
  misc_feature (280)..(280): n is a, c, g, or t
  misc_feature (301)..(301): n is a, c, g, or t
  misc_feature (307)..(307): n is a, c, g, or t
  misc_feature (313)..(313): n is a, c, g, or t
  misc_feature (341)..(341): n is a, c, g, or t
  misc_feature (349)..(349): n is a, c, g, or t
  misc_feature (357)..(357): n is a, c, g, or t
  misc_feature (376)..(376): n is a, c, g, or t
  misc_feature (412)..(412): n is a, c, g, or t
  misc_feature (459)..(459): n is a, c, g, or t
  misc_feature (463)..(463): n is a, c, g, or t
  misc_feature (470)..(470): n is a, c, g, or t
  misc_feature (519)..(519): n is a, c, g, or t
  misc_feature (546)..(546): n is a, c, g, or t
  misc_feature (562)..(562): n is a, c, g, or t
  misc_feature (565)..(565): n is a, c, g, or t
  misc_feature (589)..(589): n is a, c, g, or t
  misc_feature (610)..(610): n is a, c, g, or t
  misc_feature (639)..(639): n is a, c, g, or t
  misc_feature (646)..(646): n is a, c, g, or t
  misc_feature (685)..(685): n is a, c, g, or t
  misc_feature (687)..(687): n is a, c, g, or t
  misc_feature (719)..(719): n is a, c, g, or t
  misc_feature (723)..(724): n is a, c, g, or t
  misc_feature (726)..(726): n is a, c, g, or t
  misc_feature (774)..(774): n is a, c, g, or t
tnaaaaccccagctcaaaatacgacactaacatgatgaacatgcatgagctttgaaaagtgctctgtagtnttatgatgatctagaagagcactgtccaatagaactttntgtgatgatgaaaagtttnttcttntgannttttnaatagggttaccactaatcttgcgtgggtctnnngnncttggnatgttgcttgtgtgtttggggggctgggttttgantgttaactnttttnanttttantnttaannngttacttgtgggtggtgggtgcngtncgggacagttcagcgctaggnttatgntgtgtnctcctgttacacatactcttggtctctnctactctnccttcatnacacctgtgacatcttgcnatttttttttgtttgtgtcattatctgatgtattcntcctgggctctgagctccaaatgaacaaatgctttgtctactttgcnatanctgtgtncccagtgcttggcatgggacctggtgcagagtaaatacatcataaatantttgtgaatgaatgaatgaatgaatgnccatgattaataaaanganatagctgctcagtctggtgctganaatggtggtagtgatcaaaanggttaaaccacaggtcattaaatgaaaanagctaanttagtgcttacaggaaccatacactccctgtgtataaanangccggtgtgtgtgtacaggtgtgtgtgtgcanaagnntnatgtgtttgccaaggtttgccctttgtgtagtcatgtgtcgcactgtntgctcatgtgtttttgtgtctggata

SEQ ID NO: 701819 - DNA, 199 bp, Homo sapiens
aacagagacctgtctctaagaaaaaaaattttgaataggctgggtgtggcggctcacgcctgtaatcccagcactgtgggaggctgaggtgggagatctcttgagccctggaattcaagaccagtctagtctgggaaacacagcaagacccgccttgctgggcgcggtggctcacgcctgtaatccctagcactttggg

SEQ ID NO: 701820 - DNA, 231 bp, Homo sapiens
  misc_feature (34)..(34): n is a, c, g, or t
  misc_feature (38)..(38): n is a, c, g, or t
  misc_feature (41)..(41): n is a, c, g, or t
  misc_feature (79)..(79): n is a, c, g, or t
  misc_feature (175)..(175): n is a, c, g, or t
  misc_feature (197)..(197): n is a, c, g, or t
  misc_feature (224)..(224): n is a, c, g, or t
ctgagtctcttgctgggcgggcgcgtttccggtncacntcngcctgtgggttcgcgaccggggggtgggggcccaggcntattggcgggagcggaccccgattccgactgggaaccggagaacgggagctgcaggaggtggagaggtacggcttctcccgggccccagcttgaancagggcctcgtgcccggcgctncaggcgcgccccttggcccgggtgtcntgcgctc

SEQ ID NO: 701821 - DNA, 124 bp, Homo sapiens
ctgcacgcttacatatcttaacaagcttgagatgcaagcagattgaagagtcaaatctgaccaagatgttgatgtggataagagaattctctgctccccacctctaagttgcccgccaatcgaa

SEQ ID NO: 701822 - DNA, 1068 bp, Homo sapiens
gcttcaggcgtttgtaaagtgaggtctggctctgcctcctccgtttattttttttttattctgtttctgttatctagtattttatttttggaaatggagtctcgctctgtcgcccaggctggattgcaggtgtcacaatcgtacaggctcattgcaacctcgcgtcctcccaggttacaagagattctcctgcctcagcctacccgagttagctgggattacaggcgtgtgccaccatgccgtggcctaaatttgtggctattcttaagtaacagatggggtttcgccatgttacgccagactggtgtctcagacactccctggacctcagtgtaagatctctccccaccccgggttttccacaaatggttctggggattaataagcgctgtagacgccaccatggcccggtactacttctccagttcttagaagcccatcctctggatttcccaccaggaagtttacttttccctccgtgaccttgttacacacttgtgctctcttatacacactgtggtctgacagggtgtgggcagcccataatgcggggcttatactacaaagagcgtcgtgttcgggccttttaggttcccctatctatatcactctgcccggtgtctctactctcttgaacgctctgtggcgaagttttgccgatagccccacggcgggcctttccataggcgacgctgtgctacgtggcgtcttgcagcagccctgtgtggcctacaaaagccccccgtggggggtcctcccagggcacgaccacgggcgtggggaaaccttgctgaaggcaccctttggccttaacgccccagcggaagcacatgttttccccccttctctattttgagggccaagggcacactacccttggcagggtgtggccctcccccccaaagtagatttgtgacagaacatcgttgggaccacgtagcagcgtattcgtggcgccccttcaagagaaggcacatattctcaaagaggccccccattagatggcctcggggtagaaaacactaacgccaaacactgcaaatcttcccgtgggtattttccacccaa

SEQ ID NO: 701823 - DNA, 179 bp, Homo sapiens
actggatggaaatcattgttgatgataaacatatggacgagggtgaatttgtaaatgatcacaatttttaatcaaacatactagcttataaaagattttaagatatggttttacatgaagaggcttttaaagacaaggtacagtagaaattttaaagcaaatataatatatatatgtcg

SEQ ID NO: 701824 - DNA, 275 bp, Homo sapiens
ggatacacaggatacacacgcacttaatttttaaggaaaacgttatgtcttatacaccatgatcctgggtaatagcttttccaaactttgggaaaaatccttaaaaagggttccacatgtcacctgaaactttacaaatttaaccatcatccaagaagggatggttctaccactcttaccaaggacactaaaaaggaaaacaccattaaaaaggtaaggaaactgtctccaagggcatttttttttacaatccctttcctcccacagtaaggtaa

SEQ ID NO: 701825 - DNA, 114 bp, Homo sapiens
  misc_feature (48)..(48): n is a, c, g, or t
tgtggtctctgcggagagccgcgcgcgcccgtgtatatctggcctatntttgttgagaagtggtgggtttgagacttatttctgttatgtctccatctattgatgagggtctta

SEQ ID NO: 701826 - DNA, 162 bp, Homo sapiens
tgaacctaaaccacactatttgattcacttctgtgtttatggaaacttttatgttctgatcaatgcaaatatgcctactgtaacagctggcaatgcccatgtctccacaaggcctgagaatatgatcacaatggcagtacatctcaacacaagctgaagagg

SEQ ID NO: 701827 - DNA, 88 bp, Homo sapiens
ccattcccgtggagtatggaatatcaaacctccatcaatatatctggaggcctatgaggaataaagcagaggacagtggtacctgcaa

SEQ ID NO: 701828 - DNA, 568 bp, Homo sapiens
  misc_feature (11)..(12): n is a, c, g, or t
  misc_feature (15)..(15): n is a, c, g, or t
  misc_feature (40)..(40): n is a, c, g, or t
  misc_feature (66)..(66): n is a, c, g, or t
  misc_feature (95)..(95): n is a, c, g, or t
  misc_feature (112)..(112): n is a, c, g, or t
  misc_feature (530)..(530): n is a, c, g, or t
aggagaggctnnagncccgcacgccgcgcgcacagagctntcagcgccgctcccagccacagcctnccgcgcctcgctcaggtcccaacatggcnaaaattctccagccctncagagactgagcggtgcatcgagtccctgattgcttgtcttccagaagtatgctggaaaggatggttataactacactctctccaagacagagttcctaagcttcatgaatacagaactagctgccttcacaaagaaccagaaggaccctggtgtccttgaccgcatgatgaaggaaactggacaccaacagtgatggtcagctagatttctcagaatttcttaatctgattggtggcctagctatggcttgccatgactccttcctcaaggctgtcccttcccagaagcggacctgaggaccccttggccctggccttcaaacccaccccctttccttccagcctttctgtcatcatctccacagcccacccatcccctgagcaccactaaccacctcatgcaggccccacctgccnatagtaataaagccatgtcacttttttaaaacatgata

SEQ ID NO: 701829 - DNA, 271 bp, Homo sapiens
tctataggatccccttttaattggaaatgatctctaactagaaatggatctcgacacagggatgaagcagctgattgcaaataaagatgtaacaaaagccaagctctctggaaatgcagggagttcaatacagaaaccatttccccattccattccaaacacgtttcctcctcactcttccttggttattgggccgttgcttgctatgatccaaccctgtggccgacatctgtgactaagagagagagaaaagcaagcttcctcctaaatg

SEQ ID NO: 701830 - DNA, 514 bp, Homo sapiens
  misc_feature (11)..(12): n is a, c, g, or t
  misc_feature (15)..(15): n is a, c, g, or t
  misc_feature (40)..(40): n is a, c, g, or t
  misc_feature (66)..(66): n is a, c, g, or t
  misc_feature (95)..(95): n is a, c, g, or t
  misc_feature (476)..(476): n is a, c, g, or t
aggagaggctnnagncccgcacgccgcgcgcacagagctntcagcgccgctcccagccacagcctnccgcgcctcgctcaggtcccaacatggcnaatttcagaagcatgctggaaaggatggttataactacactctctccaagacagagttcctaagcttcatgaatacagaactagctgccttcacaaagaaccagaaggaccctggtgtccttgaccgcatgatgaaggaaactggacaccaacagtgatggtcagctagatttctcagaatttcttaatctgattggtggcctagctatggcttgccatgactccttcctcaaggctgtcccttcccagaagcggacctgaggaccccttggccctggccttcaaacccaccccctttccttccagcctttctgtcatcatctccacagcccacccatcccctgagcaccactaaccacctcatgcaggccccacctgccnatagtaataaagccatgtcacttttttaaaacatgata

SEQ ID NO: 701831 - DNA, 507 bp, Homo sapiens
  misc_feature (469)..(469): n is a, c, g, or t
gcgtcccgcgccgtcgactcgggtccagcaggggtaagatctgcagccctagagagactgagcggtgcatgcattcactgatgtgatgtctacgggaattatgctgcagaggatggttataactacactctctccaagacagagttcctaagcttcatgaatacagaactagctgccttcacaaagaaccagaaggaccctggtgtccttgaccgcatgatgaaggaaactggacaccaacagtgatggtcagctagatttctcagaatttcttaatctgattggtggcctagctatggcttgccatgactccttcctcaaggctgtcccttcccagaagcggacctgaggaccccttggccctggccttcaaacccaccccctttccttccagcctttctgtcatcatctccacagcccacccatcccctgagcaccactaaccacctcatgcaggccccacctgccnatagtaataaagccatgtcacttttttaaaacatgata

SEQ ID NO: 701832 - DNA, 318 bp, Homo sapiens
tgagaaactgaataaagtgaccttgttcaaaacaaaacaattagaaataacaattaatttcccagtagtgaatacatacaaagttaaaactatatttcttcaataaccacgtagaacaggacttaggtttgggaatcatatgccctgtgcttccaatttttagctcttgctacctctgtagttatggtcccagtgcaagttaacttaccctcttttgagaccttcttctccttctatcaaaaagagatcactaattcaacaaaccttgcagttgtggaggtgaggattaacaatagtatttataaagcacttaccagt

SEQ ID NO: 701833 - DNA, 529 bp, Homo sapiens
  misc_feature (73)..(73): n is a, c, g, or t
  misc_feature (491)..(491): n is a, c, g, or t
actcctgcgctgtgtgctgctcgggctcccggtttttctatctcttccacgatgtcgtaattctccagccctncagagactgagcggtgcatcgagtccctgattgcttgtcttccagaagtatgctggaaaggatggttataactacactctctccaagacagagttcctaagcttcatgaatacagaactagctgccttcacaaagaaccagaaggaccctggtgtccttgaccgcatgatgaaggaaactggacaccaacagtgatggtcagctagatttctcagaatttcttaatctgattggtggcctagctatggcttgccatgactccttcctcaaggctgtcccttcccagaagcggacctgaggaccccttggccctggccttcaaacccaccccctttccttccagcctttctgtcatcatctccacagcccacccatcccctgagcaccactaaccacctcatgcaggccccacctgccnatagtaataaagccatgtcacttttttaaaacatgata

SEQ ID NO: 701834 - DNA, 619 bp, Homo sapiens
cacctgggcaacaacgatggggagaacctatcggcgccattgcagttccgctctaaggaggtgtccaagagcaacgtggtggacgacatggtgcagagcaacccagtgctctatacgcccggcgaagagcctgaccactgcgtggtcatcaagtatgtgccgtacgtgggtgacagcaagcgcgcgctggatgagtatacctcggagctgatgctgggcggaaccaacacactggtgctgcacaacacgtgtgaggactcgctgctggccgcacccatcatgctggacctagcgctgctgaccgagctgtgccagcgcgtgagcttctggcactgacatggaccccggagccggcagaccttccaccccggttggctggttcccctgcttcagctttccttcttcaaatgggcgcccacttagtggccggcccgggcaaggccccggggtggtcaaattgcggctttttccggcccagcgccagcgttgcatcggaagaacatcctcaggggcctgcgttgggggctcccgccacagaaccacatgctcctggaacacaaaatggagcgcccagggcccagcctcaggcgagtgggacccgtgctgccaccacctgagg

SEQ ID NO: 701835 - DNA, 374 bp, Homo sapiens
  misc_feature (43)..(43): n is a, c, g, or t
  misc_feature (51)..(51): n is a, c, g, or t
  misc_feature (81)..(81): n is a, c, g, or t
  misc_feature (120)..(120): n is a, c, g, or t
  misc_feature (320)..(320): n is a, c, g, or t
cgccctccagggggggtcataatcctcgtcagggggcttcaanctctctcncggttaatagctttttgatggcttttagcnagcctcgctaacgtggccttaccccccactattaacctnctgggagaactctctgtggtagtaaccaggttctcctggtgaagtatcactctcctacttcgggggctcaacgtactggtcacagccctatactccctctgcatatttaccccaacacaatgggggtcactccccccccacattaacaacataaaaccctcattcacacggggaaaccccctcagggtcatacacctatnccccattctcctcctatccctcaaccccggcatcattaccgggttttcctctta

SEQ ID NO: 701836 - DNA, 1009 bp, Homo sapiens
  misc_feature (193)..(193): n is a, c, g, or t
  misc_feature (423)..(423): n is a, c, g, or t
gccgcgatgaggcctcagcgagtggcctgtccgagacgccgagacgtgagggtgcccctcgtctcaccatgcagagaggccgttccggcgtctcgaaccgcggcaccgttcgcaggaaaactggcgagtgagccaggcgcgcagtcactgggcacgatgtccctcccaggagtcctctgctcgctgttcctgntgatgagcatgacaggcagaagattccacgacagcaagcgatctgggctactgtcctagtgagatcggtctcagtctggcatgccctgcatgtgctgtcagaaggttggcgccgggcgtgccattgacgggtgctcatggtcatctgctctgaccaggcatcatgatagccctagcaaaggcacatggtgcaccacagcggtgtgtccctgacgcctgtggcgacatgangggtgcccgattcgtgccgccgtcttgaggccataggacacttgctctcgagtcagtggtagccttagtcctctagacgtgcagtgaagtctcggagtcacgtaccgtgcaccctagcttgccgctcctgttggcttgctcttgttggcatttgatgggcacatggcgctgccactctttgggagccactcgcgttgcttatcctggggtttggcctcgtgaccttctctcttatgccacatgaactacggatccctgtgatgctcctagatcccgggggctgcagcgtccactgttggctggttggacgtccttgcatcccttcgacgcaagcgcattgctggacgcggtcgtggtggctctgtgcaccggcactgagacagcatctgcgtgcctttccatctcacacgcgagcgacagggcgtccttctgcagctttgtggtgctgatgcccgatccactcgcccgagttcaatggagatccagaaaacgtcatcaacggcgagcccgaccctagacatgtggaactgcttggggtcgtctttccaaggcagtgaaacttcccgtcctcccacgtgaaattcca

SEQ ID NO: 701837 - DNA, 435 bp, Homo sapiens
  misc_feature (97)..(97): n is a, c, g, or t
  misc_feature (117)..(117): n is a, c, g, or t
  misc_feature (131)..(132): n is a, c, g, or t
  misc_feature (135)..(135): n is a, c, g, or t
  misc_feature (155)..(155): n is a, c, g, or t
gggagaacaagcaaaggccatttattcagagggctgcttgtatcaggggagtcagccacccatacatgtcttagggggggggaaaaaaaaaaaaggnccttggggctttttttgggnccccccccccaaannaancccccccgtgttttagctangtcttcagtttaatttgatatccggtaccacctcctaccccatttctacccatcttaggttcattggctgggacgcctgtgacaaaagacagattaacaagagaaaggtacacaaatttatttaatatgtgttatgtgacacaggagccttcaaaaggaaatgaagttctgaagaaacagctaaacctgaatggtttttgtcgtagatttgagaagaatgaagcattgtgggaaaatatgacaaagtaaagaaaaagaatgagagaaatgtaataaatcg

SEQ ID NO: 701838 - DNA, 309 bp, Homo sapiens
gcgcggtaccgagtgggttgagcggtggacgacggtatttttatcaacatagtggcgagaggcatagtcaaccactgtcggggagtacgaaaattactctgttcatcattttgtcaggcttgatccctagcgcgcattgcttcctcgtatgttcgacacacctcattcgcgggcccatccgcccgtatatgcccaccgttgatccagagtgcccggtcgtaatcggacacaaaatctaaatcgtgggtagcgacgattaactgttgggggaggcgatcgaacaagcgtccaagtgcagggacccactcg

SEQ ID NO: 701839 - DNA, 271 bp, Homo sapiens
  misc_feature (267)..(268): n is a, c, g, or t
ccggtcccctttgggggggccacaacccatcaatggtgccagcagcggcatggtctggtttctcctttggccggccggggctgggtcacatcagcagttcttgcagcatttgcaatgcagctggcatttcattgggtgtccctccaatcacttcgtgtcaaactcacagcaagcacatcagcctctgtgctcatgaggtgcatgcaagggcgcagcggctctctcaacacatggcatgctcatggcaccacttctcacaaactcagnnggg

SEQ ID NO: 701840 - DNA, 474 bp, Homo sapiens
atttggtagctagtttctctttgcaagactgcaaggagcgcgcagaatggatgggagtcagtgataaggatgtgattgtttgttcaactggatcctctctcttgctcttcgacataaatggtctccgtctgcagacatttcagtactgcccagaagaaatcttgagactctgtgtggaccctgttcatgtcattgtcacctgtaacaatggctctttggatgtgtacgtgtgggaggagagaagcccactgcttaggaggtgttatcgactacgaaaaaggggatatctgccactgtctggcttcattatcaaaacattatgtgatgaatcaagcataattttagtgatgactagtagtcccattccctgctttctgatggcatataccttgaaagtctgctcttgaaaactgagtgggttgtgtgtccttttccttaatgataataaagatatatttgcaagcacaaaaaaaa

SEQ ID NO: 701841 - DNA, 146 bp, Homo sapiens
attatccccagagatccccatacagagtagcttagaccacaggtgtcaccaccaccctcagctagcctttgtatttttagtacagacggggtttcaccatgttgccaaggctggtcttaaactcctgacctcaggtgatccacctg

SEQ ID NO: 701842 - DNA, 392 bp, Homo sapiens
tccctcctgggaaatgttttgcccttctgttcatctgtgaactgttttttgtttttaattactctgtaccccctccgaatcagggcttttacccctggtgatgcaaaaccccaaaggggcctaccttagcccccgtcctaaccaaacgagcaaacctgcagggggtttggaaatggacttggtccccccaaaagggtgtgcgccgttgggggaaaaactgcgtcccagccaaaaggacaaagtgtgggtgattctggagacgccagtttccgagattgttttgcatattcatttgcccattgttgtttgggttggacatgcgtgtgggcttcagtgtgaggcttttaatatgtatatcctgttatcaataaaacaattatccaagtggttta

SEQ ID NO: 701843 - DNA, 512 bp, Homo sapiens
  misc_feature (172)..(172): n is a, c, g, or t
cttaaaaaaaaaaaaggggtgggggggggggggcgcaaaataaaaaaaaaaaaaaaaaaaaaaaaaaacccccccccccccccccccccccacaaaaagtggttttttttggaaaaaacaccaacaaaaaaaagggttgtttttttttttttagaaagaaaaaaaaccgtgnaaaaaaattattttttttttaaaacccccccccccccttaaatttttttccccccccgggggggggaaaaaaaaaaattttttttttttttttaaaaaaaaataaaaaaaaccccccccccccccaattgtgggggggggaaaaaaaaattttttttccccccccccccccttggaaaaacacccccttttcccccttttttttccccccccctttttttaaaaagggggaaaattgggttttttcccccccttttaaaaatccctttttacccaattaaaggggggggccctttgggaaaacccccaattccccccagtttgtggcacagggtatggag

SEQ ID NO: 701844 - DNA, 323 bp, Homo sapiens
gggaagccgtgggcgcgcccgttctggtcgttgtccacaaagaggtgtttttttcccagaaatgggggcacttcccacagtgtgggcccccccccgaggagaattatccggagaattttaatatttttgcccccgaaagaaaaaaaaaaatttaagtattaataccccaagggccaagccggacttataaattaaaaatataaatatttaaagtttttattttttaccccccagcctttctggacctgcctttttggggataaaccattcattttttcccacccccggcccttttgttttttaaattaactttttaaaaggga

SEQ ID NO: 701845 - DNA, 126 bp, Homo sapiens
caatttctacacctattggactgaaagtgcttggacaatggaatggttttagaatatgacagaagaacacaaaccaagtagctgtgggttgaacctggcacgtgagctgtgctgcaggcgcctgtt

SEQ ID NO: 701846 - DNA, 369 bp, Homo sapiens
  misc_feature (369)..(369): n is a, c, g, or t
aataatcttataaaaaaaaaaaaaaaaaaaaaaaaaaaaaaaaaaaaaaaaaaaaaaaaaaaaaaaaaaaaaaaaaaaaaaaaaaaaaaaccaaaaaaaaaaaaaaaaaaaaaatggggcccgaatttgggcttaattggccaatttcccctaaaggggggccgtttaaaattcaatggcccgggttttaaaacggtgggactgggaaaaccctgggggtccccaaattaaaccccttggaagaaaatccccttttcccaagtgggggaaaaaccaaaaggccccgaccggagggcctttccaaaaggtggccaaccttaatgggcaagggaaattggaagccgtatttttggttccgcggtttttggn

SEQ ID NO: 701847 - DNA, 782 bp, Homo sapiens
agcggggttctcttcctgtcttagtggctccggagaaggcgttggggatgccaacgatgaggctgctgtcatctgtggtgttggctctatgagctgtcgactcaagtcagagagaaggatgccaggctatttggcttccatagtcagtgctcgaacatgatactgcccgtgcgacgtggacagagacctagaccgttgccagtagcaacatcgtacaattgttgtggtcagatcgtagctagcacttagtacgttggaatctatactgatagattcgcttcccgtccagatagacttgtgcgcaattgtgtgctggaagttgctcaactgagtcaagatggggacctggaattgtcgcctgtatacgcaagatgtctctaccacactttgtggtctctgcagctcctctcaataggctaggttaattgctaacttcaggactcaggcaactatttactgtaggtcatggcccgagcgaggatagcggcccagtctgtgagttggctgcttaccaagtgcacgctgtcactgtggcatggaatcctaggacacagctgggagttgtgacgaggcggattcttccgccctcattttcctggatctgggctagacccttggcgagtcatgacgccattctcctccatacggtagtccctcctgtctcattgtggtactcacagacatgaggaaatatgacagctcccaggaatgaagaaagaactgattcggaggttacaccagccctgcctctcccaaagaagtccaggtcgtctaccaaggaa

SEQ ID NO: 701848 - DNA, 375 bp, Homo sapiens
cattgagccccggtgagctacttacatgaaagaagactttactaaaataatcactgcacaaaatgtaaagggtggggttatgcatgtgatattaattttcctcaataatgtttttcttgtactgttctagaactaattacagtttccacggtaaatttgttttcaaaatgccgaattgcgaaactcttgctgggcttcacgtttcttaatacctttaatagtttctctgcgttgcagtcagtaagtttccttgtcatgacacagacgatcacttaaggaagcccaggttatccctgttttcaatgcgatcagtaatcaccttgtgctcatgaatcacattggactgatgcatctaggttccagccttgatgttcg

SEQ ID NO: 701849 - DNA, 223 bp, Homo sapiens
  misc_feature (42)..(42): n is a, c, g, or t
  misc_feature (44)..(44): n is a, c, g, or t
  misc_feature (54)..(56): n is a, c, g, or t
  misc_feature (97)..(97): n is a, c, g, or t
  misc_feature (99)..(99): n is a, c, g, or t
  misc_feature (136)..(136): n is a, c, g, or t
  misc_feature (156)..(156): n is a, c, g, or t
  misc_feature (158)..(158): n is a, c, g, or t
  misc_feature (160)..(160): n is a, c, g, or t
  misc_feature (170)..(172): n is a, c, g, or t
  misc_feature (176)..(176): n is a, c, g, or t
  misc_feature (196)..(196): n is a, c, g, or t
cacttgtagaaaccagtacacttttagattagacagtatctncntttaatattnnnatttgttttcctttagtttgaaaagttgtataatacttaantnactgtagcaaagttttatatgtggtagcatacctttncttatcctattacaaaactntncngaatttcctnnnggtnttaaaaaaaaaaactttttncttagaagcatgaattatttttatttt

SEQ ID NO: 701850 - DNA, 160 bp, Homo sapiens
atgtctgtattcggcgagtagcgtatgatggcagtgaggggcgcatatgatctagctattatatctgagtatagtagcggctactgtaaaacggtactctagaatatagtagatgcgaaattaaagcgctgatatgatcggcgcagatctgtcatgatga

SEQ ID NO: 701851 - DNA, 254 bp, Homo sapiens
cacgtaagacagacgcgttgcagtgagcgagactgggccactgcattccagtctggatgagagagcaagactctgtctcacaaaaaaaaaaaaaaaaaaaaaaaaaaaaaatgggcggctgaaaatccccaatttttttttaaaaaaaaagaaaaaaccatcatttaaaggcccgggtgcatggggctcacacctttaattcccgagcctttaggaaaagccggagtgggtgagactcaatggagcgtcaggat

SEQ ID NO: 701852 - DNA, 193 bp, Homo sapiens
  misc_feature (64)..(64): n is a, c, g, or t
  misc_feature (81)..(81): n is a, c, g, or t
  misc_feature (119)..(119): n is a, c, g, or t
  misc_feature (122)..(122): n is a, c, g, or t
gatttgcctatatatttcatataaatggaataataaaacatgattttttgtgactagctttttncacttagcatacctttncaaggttcgtgaaagagtatgggatgcatcagtatttnatnccttatttttgtcagataatattacattgtattgataatatcacattttgtttatccactcatcagtgatg

SEQ ID NO: 701853 - DNA, 548 bp, Homo sapiens
  misc_feature (344)..(344): n is a, c, g, or t
  misc_feature (451)..(451): n is a, c, g, or t
  misc_feature (520)..(520): n is a, c, g, or t
  misc_feature (541)..(541): n is a, c, g, or t
aattcgcggccgcgtcgacaagacgacagaaggggaccccaatacgcaaaattaaccccctaataaaattaattaaccactcattcatcgacctccccaccccatccaacatctccgcatgatgaaacttcggctcactccttggcgcctgcctgatcctccaaatcaccacaggactattcctagccatgcactactcaccagacgcctcaaccgccttttcatcaatcgcccacatcacttcgagacgtaaattaggctgaatcatccgctaccttcacgccatggcgccttcaatattctttatctgcctcttcctaaacatcgggcgaggctatattaangatcatttctctactcagaaacctgaaaacatcgggcattatcctcctgctgcaaatatagcgctttcataaggtaagtcctcccgtgaggccaaatatcatctganggggcaaagtaattacaaattaatatcggcatcccataaattgggaagactagttcaatgtcggggagntatcatagacagtccacctcngtttttt

SEQ ID NO: 701854 - DNA, 138 bp, Homo sapiens
gagcaacactacataactgatttgtagttgacttagcctatagcagttacaatgaattagttaatgttaaaaattaaccacagaattgacctcagggattgtaggggtgggtttgttcaaaatatccagtgaaattgt

SEQ ID NO: 701855 - DNA, 175 bp, Homo sapiens
  misc_feature (5)..(5): n is a, c, g, or t
  misc_feature (38)..(38): n is a, c, g, or t
  misc_feature (76)..(76): n is a, c, g, or t
  misc_feature (165)..(165): n is a, c, g, or t
  misc_feature (170)..(170): n is a, c, g, or t
gtttncatgggaccgtggaagttagtggacatcaagantttcgatgacaacatgaagtcactcggtgtgggttttnctaccaggcaggtggccagcatgaccaagcctaccacaatcatcgaaaagaatggggacattctcaccctaaaaacacacagcaccttnaagancacag

SEQ ID NO: 701856 - DNA, 151 bp, Homo sapiens
ggaaccgcattccccacagatgagggtgggagcagcggaacaggtaatgccagacacaggcttaatatttaaaggcagattttgtgtgctagggagttgattcctaatagttagttctgtcccagcttggccatcactgtgtgcggaaggg

SEQ ID NO: 701857 - DNA, 545 bp, Homo sapiens
acttaggcatcctaaccaggggcgtgcgtgtagttccaggctgtcagatgctcacctggggctgcagtgtgctgttccaggctgtcagaggctcacctgggcatgtgggtgctgttccagtctgtcagatgcccacctgggtttgtggtttctgttccaggctgtcagatgctcacctgtgggtgtgggtgttgctccagaccatcagatgcgcacctggggttgtgggtgctgctccaggctgtcggatgctcgccttagggttgtgggtgctgctccatgcgttcagatgctcgccctgggggtgtgggctgctgctccagcgttgtcagatgctcaccatgggctaatgggtgctgccccatgctgtcagatgctcacctgggggttgtgggcactgctccaggctgtcagatgctcgccttggggctctgggcgctgctccagactctccgatgctcccctgtggttgtgggtgctgctccagatcatcagatgctcacctggggttgtcggtgctgctccaggtgtcgaatgctcgcgtg

SEQ ID NO: 701858 - DNA, 405 bp, Homo sapiens
  misc_feature (12)..(12): n is a, c, g, or t
  misc_feature (30)..(30): n is a, c, g, or t
  misc_feature (69)..(69): n is a, c, g, or t
  misc_feature (137)..(137): n is a, c, g, or t
  misc_feature (214)..(214): n is a, c, g, or t
  misc_feature (329)..(329): n is a, c, g, or t
  misc_feature (361)..(361): n is a, c, g, or t
  misc_feature (394)..(394): n is a, c, g, or t
aagccgggacanttgttaaaaaaaaagggnataaatacagagcctatgaattcccaattcagtggaggnaaaaatggaatttaaaaaatcctaacccataaagtcagttttttaaaaatgccagaaacagccagcgnccgttgtcacgcctgtaatcccagcactttgggaggctgagacgggcagatcacgaggtcaggagatcgagaccatncctggctaacacggtgaaaccccgtctctactaaaaatacaaaaaattagccagacatggtgcgggcgcctgtagtcccagctacttgggaggctgaggcaggagaatggcatgnacccgggaggcagagcttgcagtgagccgagntcacgccactgcactccagcctgggcgacaganggcggtccgtc

SEQ ID NO: 701859 - DNA, 443 bp, Homo sapiens
agaaccaaactttccaacacttattctgtctttcttataaacttagtactgttttcacagcttcactaacttctaaaaattttcttcctggcaagtctttacttatcctcttctacctgtccccacctcctgtttttctgattttacttccttatgccaaacatctaccaccaacaccacatacatatactgtgcctttaccttaatcgcttgggccaggtttataaattaactcattcattttatttcattttattttttgagatggagtcttgctctgtcgtccaggctggagtgcagtggcgcaatctcagctcactgcaacctccgcctcccgagttcaaacgattctcatgcctcagactcccaaatagctgggattgcagaccatctgccactctgcccatctaatttttgtatttttagtagagacggggtttcac

SEQ ID NO: 701860 - DNA, 986 bp, Homo sapiens
  misc_feature (65)..(65): n is a, c, g, or t
  misc_feature (127)..(127): n is a, c, g, or t
  misc_feature (189)..(189): n is a, c, g, or t
  misc_feature (235)..(235): n is a, c, g, or t
  misc_feature (258)..(258): n is a, c, g, or t
  misc_feature (262)..(262): n is a, c, g, or t
  misc_feature (296)..(296): n is a, c, g, or t
  misc_feature (384)..(384): n is a, c, g, or t
  misc_feature (403)..(403): n is a, c, g, or t
  misc_feature (556)..(556): n is a, c, g, or t
  misc_feature (563)..(565): n is a, c, g, or t
  misc_feature (574)..(574): n is a, c, g, or t
  misc_feature (577)..(577): n is a, c, g, or t
  misc_feature (585)..(585): n is a, c, g, or t
  misc_feature (624)..(624): n is a, c, g, or t
  misc_feature (635)..(635): n is a, c, g, or t
  misc_feature (709)..(709): n is a, c, g, or t
  misc_feature (812)..(812): n is a, c, g, or t
  misc_feature (823)..(823): n is a, c, g, or t
  misc_feature (898)..(898): n is a, c, g, or t
  misc_feature (911)..(911): n is a, c, g, or t
  misc_feature (976)..(976): n is a, c, g, or t
cttcccggtgcccccgccgtgggtgtgtgaggggcggccggacagcccccgacgccgccggcccnggaggacgctgccgaggcaccatgcgtgagctcgtgcccctcccggcgggcccgtgcggccncccgatcggcgcccagttttgggaggtcatccgtgatgagcctgggattgccccccctggcngttcccatggcgaccgtgatttgccgctggcgagactccatgtttnctaccatgcagcccctggtaacncatntgttcctcgggccctcctcgtggctctggcgccnggcccgatggattcggttaggtctggccccttcggcccgatcttccgacccgcccctttcgtgtttggcccgagtggggccgggaatnactgggccaagggcccctnccccgggggggccgggctggtcgcctcggtcctggctgtggtgaggcaggcgtcagagagctgtgactgtctcccgggcttcccgctgcccccctctctggggggcggcacggggtccgggatgggcaccctgctcatcagccagatccgggnagagtcnnnaccgcatcntgncacttagntctgccccacccaagtgtagaacggtggtgggcctaaangccacctctcngtccaccagctggtgaaaacacagatgaaacctactgcattgacaacgaggccctgtatgacatctgcttccgnaccctgaagctgaccaccccacctacggggacctcaaccacctggtgtcggccaccatgagcggggtcacacctgcctgcgcttcccgggccagctgaacgcnacctgcgcaantgggcggtgaacatggtgcccttccctcgcctgcacttcttcatgcccggcttcgcgcccctgacaagccggggnagccagcagtacngggcgctcacggtgcccgagctcacccagcagatgttcgactccaagacatgatggcggctgcgnccgcgcacgg

SEQ ID NO: 701861 - DNA, 1589 bp, Homo sapiens
taggctggtctgggtgatgaggctcccgggtggagtctggctattattttttctgggcacctggctgtgtgtgttcccatcactgtcaggaatcccatctaatatgtgtggacgggaccactatgggtgtcgattgggggcaacaaccatggtctatcttcgggttgaccataaattatttttatttatttatattctcggttttctcatctccagcgcatataggggccaggggagaatctccacttattggaggagaggtggcctctctaggcacgcgctctcaatataggttctcaattgtgttctcactccgcgcggtcagtggcaccaagaaagaggctttccaagcgtgtgtaaaggggtgtgaagtgtctcctctctatctccattccatgccggtctatagtgaattgttctctctctttctcgagccaaacctctccgagtggtaacttctctcgaggatacatactccgtgtgtctccatagtggggggcgcctcttttccccacaacacagagtgtctataacacaccgcgggtcttataacactcttatgtggggagacaatatttactcgaggcacacccgcagagagcacacctagttgttctcccccacaaaattctagcaccgggcgcggcggggacacaaaaaataatccacgcgtgggcgaacttccacccccaagaggcgcgttgggtgcgtggtaccaatattccctgctccaccaattgaggagcgctgtactaccctataagcgccgacaaaattttttccaaaaaattacacaataagcgggctgcgaggtcctctgtggggttggggcgcaaccaaaaactagcggcgacggccacatattaacatattaaaagagcggcgatattttccccccctcttttgagaagatttcctccacctgttgggaagagacaccagcattttttccccaaaagagacaagagaactttccacgggtgttatcttacacgggggccgatggcgaaaacatattcccagtgtgtgcgaactctggcgatttctcggggggtgctaaaaaaaaaacacccctctttccaaaagccttccttgtggtttcttgggggcggcgacgcgttcaatcacttttgtgtggatttatcaccccccccaaaggggttttctcctccttatgagaaaggggcggaaaccaggagcggctgcgctccatacacaaagaattatgataccgcccgtgggcggtacaccatcgtcaggcgagataattttgtcatcaacgacgtcaacacattttggggcgagccacccacctgttgtctgccttgcgaacaacattttgtgtagcatctgccttcctcgcagaaagcgtgtctcttgtgggggctctgacaacaaaggccatatcaaagtgtaggccgtcttgggcgacgcatcctattatcgagcgcgcggcacctcttcttttgctcgcgcccaaccaggcacgggagggtttatgaaggcaatatcatggaggccttcgtgcttgttgctcccgaccagcatgccgtccgcgtttgtatgttgttgtgcccccaccactgttc

SEQ ID NO: 701862 - DNA, 110 bp, Homo sapiens
ccagagttgaaaaatgctggtataaatcaggacaaaagaggaggcaagtgagtacgccccactcctctcccatttatacgtgtagctcccattacttaagccggcaaaga

SEQ ID NO: 701863 - DNA, 1098 bp, Homo sapiens
  misc_feature (15)..(15): n is a, c, g, or t
  misc_feature (63)..(63): n is a, c, g, or t
  misc_feature (73)..(73): n is a, c, g, or t
  misc_feature (76)..(76): n is a, c, g, or t
  misc_feature (86)..(86): n is a, c, g, or t
  misc_feature (106)..(106): n is a, c, g, or t
  misc_feature (137)..(137): n is a, c, g, or t
  misc_feature (143)..(143): n is a, c, g, or t
  misc_feature (153)..(153): n is a, c, g, or t
  misc_feature (212)..(212): n is a, c, g, or t
  misc_feature (215)..(215): n is a, c, g, or t
  misc_feature (224)..(224): n is a, c, g, or t
  misc_feature (227)..(227): n is a, c, g, or t
  misc_feature (237)..(237): n is a, c, g, or t
  misc_feature (242)..(242): n is a, c, g, or t
  misc_feature (244)..(244): n is a, c, g, or t
  misc_feature (253)..(253): n is a, c, g, or t
  misc_feature (262)..(262): n is a, c, g, or t
  misc_feature (270)..(270): n is a, c, g, or t
  misc_feature (277)..(277): n is a, c, g, or t
  misc_feature (303)..(303): n is a, c, g, or t
  misc_feature (308)..(308): n is a, c, g, or t
  misc_feature (439)..(439): n is a, c, g, or t
  misc_feature (557)..(557): n is a, c, g, or t
  misc_feature (612)..(612): n is a, c, g, or t
  misc_feature (971)..(971): n is a, c, g, or t
  misc_feature (974)..(974): n is a, c, g, or t
  misc_feature (980)..(980): n is a, c, g, or t
  misc_feature (984)..(984): n is a, c, g, or t
  misc_feature (1023)..(1023): n is a, c, g, or t
gcctgggaaaaatcngaagctagagacagatccttgagtttaacagctaccacgaactgcttnaatcagtctntgngcacagtganatctcatacaaagtccaccnatctcgaaactgatccagactccattggatntcaaanattgcaagtnccttgcaccctcccacatgcccgctggttcgagggaaatgctttcagtccacagttaangtntcctcaaancanttaaggactngggantngttttcctngcttttaancccttaanaccctgnatccttaacctactaggccattaggntttgntgaacaaccccaccaaacagcctttggccctaaacgtggcaaacaggcgcggcttgcagattctggctgcagaactgttcctgccaggttcagtgggtatcactgacccctgtgagagtggcaactttagnggacaaacagtcatgaccctaggacagcaggacatggtctgctatacggctcagactctcgtcccaatcctctcacatggtggctttagggagatccttggccaggagggtgatgccngctttctggcttctgaaatatctacctgggatggagtgatagttacaccttcagnaaaggcttatgagaagccaccagagaagaaggaaggagaggaagaagaggagaatacagaagaaccacctcaaggagaggaagaagaaagcatggaaactcaggagtgacattcccttcactccttttcctacccaagggggaagactggagcctaagctgcctgctactgggctttacatggtgacagacatttccgtgggatagggaagatagcaggaagaaaagttaactccatagaagtgtcattccactgggttttgatattggcttagctgccagtctcccatttgtgacctatgccatccatctattaatggaggatatacccacatttcttcctaatattctataatctcncantcctgnaaanccctctctcaactaatactttgctgttgaaatgttgtgnaatgttaagtgtctggaaatttttttttctaagaaaaactattaaagtacttcctagtagggcaaaaaaaaaaaa

SEQ ID NO: 701864 - DNA, 308 bp, Homo sapiens
ccatcttggcctctcaaagtgctgggattaggtgtgagtcatagtgtgtggcctctagagcactaactttaaaaagcttcaattacaaatccttcctctgtccctctgagatatatacctatgtatttcctacaacctaggaatgtctttctcaaggacctgaaatccattcctttggaatgtaatcatcataaagggagggctcatgtctcccagtctatgtgggagaatagaatcctaacttccctaattgccagctagcagacacagttggcctaatcacatttacgctaagcactccattccgt

SEQ ID NO: 701865 - DNA, 659 bp, Homo sapiens
gacattaaaaaaaaaaaaaataataaaaaaaaaaaaaaaaaaaaaaaaaaaagaaagagaaaataaaaaaaaaaaaaaatataaaaaaaaaaaaaaaaggaatacagacaagaaaaaaggacacttagaaacagtttgtcctaggtagagcccttgtagatttcagttcctgagggtttacgcctttagtccgtgttgagccctgaaggggatgtagcttatttgggtgggtgaataaacatttttgggcagtggttgtaaaaccggggaggtcgaaaaaggttgggttttccaacttttaatcgctttgaaagagagtacgtttatggcaggtgggggcatttggcaaagggcccggttaaatctggcttcaaaatgctggccggcctaaataggggcaggaaattggacagggccttttttgtgaaaagtcccggctcaaattttgggggaagaaggccctgtttgccacaagggcccaatattgaaaaactctgttttcatcaaaaaaggtcgccctggccacgtttgcgggtttgtcacgactgggataacgattccccttttaatggggaacaattgcccgtaaaggctttaggggtccgggaccggaagggcctatattgaaccctaaggagcgcccctttataaggtttgag

SEQ ID NO: 701866 - DNA, 722 bp, Homo sapiens
gggtccgcgcaggaagctggcctggaggacggagtgtcaggggagatttccgacactgagcttgagcagaccgattcctgtgcagagcccctctcagagggaaggaaaaaggccaagaacattaacacagaatgaccgaaggagctttctccagcaggaagcatctcgaagaacagccctgcacactctttgaagttcctgacactatggtaaccaagacctgagggcagcaaaccgctgggtgctgtcgctgtgagcaagagccggttggcacatttgggaaagccgcactgtatttaacttaatcaaatgtggtactgggaggggttgaaaccaagttgtctcctgggggggaagaacaacaggttcactctgtggctgtggttttcccccttttttaatctaactggcctgttgaacattgacacctcatcacggttggtaggctgtcatgacctgtgtacgtgcttaccagtgactccgtgtggctcttggtgagggcctttcctgttcaggaccccaggtgggctttaagaaccctgcctgtatgggggcgttgtccggtggtgacacttctgcaaaaggagtggcatttccactggctgtgatccatgcattcgggggtagtactgtcttgcctgtgcgtctctcggcctgagatttgcggcagtttgcgccttcggttaatcttccgggggcaatccgtggtgctcctgttccac

SEQ ID NO: 701867 - DNA, 334 bp, Homo sapiens
tctaacaggtcatctgaatcgtcattggtaaagagaatgagagtcattctgcatgcagaggtgtgaaagtggcacagtcttcacagcccccaccacattcctcccacctaaggaggtgccacagagtacagacacatttcccgcaatgggcatctttttctgcacccatgaatggattctcagttcgctgatgaactcgagagttttccccgtaaataacacattcttaaaacatgctacatcaacactgaatgagtttcactggcagctcctactattccatttcagtactcccgcaagtcaaaagaaattagagctgatcctctagagtcga

SEQ ID NO: 701868 - DNA, 636 bp, Homo sapiens
  misc_feature (1)..(1): n is a, c, g, or t
  misc_feature (5)..(5): n is a, c, g, or t
  misc_feature (11)..(11): n is a, c, g, or t
  misc_feature (162)..(162): n is a, c, g, or t
  misc_feature (204)..(204): n is a, c, g, or t
  misc_feature (207)..(207): n is a, c, g, or t
  misc_feature (236)..(237): n is a, c, g, or t
  misc_feature (243)..(244): n is a, c, g, or t
  misc_feature (263)..(263): n is a, c, g, or t
  misc_feature (275)..(275): n is a, c, g, or t
  misc_feature (287)..(287): n is a, c, g, or t
  misc_feature (290)..(290): n is a, c, g, or t
  misc_feature (302)..(302): n is a, c, g, or t
  misc_feature (311)..(311): n is a, c, g, or t
  misc_feature (315)..(315): n is a, c, g, or t
  misc_feature (322)..(322): n is a, c, g, or t
  misc_feature (329)..(329): n is a, c, g, or t
  misc_feature (337)..(337): n is a, c, g, or t
  misc_feature (350)..(350): n is a, c, g, or t
  misc_feature (354)..(354): n is a, c, g, or t
  misc_feature (360)..(360): n is a, c, g, or t
  misc_feature (370)..(370): n is a, c, g, or t
  misc_feature (375)..(375): n is a, c, g, or t
  misc_feature (392)..(392): n is a, c, g, or t
  misc_feature (394)..(394): n is a, c, g, or t
  misc_feature (404)..(404): n is a, c, g, or t
  misc_feature (406)..(406): n is a, c, g, or t
  misc_feature (414)..(414): n is a, c, g, or t
  misc_feature (422)..(422): n is a, c, g, or t
  misc_feature (430)..(430): n is a, c, g, or t
  misc_feature (433)..(433): n is a, c, g, or t
  misc_feature (441)..(442): n is a, c, g, or t
  misc_feature (454)..(454): n is a, c, g, or t
  misc_feature (476)..(476): n is a, c, g, or t
  misc_feature (491)..(491): n is a, c, g, or t
  misc_feature (502)..(502): n is a, c, g, or t
  misc_feature (509)..(509): n is a, c, g, or t
  misc_feature (537)..(537): n is a, c, g, or t
  misc_feature (635)..(635): n is a, c, g, or t
ncgcnccctcnccgacagccacttccgaggcctgggggtcgaggtccccggcgtcggccaggctccgggccgggtagccttcgtctcggagccgggcgccttctcctacgccgactttgtgcggggcttcttgctgcccaacctgccctgcgtgttttccancgccttcaagcagggctggggcagccggcggcgctgggtgangcncgcggggaagcccgaattcgaacaaatgnnaagganntaaggaaaagtggttgtancaattgcaaaangtggggtccaanaanaaaaatcgaaanccaaaaaanaaanaaatctnaaaaaanaaataaantaatggaaaaaanaaanaaaagngggctaatcntctcncaagggctgtctctaantnaaaaaatggnanttgtgcanggaatttncggtggangangttttcannctgcctgtgtanttctcgtccgaatggctgaatnaattctgggatgcantggatgtgganaaataangctttgtctaagcggggcctgcgggcanctggtccccgttccatgctgaaatcttccgctccttcaactggtctatcaatgtctgtgggaagaagaagtggctcctcttccccccagggcaggaana

SEQ ID NO: 701869 - DNA, 484 bp, Homo sapiens
  misc_feature (14)..(14): n is a, c, g, or t
  misc_feature (16)..(16): n is a, c, g, or t
  misc_feature (18)..(18): n is a, c, g, or t
  misc_feature (77)..(77): n is a, c, g, or t
  misc_feature (79)..(79): n is a, c, g, or t
  misc_feature (294)..(295): n is a, c, g, or t
  misc_feature (307)..(307): n is a, c, g, or t
  misc_feature (345)..(345): n is a, c, g, or t
  misc_feature (363)..(363): n is a, c, g, or t
  misc_feature (373)..(373): n is a, c, g, or t
  misc_feature (475)..(475): n is a, c, g, or t
  misc_feature (483)..(483): n is a, c, g, or t
atttcggcacaggntnangcataggtggggcctggatctgcagctgagttgggagcagaaggaacagccagtgcggntntcaccctcttgtggaggcctgggggtccctgtaggttgcccgacccactgtgaccctgagcctcttcccacagaccatcaagtgcctgctgatccaccctaaccccgagtctgcactcaacgaggaggcgggccgctcgctcttggagaactacgaggagtatgcggctcgggccgtctgctcacagagatccacgggggcgccggcgagtcacnnggcacgggcganacgccggtccgggccctggcaagtggacctgaagcttnctccaccgaccctggctncccaggccgngcgaagcggctttgaagggtcccatggccaagaagcatgctggcgagcgcgataagaagctggcggccaagaaaaagacggacaagaagcgggcgctgcggngctggtant

SEQ ID NO: 701870 - DNA, 251 bp, Homo sapiens
aaggcacggggatggtacacggaattctcagtcgtactcagatcctgtactttgcttccaaggtgagaaatgaggaaagctggcggatgttgggtagaggagaaagcagggtggggctgagcatgggcaggtctatacctggatcctccataatggccagatacaacgtgccacgccctgtatgggaggttgagaggacacgttctcagtgccactggtagcaatacgttcagaggagaagtggagcaact

SEQ ID NO: 701871 - DNA, 275 bp, Homo sapiens
ccaaatacgatcgtaaaagttttgttttatccctaagccagagtttaccagctttccttcaagatgataatatcaaggagcgaaaatcatttaagggccaccggtttggtaaacctttctccctaaaacctggaacagtgtaatccttccttatgttaattattagatgcgacacaaatgtgttttcttaggacacagaaactcggcaaaaaagagacaaagggaggagggacttccctttgtttcccgatgtaaatgacctacggctgctcaag

SEQ ID NO: 701872 - DNA, 105 bp, Homo sapiens
  misc_feature (59)..(59): n is a, c, g, or t
  misc_feature (88)..(88): n is a, c, g, or t
  misc_feature (93)..(93): n is a, c, g, or t
atgcagatctctattgccagaacatgaattcaggcaacctggtgtctgtcctcacccangcggagggtgccttcgtggcctcactgantaagnagagtagcactg

SEQ ID NO: 701873 - DNA, 125 bp, Homo sapiens
tggtatcagagcggctcttcaagtatcaggtgattttgtgaggaacgattctcggttctgcaacattgtgtcacagttggagcaatttgtggtgatgctctctctctatgatctctcttaatttc

SEQ ID NO: 701874 - DNA, 129 bp, Homo sapiens
  misc_feature (5)..(6): n is a, c, g, or t
  misc_feature (12)..(13): n is a, c, g, or t
  misc_feature (20)..(20): n is a, c, g, or t
  misc_feature (22)..(23): n is a, c, g, or t
  misc_feature (30)..(30): n is a, c, g, or t
  misc_feature (91)..(92): n is a, c, g, or t
  misc_feature (111)..(111): n is a, c, g, or t
  misc_feature (113)..(113): n is a, c, g, or t
ccccnncattgnntgagacngnnaaatgantctgttctaaaatttgtaatttgctaaccttgatttgagttagtgaaaactggtacagtgnnctgcttgatttacaacatntnacttgtgactgtacaa

SEQ ID NO: 701875 - DNA, 356 bp, Homo sapiens
  misc_feature (194)..(194): n is a, c, g, or t
gtcgacctgtattaaatacttacaatttgcggcatgagtttgagaactagctagtgttagaactaaccagtggaccgggcaaggtggctcaagcctataatcccagccctttgggaggccaaggcaggaggatcacctgaggtcaggagttcgagacaagcctggccaacatggcaaatccccatctctactanaaatacaaaaattagccgggcatggtggcaggtacctgtaatcccagttactcaggaagctaaggcaggagaatcactcgaacctgggaggcagaggttgcagtgagccaagatcgtgccactgcaccccggccagggtgacaagacagactctgtctcaaa

SEQ ID NO: 701876 - DNA, 459 bp, Homo sapiens
  misc_feature (96)..(96): n is a, c, g, or t
gcgtaccttttgtctatcctcatctgctgttaggtgatcacataagatatgatgtaactatactctgtaaaaatgattggtaagcttagatgggtnaacagagtcagtgattcctaattaatgagaattccctgagatgttgacatccgaacttgtccttaaggaatatgcagactggaacttggcagaggcatgcaggtgccaatgtgtgttttactagaatgccaagttcctctgcacaaaccttactgagcctcagcaggtcctgagtttctatcatggaccccatggagtcattcttgctcttgaatgtttttcttctattgttctggcaagttcctctccattctacagttatttggaaactactgctgtaccaagcctcaatgctaacagaatttaatagctgtcattagaaagcaagcttctgcttaccagttgtcctactgtgaatagtaa

SEQ ID NO: 701877 - DNA, 1730 bp, Homo sapiens
  misc_feature (923)..(923): n is a, c, g, or t
gctgtcgactcttgagtgttcatattgaatcacacctcgtcagttcctcctgatgaaattacaaacttttcttgtgtcgtcacaaacactcaagtgtgtttaaccgcaaagcgctgtttttaataaataacaggtccccagtatcatttcatgagagaagcaccgctccctctttttgcacccagcatgtccgcgtcccaagataattcgccctccgtaaattgacgtggatgtgccctacacaagaatacccactggctgtggaaagaaggatcttttcctaccccccccttatgcaaaagatgatgttctctctgccccccgaatgttacaaatcccgcaggtgtttacattggccccccaacaacacccaccccgagatgtgcccccccctgtggctatttctacatgtcttcggccgccccctacggaaaaagagaagggcgcccccacacccctcttgtaatgggggaagaaattctccccaacggtgttggtaaaccgcggaggaggccaccccttgtgtggggcccccatcgagagaaaaatacctctgtgggcgagcattgggggcccccccctcgccggaagaagaaggcctcttttgtgacgaccccagcacccaggggtgaaacaccctgtggtggaagagccccacaaagatgggttctttttgcgccaccacacaggaaattgtacacagagtttggtagttccggagaccggtgtcaattatccgcggggggggggagccccacaacaggggcgccccacaaaggggcctaacaccacaaaaaagggggggttgccaccaccccacagttgccactgttgggcgcccacacgccccccaacaggaaagacttgtgtccccccccccctcatcaaggagcgccaccccccggagagggccgctctggccncagcacaacagcagtggtgcgcccctccgttatatttttggcggcgccacatatgggcaactctccctcggctttcgcctgtgttagcgacccctctctctctcttgtgtgggcgcacacacgcccctctcgtggggcgcacagaaaaaagggctatgccacactgtcacaccccccactctctgagagattgccacaccacacagagaagagtgtttataaaaagatattgtgggtcacacaggggctttacccctcttagtcttacacaggaccccgcgcacacatctttgattctctcaagaaccccatatgcctcgccacctctgagcttatatgagcctcagtgtctcggacacacacagagagcatatcacacgcccctctctctgggtgggcctgttgtgtcccacactaagtgggtgtacagagtggacaccccagaggacactttgttctcaagtcctgtataagagccgtgtgtgttgtggtgtgtgacacacccagagaacccgggggtgcctctcacaccctctctcccaagagtctcctatgtcttgtgtcgccagaacgaaaccggccgggctcttggagaaagaattgcacccttaagattccattgaccacccccctcccagatttggccctaggcccgcttcccagaaccctggaagagagaaagaaaagaccattccatgggcacccacctcgaagaaagacccatattgcccaaggaacaacggagcttaatgcccggaccagattttccccttggtggggtctccaaataaaggtattttcccctga

SEQ ID NO: 701878 - DNA, 1104 bp, Homo sapiens
tgagtgccgagttccagagacatggggtctacggtatgtcccagcactattatgagtcctatatcactgacagacctcccggtaccgccgaccgcgcccgccaaacctgacgaccccagactacacccggagacgccagaccctccccagacaagaacacccgccatttccgaagcagcctgctcggcagcatgtcgacagtgactctaacatgaggctaccgggcgctagaataggacaggcaggacacaggagtcacagtgttactaggcgcgatgggtcactgcgtacagcccgccattgaaccagacatcgcggcactaagcccccaccacgcacgctccctgtgcctcaccccaataccacacgacccacgcacagcgctccacttcagcagccacctccaactaccattatagtacccacacatgggcacgacaaatccgacaaccgcctctccttagtgaacacaaggaacccaccacaaaacacgagagacaaaaagcggcccctctaaccgcggctggcaacagctcacctaggacacaaacgctaaccccagcacacgagagtggcaacaaaacataggatcacccaaccaatggacccatccacagaatcccacgatcacaaccaccaccgcatagtaccccaccaccagcaagccacaccgaccaattcgcgccactcgcccacacacaggaccaaacaggcacaccatggacaaccaaagcaacaacacacatctagaatacacaaatcgcaacaaccaagaccaccaataacaacactacaccatggactcgcgcccccaccacctcaaccccgccagcaacccctggacgaacgacagcatagcaaagtccaacatgactatgctcaaaacacaaaatatcaccctcccagcaactcacttacaactaacacacaataaataaaagcaaaaacacacaaatacaaacaacaactctcatcaacaacagataataccaaaacacaaaaaatcacatatactaaaaacacaacaaacaaatcacacaaccacaataacctataactaaaccaaccaatacatacactaatctcaatcaacccaaatccccc

SEQ ID NO: 701879 - DNA, 380 bp, Homo sapiens
ttctagaggatcccgaggcaggagaatcacttgaacttgggggggcagaggttgcatgtgattcaagattgcaccatcgcaccccagcctgggtggacatagagcgagtcttcatcaaaggaaatggacaggataggaaaagaaaagagacaaagacaagacgaaagaggtcaggcacagtagctcatgcctataatcccagcactttgggaagccaaggagggcaatggtgtgctcttggcttaccgcaacctctgcctcccgagtagctgggactacaggcgcacgccaacatgcccaactaatttttatatttttagtagagacagggtttcaccatgttggccaggatggtcttaacctcttgacctcgtgatctg

SEQ ID NO: 701880 - DNA, 287 bp, Homo sapiens
caggctgtggaccaagctggctaagacagactggcacccaaccacggtgctggatttgcatgtcaggtttcacctaaggtactcaattatacactcattaatatactaaatcccacacccattgggcatggtggctcacgtctgtaatcccagcactttgggcaggctgcaggcgggcaggatccacttgcagggccaggcagttcctaaacccagtcttggcctaaacatggatggtgacccaacatcaggtgggcatccatctcagcagtctgcacctgctaggc

SEQ ID NO: 701881 - DNA, 149 bp, Homo sapiens
gagttagggtgtgtacttaccacacacctacagcagagaatagcagttgagcaagatacagatcaatgctctgagagatgactgaagcagctccaaagaaagctgtaaaaagtgacaagaatttgtcttccactttgagactgttcgat

SEQ ID NO: 701882 - DNA, 248 bp, Homo sapiens
ttatatccggggggctgtatccggggagagaaagatgcgtgaggctgctgaggaggcagcgtgtgagcagtgagcagcttcaagccaggtcgaactaaattgttaagaggtatacaaaattacattaagcagtaagagagaaaaaggtctgtttcccagaggtattagagacccaaatcagcccagaactctcagggggacatgtatttaccagagatgagattggatagcatgttcttcccagctgg

SEQ ID NO: 701883 - DNA, 1075 bp, Homo sapiens
cccacgcgttcgcatccggtgctaggactccagtactcttgacgcaggtggctaggctggcaggcaggcgaggttgggagcttgccgagagtcctcgcttattgtcaccgacggtacagctagcggtgcatggaagcctatccgagagcgcgatggcaagtatggatggcacctagaggattcctggggtccacagatcctcatgtgacgtatggcctgtgcaccgatggccagggacacagcgtaggccaatcttcggtcctcgcagtgagtcgttctcggggggtcactcggtcgtggaccacgtcattgatcctgctagacagcccggggtggtgcacagcgagtcacgggcgtggggctaattgcgggaaggaaccgttacaggagagacctggcatacgacgcgaacgggtggcgcatggcaccaaggtggaaccacacacacatgacccatgcatccccgactccagggtccgccaacgggcctggggcagacaggacggtccacgagtcgccaaccaggtgacacgttggccaagcggtgcctcgggcttacggctggccgcaacgcgggacacctccctaatgtgaaacccgaagtccgccagagaaactctcaaggaaggacatcccgtgcatcggaggacacggagaggacaacacacgtggtgtaacaagggcgttgctcccttgcacgaagcgggacacgttaggatgactacctggacaacaaggccacttgtgtgtctagaaaggggaaccgcggttacacagtcccacgcgatccgtgggccagggtcacctaactacaagatcgggggtacttcctgaacccttgtactcggcggatgcatccgcatcaaggtgagcactatcactcccaggtccctctgatgccgacacgacggcaaaattggaacccccgtggaaagactgacggcctgtctatggtaacacccaaataggtgcgataccaagatgagaagacaggccacattgtcacacccagagtcgcaatgggcacccccctgtaagccaagatttcttaagacatggccatattttcgcagcg

SEQ ID NO: 701884 - DNA, 113 bp, Homo sapiens
ctctgcatatgttggcacagcatgccacccagcaaggcaatatgacgcacgcatgcatctccatagggaggtgctttcgtctgtgtactgcaaatgtgtgttgcaaatccagt

SEQ ID NO: 701885 - DNA, 168 bp, Homo sapiens
aggtgtgctattagatttcgtcctcatctgggtgtcaggaaaggggagggagtgttctaaatcggggagataactttgtggcccattaaggggagaaagaggtcccaagggaaggtctagaaaggaaagacagaccgggtgctgtggctcacacctgtaatcccagca

SEQ ID NO: 701886 - DNA, 353 bp, Homo sapiens
ctatgctacctgtcaacagagctgaagggtttggatcagctctgagtcaacgtccctgtcattggtggccatgcacgggaagaacctcatccgccctgatctctcagtgcacccccaaggtggactttccccaggaccagctgacagcactcactgggcggatccaggaggccggcacggaggtggtcaaggctaaagccggagcaggctctgccaccctctccatggcgtatgccggcgcccgctttgtcttctcccttgtggatgcaatgaatggaaaggaaggtgttgtggaatgttccttcgttaagtcacaggaaacggaatgtacctacttctccacaccgctgctg

SEQ ID NO: 701887 - DNA, 601 bp, Homo sapiens
aaaagtctcataaaatcatcatatccatctttgagtgagattgtttaatcacaatctcagcttcacatccccgtcagtttgggtcctccaagagccgatgccaagactgacttatacatgaaagagatttattggtggaaatgcctggcaaggataaaggatcttgggaacaggaggaggcagagcatcttcagaccccattgcaagtctgagtaagtctggaccaggttgatgagaattcctgagcaaagggtgccaggttgagcagtaatggttcaagaaaagttgaaccctgccactctcagccattggctgggtatactccgtagaaatgcagtgttagtgtgacagctatgatggatctggaggagcagtagctgaaggccgtcatcaactatgcttcccacagcaggttcttttgaagtagatctgggtggtacactccatggccaccacaatcttatatcctaaagatcagtaataaatgtaaccaatgtgaacacttggggaaagaggaaaacagaattggatatatcaatacataaacatcatgaaatcaggcgctgcaatgtctcagtctgcactgatctgagcacagtgc

SEQ ID NO: 701888 - DNA, 98 bp, Homo sapiens
tttcgagcggccgcccggcaggtactgtcatctattacaaccagaattctcctcacatttcatttttcttaaaaggaaattgagaatacctgcaacat

SEQ ID NO: 701889 - DNA, 586 bp, Homo sapiens
gcgtaacgcagagaggaagcacgaatcttcgagctattatgagtactcctgaacaatgaatatcgagaagtgaatgaatatgaggagcaccggtatgagaaggcatttgaagcaaggaaaagaatatgatcaacacagaaaagctagaattgaaaccaccggagaagaaaaagagtgatgagagacgaacttgaagctccattagaatcttcatgagaatcacctgataagaatattgatagaaaagagtggagagacttcacatcagtaagatggatactcgattaagagatctgaatccttggagaaaaacaaagggcgggagggtggcacaaacaaagacaatttggaatggttgaaaggaaccccgttgagaagaactgatgtttgatcttgcggttgttgaaatgatcggatccacttgaagaacaacacgccggtgaaagaaattgaaatgacaaactcgatgatcgagaaggattagtattcacataggaatatgagaccacacttgggaaaggtatggaatcaacatttgactttgaagcaactcgaataacacatactctctgcgtctggggtaccg

SEQ ID NO: 701890 - DNA, 1284 bp, Homo sapiens
ttcaggttgactctgtgcctggggctgtacgtcttaatgtatcttctggcagttcgagctagccatatctgtccacgctgcctgtcgcctgcctgccaccatgcccaagagaaagtgctgaagtgtggatgctaatgtgtgagataaatgcaaagtgtgaaggacgaaccacagagaagatcctgctgaggttgtcttgctaaaccatgcgtcctccaaatgccatgatgcccaatgcctaaaaatggcccctgcaaaaggaagtggacgatgaatgtgtacccaaaatgtgtgaaacatgtgtgaaagagcttgatgcattggcataggatgtgggaataacccgtgcagaaaattggagattgccaaagacagaccagtgcacagaaatgctgaagtgttgctggatgatgccaatgtgaagtgtgttgcattttttgataacttgtgtactatctgtgtgactgtacagtatttgaaatactatatacatatcaagatataataaaaatgcagaatattatgttatatacttataaaataaaagataaaaaggactatgtgagaaagacacaaaagaaacactacatagagtagaaaatggggagaaagggcacataatgcccacaaaatcaaaagtgatatcacaaaacctgaaatacgatgtagaaaaaaaaaacgatataacccatatagaaggaaaagagaaggaaaaataacaaacagttggcaccccaagagaagagaggagaatccccaatgaacatataggaacacacacatgtgtgcacaacatttgtgagacaagaaaaaaccatatagagacgaaatagaaaaaaaagcaaatcgtgttggtgagaaaaaaataagatacagcagtcctgaagttcccactataaccacgactcatattaccagagtaatgagaggtgatatggatccccacatttaagggcacacgaagaacaatacggtgtgagagaaaccacagtggaacccccataggtaacatgtgtgtacaaccaacagtatattacataagagaaaaaaatctgagtattattaccaagagaggaaataacccactagtagagaagtgggaacagtgtgtacgaaaagaaagaagagtgagtgtcaagaaaataagaagatatgtgtgtgactttgcgagaaaaaagatagggagaataataataataaatataaagtagaaaaataaggaaagatggatagtaaaaaaatttgtataggaaaatagtataagttgtataatgttagagacta

SEQ ID NO: 701891 - DNA, 1097 bp, Homo sapiens
gcaggagccgcagtgtccatggtacaatacttggtgttacgaaaggatctatacacaagctccgttctcctggccggcgggcgcactggtatctgcaggcatatgtcacagctggacaccgaggaccttgcacactcaccgcgaccacccgcacacagaccgcttacctcacaagagcatgggagcgcatgcgcaaagtggtcctcagaggcccacagcatgagaccaccctacaggcagctggccgcagacccatgcgaacagacagcaaccattgaccacatgcctgtgggcctatgcagcaaccaaggacgcctagtcgccacttgctattgcctcttccggtgccctaccccccaagtgacagacccgtggggccagtactttgacatgacagattccagacattggtatcaaaagttaaaccgtagccttggcctctcagatagtacgttctcgacaattaccgaccaaggcgcaacccccaatatacacaaaacggcaatccactggttagttacacccctaatgcccaaggttggattccaggacttctggccattaccccggttccttatctacacgctccggcttgacaccacagtgttacattatgaacgagagctataaactgcccccaacttggtttctcccacctccgcttcacaacaacgcgtgtggtatacccaacttattatccagtttacagccgtacacagtgaaaaacgagctcaacacagccagcggccaagcacgagcgcactagaaccaccggcacagcccacctagagcccgcgtgataccattacccgccccctctaccgacaaaggagtggcgtgtcgtccccgcaccaacagccacatattatacccagatgcggataacacccaccagagtcccagtttaacagtccatttgtgccctacacaaaacgcatacggttgggagcacacccccacaataattaccacattgcacaggatcttcgtaatcaaattatacaactaaagcgccaccaacagggtcacaaccattggtaaacccaggcacacacggtaaaccgcacctaacagacggacacctagagcgaacaatg

SEQ ID NO: 701892 - DNA, 175 bp, Homo sapiens
actcgtttcatcggcacgcgaaacatatcatacacaaacgcctgagccctatctattactctcatcgctacctccctgacaagcgcctattttacaccaaccccggtgccgatgaatagcgaagtgccgatgaatagcgaggtgccgcgaatagcgaggtgccgatgaatagcga

SEQ ID NO: 701893 - DNA, 330 bp, Homo sapiens
gttcgaagcattcagcaaacaatggcaaggcagagcccccaaaacgtgacacctgatttttcatgacaaatacggtaatgctgtattagctagtggagcccctttttgtattgttacatggacatatgtagcaacacaagtcggaatagaatggaacctgtcccctgttggcagagtttccccaaaggaatggaggaatcagtaatcatcccagctggtgtaataatgaattgtttaaaaaacagctcataattgatgcccaattaaagccctgtggaccccttaaaatatggccttatttaaaaaataaaggaccttttgaaccttcca

SEQ ID NO: 701894 - DNA, 317 bp, Homo sapiens
gatcgagctcgcaccgtaagtatgaaaagaagcagtgatgatgacaggtgatagatccaaaatagtggcacactttgttaacagttttaccactatctaaaccaatccttaaagaacatcatatatggggtcacacacatcctcacggcgagtccaattaaagcaagccagtgtccaatctgcgatgcatgctctgcaccacataaagcaactggatagattacaggaagattcacgccaaggcatgtgacttggatatgtgctacgtgacagccccgcgtgatcagtaacagagcgtatttacctcattgtcctgg

SEQ ID NO: 701895 - DNA, 121 bp, Homo sapiens
gatgcgtaggctcttacatgttttcactttttaacaattctctgtcaatgaagggttggtgactctgtgggttccctggcttatctgcaaagccctcaaacctgagtactgcgtggtcacg

SEQ ID NO: 701896 - DNA, 1212 bp, Homo sapiens
taaaaggtaaagtgtttgtgattctggtcacaacaaataattggcttttcctcaggggtccccgttcgccggcccgaagcgccgccgcgccacccaggaaccgggccgcggggcctctcgcggcgcggctatagcaaacccttctccgagggcccctcgctgtgcgacaagcgggggaagagccttctctccccccttcgcgccccgcgcgcggggaaagaggtacagagtttgagagaagagaggggggaaagacaggggaacactgtggacactagtgaacagagagggaggaaatccacgcgtgggagccggagaagaacaccggatacccgcgggagagcggtgggtccgaagaacacctgtgccttctggagaaacaatgtgtgcgcacaatttcaaagagtggagtggaaaaaaagagtgtgagaggagaagcatataaacacagggttgtggaaattgtgtggggcaaatcttgtgagagagtgtacctcttacagtgtttataaaatagaagagtgtgatgagcggtctgtggaatcctcacagtgttatcaaaaaatatctcctcgcctcaaaaaagctgtgcgctaataaagatgtgtgagacacacaggctgtgtggacactctcacaagtgtgtacacacatatagaaaattccatgtggggggaggggccttggtgggcacagtgtggtcttcacgctgtagaaacacaaacttcttccgagaaacttctctcacaaacaccgatttctataacacagctcttaaccaacgggtgcgaaacacatttacacacgtgtggcacacagaaaatatctcgaagaccccctccgttgtgggcaacactctcttttgtggcaaccacagacgcttaatcaaaaatggtgtgtctgtgaaaaaaaacggcccggtgggcacccctctctataaaaaccgggtggggagagaggggcgacacccccaacacccctgggagacagctgaccacataccccgaagacagacagggtggctcaccttacagaagcccacccaggtgcgccccccgaaggaataaacacaataaccgtaggtgacaacggggcgactaaagacgacaccccggacgcaagggcaccccaaggaggacaacgacacgcgtagggcaacgctacacaagaactggcccaggactggtaggacaacttgcggtagtgtaggca

SEQ ID NO: 701897 - DNA, 280 bp, Homo sapiens
attatatctttgtataggtattctattcaattatatttgtatgcatttttttaaatttttattttaagttctgggtttcatgtgcaggacgtgcaggtttgttacatcagtaaacgtatgccatggtggtctgctgcacccatcaactcatcacctaggtattaaaccccgcatcccttggttatttatcctgatgctctctctccctctgccctgccaagaggccccaatgcgtgttgttcccctccctgtgtccatgtgttctcattcttcagttccc

SEQ ID NO: 701898 - DNA, 109 bp, Homo sapiens
gggcctgctatggtggtgctgcggttcatcatggagagtggggccaaagctgcgaggtgtcgtgtcttggaactccgaggacagaggctgaaatgccatgtaggttatt

SEQ ID NO: 701899 - DNA, 281 bp, Homo sapiens
cgtctcttacagtatcccccggccgcccagcttcgtcagtgctaaaacgggaaatgtggctagccttgcggtctggggtgccctgattctcagaatccctgcgtggatgtggaaagacgtgtttggagtttagaccggctcacaggatttgggtggattgcaggaaaaggagcggctgggatgcactctctcatcctgcccccatggcgaccctcctttctggctttttttgagacggagtcttgctctgtcgccgtggctggtagacgctgtggcggccg

SEQ ID NO: 701900 - DNA, 377 bp, Homo sapiens
gtgcagacactagtctttgtatatactctgtattcttgatctcacatatctgaggaaggtatatactcaaccctttaatatggtaaactagtacagaacagtctgcacttagctattgtgtgtatgagctagtccaagcctagtgcttgaaaagtgccatgagtctgataattggacccaagagagctgaatctccaggtgacatcagcgggatagttcggactgacgtgtgtgctctgatatccccagaagctagctggttcatagtgggtgagatacagcgtggctggccatttgtactgcagaagggcaaggtactcaagcctggagagggtcatgtaggaactgcaatctcttctactatgtcacagaaatgt

SEQ ID NO: 701901 - DNA, 304 bp, Homo sapiens
acgtctacccagatcacggccgggttgaccctcacatagaattgataccgggagcacacagtatcccaggggacttgtgtattcacggtccgaacctgaaagggcagctcttcgagatttgggggcaagaatggtaaaagaggggctaattactccaaggatggcacctaagggagcccaagttctccaggtgaagagggggtggaaacggcaagtttcttatgatggccgagctccaaacaattttactatccagaatcagtatcctcgcctatctattccaaatttagaagaccattcaaca

SEQ ID NO: 701902 - DNA, 854 bp, Homo sapiens
gggcgtgtggagaagttcgatctggtgcccgctgcccaccaacctttatggagacttcttcacggcggcgacgcctacgtcatcctgaatgacagtgcagctgtactgaacggaactctgcagatatgacctccactactggactgggcaatgagtgcacgccagagatgagagcggggcggcgcgtccaatcattatacgcagtgtcaggctggtatgacgtaccatgaactggtcgggctcgtgcagcaccggtgtaggtccgagggccttcgagtcaggcctaccattccctaggcttacttcaagatctggccctgaagatacaagaaaggaggtgtgtgcatcaaggattcaacgcacgtggataccctagacgaggtgggtggtgcagagactcgttccaggtcataagggcggcggtgttggtccggtgccacccgtacggtaccgtgttggtcctgaggaagaagccttctaagcaagtggctgacttgcttctcattcctggactctgggcgaacaacgatcccaccaggttggatgtaggattccgaacagcgaaatcggtatgagaacgactggaaaggccaccacaggtgtccacaagggcagtccgggacagtcggagcggtagtggctcggggccctgattgcacgtgtctgaggagggctctgagtcccgaggtcgaatgctcctggtgctggtgccccaagccggctctgctgcaggttccgtggacaccgcaaggaggatgcggcaaccggagctggcaagctctacaaggtctccatggttgccggcaccatgtccgtctccctcgtggtgatgagaaaccttccccggggcccga

SEQ ID NO: 701903 - DNA, 400 bp, Homo sapiens
attatggccggggccggaccccagggccggagcccttgcttaggccgccttcccaattgttcccaccttgaagttgtttgaagaaccggggctactcctaaccattggcagccttgaaggagtttgggttcgaaaacaggcaagggagccttgggtgtgggagaaggtcaggagcccaaagtttaaggccagggccaagtctaactttgaaaggtcaagggaccagttgccacccttgatcaggaaggctgaaccggaacgggtaaacttctggagctattccgggaaactgggaccacagcctgccacccagggaagggtccaaaccatggccttccaacccaagttggcctttaaaccaccaactggccagtcctagagctccggtccttaccaattt

SEQ ID NO: 701904 - DNA, 791 bp, Homo sapiens
tgttatccttcaagcatcgctgcagcgcctctgtcctggccaatgtagaggctgggcagccacggcgtgcagcctcccccaatcgccgagcacgcacctttgactgattgtcctctagggcaggggctgtcctgccttaggttgggacgctggtctctagcacacttgtaggatggcgtgtaaagcgtaatccctgtggcgcatccactccgagtcccataggcccagcaggctgcgccagtctcagactacacacgccagataatggtctcccagacgtcgtgccgcagccgtcacccaggtacgcgcactcgcttcggacgacaagtgacactcagaagtcatctagtgtctccgtacgatacgccttgatagtagacgccccaaggtgcacgtggtgtagggtaggccgggctaagagaccctatgcctgtagtccgggacaccttggcgccgcgtctcaccactcactgatggatccttcgcgcactaacacgtgttctctagtgcggctagacgcctagggcatcccttgggcccatgcccagcgatggccatggcgcaggctctcgaaccgcggcatggctttcgccaggccatggtgattctgctctccagggatcggttggcaccttcctcgggggcgggccccacgcaccccagaacacacagacccacctttactggcgttcgtttctacctcccttgtcgttgcatgaggagcatggtggtttcatgagctaatgaacatcttgcaaggtgacacatagagcaaagaacctaaaatggtt

SEQ ID NO: 701905 - DNA, 894 bp, Homo sapiens
gagcgggaacaaaactgcgctcttagaccatggcgacccaggcgaagcgtcacgggtggcggggccctgtggacggctgcgagacctggatcctgtggcctgcttcctgagctggatgccggcgggtggggctggagctgagtcccaatggatgagctgagcgagccggatttgcgagagcgacccgcggtcgcgggacctgcggtgctgcccatgaccagcagctcctgctcagcgtggcggtccagaccggcacaggtcaccggtggccaggactactagcactgagtaggccctggggaagaagccgattgaaagagccagggaggaagatttggacatgcagcggatgtgatgcccagaaagtggagcacctgaggcaatcccattggtcagaaagacatacccccccttgaataccccaatcagggctgggccattgcttgggtacgtcacaacggagcccgcaagattagcgcgcgccattgaaaaagcaagcagcatcgatccagaggagcactgtggtagctgcaccaaaacagtggcatgttgccggtagtgacgcgccatagcaaccaaaaaggataaaaaccatttgaggacgcataaactcaacgaagacagaatcacaggacagccgagaacaaggacccctatatcagtacataggtcaggcttccatgggggacgccgaaagcagtagcagagaaacagagaaactagggaaacgagaaacgccacggaactcggctatacataggcgcgaccagaggcagaaggcagcggaagcaacgaccaggggaacaccagtacgactctccccacacgggggaacaaacaagagcgagtaccagctttagaaccggatccagcgtaagcgacgacaaaagcgac

SEQ ID NO: 701906 - DNA, 315 bp, Homo sapiens
  misc_feature (182)..(182): n is a, c, g, or t
  misc_feature (191)..(191): n is a, c, g, or t
  misc_feature (231)..(231): n is a, c, g, or t
  misc_feature (239)..(240): n is a, c, g, or t
  misc_feature (242)..(242): n is a, c, g, or t
agggaaggtgaaatgcatccggaggcaccactatgatatgagctggagttaacggaatttgattctggcatgttgatcccgttattagtttgcttacgtagggttctagttctgaaaatgaatagttagatgccaaagcagtgtaaagatggaagtcatgcagtcgggcccatgtgaggtgnccgggccgnagcccccgtttgcagtgccccccagcctgccgggcccagnagagaganngnagcatctttgctactagctgttgctgctacctgcctttgcccgccgacgccccccgccttttgagattaagga

SEQ ID NO: 701907 - DNA, 253 bp, Homo sapiens
  misc_feature (11)..(11): n is a, c, g, or t
  misc_feature (17)..(18): n is a, c, g, or t
  misc_feature (49)..(49): n is a, c, g, or t
  misc_feature (53)..(53): n is a, c, g, or t
  misc_feature (59)..(59): n is a, c, g, or t
  misc_feature (90)..(90): n is a, c, g, or t
  misc_feature (120)..(120): n is a, c, g, or t
  misc_feature (129)..(129): n is a, c, g, or t
  misc_feature (169)..(169): n is a, c, g, or t
  misc_feature (177)..(178): n is a, c, g, or t
  misc_feature (180)..(180): n is a, c, g, or t
ttcccttctcntggtgnngttgcgtggccgcgtgtgtgcgtgtgtgccncccngcgggngttggttcccggctggggtgggggggcttcnggcgggggcgcccgggggccggggaggtgnccgggccgnagcccccgtttgcagtgccccccagcctgccgggcccagnagagaganngnagcatctttgctactagctgttgctgctacctgcctttgcccgccgacgccccccgccttttgagattaagga

SEQ ID NO: 701908 - DNA, 425 bp, Homo sapiens
caggcagcgtgtgggtcccgcactctgcccccatttcccagatgtcccctgcgggagcgggcagccacccaagcctgctggctgcggccccctctcggccaggcattggctcagcccgctgagtggggggtcgtgggccagtccccgaggagctgggcccctgcacaggcacacagggcccggccacacccagcggccccccgcacagccaccagtggggccaccccctaccccattgccaaatccacagacacaattttcggagtccgttgcctcttgtgataccatgtagttttgttttgtaaagtgggtgtgcttggggttccgaggtgggcaatggagttgtctgctccgtttttttttaagacaccgaatgggaatgtaaaaagttctctgcatacctcttttaaaccgcccaaaatctc

SEQ ID NO: 701909 - DNA, 588 bp, Homo sapiens
aaggtttatcgaactgcacgttgatttattgtcatcaccataaggactgccatggatgtaggaacagggtgtcttttgctcttaaaatgatttgaggctgggctagaccattgtccccttggaaaggggtgatatgtctttgtgcagatacagtcctataacaaagggaatgtctttcgaaaccgtctgtggaacggatacggcctgggcgtctacacccagggggcgaggctgtccttctcctattgcgagtatggtgaatgcaatcatatgcatggcgttggagtgcatggggtacccctgctttgtgcacgtggcccgagaaatgccattgtcataaccattaggagtggacgcttatgcgtaagtgccatcttggtaatcaactgcatcgagtatggcagagtgacactcgttcatgcagcaaccagatccattgtgctcagcacagatgcctatatacttactagtgtcattgatccacgtactgaactgcatgccattatgggatgcgaataacttgtcactaggatcatcgccaaaatcaaatccagtgaaggcaccgtgcagcattaacgacgagagata

SEQ ID NO: 701910 - DNA, 358 bp, Homo sapiens
tgtgagacagggtctggctctgttgcccaggcgagagtgcagtggtgtgatctcaggtcactgcaacctgcaacctcctcctctcaggctcaagtgattctcccatctcagccttccgagtagtcgggaccacagtcatgtgccaccacgcttgggtaattttcgttatttcttttttttttggtagagacagagttttgccatgttgcccaggctggtctggaactccttggactcaaaagatttgcctgcctcaggtcccaaagtgctgggattacaggcatgagccacccacgcctggctattagaatttcttttcagtcattcttttaccgatttaactcttgtgttgttgttg

SEQ ID NO: 701911 - DNA, 222 bp, Homo sapiens
cgttcagaggttcaccacattccctttctatgtatatacactctggaaggcggttggaggttcaccacattccctttctatgtgtgtacactctggaaggcgctcggaggatcaccacattccctttctatgtgtatacactctggaaggcgctcggaggatcactacattccctttctatgtgtatacactctggaaggcgctcggaggatcaccacattc

SEQ ID NO: 701912 - DNA, 462 bp, Homo sapiens
tgcatagtacttgttgaagctgatggcatgaagaatcgcttgaatgcaggagagcaaggggtagccatgtggcgagatcatgcatactgcattccagcctgggttactcaacgagagtacgtctcaaataaggattatgcaatggtactcattaacacatggtgcaggatggctatattcccactgactgtgatggggccttccagtgggggagaatgattgggctcaaatctgaatatggcttgggcaagcgggactttataaccaaggagcagggtgggggtcagtggatggaaaattactaagaggaaacactgagcatacagcagtttctagctaaaccgacctaacaggattcttgctgaagacaggccagggtgatcagatagtacctggggtatgggggaagatacagagcccgatcagacatcaagggtgatcagctctcaagggcagagggtt

SEQ ID NO: 701913 - DNA, 438 bp, Homo sapiens
  misc_feature (15)..(16): n is a, c, g, or t
  misc_feature (34)..(34): n is a, c, g, or t
  misc_feature (312)..(312): n is a, c, g, or t
  misc_feature (378)..(378): n is a, c, g, or t
  misc_feature (426)..(426): n is a, c, g, or t
aggtcccttcccttnntatgggagctgttttcangctatttcactctattaaatcttgcaactgcactcttctggtccatgtttcttacggctcgagctgagcttttgctcaccgtccaccactgctgtttgccaccaccgcagacctgccgctgactcccatccctctggatcctgcagggtgtccgctgtgctcctgatccagcgaggcgcccattgccgctcccaattgggctaaaggcttgccattgttcctgcacggctaagtgcctgggtttgttctaattgagctgaacactagtcactgggttncatggttctcttctgtgacccacggcttctaataggaactattaacattaccacatgggcccaagnattccattccttgggaattccgtgaggcccaaggaattccaggttcanggattaggaggg

SEQ ID NO: 701914 - DNA, 732 bp, Homo sapiens
gcgtccagtgccaggctcccctctgtacgccttcaaggtggtatctccggccgtcgactcgttgtggctttgaggctggatctccggactcgacaccccgggtacaagcctgttctgctgtctgtcttcccaccagcgggcagattgtgcctggtgatgcccctgggacgcagagccgttgtcatccgcgcccttggaccgcagccagctcctcacctggcccgggagattcatgatcctgaacccgccgtatggaagggcctcagtgaaggatgtgggcatcaccaattcttcgatgatcctatgttgctggagacttgcccaaccggatgttgtgctcgattaccccctgtgaggtgcgtggactcctgggagctcctgctccctacacgtgggctgcactcctgtacttgaagctgagacctcatatgacgtgggccttcgtgttgtcagagagtgtctggaagctgctgttgccatcttgagaccactctacccacctcccaccccgtagcccccgtgagagaggagccatttggcctcctgcttccttctgtggcctctgccgggctcccttccccaggaaaagagaggagcttgggctcacagaaagagaaggcggatgaacccccacggggccctatctttgggatttacctggaattttattttctaccagcttgaccttaccctggtttgcccagtgacagaccttctgaaaaaaaaaaagaa

SEQ ID NO: 701915 - DNA, 710 bp, Homo sapiens
tccacaccactggatgctggacccctggtctgatgggaaggactgccccaggttgtttgggccgagggcctgagggcccggctccgcgtcctgttccagtccggcccctggaggctggcctgacgcccgacatcctcatcccccctgaggggatccccaggctcggccccaacacggtgaacccaggtggacagggacaccatcctagtcagctttgaacgctgtgtgaggattgtcaacaagcagggcgagcccacggccacactggcacctgagctgacctttgatttccccctcgagactgtggtgtgcctgcacggaccgtgtgctggccttctggagccctgggatgccaggccgaagcctggatacccatgaggtgaccccggagatcacagatgaaaccaggatcttccgagtgcttggggcccaccagagacatcatcctggagagcattccccctgacaacccacgaggcgcacagcaacctctacatcctcacgggccacccgagcacctactaagagcccgcgggcctgtcacggggctccccgccccaccccacgccttagctgcaggcccttttgggccaaggggcccactcctgggccactcccttcccttttgttccaccattcccttctactctttctgcccagagcctgcccctgcacatttgtcctgggaaaaccccggtatttaagagaga

SEQ ID NO: 701916 - DNA, 139 bp, Homo sapiens
cgaatgcagtaggagagactcctcatgaggcttagccctatgtcttactagccagccttagccacaggcaggtgagaaaggcagggccactacctacagcaaagtaggcctcttcatacacttcctcaccagtgtagta

SEQ ID NO: 701917 - DNA, 381 bp, Homo sapiens
cttgcatgctgggtgattagaggatcccaaccgacctccttgccatgtctgtaacatagtttgtgactacactgacctggttgtaaatatcttcctctgtgtactttcgccttcagctcatgctctggtgattcgctcacaatagaagcagctggtttccgtctggaattaccaatttgaaatgccaccagtcgcgcatacctagtagtgtgttctccacccctgggtcacagaacttcgttctccccggctctgtaacccaaggaccctacagcctctgaggcctaacacccaagctcttccttgcagaagagctgagatgctaaggagaccatctggagtgtcataataagcccttgggatttgctgagctcccacatg

SEQ ID NO: 701918 - DNA, 232 bp, Homo sapiens
caggacccccttatttcctttcttattgggggaaatcttatttaatgcagaactgatacttagggtaaatctatatcactaactgcctatctttataaaagaagaagaatctcaaatcattgacctctggcttcccctcttagatactaggataagaaggtggaatttaactctaagcagaaggaagaatattataaaggttgagcagaattcaataaagaaggaggataag

SEQ ID NO: 701919 - DNA, 340 bp, Homo sapiens
acactatacacccccctgctctgaggaagtctggaacacttaggagacgtaagatatacacttgttgtatccacgttggtggactcgggggataagcagaaagaaatagcgtctgagatcataggaatactgatgctggaggctcaccattttcccggacccttattggttgaattaggccatgagtttattagtgctggcagagaaggcagactagtgaatggaaaatctatggaggtactacctatcatttctcactgacctggctacgaaaaaggagaatctgttttattgggaaaaggtgtactgagtgggggagaattgtagaaaacagttgatt

SEQ ID NO: 701920 - DNA, 101 bp, Homo sapiens
ataggatcccctcatcgaaaccctaatgaaggactagtagatggatgggatgacccaagattgcctacggttcgtggtgtactgagaagagggtttgatga

SEQ ID NO: 701921 - DNA, 187 bp, Homo sapiens
tctcctctgccaatggctggcaaactacctgtagctggtctgtcctcaagtgacctatggcatagtgcaacatgtatgataatcttgcagtttcgaagcgacatttagtccacagcagtaaggccgtcgacactcccgcaaccaacctcaataaaaggcctgaatatactgcaaaggttgggctgat

SEQ ID NO: 701922 - DNA, 287 bp, Homo sapiens
cgccctggaatatatctggtgattgactatatatactgaagggcagattgcaactgttagtggagcccatgaaatgtttgtgacccctgatatacatcaggcactgagtctggtccataaattctctgtgggccaacgatgaggggatgctgagattactggctatttagttttcaatctcctgacatttctattcttaaatggcctactacttgcttggctaaatcatctttcagttaaagaacttctgcatcttcgtgcccagtagagcctggaattcaggggat

SEQ ID NO: 701923 - DNA, 220 bp, Homo sapiens
gggcgaacgcaccgtcgagcgggggagcggcgctgccctgttggagatccgcggaggccgacaggattcgttggctgccgtccccctgctgtacattgggttaaaaacgacaaccaacatcagccatgaaaggatccaaggtcgcagcagtactagcccaagcatcatcaatgaaggtgttattattaacggtcattctcatgaggtggacaatccattt

SEQ ID NO: 701924 - DNA, 472 bp, Homo sapiens
ttgagtcgcctgggacgggagctgagccaaagtgatcatcgtggacaatttctcctgcctcctacatcttccatcctgagaatgcagtgcccgtgcaagtcctggtttgacgacatgacagacacggagctgttggacctcatcccgttcttcgagggcctgagcagggaagacgatgtctacagcatgctgcacagactctgtagcaggtagccctgccttggcccatctgtgcctgtgcactctggaaccctggctcaggggacccgcccggcctcggctcactgagtgcagcccaggaagactccgtgctccgggccacagggtgaatgtcaccatgcctacctggtttgttttgttttgtttttttaaagaacagaaacaactattttaaaggaaaaaaaaaaactcttttaatagatttcataaacggactgcattttacaagattcgattttcttaaaaacatacc

SEQ ID NO: 701925 - DNA, 528 bp, Homo sapiens
  misc_feature (1)..(1): n is a, c, g, or t
  misc_feature (59)..(59): n is a, c, g, or t
  misc_feature (102)..(102): n is a, c, g, or t
  misc_feature (113)..(113): n is a, c, g, or t
  misc_feature (132)..(132): n is a, c, g, or t
  misc_feature (140)..(140): n is a, c, g, or t
  misc_feature (172)..(172): n is a, c, g, or t
  misc_feature (203)..(203): n is a, c, g, or t
  misc_feature (206)..(206): n is a, c, g, or t
  misc_feature (220)..(220): n is a, c, g, or t
  misc_feature (229)..(230): n is a, c, g, or t
  misc_feature (235)..(235): n is a, c, g, or t
  misc_feature (246)..(246): n is a, c, g, or t
  misc_feature (250)..(250): n is a, c, g, or t
  misc_feature (269)..(269): n is a, c, g, or t
  misc_feature (281)..(282): n is a, c, g, or t
  misc_feature (287)..(287): n is a, c, g, or t
  misc_feature (289)..(289): n is a, c, g, or t
  misc_feature (293)..(293): n is a, c, g, or t
  misc_feature (297)..(298): n is a, c, g, or t
  misc_feature (302)..(302): n is a, c, g, or t
  misc_feature (307)..(307): n is a, c, g, or t
  misc_feature (320)..(320): n is a, c, g, or t
  misc_feature (340)..(340): n is a, c, g, or t
  misc_feature (346)..(346): n is a, c, g, or t
  misc_feature (354)..(354): n is a, c, g, or t
  misc_feature (357)..(357): n is a, c, g, or t
  misc_feature (359)..(359): n is a, c, g, or t
  misc_feature (383)..(383): n is a, c, g, or t
  misc_feature (392)..(394): n is a, c, g, or t
  misc_feature (409)..(409): n is a, c, g, or t
  misc_feature (432)..(432): n is a, c, g, or t
  misc_feature (469)..(469): n is a, c, g, or t
  misc_feature (489)..(489): n is a, c, g, or t
  misc_feature (497)..(497): n is a, c, g, or t
  misc_feature (519)..(519): n is a, c, g, or t
nccctcagcagaaaatgatacagtttatagaaaacctccccgcccctcccacaccccanttaaaaactacaaaaaaatctcccctccttccctacgatgtcntggtagtctgnctcctccagtggcactgcngctctggngtggccagctcaccacagcaccctccccttcnccttggggggggggggggtgctggtggttanggnggttaaaaccattngttccagtnntgccngttcccaaacntgcncttccttcctttcccccanggtctggggccnnggggnangggnccgnnatgngcccngccatggggggcnactcgggggggggaaatttngcccangggggttngangngttcccatttacctcctccctccncccccctcnnnaaagaaaaaaaggcngtttagggtttttttcccacccnaattggttccccctcaggcctggggaaaagccccagntgtcccgtcttgcgggggtnctgggaanctccgggctcttctttccttgngcctccctt

SEQ ID NO: 701926 - DNA, 895 bp, Homo sapiens
aaggaagtaagctctcagagatcctaacacgggctgggaacctctgactcagagcatgtctttaaagagtccaccatctggccaggcgcggtggcacatgcctgtaatcccagtcactttgggaggccgaggcgggtggatcacgaggtcaggagttggagaccagtctggcaactatagtgaaaccccatctctaataaaaggtacaaagaaattagctgggcgtggtggcgatggcgccttgtaattcccagcttactttgggaggctgagacaggagaatcacttgaaccctaggaggcggaggttgcaggtgagccagagatcatgccattgctactccagcttgggtgaccagtgcgagtactccatcatcagagactgaaactgaatagatagaatagactcgcatgtttgtgtcgacctgggacggcgtgggtatcatccccggaaaatggtccagaacccttggaggcagtgcccatggcgtgggcctaaatcacacctgggggggttgagggcgtcaaaatggtcgccctgtccacccaaatatgaaataccaccgtgtcgctaacactattgccagaactaagcaaatgatgagtacctgtgtggtcgcggggggcggcgcactggtagaattctacgaaaattggggaaggctgcacgcacagagaaatctctttggagaccctaatgagtgcataagggttgtggttgacaccatgaatggtggcccacgctgggacaaagggggtgaggggccctggtctgccaaagacaacgtcccacgtctgcgttggaccccttggaaacccggcggtgggggccgcggcttgaacccaactggagggaatgccctggaactctaacacggactgtggtaaggttccaa

SEQ ID NO: 701927 - DNA, 660 bp, Homo sapiens
  misc_feature (26)..(26): n is a, c, g, or t
  misc_feature (233)..(233): n is a, c, g, or t
ccagacaccacgactcatgcctgtantcccagcactttgggaggccgaggcgggcagagcacttgaggtggggagtttgagaccagcccggccaacttggtgaaaccccacctctactgaaaaacatacaaaaattagctgggcgtgatggtgcatgcctgtagtcccagccacttgggaggctgaggcatgagaatcgcttgaacccaggaggcagaggttgtagtgagccnagatcacatcagcacactctagcctgggtgacagagcgagactctgactcaaaaaataaataaaataaatatcacttacattagatatacccaaggggtggtctatagagacttggaagcagtggttattgcaacaggggcacggaagtcatctgctatgccagggtgcccaggggatactcggggtgggtggcatggtgctgctggggactcaccgcacaggacgctctgattgacgcactgccaggagtagcgctctgtcttgggctgcagccggcctcctcagctcgagtgtaacaacagtcgtggccatggcagcacctgcggatgtcacatgggcaggacagcaggtgggtgaagctctctcctggccctcctctcttgccaggaccatgggtgactgaagacccccagggagcacagcatc

SEQ ID NO: 701928 - DNA, 139 bp, Homo sapiens
ctactctgtatgccaatatcaaaaaggcactctgttgttcattagagaataggtggggtgtaacgtgctcatagagctgctgcagtcacctgcttatgcttcccaggatggctgtagcaaactatgccaagctgaagtt

SEQ ID NO: 701929 - DNA, 602 bp, Homo sapiens
gcgtgatcacagttcactgcagcctcgacctccccaggctcaggtgatcttcccacctcagtttttgtatttttaggagagatggggtttcgccatgttgcccagactggtctcgaactcatgggctcaagtgatccacctgcctcagcctcccaaagtgctaggattacaggtgtgagccaccatgcccggccttaagcaactctttaaaaatatgggcaagccacctcacacctgtcagaatggctatgatgaaaaagatgaggccgggcgcagtggctcatgcctgtaatccccagcactttgggaggctgaggaggggggatcatgaggtcaggagatcgaaaccatccttgctaacacggggaaaccctgtctctactaaaaatacaaaatattagccaggtatggtggcacgcgccctgtattcccagctattccgtgaggctgaggcaggaggatccgcttgtacccaagcaggttggggtttgcaatgtgccaggatttcccttactggtctctaccctggcgacagagtgagactccatctttaacttttttcccaattggggggaatgcctccctcgtgcatggagtttgcg

SEQ ID NO: 701930 - DNA, 167 bp, Homo sapiens
tatggcgttgaccaggagatcgagcaagtcaaagcgtagagtcaaagcgattcggttcttatgatatagccatacttcagataggggtacccccatgcaatatagtggctcatacaagtcctcagcatgttaagtcgaaagcctcgcttgcagcttcacaataggtt

SEQ ID NO: 701931 - DNA, 179 bp, Homo sapiens
ggtaatcagaattttagagtaatgtattccttgacaagatatgtttaaatagaacttgagtttttggatgggcgcgggggctcaagctgtaatcccagcactttgggagccaaggcgggcggatcatgaggtcaagagatagagaccatcctggccaacatggtgaaaccctgtctcta

SEQ ID NO: 701932 - DNA, 550 bp, Homo sapiens
  misc_feature (14)..(14): n is a, c, g, or t
  misc_feature (52)..(52): n is a, c, g, or t
  misc_feature (70)..(70): n is a, c, g, or t
  misc_feature (141)..(141): n is a, c, g, or t
  misc_feature (187)..(188): n is a, c, g, or t
aaaaaggcacttgnatggaaagggtaatccatgtgctagggctgccaataanaagcaatagactgggtgncttaaacaagaaatgtgttttcctcacaagttctggaaggctgagggcccaaggtcaaaggttttggcagnccctggtttcttctgaggcccactctctttggctttgcatgatggnnggccctttggcaatgtccctcacgtggtctttcctctgtgctcaagaaatccccatttctgaggccatgcacgttggctcacccctgtaatcccagcactttgggaggctgaggcgggaagatcacttgaggtcaggagttcaagaccagcctggccaacatggcaaaaatcagtctctactaaaaatgaaaaataaattaaaaatttaaaaattagccaggtgtggtggcaggtacctgtaatctcaactactcaggaggctagacagaagaatcgtttgaaccctggaggcagaggttgcacagagctgagatcatgccactgtactccagcctgggggacagagcgagactccatctct

SEQ ID NO: 701933 - DNA, 1068 bp, Homo sapiens
tagagacagggtttcggcatgttgcccaagttggtctggaactcctgggcttaagcagtcctgcctcggcttcccaagaatgctaggattagagccaccatgcccagcctattttgatttgtgtttttttaatgttcctttctaataaatgtaacaaatgatgttctcaagtacgtttccagtttcttttcttttctttcttgttttttttttttttgtgaaaggggagtcctctgttctattcgtcccaggctgtgagttgcaggggcgcgactcatgggcgtcatcgtgagaagctcataccttccgggggttcacaccagttctgcagtgccgtcagcctcccaagttgaacgggcacatacggagggcttgtgtgactagtgcgcgggaataatgttacagatcagagacggggttcggcagctggttagccaggagggtctcaaaaactcattgacctgcaaggtgtatgccgtgcaatttccttcccgatggagtgcgtggtattggcgaggattatggagtcggcttaaaccagagagggcctaaactttgcttgtgcaagttgggattggaacccttttgccgacacggttggtctccacaatggcggtttcgggcttttaccctaattgacttttcatatttttgcaagattaattccctgaatgggctactgataaaatttcagggttgcaaggaagggggcaaactctcttgggaactttctgcaacatgtcagtggcaaagtctgccttctccttttgaacccctaattatctttgcttccgccataccgcaggatcttcttgttgttgaaaaattcatgaccctttcaatggaccagagcggggggcaaactgagcgggaggaagggcgtacaaggcgttcccgattttgcattcacgttgtggggtacacccaaatttccttccccactttagagatgttttaaccctttgaggaacaagcttgtggcaccttttttgtgccaacaaaaaaaaaatgggtcacgctacagggagattcttaacaccgtgtcctcactttgtgagaagcctctac

SEQ ID NO: 701934 - DNA, 513 bp, Homo sapiens
acactgggttcgaagtcctgggtgcatgcatgtggttaggtttcgttttttaacttcatcaatgggagagttagagaaggagtagaggttgcttgtaggcatagctctcaaaacaggctggtattccaattgggccaacccaggtcagtgggattaagttgtagccaatgtaatctatatattaaaaaaagttattttatgttctttttcttgtactaggtctttgaaatctgtatatttttataattgcagcacatctcaattaggactagccacatttcaagcgataaacagccacacacagctagtggttaccataatgtcagtggaactctataattctggcaccaagcctgggcccattccaaagaatctaccctaatacccatttcacaggttagcctagatccatgccacctaaaatcatctcacaaatctctaggttacccagggaatcccgttgcttagattactataaaacacctgtatatttaaaagctcacagtcaggttt

SEQ ID NO: 701935 - DNA, 419 bp, Homo sapiens
tctggtatgcaaaggtccgagtccgagtgtgccaggtgggcagtgtattgatggtgcccgtccgatgcgaggtgagatgcaaactgcaggacaaatcagatgagcagaactgtggaagtgcttcgtttaatagatcagttccgctgtgtcattggtcagtgcattggaaagcacaagaagtgtgatcataatgtggattgcaggtgacaagtgagatgaactggattgttatacgattgaagaaccgagattgacagggcagcaatacggttggttctgtgatgggcgttattgttatgatttttgtgtctggaactgtatactttatctggcagaggatgttgtgtccacgtatgaagggagatggggaaactatgactaatgactatgtagttcatggagcagcttctgtgcctctt

SEQ ID NO: 701936 - DNA, 103 bp, Homo sapiens
attgaatattgactctgtaataaacctaataatgaatgagtaaattacaaaaatactttgtgtaggcatattttgtgaaacatcttttgattttaaatcattt

SEQ ID NO: 701937 - DNA, 234 bp, Homo sapiens
gtgctggcaggatacagagcaacagaactctaattcatgctggtagcagtgcaaatggtaatcgctacttggaaaaactgttgacagtttcttacaaaattaaacatactctacaggctgggtgcagtggcttacgcctgtaatcccaacactttgggaggccgaggtggacgaatcacgaggtcacaagatcaagaccatcctggccaacatgttgaaatggtcgccaatccg

SEQ ID NO: 701938 - DNA, 129 bp, Homo sapiens
acatctcagtgccaggaactgtccatttctctcagagagcaatgatatgctacagctatacccagaccttttataggtaatgacgcagttcacatcttgagagaacacacaccctgtcctcagatttct

SEQ ID NO: 701939 - DNA, 433 bp, Homo sapiens
gagatccagatcatccgtgtccggtcgcagcggatagggtggaagggtgatgcgataaaggtgggtgtagcgttgtcgagttcagaggctgtgtccacggacagttggatcgcttgcggcgcaggtgtttggctgacagagagagacgttgagcgcatttaacatcctaaggatagatatgcagttccttccgcctgagaaatgatcgaggcttcgtgccttgtggacaactaagtgattggtggcgtcctattggttccgaggccgaactcatgtacatctggaaacaggaattctcataaaagacaggtagtacggtcggggttttgatatttgttgcacaactcaccgggctcacatttagaaggacccgcatgtcgttcgtcgaaaccaatcaagtccacctgcttgccgccctgtggttcatcctgtg

SEQ ID NO: 701940 - DNA, 362 bp, Homo sapiens
aggaggtctggaacacagcttccacattgttatttaactcatcaactctatttctgattggcctttcctgttgtagcaagctctcttgcaactgacatctgtgtagcacacctttcaactttcttttgagtgacagctgcttggtctggacgagccatatagccacttcctgtgatggccgttgggccaggcctcagtctggaagctctcttctctcttcgtgccaaggggtcaatgaccacgggctctgaagaaaccctcttcattgtcgttgacaccttgggacttactctagagacacacacatatagtagcaataatatatgtctcatggttttaagtgtgtgaaagctaaaagaacc

SEQ ID NO: 701941 - DNA, 395 bp, Homo sapiens
ctgaattcatgtgatggttatcagaacaagatatagcaatagctaggttagaagacatacagctggtaggcagaagtcaggaaaagtgcttatgtggccaggccattttttcaatactttaggtgtgtcagaaactacgggggttggtgcaaggttcaaaaacttgatggttcttggccatgagcaaaccctcaagattggtggaaatgtatcacatcttacatagctgtagatgtactaccctgagtaaagagcatgtatacttttcacaaatggggatatctgcaaaactcagaaattcaggggctctcataagatttctcctttccctttccttacccttttcctttccctttcccttttcctttccctttccttttcctttctgacccctg

SEQ ID NO: 701942 - DNA, 255 bp, Homo sapiens
ggcacgagtaggggtgagccaccgcccaagacctaaacttaagagaatcttttaatcagttcgtatgttcaacttacttcaggtttttataaagactgccacagactaaacaattttctttttctgttttgcagtttcactattaaaggatttaaaacatgcaaatatagtaaccttacatgacattgttcacacagataaatccttgactttggtgtttgagtatctggtaagcatctcataaaaatcagtatt

SEQ ID NO: 701943 - DNA, 128 bp, Homo sapiens
actgcggctgtttacgttacggactaactactaaactacgttaaacttaacgaactggttactgttacgggtttgtacggtacacacctgctacttacttcctcctactgtgggtaacttgacggacg

SEQ ID NO: 701944 - DNA, 147 bp, Homo sapiens
agggttaccctctaagactccggggctgagcgctaggagccagctggagagctgcggctgcccccaaaggcctggcctgtccagagtatggccacataaggtgtcagaagctccggcccactggccacaccgtgccgcagcctcgtg

SEQ ID NO: 701945 - DNA, 115 bp, Homo sapiens
gggggaccccccccctgccatttgcctacttgccatgtggccagggcttaggtttttttgggcatgcccccctcgcagaatttttgataattaaataaattaggacatgccccca

SEQ ID NO: 701946 - DNA, 176 bp, Homo sapiens
cgagtcgagccggaccccaagaccccttagctattgtgtgttcaggactatgtaagccactttcgtagtctattccgtgtcacctggcagttgtttacaagctcaggtgagtcctagctttattggggagggggtgatctaaaacagtctttacgccggcttaagggacccttgca

SEQ ID NO: 701947 - DNA, 186 bp, Homo sapiens
  misc_feature (15)..(15): n is a, c, g, or t
ttggcttcaactcanaggcgcaaaaagaattatgaaagagaaaattttaataattaaatatttctatttttcaatttgtatttttttcaattttgaatttaaaaatataaactccagtaacatccatgtttgtattatgttccatgcattcaccatagttgagtaaagatccgatttgatgataaa

SEQ ID NO: 701948 - DNA, 136 bp, Homo sapiens
  misc_feature (42)..(42): n is a, c, g, or t
  misc_feature (65)..(65): n is a, c, g, or t
  misc_feature (105)..(105): n is a, c, g, or t
  misc_feature (133)..(133): n is a, c, g, or t
gaccaattttttatttttaaaactagttcttttgtaatgtgntgttcaaaacggaattgaaaacnggcaccccatctctttgaaacatctggtaatttgaattcnagaggtcctttgtgcttcagcccgggcncta

SEQ ID NO: 701949 - DNA, 145 bp, Homo sapiens
  misc_feature (22)..(22): n is a, c, g, or t
  misc_feature (106)..(106): n is a, c, g, or t
aagatgaatttacttttcttanaaaaaaaaaaaaaaaaaaaaaagagtttctggctgatgggtgactcaaagtgcaggactgctgtctcgtggggcagaggggttngcccttctcggagggaacctcctgttccctgtctgagca

SEQ ID NO: 701950 - DNA, 1081 bp, Homo sapiens
aagtatggtgcactggtcaataactttgctgcctgggatcatgtaagtgctaagctaggagcagctgagtagccaaggattattgtagaatagaagccatctcccactgggaactgcagtctgagggtggtcaatctagcagccccatcccctgcctacctgggcctgcagtccgaaccttcgatgcttacactatttgacagaggggatatcagtacgcttccctcctgccagacctggcagacctgggtgtcatggagtactacctgatggatgctgcctcctatgctgcctgtactggccctacggccatgcaagccatgggagacatcagtgcattgaccatatgtgcagctcctgggggaaagacactagcgtagctacagactggcatgtctgccgcacatcttgctgccaatgatctctaccccgtaccccgaatagccagactacagaagatccttcacagatatgtgcctagacgagatcagggataggaacatcaggctccgacgtacacctccactgcgattggccaggaaactggcggacaaacatggaggagagacaccctatgcaacgggatgccaggatggatgtgccctgaacccacagaccgccaccacccttccatgacgaggacaacacaatccataacaggcgcgaacaacggcacagcacaggcgccgaaaccgaccaatggcacgagagcatgccaaagaggacgaggaccagacggccgcgccagacacccatgcaacaccacacaacaaggcaagggaccggtgagaaacaacaaccgacacacacccacacacgagcccgaaacaacaaaagcgcgccaggagcacttgggcacccagtgaaaaaaacataccgacatccagaacccgggtggcaaaaaaggtccacagcaagcagacaaacgacacacgaggatcgacaacaacaggtgcaaacgcacacaccgacaggactagaggcccaccaacaacagaagacgacagacaccacggcagacaagacgatatgaaacaaaaacaaacagcacatacagaaccaccaattacgcacaaacgcc

SEQ ID NO: 701951 - DNA, 724 bp, Homo sapiens
gggggctgctgggactcgcgtcggtgggcgactcccggacgtaggtagtcatgtggggccgggtatctgaggcccttggctattcttatacttttgccacctctaggccatcgatgccgcagtaccgagacctgggaggtagtgcagccagtgctgctgagaaagctttacctcgtagagccatatgaaggcaggtgtggttcgtcgaaatataggctattctgatgggaagttgtgtgttcaaagtaaccagatgatttagttagacagtgtcttgctctattgctcaggctgcaagtgcagtggcttgatcatggctcacttgatcctcgacctcctgggctcaagcggtcctcttgcttcagcctcctgaatggagagactacagtgttggggtcataaaacagaccaagctcaagatgtcaccgacgcttgagaaattccacagtcaactaatgcgattatggtagcccaaggaagcccgcaaatgttaccattggaaactgagtgaatggttgacaatgaagacttttgtcgtgtacttaggaagtaaatatctttttgaatcagagaaagtgttgggacagacagtactttatgtaactagtgggtgtcagaagcttagaggtccattattggtaatgtcttttaattactttagagagctaggatgcaaatgttttcgtaagaaggcttatttacttttggaattgaacaaaattgt

SEQ ID NO: 701952 - DNA, 474 bp, Homo sapiens
atctgtcggaacacctgttcgagcatcggttcgggaccgctgtcggaatagcggacagcatttcccgactggccggagccgatggccagcggcacgcacagcgaggacaggaaaagggcgttgcgcagtacgcgtgtgagcgcgcggctgcgggcgaccggggccgtgctcatccgccgacccgctcctgctggatcagccagcggccgtcgcggcgcaccagcgtcagcgtcttggtcgtgcttgtcttcaggccgaccgccttgtagtgctggcggaacgtggcgtcggcacggtctgcggcgaccgacttcaccttcacgttctcgacgcggacctcgattgcgcccggcttggcgatgcgcgaccggcgctcggtttcccaggcaccgcggggtttgccgtccggtaccttgaagtcggccgcgtaatagccaaggtagctcttcacatccttgcgcgaccaggcggccg

SEQ ID NO: 701953 - DNA, 302 bp, Homo sapiens
tgaggatccccagaggctgaatgggtgcactgcctgcgctgcctcagggcctggtttgcctcagagcagatgatatgcccctactgtttaactgccttgccagacgaattctctccagctgtttcccaagcgcacagggaagccattgaaaagcatgcccgcttccggcagatgtgcaacagtttcttcgtagacctggtgtccaccatttgcttcaaggacaacgctccgcctgagaaggaagtgattgagagcctgctctctctcctcttcgtccaaaaggggcgcttaagagatgctgc

SEQ ID NO: 701954 - DNA, 92 bp, Homo sapiens
tcgatacgacttttttttttttcctaattttgacctgtttcaccagtgttttacccttgactgccccttctgtcgtcttatcgcacccgtat

SEQ ID NO: 701955 - DNA, 124 bp, Homo sapiens
tagctatatcagtgggatgaaggcctgcttacctttgtgtgtgggtgatgaggaggtataaccttccagtaaagtagttgagccttcagaaatgattagggtcacaacttgcacctgtaacatc

SEQ ID NO: 701956 - DNA, 251 bp, Homo sapiens
tggtggcacaggatctctggggaccttgggtgccaaagcatggatccccacccccaaaagccccctggtggctgagtttgacttctactgccaggcctgcagagctcacttatccaggccagtgggcagcaacctaggtctaggagacccctggcaaaagtggaggcagatccatcttcctggccccatagggaggtgctaggggtgagggcagttcaagtgtggagaacaaagtgaatgctcctgcgact

SEQ ID NO: 701957 - DNA, 1666 bp, Homo sapiens
  misc_feature (1)..(1): n is a, c, g, or t
  misc_feature (141)..(141): n is a, c, g, or t
  misc_feature (144)..(144): n is a, c, g, or t
  misc_feature (1270)..(1270): n is a, c, g, or t
  misc_feature (1284)..(1284): n is a, c, g, or t
  misc_feature (1337)..(1337): n is a, c, g, or t
  misc_feature (1357)..(1357): n is a, c, g, or t
ntcggtctgtgggagaggacccacaaagtggtggcgaccaaagaacgcaccgcgcgttttttatccctcgccggcgcccctgtttactttatacgccggtgctctaaatggttagccgaaccgcacccgtgtgggtgggcngcngaaaatttctctgggcaaccagagggaccccaccagcaacacaccaacggcgcggggctttgggccaccaaggaaacccaacgcccgccctcttccctggaataggccggggcgccaacaaaaaagaggggaacccccacaaccaagagcgaaaaaaatggggggtggggacaccacccagactttgtgcttcaaagagagagagacatattggggtaaataggagaggtgggaagaagccaaccccgcgctgaagaggttccacagagatgaaaaggagaaatatttttgggggaaaaagacaacgcccctttccgcgtttctaccccagcggggaccccctcagggcgcaactccacagcaaattgtgcgccactatctggcgatagggttttcctctcacaagagcgtttccccttgtgttgtttttttggaagaaatgggaaaatttcctcttgtcctggggattattgcggccccgcgagatagtgaatagggagagaatgtgcgcgcaacttttgagtgggagagaaatgttttttccacaatgccttgggaggattttatatccctcgtacgaaaagaatatgtgttttctcaacgcgggggtataaaaaaaaaccttcggcggcccgtcggagtgacttataagcttctttcccactcgggcccactcgggagatgttctttataacgcggccgcgcggagccacagcagaaaataggtggtgtttctcacactcggggttccacacaaaagattgggcgccgacagagacacactgtgagtttttgagaagtctttcacacgcttgttggagagtgtctcacacagagctcaacctccgagtgtgggtgtaaactctgggcgtctgtctgtgtcttctgtgttttctctgtgtgtgtgtgggtgtgttttagactctaagaatataccgccaacccacacattcacagagatactcgcgagaagagccccctccttatatggctcaccgcacccacacacacagggtctccccccacaatctccggagaagagaagagatagagagtgtgagaaaatctacatgagaccccgcagagagagggtcgtcacagaccacacaatggagactctgtaganaagagaagttgtgngccacacatatagaatgtgagatgttccacgcagacacgccacatgtggaganaaagagacacatatgagaanaagggctgtgcacacacattctatatttaattcctctctctccacatcgagaggttctttcgcgttatgagaaaagtataaaaatgctcgaaggagaggccccacagtttgagaattgggagaaagctcactggaggcttcactggtgaaaggcacgtaagttcctgggaaaagcccctcggggaacgaagacacacggtgggctataaagttgaaacgagagactgatggatatgaaccccccgtcccagaaatctgtttaaagattccagacttccaatagtggcccaattaaaagtgctatttgtg

SEQ ID NO: 701958 - DNA, 112 bp, Homo sapiens
cgggtcaactttctcactatgtgcttcatccgacaactaatatttcactttacatccaaacatcacttggcttcgaagccggcgcctgatacagccatgagatgttggaagg

SEQ ID NO: 701959 - DNA, 654 bp, Homo sapiens
aacaagttgtacatcaggtcgctgcatgaggtgttaattcaggacgaggcgcgctggttggtgccaggcggtcgtgcggacgcaaacatgcagatctttgtgatgaccctcactggcaaaaccatcacccttgagtgtcgatgcccactgtgacaccatatgagaatgtcaaatgccaaaattcaatgacaaggagggtatcccacctgaccagcagctgtctgatattttgcctgtgcaacacatgcttggatgtgatgtgcctgcgactctactcatgacatcacaaccatacccagcaaatgcagtcccacccatgacagccatgtgtgattagcatgccatggcgacgggtgtgcaatatactttgacgcctatcttctcctgaccagacttgcccatgaaatacaacttgcgacaagatgatctgccgcaagtgctatgctcgccttcaccctcgtgctgtcaacttgccgcaagaagaagtgtggtcacaccaacaacctgcgtacccaatgaagaatggtcaaataagtgttgttacttatccttggaatgtggcatgcctccatgacccagggcccctgatgggcacctgtgatggccatcaagtaaaggtgtaccctttcaattgacttggagcaagcaacaaac

SEQ ID NO: 701960 - DNA, 190 bp, Homo sapiens
atgatccccgttattgtctctttggggatacagtcaacacagctcaagaatgcgtctaatgggcagcctgaagatccattgtcttctaagaccaagctgtcctggaggagtttggtggttacgaagcttgaagctacgaggggatgtagaaaatgaagggcaaagggaaaggttcggaacctagtggctc

SEQ ID NO: 701961 - DNA, 589 bp, Homo sapiens
  misc_feature (12)..(12): n is a, c, g, or t
  misc_feature (541)..(541): n is a, c, g, or t
  misc_feature (583)..(583): n is a, c, g, or t
acaataccaaangcaactcctagagaaataagacaatttttaaattttctactttatattaattagtaactaatttgaaatgtcttaatgtaaaggtggaagatatttctggtccagtcgctagctttaattagttatttctaaaccaatatattttcttcctttctttgggctccatatgttcttctccactgagatctaaatgtatgccctcactgagacacagtaaacaggcatattcataaagagtgctttcttgcaggaatgccctcttgacatcattatgcatataaaaataatcttagaaaataagaaattacaaaagcgagggatgtttgaatgcattcttctgttttactaaagttgttatagattcatctacctcagcattagactgatcttaaaagtattagattccagccattcacccagtgcttgtgccacatccctaccaggtggcaagtccttgtttaaacaccccacaaaggggctatttgctctgcaaatatattgtaaaatgtattatttaattattaatatnttttaactatttatattttagtattacctttcagtcctttgntttctt

SEQ ID NO: 701962 - DNA, 260 bp, Homo sapiens
gctgcgctactactacctcagaatcccgctccttcgtcggcttggtttttcagcatagcactatcgcctacggacatactatatttttattggttattatctatcttccttcactagaaggtaagctccattagggtaagaacttaattttatcaccggcggtatcccagggcttaaaattctgcttaacacaaatacggtggattactgggtagaatgaataaataactaaaaggcaacataatgagggtaccgagctc

SEQ ID NO: 701963 - DNA, 234 bp, Homo sapiens
gtcctgtcccccaggcagatccgactgctgtgaggcacattcctgtccagtgaggcggccactgtgagggagttgatggaccgagctctggagctagaggcacggtgctgggttgaggatgtgcctccccagaggctggacgagcactgccacagggagctggccatcgacatcatccagatcagctcgcaggcccatgggaaggccgagatcatcacgctggacttgggctca

SEQ ID NO: 701964 - DNA, 1123 bp, Homo sapiens
  misc_feature (1123)..(1123): n is a, c, g, or t
tggctctgaaagcaccatgtggcagtggagcgtggcacgggagcgaggcaaccatgcaactgaactcgcaggcagtgccgggacggccccctggcctctctgcgttttgcctttacacactaactgtactgttttttctattcacgtgtgttctagctgcaggactgctaacatggaaaacaggtaactacacagattaacacttcaacaggactttcagacagttaaggttaacgtttctctacgtttaattctgctgctttaccctacaactctgtatgctactaactctctctctgggctggcgctactgggcgacacttgcatcttgcctaacacacactagaggcgtcctcagcggcctgcttctcagcacctctagcacgaagcacccaaggcgaccagctactcctctttagtccaacagggcaacttacctacgtatatgtctgtcaactaccgtaacgcgtcaaacctgtggcttgccttcttgcaataacctcccagaaggccctgaacttggggcggctctttctcccggggctctcttggggtcattccaactaggccccaaggttccccctggaggctgcctagagggattattaggcagtctttccctcagactttggctatgccccaaggggcagccttggggataccgccctcggggacggggggggatccgtctttatgggggggccccaatagggtgacccaaattaccccccaaacgtattctccaggccacacaatggttacaacttaaaggtggggtcctccaacggcatcccaaaagggggggttctttcgagtttttcccaattggaacccacaacggggaccttcccacacgcaagccgcccaagtcggtggcttgcggccttggtcggggtcctccctcccaagatctttcggacgtggccttcccccagcgggcctcgggccgctccccagtgcctgggcccttttggcttggccgcgagcgcccaaacctttgggccgcgcgcggcttctcaacagcgcgtcctcccacgagcccatacgacttctcaaccgccctaatttgctcgggtctctgtaccccctcgctttcgtctctctggcttgcccatttggggcn

SEQ ID NO: 701965 - DNA, 189 bp, Homo sapiens
cggcacgaggccggctcacaggtgctcaccaccgaaaacgcctgtgagcagatggcctgcgagttgttgcttctctttttcttctgcttttagacttttcttcgtttcgttttaaatctgattacaaaaatcaacgtacacttttaattgaaaacgcacacattacgcaaagtaaagaagcatcccaga

SEQ ID NO: 701966 - DNA, 731 bp, Homo sapiens
gtggggaagagaaagatgaggatgaattccaataaatctgaatctgaggacagcatcaggaggaaaggtttacgcttctccattgaggggaaccgatcgacatatgaaaagaggtactcctccccacaccgagctcttggttgagcatccgtgtgctcccatatttgcagccaaggcgaaatagccgagaatcaagccttttgcaggctttagagggcgagcaaaggatgtgggatctgaggaacgacttcggcagatgatgagcagcagcaccgtgtggaggataagcgagagccggtagagattccttgattgtgccccgacgacacggagagagacgcaacaggaacctgagtcgagaccatgtaggtcatcccggatgctgtgcaggtgttatccagcgaatgggaagatgcacaggactgtggattgcaatggtgtggtttcctgtggttggtggagccttcaggttcctacatcgcctgttggacagcttctgccagagggaacaaccacgtgagaagctgagaatgagaagagaggaaggtcaagttctttccacgtgtccatggactttctagaagatccttcccaaagggcaactgagcaatgagtatagccatgcattgctaacaaatacgacgtagaaggaacttgaagaatccacggcagaaatgtccaccctgtggggataaattttcgcaacatattcttaatctgggactgtctca

SEQ ID NO: 701967 - DNA, 468 bp, Homo sapiens
tgaagacaaaatacttttagaaaattacgtaagaagcatagaaaatgaaagggataccttggaatttgagatgcggcatcttcaacgagaatatttaagtttaagtgataaaatttgtaatcagcataatgacccttcaaaaacaacttatatttcaagaagagagaaattccattttgacaactatactcacgaagatacttctagtcctcagagtaggcctttggcttcggatttgaaaggtggaaacaatacacatgcctgccctggctccagaggaaacacaatctctagcttccaaggttgcaagcacacctgttctgtgctccagagacactctgtcttccaagactgctattcaaatattccttgttgaattctgtccaaagctttttctacatttattggaggttatttcaaagttaaagacagaactctcaagcatcattaggatttctcaagattgct

SEQ ID NO: 701968 - DNA, 224 bp, Homo sapiens
  misc_feature (6)..(6): n is a, c, g, or t
  misc_feature (23)..(23): n is a, c, g, or t
  misc_feature (46)..(46): n is a, c, g, or t
  misc_feature (61)..(61): n is a, c, g, or t
  misc_feature (148)..(148): n is a, c, g, or t
ctgcgnaaaagcttcgggcaganctccaacttgcaacacaaccacntgctcctttgaaaanttctttttacacgtgtaagcccaactgagataccgtgatggtgttgatttctctcaatgatgcttactgtctattttagcatagacnatactgtacgtgaacaaatgatcatggatatgttctaataactcatttaataaatatactgtttatctgtttctga

SEQ ID NO: 701969 - DNA, 969 bp, Homo sapiens
tgtttagtagagacagggtctcaccatcctggcaggctggtcttgaactcctgacctcatgacccacctgcctcggcctcccgatgtgctgggactacaggcgtgagccaccgcacccagcccttttttttttaattagccaggcgtggtggtgcaatcctgtggtcccagctactcgggaggctgagatgggaggattgcttgagcccaggaggtcgaggctgcagtgaaccatgatcatggcactgcactccagcctggatgacagcgagactctaaaaataaagagtgatgacagaggagtgtcacctttgaaagaaaaaataaacacgtctccacgctgctgtgactgacgataagcaggagagtggggaagagtacctcccgccagtggaaagacaacagcagaattagaaggcgctatttgggcaaacaccgtaataaacacaggcaacattagcaaaaaatgctagaccttgaggagtcccaggtatttgggaaggcctcccccaagagacatctgtaaagggcaaaacagtcacttcacagtgaaaaacccctggcagaccccgtctcagccgaacggcagcaatgggactgacgggatgcacgtcacctcggtgccactctgagaaaagcacagccttatggtcacggcggtgggagacaccaagacaatactgagcttgaggacggtctgcccgaatgacagggccagtggtctggggacagtacgatgtcccaaaccacagacgctgactggggacactctagattaacgcggggggggggggcgcaatgcccaccacggggggggtgtacacagaccactgggccctccagaggcggccgcctaaagatgggcccaccccggtagaagggcggcaaaggaaggcgccgccggcaagccagaaggagggaaaacagaccggaggccacacgctccacgccgcaaaaaaagccgggtta

SEQ ID NO: 701970 - DNA, 142 bp, Homo sapiens
gaggggcgctcctaagggtacaaactgacgctcactctaggacttcccaagacacacttagacacggagcccaccccaaggacctcccaccgtgcatgagacaggacagacccgatgccaagctggacctacctagactagt

SEQ ID NO: 701971 - DNA, 189 bp, Homo sapiens
ctcatgtatgcacgatgttctcctgccccaggaaactgctgagatcacctccacagcctgtcgccgggtcaccaatagcaacttctggcagtcctcccttctaatagtcagatgcccgagggcaggggaagcttctgtctccagcttcccgtagtaccagtgacacgtctcgccgagccccagctgcgg

SEQ ID NO: 701972 - DNA, 131 bp, Homo sapiens
gtgatgccagtgatgacagcattttcagagccaaggatagactgagttggaaatcagctgaaatgaatacatgactgggaataatggggcctgcctgtgaggcctctgaaataatagaaggcaagatgaag

SEQ ID NO: 701973 - DNA, 377 bp, Homo sapiens
taccggacactgggctgtgctggaaggggctggtgtctgaactggcagagccaagtctgagccccctgatcaacatcactgtgaggcaggagaatagggtctggaggcaggtaacctaatggccaattcatgctgacttcttagaactaaatccaaaggaaaaccccaactttccatccccaagtaacaaaagaaccagaggctactcccttcacaccgacctgcttttctaccaagcagatcaagaactgaaagtacctctgattggtcccctcctgcaagcaatcaagctggtctccggccaagtcttcatttatataggagtgcaactttgtaatttcacttcagcctctgattggttgcttgccacaatgaat

SEQ ID NO: 701974 - DNA, 565 bp, Homo sapiens
acgaatccaatccaggttcccaaatcgcccgcacatccaaccccgttatataaaaaagaccgaaagccggtaaccgacgtactttttgccgactcgtccgccggaacgccggagtagtgccctatagcttcctcgtcccaatccgagcccgacgccccgtgcaaggaaatctacgtcgcggagtcctcctaaccggcttcttaacccgagcgagaaccctagtagaaaaggggtcagcaagaagaacccagggaagactccgaactacaaacggagatccgagaagccttagagaactactaccgcgtggaatctttaggaagggtcacccggccggctctgttatattcgccggactcgcgccgttcgtacttaagaccttaatcaccgtatgtagacgcggagtcttcattcgaaacgtcgtctaaagcgtcggcgactttagccgataaaagataagactaaagggacgactaactggaggggtgagacctagacttagtaacgatactcggatagcctctcgcagcacttctgccggtaaactcgtcggcttcgtcggacg

SEQ ID NO: 701975 - DNA, 769 bp, Homo sapiens
  misc_feature (360)..(360): n is a, c, g, or t
gattcctgtaatggctgtcttcctagaaaggtcgtgtctcgggaaacctcttaatctcagcatgccggagctccaggagagggaagtgtttcaagtcagagtagaattctatatataccattgtcttggcccgtcagagattccactatcatgacctcagtgttcaacacagttgtccttagtcctcatgtcactgcttgttggtgctgccgtgttgtggaaggcagttagaagccggtgatgcaatgcgcccttttggtctacggatagtgtgtttctcagtcattacaggtgcattgtagtgccgtgctcgaggggtaatattgcacgagaaacgacatatggaggagactgtagacnttgtggataggtgcctacgtggatgtccaaaaagcatcaagcccgtgaaagaagctatgtgcgcatgtagaagggctaagtactgaagattttggttgtgtgaaacggtttccacagaatcaggtacatttcaaggggagtctcacattttttcactgtgtttccatgaaaattgggcaacaaaaacatacgattttatagatgggaggagaggaaaatgttggcgtattacgaacaaaattgaggtgcccagaaaatttggaagctattggattggttagtaaggtaagtcgacagaagttaagatgggggaaggtttacataagggtcatagatttcatgagtcgttagaaattcttctcaaacgtattgtggaaaatacggggaagcaagggagggtctggcccag

SEQ ID NO: 701976 - DNA, 420 bp, Homo sapiens
  misc_feature (120)..(120): n is a, c, g, or t
  misc_feature (131)..(131): n is a, c, g, or t
  misc_feature (179)..(179): n is a, c, g, or t
  misc_feature (193)..(193): n is a, c, g, or t
  misc_feature (195)..(196): n is a, c, g, or t
  misc_feature (278)..(278): n is a, c, g, or t
  misc_feature (353)..(353): n is a, c, g, or t
  misc_feature (372)..(372): n is a, c, g, or t
  misc_feature (379)..(380): n is a, c, g, or t
agcttttccagcccgcaactggggacccgcccaaggtcgtacgctccagcacaaagtgggagcactttgtcaaaatttaaggtcggcgagggctggccacggcgcgtctctactaacagnccgcctccgcncgcacctgctccggtgccctccacgccgcccggcgcagggcggggaancagcgcgtccgggncnnccggcccggagcgccgccttacgttggacggagttgatgagcgcccggtactgatggcggatctggcggcaacagccttcgnggcctccgcctccaagctggccgggtccatcatctcgtccccggaatccgacggctctgtgtcctccaggctcgngcgctctggggccttgtcnccgcganncgcggcgggacctgggcgacaaaggggacgcgagcgggag

SEQ ID NO: 701977 - DNA, 1233 bp, Homo sapiens
ccgccgctccgcgcacgcacgcacacacacgatgctggcagaccaacgctggcatgcctcctgcagcagcagaagacggctcgaagcaacatggacaacatgttcgagagctacatcaacaaccttaggcggcagctggagactctgggccaggagaagctgaagctggaggcggagcttggcaacatgcaggggctggtggcagcgcacttcacagcaacacacgctactgagcgactgcacgcactcacactaacccgctacacgcacgcactgcgacgcaaccgaactcttgctccctcactcacacgcacagcgactgctgcgcactgcacacgccttaccactgcacacccaacgggctacgcagccctggcacgcctcctcgccccctgcgacacgcggcctgcacccgcaccgcacgcactcacaccttccctcacgcgccacccctacctactgaccccacggccgcaccccggccacccctgccccctcccccgcactctcgcgcaccccactctgctggctgcctgctccccccggccccccccacgcccgcctcccctggcccccctggcccccccccctccctctgcctgcaccgctcacccggccccccgctaccgcaccgcactccttcgcccaccccgtccacccccgcgcgcctgcccgcctgcccagcccctgctacccaccacctccccgctcctgcaccggacgcttgcccccaccccctgcccctgccgcccgcccccgcgggcactgcacccctgccgcgccgcccccccccgaacctgcgactctcctgccgcacttgacccccggcaccccttcgccccggcctcccgcgcctgccgcactggccgcgcccctcccccgcgcccccacgcgcctcccctgccccggcccgccctcccccacgccccccccccgccccccagctggcccccccccgcatgccccccccccctcgctcgcacctggccgccccccctccccgcgccccacccgcgcctgccccgccccccgccctactccccgcccccgcccaccgctacccctgcccctccacccccaaatcccccccaccccacccctccaccccacccaccccctcgcccctccccccccccccactacccccccccccccaccccaccacccaccccccccgcccctcgccccccccccccccccccccctcccccccaccaacccacccacacatcc

SEQ ID NO: 701978 - DNA, 120 bp, Homo sapiens
agcggagcggtggcgggctgagcggtttcgagccggtgtcggggagcggcggtaccgggcggctgcggggctggctcgaccaagcttgaggtctcggcgtccgcgtcctgcggtgccctg

SEQ ID NO: 701979 - DNA, 414 bp, Homo sapiens
caggcactcagtttgtaagatgaacaaatgaaggaaagaaggaacgaatgaataagggctcatcttgcagagcgttcgcgtctcagcgcgcaccaggcacatcagtgccaaaggtgctgggggtcgggcccagcgcccggcgcggctggaatgggggcggcgaggagctcctcctagccagccgcagggcgggaactgcccaaacgcaggtcgcagcctcactgggttccgcggcggctccgctcagtagggaccgccctgttccctagcccccaatagcctcgccctcataaattcacctgagcaccctggcccaagtcaccccagatccctgggacttcccaggccccgacctcggccgggcgggaggctgatccttaacagcggcccccttcccccattcccggcttctcc

SEQ ID NO: 701980 - DNA, 787 bp, Homo sapiens
  misc_feature (787)..(787): n is a, c, g, or t
atgctgcatcgatcgagctcggtcccgtgctgggaagaaggcgctatgcaggtagcactgggaacaggagacccacctgaggctcagccctagccctcagcccacctggggagtttactacctggggaccccccttgcccatgcctccagctacaaaacaattcaattgctttttttttttggtccaaaataaaacctcagctagctctgccaaaaaaaaaaaacaaaaaaaaaaaaaaaaaaaaaaaagaggggggcgcgcgcgcgcccaagaaggttccccccgagggggcgcccagatacccgcgcggcccccgggttttggggaacaagggggggccccccaataggaggaggagccgcgccaattataatagcgacagcgggccggtgggcgccggcggcttatcacacaacggcgcaggcgaccgggggggaaaacagcgcggccaccgccgcggcgaaacccctcggggagagagggacaccctataaacccgcgaggcgggagggaacaaatatggtgggagaccaaaacattgcgctctccagaggggaatttataaacgcctctctatcgaggggagagacacattgtatcgcagtttgtttaaacgcgtctgtgtaaattacgggtgggggtcaaaacataagctgtgagagatatgttagctgagtgaggtgcgaaggaaaaaactgttgagaggtatacaataggggatatattagattatgtaagaaaaaaattattttatcaccccaggggacccgctttggaggagtaagn

SEQ ID NO: 701981 - DNA, 169 bp, Homo sapiens
gcggccgcctactactactactactactactactgctcgaattcaagcttctaacgatgtacggggacatgagcttcttgccgttgttgcggccgtgcatcatcatgcctccagctacaaaacaattcaattgctttttttttttggtccaaaataaaacctcagctag

SEQ ID NO: 701982 - DNA, 2370 bp, Homo sapiens
  misc_feature (8)..(8): n is a, c, g, or t
  misc_feature (2370)..(2370): n is a, c, g, or t
gaacaatnagctaggtacgaggctgggtgttgaatcggccgaggcttctccgctccttctaggatctccgcctggttcggcccgcctgcctccactcctgcctctaccatgtccatcagggtgacccagaagtcctacaaggtgtccacctctggcccccgggccttcagcagccgctcctacacgagtgggcccggttcccgcatcagctcctcgagcttctcccgagtgggcagcagcaactttcgcggtggcctgggcggcggctatggtggggccagcggcatgggaggcatcaccgcagttacggtcaaccagagcctgctgagcccccttgtcctggaggtggaccccaacatccaggccgtgcgcacccaggagaaggagcagatcaagaccctcaacaacaagtttgcctccttcatagacaaggtacggttcctggagcagcagaacaagatgctggagaccaagtggagcctcctgcagcagcagaagacggctcgaagcaacatggacaacatgttcgagagctacatcaacaaccttaggcggcagctggagactctgggccaggagaagctgaagctggaggcggagcttggcaacatgcaggggctggtggaggacttcaagaacaagtatgaggatgagatcaataagcgtacagagatggagaacgaatttgtcctcatcaagaaggatgtggatgaagcttacatgaacaaggtagagctggagtctcgcctggaagggctgaccgacgagatcaacttcctcaggcagctatatgaagaggagatccgggagctgcagtcccagatctcggacacatctgtggtgctgtccatggacaacagccgctccctggacatggacagcatcattgctgaggtcaaggcacagtacgaggatattgccaaccgcagccgggctgaggctgagagcatgtaccagatcaagtatgaggagctgcagagcctggctgggaagcacggggatgacctgcggcgcacaaagactgagatctctgagatgaaccggaacatcagccggctccaggctgagattgagggcctcaaaggccagagggcttccctggaggccgccattgcagatgccgagcagcgtggagagctggccattaaggatgccaacgccaagttgtccgagctggaggccgccctgcagcgggccaagcaggacatggcgcggcagctgcgtgagtaccaggagctgatgaacgtcaagctggccctggacatcgagatcgccacctacaggaagctgctggagggcgaggagagccggctggagtctgggatgcagaacatgagtattcatacgaagaccaccagcggctatgcaggtggtctgagctcggcctatgggggcctcacaagccccggcctcagctacagcctgggctccagctttggctctggcgcgggctccagctccttcagccgcaccagctcctccagggccgtggttgtgaagaagatcgagacacgtgatgggaagctggtgtctgagtcctctgacgtcctgcccaagtgaacagctgcggcagcccctcccagcctacccctcctgcgctgccccagagcctgggaaggaggccgctatgcagggtagcactgggaacaggagacccacctgaggctcagccctagccctcagcccacctggggagtttactacctggggaccccccttgcccatgcctccagctacaaaacaattcaattgctttttttttttggtccaaaataaaacctcagctagctctgccaaaaaaaaaaaacaaaaaaaaaaaaaaaaaaaaaaaagaggggggcgcgcgcgcgcccaagaaggttccccccgagggggcgcccagatacccgcgcggcccccgggttttggggaacaagggggggccccccaataggaggaggagccgcgccaattataatagcgacagcgggccggtgggcgccggcggcttatcacacaacggcgcaggcgaccgggggggaaaacagcgcggccaccgccgcggcgaaacccctcggggagagagggacaccctataaacccgcgaggcgggagggaacaaatatggtgggagaccaaaacattgcgctctccagaggggaatttataaacgcctctctatcgaggggagagacacattgtatcgcagtttgtttaaacgcgtctgtgtaaattacgggtgggggtcaaaacataagctgtgagagatatgttagctgagtgaggtgcgaaggaaaaaactgttgagaggtatacaataggggatatattagattatgtaagaaaaaaattattttatcaccccaggggacccgctttggaggagtaagn

SEQ ID NO: 701983 - DNA, 1025 bp, Homo sapiens
ggcctttgtcgctatcttctgcgtgccgtccggtcattgccgagtctgtgatatctgtacttgtgtttacggcgttaaagccctgtgtgtcttgctgggtttaaggcagttttgactccctctttatcatcttgtagccacccttgtgctcttcctgaatttactgttttctgttgagctgtaagtttttggatcttatacatgtggcgtgcgaaccatggttcctttgttctgcagttcctttgcttattgtgcttactctcaattagggaggggatggcgtctaatcccccaaacatagtttcctccgacttagaggttagaatgatgttgttctctattcgttttgttgaaagcaggtaaatggaatcctagtcatggcactgttattcagtagttacaaggcttgctgaatgaaccccggaaataccgtgtttttcgctcaaagtcttgcccatcgttggaatggatgagtgaaatttttcttggggccagttgtgtgtcctcagtaggggtgattagacgaggctgtaatgtttctggaccactcaaagacggctatactctacacggagcgttgtttcgtgttagccttcgcgttatgcacacaacgctcggtatacctcctcaggtcggctaccacagctcttaaactcctggtggatacccagggatttacttaatgatcctttgttccttgatcatggagggcttaatacgagcgccagtatatgaggcatttttactgggcctctctatcaaatccgccggaattctcagtaacagtgtgccttctgatgtatccccggacagtagaagatggctggtataattctttggtaatttctcttcagatgttctcttattagtttgagacagccatttttattgttttaacggtaaaatatcagtcagtgctccgggagagtaatttcctatggggtatgcaccctcctgtctgggtggtgaatgtggtttgagaagtaggagagcagatattggtcaccgtgtggctctaaccctgt

SEQ ID NO: 701984 - DNA, 566 bp, Homo sapiens
tccacacatgccagtccttaccggaaccccatgagctggcaggcaagtcgaagggcttgcccacgtatccgccttcgcgagcctgctccagggtgcccacctggattccggcctcgggcagggcgcgaagcacacgttcgagccacatcggtccctcgtaccaccaatggccgaacagttcggtgtcgaacgccgcgatgacatgcgcgggccgcccgatgcggtcggactcggcgatcaggcgctggcgcacggtattcacgaagtcgccgacatggacgtcgatggctccgtcggcacgctcggggtcgtacggcgccttggcttccggtgccacattgcgtccggtaacccgcgcgggcttaaggccggtgtcatggtcgtaggtgtgaagtcgcggtaggcggcatggccgggatagccggacttcggtgaccacacccggtaactgaccgtcagatcgcgcccgaacgccaccacatcggagtcgcccaccggacggcccagtgaggtgtctccctgcagagatggcccgtccaccatgaagtggttgacccctgcggccg

SEQ ID NO: 701985 - DNA, 2394 bp, Homo sapiens
  misc_feature (2394)..(2394): n is a, c, g, or t
gcccgaggacagggaagaggccaaaggcacaccaacaaggtgggtggagaggaaactggtactttaagcttctccgctccttctaggatctccgcctggttcggcccgcctgcctccactcctgcctctaccatgtccatcagggtgacccagaagtcctacaaggtgtccacctctggcccccgggccttcagcagccgctcctacacgagtgggcccggttcccgcatcagctcctcgagcttctcccgagtgggcagcagcaactttcgcggtggcctgggcggcggctatggtggggccagcggcatgggaggcatcaccgcagttacggtcaaccagagcctgctgagcccccttgtcctggaggtggaccccaacatccaggccgtgcgcacccaggagaaggagcagatcaagaccctcaacaacaagtttgcctccttcatagacaaggtacggttcctggagcagcagaacaagatgctggagaccaagtggagcctcctgcagcagcagaagacggctcgaagcaacatggacaacatgttcgagagctacatcaacaaccttaggcggcagctggagactctgggccaggagaagctgaagctggaggcggagcttggcaacatgcaggggctggtggaggacttcaagaacaagtatgaggatgagatcaataagcgtacagagatggagaacgaatttgtcctcatcaagaaggatgtggatgaagcttacatgaacaaggtagagctggagtctcgcctggaagggctgaccgacgagatcaacttcctcaggcagctatatgaagaggagatccgggagctgcagtcccagatctcggacacatctgtggtgctgtccatggacaacagccgctccctggacatggacagcatcattgctgaggtcaaggcacagtacgaggatattgccaaccgcagccgggctgaggctgagagcatgtaccagatcaagtatgaggagctgcagagcctggctgggaagcacggggatgacctgcggcgcacaaagactgagatctctgagatgaaccggaacatcagccggctccaggctgagattgagggcctcaaaggccagagggcttccctggaggccgccattgcagatgccgagcagcgtggagagctggccattaaggatgccaacgccaagttgtccgagctggaggccgccctgcagcgggccaagcaggacatggcgcggcagctgcgtgagtaccaggagctgatgaacgtcaagctggccctggacatcgagatcgccacctacaggaagctgctggagggcgaggagagccggctggagtctgggatgcagaacatgagtattcatacgaagaccaccagcggctatgcaggtggtctgagctcggcctatgggggcctcacaagccccggcctcagctacagcctgggctccagctttggctctggcgcgggctccagctccttcagccgcaccagctcctccagggccgtggttgtgaagaagatcgagacacgtgatgggaagctggtgtctgagtcctctgacgtcctgcccaagtgaacagctgcggcagcccctcccagcctacccctcctgcgctgccccagagcctgggaaggaggccgctatgcagggtagcactgggaacaggagacccacctgaggctcagccctagccctcagcccacctggggagtttactacctggggaccccccttgcccatgcctccagctacaaaacaattcaattgctttttttttttggtccaaaataaaacctcagctagctctgccaaaaaaaaaaaacaaaaaaaaaaaaaaaaaaaaaaaagaggggggcgcgcgcgcgcccaagaaggttccccccgagggggcgcccagatacccgcgcggcccccgggttttggggaacaagggggggccccccaataggaggaggagccgcgccaattataatagcgacagcgggccggtgggcgccggcggcttatcacacaacggcgcaggcgaccgggggggaaaacagcgcggccaccgccgcggcgaaacccctcggggagagagggacaccctataaacccgcgaggcgggagggaacaaatatggtgggagaccaaaacattgcgctctccagaggggaatttataaacgcctctctatcgaggggagagacacattgtatcgcagtttgtttaaacgcgtctgtgtaaattacgggtgggggtcaaaacataagctgtgagagatatgttagctgagtgaggtgcgaaggaaaaaactgttgagaggtatacaataggggatatattagattatgtaagaaaaaaattattttatcaccccaggggacccgctttggaggagtaagn

SEQ ID NO: 701986 - DNA, 1376 bp, Homo sapiens
agtgggccatgtgggccaacgagcaggcgctggcgtacggcctgatcctcatcaccgtggggcatcgtggacaccagatgggcgcttcacccagtggtactattggtgcctactccattgtggctgggcgtgttttgtagtgcctgctgtgagtacccccgtggggaagcggcaagacagggctccaacaatggatgctgctggtggaccagaagcacatgacagccgaggtagaagctagttcgtggcccttttaccaggacattactatagtatcgcggccgcaccatgcatctaacctgaatactcaggatgaccacagaccatggacttaccttggactggaacaacatacacttttgcgaaacacaggagcaatgacacatgaggacacctggccagacagcggcacaatcgtaacaccaataacaatggccgcgcaaggcgcgcatagaaggacgaagcacacgcagcgacacgagcccaaacacacacgaacagccacaaaagacacacaggcacagacggaccacgcaacgaaacaggaaagagcgaacaacccaacaccagaagacaggaccacaggccacgagccagacgaaggaaccgaaggagaccaacagcgacaacagacaagacaagcgcaccaacacagaacagagcacgccgccacacaaacgacaacggccggaaccggagagacagaaaaacaacacccacaagccacacaggcgcgcaccagaggcacgcgcggacgacagaagcaacacacgacaaggggaagaagcggcacgcaagagagacacagcgaaagccggcaaaccaacaacacgccccaacagacgaggaggagaagacgaaaaagacggacagaacacgcccgacacccagaaccaacaacaaaggcaggaaacaacacacagacgcagcgaacgaacagaagagaagacagcagggacaaacaagagagacacacgcgagcagaagcggcgaggaggaaaagacagaggggacgaaagtaaaagccaggcgcaccagaccggagagaggagaaggaggagcacacaaagcgcgaatgagaaggacggaggaagaaacagaagagagacccgaagaggacggcagaaaaacgaacggacaggagaagcgggacgaaagaccgagaaggaggcggaccggaagggccacagggacgagagcggacacaaaaagaaagagaaaggacgaaagaagaacgacgacgaggacgagccggaaggaaaaaaagaaaggaccacaggcggcaaacatggacaagaagagagagaaagaaaacgaggaaaacagcgagcaaaaggaaaacgagggacaggcggcgacggagacagagaacgagg

SEQ ID NO: 701987 - DNA, 1788 bp, Homo sapiens
  misc_feature (8)..(8): n is a, c, g, or t
gaacaatnagctaggtacgaggctgggtgttgaatcggccgaggcttctccgctccttctaggatctccgcctggttcggcccgcctgcctccactcctgcctctaccatgtccatcagggtgacccagaagtcctacaaggtgtccacctctggcccccgggccttcagcagccgctcctacacgagtgggcccggttcccgcatcagctcctcgagcttctcccgagtgggcagcagcaactttcgcggtggcctgggcggcggctatggtggggccagcggcatgggaggcatcaccgcagttacggtcaaccagagcctgctgagcccccttgtcctggaggtggaccccaacatccaggccgtgcgcacccaggagaaggagcagatcaagaccctcaacaacaagtttgcctccttcatagacaaggtacggttcctggagcagcagaacaagatgctggagaccaagtggagcctcctgcagcagcagaagacggctcgaagcaacatggacaacatgttcgagagctacatcaacaaccttaggcggcagctggagactctgggccaggagaagctgaagctggaggcggagcttggcaacatgcaggggctggtggaggacttcaagaacaagtatgaggatgagatcaataagcgtacagagatggagaacgaatttgtcctcatcaagaaggatgtggatgaagcttacatgaacaaggtagagctggagtctcgcctggaagggctgaccgacgagatcaacttcctcaggcagctatatgaagaggagatccgggagctgcagtcccagatctcggacacatctgtggtgctgtccatggacaacagccgctccctggacatggacagcatcattgctgaggtcaaggcacagtacgaggatattgccaaccgcagccgggctgaggctgagagcatgtaccagatcaagtatgaggagctgcagagcctggctgggaagcacggggatgacctgcggcgcacaaagactgagatctctgagatgaaccggaacatcagccggctccaggctgagattgagggcctcaaaggccagagggcttccctggaggccgccattgcagatgccgagcagcgtggagagctggccattaaggatgccaacgccaagttgtccgagctggaggccgccctgcagcgggccaagcaggacatggcgcggcagctgcgtgagtaccaggagctgatgaacgtcaagctggccctggacatcgagatcgccacctacaggaagctgctggagggcgaggagagccggctggagtctgggatgcagaacatgagtattcatacgaagaccaccagcggctatgcaggtggtctgagctcggcctatgggggcctcacaagccccggcctcagctacagcctgggctccagctttggctctggcgcgggctccagctccttcagccgcaccagctcctccagggccgtggttgtgaagaagatcgagacacgtgatgggaagctggtgtctgagtcctctgacgtcctgcccaagtgaacagctgcggcagcccctcccagcctacccctcctgcgctgccccagagcctgggaaggaggccgctatgcagggtagcactgggaacaggagacccacctgaggctcagccctagccctcagcccacctggggagtttactacctggggaccccccttgcccatgcctccagctacaaaacaattcaattgctttttttttttggtccaaaataaaacctcagctag

SEQ ID NO: 701988 - DNA, 157 bp, Homo sapiens
aggaaacacggtatgattgggtgatgtgtggagaccgatgaaagttgaaatgtacattgctgtcgcattcccatgggtcatgagccaatgactggagtgctggagtgtgctgccaggtcaggtcatctttgggttttgcccagtgagctgtgcggcc

SEQ ID NO: 701989 - DNA, 574 bp, Homo sapiens
gtaaggggagtggcggttccccccagaagtttatgtgcttcttttcctaaagggcggttggccaaaccaggggttcattcggaggggcccccaacaccccactgtggggagctatctcttcaatggcccacatggtggtttgtcccccctgggttttcaacaaacctcccggtggtaaagcttctctccgcttgaggcaaataatcccgcaggagtgggtatcgcagaggtgcccaaagaagggcagccctgctggagaaggtattcatccttggaacaagatcattttgtgggagctcagtcatcctctgtgcgaacacactacactaccaggagtgtaaaccccaccgacgcttgtcttgataaccaccgctagtgatcctcttataccattgtctcgaacaaggatttctcacccaatttttgactacaatcaagcccacatgatgagaatattcatggcataatttctttgcgaagccgtgtatacgtaggttggctatagacttcatgttacacgactataaataaattttatgtggtcaaccgctgtacaaaaaatagtaagagaaaa

SEQ ID NO: 701990 - DNA, 1941 bp, Homo sapiens
  misc_feature (8)..(8): n is a, c, g, or t
gaacaatnagctaggtacgaggctgggtgttgaatcggccgaggcttctccgctccttctaggatctccgcctggttcggcccgcctgcctccactcctgcctctaccatgtccatcagggtgacccagaagtcctacaaggtgtccacctctggcccccgggccttcagcagccgctcctacacgagtgggcccggttcccgcatcagctcctcgagcttctcccgagtgggcagcagcaactttcgcggtggcctgggcggcggctatggtggggccagcggcatgggaggcatcaccgcagttacggtcaaccagagcctgctgagcccccttgtcctggaggtggaccccaacatccaggccgtgcgcacccaggagaaggagcagatcaagaccctcaacaacaagtttgcctccttcatagacaaggtacggttcctggagcagcagaacaagatgctggagaccaagtggagcctcctgcagcagcagaagacggctcgaagcaacatggacaacatgttcgagagctacatcaacaaccttaggcggcagctggagactctgggccaggagaagctgaagctggaggcggagcttggcaacatgcaggggctggtggaggacttcaagaacaagtatgaggatgagatcaataagcgtacagagatggagaacgaatttgtcctcatcaagaaggatgtggatgaagcttacatgaacaaggtagagctggagtctcgcctggaagggctgaccgacgagatcaacttcctcaggcagctatatgaagaggagatccgggagctgcagtcccagatctcggacacatctgtggtgctgtccatggacaacagccgctccctggacatggacagcatcattgctgaggtcaaggcacagtacgaggatattgccaaccgcagccgggctgaggctgagagcatgtaccagatcaagtatgaggagctgcagagcctggctgggaagcacggggatgacctgcggcgcacaaagactgagatctctgagatgaaccggaacatcagccggctccaggctgagattgagggcctcaaaggccagagggcttccctggaggccgccattgcagatgccgagcagcgtggagagctggccattaaggatgccaacgccaagttgtccgagctggaggccgccctgcagcgggccaagcaggacatggcgcggcagctgcgtgagtaccaggagctgatgaacgtcaagctggccctggacatcgagatcgccacctacaggaagctgctggagggcgaggagagccggctggagtctgggatgcagaacatgagtattcatacgaagaccaccagcggctatgcaggtggtctgagctcggcctatgggggcctcacaagccccggcctcagctacagcctgggctccagctttggctctggcgcgggctccagctccttcagccgcaccagctcctccagggccgtggttgtgaagaagatcgagacacgtgatgggaagctggtgtctgagtcctctgacgtcctgcccaagtgaacagctgcggcagcccctcccagcctacccctcctgcgctgccccagagcctgggaaggaggccgctatgcagggtagcactgggaacaggagacccacctgaggctcagccctagccctcagcccacctggggagtttactacctggggaccccccttgcccatgcctccagctacaaaacaattcaattgctttttttttttggtccaaaataaaacctcagctagttctggccaatgttcacaaaaaattaataactgaaaatacctcgagagggcaatttggtaccgggtcggggacccatagaggatagaacatagggcccaggggtagtagcgtgtaccagagtcccacttctgctgtgacccaggcgggtgcaa

SEQ ID NO: 701991 - DNA, 331 bp, Homo sapiens
cttatttaggattccctccttgaaaattttgcccccaggccccccagggaaatttatagttttccatttagttgtcattattgcccggccttgggattattagtcattggtaagcaactaaaacttcccccggtcaaaaaaggttttattgttcaaaagaaggaaaaacccctgaactttttaaaaaaatttccttttttggataggtttttaacccgttcaaaaaaaaactttgtccaaaaaatggagggggatggggccctttttaaaaacccggatggaaaccccccttccctgggggacctttttaaataaaaaattttacccggga

SEQ ID NO: 701992 - DNA, 1970 bp, Homo sapiens
  misc_feature (8)..(8): n is a, c, g, or t
gaacaatnagctaggtacgaggctgggtgttgaatcggccgaggcttctccgctccttctaggatctccgcctggttcggcccgcctgcctccactcctgcctctaccatgtccatcagggtgacccagaagtcctacaaggtgtccacctctggcccccgggccttcagcagccgctcctacacgagtgggcccggttcccgcatcagctcctcgagcttctcccgagtgggcagcagcaactttcgcggtggcctgggcggcggctatggtggggccagcggcatgggaggcatcaccgcagttacggtcaaccagagcctgctgagcccccttgtcctggaggtggaccccaacatccaggccgtgcgcacccaggagaaggagcagatcaagaccctcaacaacaagtttgcctccttcatagacaaggtacggttcctggagcagcagaacaagatgctggagaccaagtggagcctcctgcagcagcagaagacggctcgaagcaacatggacaacatgttcgagagctacatcaacaaccttaggcggcagctggagactctgggccaggagaagctgaagctggaggcggagcttggcaacatgcaggggctggtggaggacttcaagaacaagtatgaggatgagatcaataagcgtacagagatggagaacgaatttgtcctcatcaagaaggatgtggatgaagcttacatgaacaaggtagagctggagtctcgcctggaagggctgaccgacgagatcaacttcctcaggcagctatatgaagaggagatccgggagctgcagtcccagatctcggacacatctgtggtgctgtccatggacaacagccgctccctggacatggacagcatcattgctgaggtcaaggcacagtacgaggatattgccaaccgcagccgggctgaggctgagagcatgtaccagatcaagtatgaggagctgcagagcctggctgggaagcacggggatgacctgcggcgcacaaagactgagatctctgagatgaaccggaacatcagccggctccaggctgagattgagggcctcaaaggccagagggcttccctggaggccgccattgcagatgccgagcagcgtggagagctggccattaaggatgccaacgccaagttgtccgagctggaggccgccctgcagcgggccaagcaggacatggcgcggcagctgcgtgagtaccaggagctgatgaacgtcaagctggccctggacatcgagatcgccacctacaggaagctgctggagggcgaggagagccggctggagtctgggatgcagaacatgagtattcatacgaagaccaccagcggctatgcaggtggtctgagctcggcctatgggggcctcacaagccccggcctcagctacagcctgggctccagctttggctctggcgcgggctccagctccttcagccgcaccagctcctccagggccgtggttgtgaagaagatcgagacacgtgatgggaagctggtgtctgagtcctctgacgtcctgcccaagtgaacagctgcggcagcccctcccagcctacccctcctgcgctgccccagagcctgggaaggaggccgctatgcagggtagcactgggaacaggagacccacctgaggctcagccctagccctcagcccacctggggagtttactacctggggaccccccttgcccatgcctccagttatcagacaatgcaacttgcaacttctcagtgcgaaaaatgagagctcgggtagctggtgctaagacaaggaaaagtgagcaacagggggggcggggcaagaaaaggtgcccggggagcccaatttatccgtggccgcttgtgtgggaagggggcccaatggaagggtgtaaaagaaacgggggccaaacaaggcggagggaaaccgacggtgaaccttggagcccgcaccggggg

SEQ ID NO: 701993 - DNA, 1703 bp, Homo sapiens
  misc_feature (8)..(8): n is a, c, g, or t
gaacaatnagctaggtacgaggctgggtgttgaatcggccgaggcttctccgctccttctaggatctccgcctggttcggcccgcctgcctccactcctgcctctaccatgtccatcagggtgacccagaagtcctacaaggtgtccacctctggcccccgggccttcagcagccgctcctacacgagtgggcccggttcccgcatcagctcctcgagcttctcccgagtgggcagcagcaactttcgcggtggcctgggcggcggctatggtggggccagcggcatgggaggcatcaccgcagttacggtcaaccagagcctgctgagcccccttgtcctggaggtggaccccaacatccaggccgtgcgcacccaggagaaggagcagatcaagaccctcaacaacaagtttgcctccttcatagacaaggtacggttcctggagcagcagaacaagatgctggagaccaagtggagcctcctgcagcagcagaagacggctcgaagcaacatggacaacatgttcgagagctacatcaacaaccttaggcggcagctggagactctgggccaggagaagctgaagctggaggcggagcttggcaacatgcaggggctggtggaggacttcaagaacaagtatgaggatgagatcaataagcgtacagagatggagaacgaatttgtcctcatcaagaaggatgtggatgaagcttacatgaacaaggtagagctggagtctcgcctggaagggctgaccgacgagatcaacttcctcaggcagctatatgaagaggagatccgggagctgcagtcccagatctcggacacatctgtggtgctgtccatggacaacagccgctccctggacatggacagcatcattgctgaggtcaaggcacagtacgaggatattgccaaccgcagccgggctgaggctgagagcatgtaccagatcaagtatgaggagctgcagagcctggctgggaagcacggggatgacctgcggcgcacaaagactgagatctctgagatgaaccggaacatcagccggctccaggctgagattgagggcctcaaaggccagagggcttccctggaggccgccattgcagatgccgagcagcgtggagagctggccattaaggatgccaacgccaagttgtccgagctggaggccgccctgcagcgggccaagcaggacatggcgcggcagctgcgtgagtaccaggagctgatgaacgtcaagctggccctggacatcgagatcgccacctacaggaagctgctggagggcgaggagagccggctggagtctgggatgcagaacatgagtattcatacgaagaccaccagcggctatgcaggtggtctgagctcggcctatgggggcctcacaagccccggcctcagctacagcctgggctccagctttggctctggcgcgggctccagctccttcagccgcaccagctcctccagggccgtggttgtgaagaagatcgagacacgtgatgggaagctggtgtctgagtcctctgacgtcctgcccaagtgaacagctgcggcagcctccaactaccctctggctgccaactggaagaccgtttcaggtacctggacacgaacccctaagtactgctcaccctgggtttatctgggcccttgctcccgaaaactcatgttttgcaaaacctttca

SEQ ID NO: 701994 - DNA, 1534 bp, Homo sapiens
  misc_feature (8)..(8): n is a, c, g, or t
  misc_feature (1434)..(1434): n is a, c, g, or t
  misc_feature (1436)..(1436): n is a, c, g, or t
  misc_feature (1441)..(1441): n is a, c, g, or t
  misc_feature (1459)..(1460): n is a, c, g, or t
  misc_feature (1470)..(1470): n is a, c, g, or t
gaacaatnagctaggtacgaggctgggtgttgaatcggccgaggcttctccgctccttctaggatctccgcctggttcggcccgcctgcctccactcctgcctctaccatgtccatcagggtgacccagaagtcctacaaggtgtccacctctggcccccgggccttcagcagccgctcctacacgagtgggcccggttcccgcatcagctcctcgagcttctcccgagtgggcagcagcaactttcgcggtggcctgggcggcggctatggtggggccagcggcatgggaggcatcaccgcagttacggtcaaccagagcctgctgagcccccttgtcctggaggtggaccccaacatccaggccgtgcgcacccaggagaaggagcagatcaagaccctcaacaacaagtttgcctccttcatagacaaggtacggttcctggagcagcagaacaagatgctggagaccaagtggagcctcctgcagcagcagaagacggctcgaagcaacatggacaacatgttcgagagctacatcaacaaccttaggcggcagctggagactctgggccaggagaagctgaagctggaggcggagcttggcaacatgcaggggctggtggaggacttcaagaacaagtatgaggatgagatcaataagcgtacagagatggagaacgaatttgtcctcatcaagaaggatgtggatgaagcttacatgaacaaggtagagctggagtctcgcctggaagggctgaccgacgagatcaacttcctcaggcagctatatgaagaggagatccgggagctgcagtcccagatctcggacacatctgtggtgctgtccatggacaacagccgctccctggacatggacagcatcattgctgaggtcaaggcacagtacgaggatattgccaaccgcagccgggctgaggctgagagcatgtaccagatcaagtatgaggagctgcagagcctggctgggaagcacggggatgacctgcggcgcacaaagactgagatctctgagatgaaccggaacatcagccggctccaggctgagattgagggcctcaaaggccagagggcttccctggaggccgccattgcagatgccgagcagcgtggagagctggccattaaggatgccaacgccaagttgtccgagctggaggccgccctgcagcgggccaagcaggacatggcgcggcagctgcgtgagtaccaggagctgatgaacgtcaagctggccctggacatcgagatcgccacctacaggaagctgctggagggcgaggagagccggctggagtctgggatgcagaacatgagtattcatacgaagaccaccagcggctatgcaggtggtctgagctcggcctatgggggcctcacaagcccggctcagtacagctgggtcagttggtcngngcggntcagtcttcagcgacaannctcaggcggntggaaaaacccacctgttggggacgggttggcccggccccccagaagggggcctccgccctggg

SEQ ID NO: 701995 - DNA, 507 bp, Homo sapiens
  misc_feature (285)..(285): n is a, c, g, or t
  misc_feature (301)..(301): n is a, c, g, or t
  misc_feature (312)..(312): n is a, c, g, or t
aagcccgccctctctggtcctcccaaaccccaaagctgctggagagactttgggggacttttttattttcattttttgcctaacagctttttgtttgttcatagaaaagtcttcgctgcgttttttgatggctctgaagcactgtttgagtagaggtagaaggagggagcgaggaaccgtgaatgaactcgcaggcagtgctgggcggccccagctctctgcattttgcctttaacactaactgtactgttttttctattcacgtgtgtctagctgcaggatgtnacatggaaaacagtanctaaagattanattcaaaggactttcagaaattaaggttaagtttttacatttaatctgctgtttacctaaacttgtacgtataatttttgggtgggtatgggaaattgctttgctaaaaataagatcccagggtgtttcaaacttagagaagaccaagggacagtattttttatcaaaggaatcctattttttcacactatgtct

SEQ ID NO: 701996 - DNA, 485 bp, Homo sapiens
tgagctattgtttcttgtctcattcactcacctttttttttcagacactgcatcctctggtttccaaagctagccctttcccttgagcctgtacatcctcctgacctcatcacctctctcctgttatgaacttagcttctttttcttacagacatgcctgcgtttcctcgaccttcaaaacaaaacccggataaaattcttcaaactttttctttttctgttcccctcagaatctaggccaaccctaaggatgctccgtgatcctctaacaaaatcaggaagggggacgtgagcaccctatagttttggtcacctttctttccacctatgttgtctcatcggtttcgcatggctggcctctatactgcttggcaatgtgcatagtcaagtgccttagcgggtatttagtaagtatgaagttaggagagtgccttcatcatgagccctagttcatgttttcggtcctaaaaaaaaacatttcactt

SEQ ID NO: 701997 - DNA, 475 bp, Homo sapiens
tggtatcagcggcttagctgcactggtggttgggcttagctggggcttgggtttgggctcagctcccaggttcagaatctggtccaagtcctcttcaactctgaacagttccttgtgggcgtccctgtggctagaggctgtgtgcgggccctctcactctcaccaggcgggcgggcagcacgagggagtcacccaggggggatagacccgccgaggtcaggatcatccaatagcttcagggggtccatggatgacacgtaactccgaggggtcctgtggagacagctttctgcccggggcaaagagcccctcatcagggtacacctcctcgtccaagattgggagccggggcgagggcttggctttcaccggccactatgggatgtttcttggggcttcttggagcgcataattgcccgagggtcccacgcctcctcctcctcccaggatatctcaggatcctcgccctttaggg

SEQ ID NO: 701998 - DNA, 147 bp, Homo sapiens
cacgagggtcccccttaaaagcataaaccggaatcgtggattacatgcaacaggggccctgctcaatgaagcgatcacttttacttaacatcgtgtgtcgccattttttaactactacatccaattggtactgcatggcaacactga

SEQ ID NO: 701999 - DNA, 158 bp, Homo sapiens
  misc_feature (57)..(57): n is a, c, g, or t
  misc_feature (60)..(60): n is a, c, g, or t
  misc_feature (63)..(65): n is a, c, g, or t
  misc_feature (67)..(67): n is a, c, g, or t
  misc_feature (74)..(75): n is a, c, g, or t
  misc_feature (77)..(78): n is a, c, g, or t
gtccaccaggctatgatattaaatctagcacataaagccattactagaggtgaaatncangcnnntnctattcnncnncaccatccatttggttgttacagaaaaattcttaactgtaattgatggttggtcccgatgaataggtggatcctctagag

SEQ ID NO: 702000 - DNA, 173 bp, Homo sapiens
gcggtgccttgcaggtcgacgtgtattcgccactgcgtgtgcatgctctcccatggtacaacgttcctgtctgcacactgtgagacaccgatgctgtacctcgcaaagtattgcttcagcatgggagccatggatcgacttctagcatggatcctcgcagttaccctgtagtc

SEQ ID NO: 702001 - DNA, 335 bp, Homo sapiens
tcatcccaacactccagagacccggagacgaagatcgggcgtttagaccaggctgggctaaatgagacgctgtataaaaactaaaatgtaaagaaaaagtaaagaaggcagcagacacactgtggacaagcttattgttgccagtgcctccaaccgcctgatgcagcagttcagactcattgaagagaaacgttgtgggctactgagcaggtgcaggctcttgccaccaatcctgaggggcctgagttcgatctcggagacaagtaggaccaccacagacaaagatgagtaaagcaaagtaatgaaaaataaaagctgtgcaaatgctgaagcca

SEQ ID NO: 702002 - DNA, 1455 bp, Homo sapiens
ggcgcttttccctgccgcacggagccgcagggcccgcctagcgcacgccactgcgcgcccagcccgcgcacactggcactgcgcctccttgcacacccccccaccttccacacacggcacctggccacgccgcgcgcgcttgcgccccactgctgcgcttcaacccacgccccggcccccgcgcacagcactcccgcccagcaccgctacacgcgcccggccaacgcccaacggcgccgcccgcacttcgccttccgccgccccccgccgcctcgcggctccccacttccggcccccatcgctgccgcttgcccccccacggctctctcggctacccaacacccgacactgcttgcccctgccccggccccgctgcgcctttccagcccttgcccacgcgacgcctccacgggccttgcgccccgcgccctttccaccacaccgacacggcttgcgcccccggacccactccgggccattctccttgctgcgcaatcccgacgcgcacgcgccgcgacaccaaagcctcccaaccggcacgcttcccccttgcccacgggccccaaccgtcttgccacccccgcgccctgccacgcggaagctaccccgtccctcccacaacccttcacttccctcccttttccccccacggccaacggcccctcgcgcccccccccaaagcaaaccggccacgaccaagcttccttgcccttgcacacgaaccttgaaaacctcggccccacccccagcctcgacccggcaccccgcgctcacttgacccggctcccgcgacaccggtccttactcaacccacacggaccgacacacgcctccgaagctcatccacctcgcaagcgaaacgagcacacacgaaaactttcccaacaggccccttctcgcccttagctcctcccgctaattgccccccccggctgccccacacggccccgggcctcctctcgggcccctacgcggccaaaaacacagaagcccaacgggcaaccccgccacacaccacccgccctgctcgacccccgcacccccattcacagccccctccctggcggcaactgccgaactccccccccccacccccccccccccccccccccccccccaccccccaccccccccacccccccccccccccccctccccccccgcccccacacacaccccccacccccccgcccccccccccacccccccccccccccccccccccctcccaccacgccagccacacccgcgcgcccccccccaccgcggcccctctctcccccccacgaggctgtccccccccccccccccccacccaccaccccccaccccaccccaacccaccccccccgacccccacccccaccacaccaccccacaacccacccaccccccccacacgccccccgaccacaccaccctcgcccaccgccacgacacccccccccacaacca

SEQ ID NO: 702003 - DNA, 331 bp, Homo sapiens
gatcttgtgaacacaaaagcgggcgggatcctgagcctgtgtctgcaactacaccacagctcatggcaacgccggatcgttaacccactgagcaagggcagtgacctgaacctgcaactcattgttcctagtcggattcgttaaccactgcgccacgacgggaactcccattatcagttttaatttgcttgaggcaggcccacaacttgcaaataggcatataaattgattgaataacatgtttagcagatttaccagattgagcagtagccccaataaatttagagaaagttgtccgtacacacatgaacaaatgatgattttccacaag

SEQ ID NO: 702004 - DNA, 183 bp, Homo sapiens
tgcaatttataaggagctagctggcccagactgattgttacgctgagtgaacatcgcataccccaactttgtccgctgcatcatccccaaccacgatacgaatcgccggcgagctggacccgcatctcgtgctgaacccgcctgcgctgcatacggttttcctcgagtcgcgtccggtactct

SEQ ID NO: 702005 - DNA, 1418 bp, Homo sapiens
  misc_feature (482)..(482): n is a, c, g, or t
  misc_feature (488)..(488): n is a, c, g, or t
  misc_feature (530)..(530): n is a, c, g, or t
  misc_feature (537)..(537): n is a, c, g, or t
  misc_feature (738)..(738): n is a, c, g, or t
gcatctaactgcctatgaaaactaactaggtacagatgtactatagacataatattcatgtgttgcgagttgccctgtaaccttatggatagcatatgagatgctcaagcgggagttgtaatacagacaacaatcggtacagaatcgaactagagtccacctatccagtctgtacgaggaaatggatcatctcacattctgaactcggatggtgcgcatacatgcggaaatcgtgcatacaaaagtattgtctgtggaagctagtgaagtatgtaggcgtaaattgaaagaattattgtatataggaatagtgttataattactatatatgtcgaattaggccacaggttaacttgtagtgtgtactgttcaaaaataattcacttagtgtaggataatatatagcgatttgttctaattctgctattcagtacgatggcaaaagagatgtaagcacttagcaatgtcacagggaacattcnagaggnacacaggaggggtctcggtttttgcttgtctaacaactcagncaatctnagaagtgtgaatatgcaggtttaatatgataactaaggttccgatagtcaatagggggtaagagaaaaggtagttaaagtcgtcgcgaggaagattgtaaaggagtggaaatcctcaatatttccatgaagtttgcattcatactaaaagtatttgccctacgggcatagcacgataacactggccataaaggcaccaccnagaagttctcaaggtgtcaaaatcctacccgcgctgaaaaaaggcaattcaaactttgtgtgtcccccgcaattcggaggtccaacaaaggaggggggccaagaggctccaaatggaattcattggtccaaattcatgcatatttccaattggtcaggttgtaaagacccaccgtgtgtaaggtgcatggaccgatcaatttgagggttgaaatggaggggctttgggcaaaggcgcaaagttaactttcaggggggtccgggggggttagggggcgaggttggagttacacttccccacgacaaacttggtgggaacaaattgcacaaattacttagggtgtttccttgggaatggacttaatgagagagtggaacaggttgtcttcacacaacaggcgtaatgccgttgggaactggagacacggagaactatgggtcctttgttggccaccttggtgatggggtttctttaaacaccatttcgccagtttactgtggcgtcgcacgcgggcttgggggaccacactgaggggtgggaggtataatacccccatccgggtgggttataatcccccccatggggccccatgttggggggagaaaaagggcggccaaaatgtgccaaagggattaagggcgcgtcgacacgtttgtgagaaaaggcatacaacgcaagtg

SEQ ID NO: 702006 - DNA, 2096 bp, Homo sapiens
tgcagacacccttactccagccggagctgggactgttcagtcactgggagaagggatgtgtgtgtctgaagagcttggttgcagaaacttcgcgggctctacaaactgcagtgcgtgtgatgctgagccaaaagacgcttgtttgctgggatggtgcggagatagcagcaccggcagcgatcacagaaagaaccaaatcactagggaggtgaaagctcgagcagaagggagacgcgtcaatggtataggacatagacgagcaggcgaagaacggatagaaagagaagagaaaagcggcgagcagagagcgaaaaggaggcaaaacacaacacgactacgcgggaacgagggcaggaaatattagcaaagggagtactactgacgacacgaggacaattaatagacacaaacaagaaaaccaaaataacaaaagaacaagcaggcgaagaaacaataaaatatataagacaaacaaagccttatacaacaccatacacacaactaaaaaaaaagaaacacaacataaccatcctcaagaacctaaccagatattatttgctatagaaacaaaactcatgtacataaagaaacattcagtaaaatataaaaacagagacaagatacacagtaattaaacaatagaatacatctaacaataataaacaaacctaatctaaataaaaaaaaatctcaaatcagaacaataatatcaaaactaataatcatgactacaaagaagcaacaagacaaacatagaacgtcgaaataagaacatgaatatctagcatggaagataggataaaagaaaatactatacaacaatatgactcactcaacagatagcaagataaatgttgacataagattaactacgacaaaacaatcacatataaacaaccagaactcataaattcacataacaggaaaatacaatagagacactgcaacgaagaaacatataactagcttaactaagaatacgtagaatcactcaatacaagcgcgcacacacaaaggagaagagatgatatactaacatctaactactcgtacatataaatctagagtgacaagataacaacaatgtattatatattatttatagtcttaaactagaagacgcaaggagagcaggaggaggaccagacgccgcagacgtggagagtgaacgaaaggagagacaaggggtaggagactagtactagcgagaagcgggagagcacagaggcgtcagagagcacgaagagacaagcacagggaaggagagggagcgagaagtgaagctcaagaacggagactagcacacgcgagccgcgagagcatcgcggcgtgagtgacggagatactaacggctgcgcgtacgagcacgtcaacgaagcagggggagtcagaagacagctgaatagaacgagctacggtagacagcagagaaggtcagatggagaccggagaagagaagcagatagtagcagcactacggagagagcggctgagagtagtgggagggctcagagaccaggtcgcgaccatgagacgggagctggtggacgctgtagtagtgagctcatcagagtgagcgtaggcagaggagagtgcagagaggacaggagcgagagggagagatgcgaaagagagggagagaacggaggaagcggaatgagcggaacagtggtacgaggtcggcagcagcagacggagacaagaaggggagatagctaagaagagagtgagatacgacagagagatgaggagagaaagagaagagtgcgcggagctgatggggaagagacgagtaagtagagcagcagacaaatggagacgtgagtagacaaggagagtgagatgaagatagcaagcagagcgaatcgcaaagcagagacagagcgaagaagtggagatggaggcggcatgaatgcgagcagtagcataggacaggcagcgagatgagcgcgggcgagagataggagagtagcaagcgcagcgacgcaagggactgctggagagtgcgaactgaggcgctacgagcgagaagagacgcagaagatagcagcgatagagagcagcaactgagagacacgcagcgcagcgcgatagaa

SEQ ID NO: 702007 - DNA, 173 bp, Homo sapiens
ccctagttcagaagtttcaaatagcatgtgataatgatgtaaactaaaactattttcagcttttctcaattaacattattggtagtatacttcatagtgatgtcatctaagttttaagatagtttacagtttgtcaacgtgtggattcttttacacagggtaccgaggctcga

SEQ ID NO: 702008 - DNA, 219 bp, Homo sapiens
acgctaatgtcgaaatattagatataaaaaggaatggcatactgatacatgctacaacgacaggtaactctaagagtataccattatgcagacgtgacataactaatcactaaatagcacacgtatgcatatattccattgcatactgaaatgtacctgaacagagcgaatccagcagtagacagaatagcatactacactggatggctgccatggaac

SEQ ID NO: 702009 - DNA, 130 bp, Homo sapiens
gttctagaggatattgagagacacggggagaggtgggacaggggaaaaatgttaagaagacacaggatgaattagatacaatggtctcgttcgcttacccgtcaaagtctgcttcaggtgtaacaggagt

SEQ ID NO: 702010 - DNA, 138 bp, Homo sapiens
cattattcaggtttaggcaagaagtgctttatatactttttatatatatttttagagacaggatcttgctctgtcactcaggctggagtgcagtggtgcaatcatggttcactgcagccttgaaccccaaggcacaag

SEQ ID NO: 702011 - DNA, 277 bp, Homo sapiens
acatcacacaaattcaggattgagaaaggatatgggatacatatgaagactgttttgttctcagtctttgagactgagggggcgtatatcacccacgctggagtgcagcggcacaatctcggctcaatgcaacctctgcctccggggtatcaagcgattcttgtgcttcagcctcctgagttagctgggattatcaggtgcccgccaccacgcacagctcatttgtgggatctttactagagacggtgtttcaccatgttggccaggctggctctgg

SEQ ID NO: 702012 - DNA, 1234 bp, Homo sapiens
ctgctacatggcttcagctgcgctaaacatgtgtgttaacagattcatgcatcatacctgtccacgcatcgccatgaccctgggtaccccagcctggggacacgtctaccagcttacttggcaaagcacgagctccataaactctcttcagacacactctctcagcagccgtctcagtggcaaaagcgttaattcctctctacactctacaccacacgctaacccagccactccacgcacgcaagtatcaacacgcgcgcacgcacgcctttcaccacttggcacccagaagacgggcgcaacagctctgcgcctgctactcgacgcgctacgcacgactccgtcctcctgcagcacgaagcgcacgcctcgactggaccttggaactgccacacacgtaatcgcccacggacctcaactggctactctccttgcataccgcacctacactctgccgcgcacctgcacaccgtgacctgcaaccgccacgcgcagccacgctgaccacacgctcggcacaccccacggcaactggcaccgcgcaaccgcctccggccactcgaacgcgcaccacgcagccggcaccgcgacctggccccctgacgaccgcggccaacaccgcccaccggccaacccctgggccacacacgtcgccccacatcccacaccccggccgacccagacgacagcgggcacaaacccatccgccacacccagacaacagcttcaccgcccccccggcccgcagcaacgggcccgttcggaccaccacgcaccaccagtcaccggtcaaacaacctcctactccaccccccacgctctgggcggccacacagcgaaacactcctatgccagctgggcaagccccccgctcgcgctccctcaggcaggtcgcagtacacgatcgcctcggaccgagcccgccatacggggcgcacacctcaccgacgacacgctcacgagcccactccccctcactacggcagccgactcacagccgacccacacacacgcggcacccacacaccgaccctgtcggccatccgacatcgccagccccactctgtgcgccaccgccacccctgccgctcaacgctgcctcaccagcccggcgcacctcccccctgccataccccgcccccagccccgctgctccaccacaactccgcagctactgcccccgcacagcgagcaggtgccacacatccccccccccaccaggcggacccacgcc

SEQ ID NO: 702013 - DNA, 93 bp, Homo sapiens
  misc_feature (69)..(69): n is a, c, g, or t
  misc_feature (71)..(71): n is a, c, g, or t
atctccatacttgaggaaccttcaaaggcacttctgggggtaacattagacagcagactactgcgacananactatccttagatggtaacccc

SEQ ID NO: 702014 - DNA, 153 bp, Homo sapiens
ccacaattgataagaaaagcaaacgaactagtgaacaaaaatgagcagaatatctgaacagtgaacttccccagagaggatattcaaatgggcaataagcctgtgaaatggtgtccaatatcattatccctcaggggaaatacacatgggaac

SEQ ID NO: 702015 - DNA, 252 bp, Homo sapiens
ctagcggagttattccaccagcaaagaccaaaaaaacaagaaataataataataataggctgggcacagtgtgctcacacctgtaatcccagcactttgggaggtcatgtgggcagattgcatgagctcaggagaccagcctgggcaacatggtgaaaccctgtctctaccaaaaatacaaaaaattagccgggtgtgggggtgttgcacctgtggtccccagctactaagtgagaccgaggtgtggaggat

SEQ ID NO: 702016 - DNA, 373 bp, Homo sapiens
cgggtgttatcgatgccactggtgtatatcgatagccactggtgtttatacgatgccactggtgtattatcgatgccacctaccgtggcatgtaccctgatactgtgcaaagacccagtccaggaggcctagggctgaggacgtggacctccgggtgaactttgccatgaatgtaggtacgtggctggagcaggggctaaagcctagaggagcgtggggatgcttgagcattggcttctgtgggactccgaaagtttggggaatagaaaggggaacacacagaccttagtggggcaaaaggcccagcgactgtgcctctcccttattgggaatagttcattctgaatctctcattctccgacagtcctaagct

SEQ ID NO: 702017 - DNA, 521 bp, Homo sapiens
ccttcttccatcatcgaccccaccgccgacgcgtgatcgaggcgatgctaccgtcgtagttacatcgacaccgccaggatgagatctaatgacagaagatgctcttcgcttaaatctgtagaatcggctcttggacccagcagataagcgagatgatgtccgtggccaagcgaatcaaaatggaggggcaatgatggcatggaaggtctgacaatgtcgggattgctcacaaggcaggatttggagaatcttgagtgttgccagagtgagttagccaccaaacaggatggcagtggtgtcacgggctatgaagaaaaacttaacgggaatctcaggcctcatggcgagaacaggacgtgctggaagggcaggcaaatgaaaacatcaatgatgagcctgtggatatgagtgctagacggagtgagccagagcgaggaatgctaactccctcaccagacatcattgttttgtctgaccatgaggcttccaggccccggtccagttcccgaatggaagaaaga

SEQ ID NO: 702018 - DNA, 819 bp, Homo sapiens
tgtggtggctcacatctgtaatcccagcactttgggaggccaatcacttgggcccaggagttcaagaccaccctgggcaacatggtgaaactccccaggcatgatggcacgtgcctgtagtcccagctatgcctcccagctgacatgggaggatcccctgagcccgggaggtcgaggctgtgatgggccatgatcatgccactgcactccagcctgggtgacagagtgataccgtctcaaaaaaaaaaaaaaaaaaaaaaaaaaaattttgggccgcatggcccacaaaaaaagcgttcttagaaacaccatgtggtattggggacgactgcggccccaccataagatatcacggtgcacaggagtggcacatagagccggtacccaagggaaaccgccggcccatgcacagtgagaccgggaatccaccacaccaaagtaaaaaacgccccgggggagcccacgacatgcttctagtgaacacactaccagaagggcgacaacgaggagacaacatcaggggaacctaaccacaggggagcacaaaaggagaccccaaaatacaaaaatcagccccccggcgggggtaacacagcacaggagcgaaccagaacaaacaggcaccaccaacgtgcgagagagtatgaaagagcgccgcatgggagacacgaaaaacaacacacaaaaatggagttaagcacaatcacagaaaaacaagcagaagaaaaaagcgacgacacagacatgaacacatgcactcaatagaagtgaaacaaaggagaagcgaaaaaaagcacgacagaaacagcatacaaggca

SEQ ID NO: 702019 - DNA, 295 bp, Homo sapiens
  misc_feature (208)..(210): n is a, c, g, or t
gcaaaggggccagagaagtgttatcatttctagaagatggtatatgtaaagcacctctatgttcaatataagaaatattggaaagacgtcgtcaccaggaccaaggaaccaaaattgcatcttatggtctcaaggggtcgtgtgttttaagtagtctctgattttcagaatgatgaggttgcatttagaaaattcaagctgattactnnngatgttcagggtaaaactccctactaacttcatggcatggatcttacccctgacaaaatgtgttccatggtcaaaaaatggcaga

SEQ ID NO: 702020 - DNA, 316 bp, Homo sapiens
cctttaaaatacagtagaaggccgggcatggtggctcatgcctgtaattctagcactttgggaggccaaggcaggtggattgcctgagctcaggagttcgagaccaccctgggcaacatggtgaaaccctgtctctcctaaaaaaaaaaaaaaaaaaaattacaaaaaatttgccgggcatggtggtgcacacctgtagtcccagccactctaaaggctgaggtacaagaattgcttgagcccagggtcagaggttgcagtgagtggagatcggcgtgcgtgcacctgcgcgacagagcgagactatgtttttttt

SEQ ID NO: 702021 - DNA, 300 bp, Homo sapiens
cggaaaggaattcccccccctaaggggggggcccccgggggggttttttttaaaaaaaaacctttttggttttttgcccttccccggggttttttttgggaacttttttttggggccccccttggtttttttccgggcccctttttgggccccagaaccaatttagggttttccccccccacttgggggggtttttaaaaaaaccccggtttttttttccctttttttttggggctttttttggggtccccagttggtttttttttttttttttttttttatttaaccccttttttttta

SEQ ID NO: 702022 - DNA, 514 bp, Homo sapiens
  misc_feature (11)..(11): n is a, c, g, or t
  misc_feature (148)..(148): n is a, c, g, or t
aaactttttanactgccgaacccccagggtggccggatttttcctccgggttctcaaaaacccaactgttttggctgggagggcggggtgaattccattgggtgggcctttccttttggaaaaaatttttatccgtcccttctgggantggcccaaatgggcccttgcaaaaattgcccccctttttgggggttttttttgacccctttccttaattgggggggggaaaccccccaaaaattggggggccccgttgccccctttggccaaatggggggggcccaatttgggttggggggaattttttttttccaggccccccttgggggccggggttattaaaagttaaccccggggttattttccccaaaccgggggggggctttcctggttccccagggaggggggggatggtgggggtttcttttccctttttttttgttgggcccaaacctcccctttagtttttttttttgggccctttcttttaattaaaaaatttggggccccggga

SEQ ID NO: 702023 - DNA, 540 bp, Homo sapiens
agtccaaagccgcatgcccaactgcctgcaatttttaccttcttcacaaagagctatccagtctgccctagccagttgctgtctggcccctggcccttcatctccatcctcagacccagggatcttccttcactctgtccgggctcggggtggccatggcctctgtttccttctagcctcccctctttccttcgggaggctgggcataggcagattcagtgctacagaccagcctcagaggggtgggggtatcagacacagccccatccccaggaaggcctccagtgccagtgcagaatggcccatgccctttgcccagccctcaccagacctgtgcccggcaggttcgctaagctctggctcggcctgccggctctgcgctccatcgggctcaaaggccggtaacatctcttcttctccaagctcatcggggacacacccattgaccccttccttatggagatgctggaggcgccgcaccaaatgacttaggcctgcgggcccatcctttgtgccacccgttctgccaccttgcttgac

SEQ ID NO: 702024 - DNA, 1256 bp, Homo sapiens
  misc_feature (139)..(139): n is a, c, g, or t
  misc_feature (240)..(240): n is a, c, g, or t
  misc_feature (1094)..(1094): n is a, c, g, or t
  misc_feature (1121)..(1121): n is a, c, g, or t
ggtgccaagatgcgagtgcgtgactatagtagcaggaagccacatactcaagacatgaaccccgatgaccgataaaggttgaatagcatggttggcaacgcgtggacggcaagtggtatacctcaatgctaaacggctnaaggagagcccatgaaaggagtgaatgaccccaattgactagactcagtaaacacacggatctcatatgctcctactagaccttgttggacagtgatactngcccctgaatctagcacaatgttattccagcaagggagcacagtgtacagactaaggaacgtacgtcaagaccgcatcaaaagtcctaccggtatatgaacccagcaaataaagagagcgacgacacgcggttctcagtcgatacgctgatatactaagaatagcgcgaagatagtgttggtatgagctaagaagagcgggacgggataacccagcgggatggccttagagatcgattcagccatagaagattgctctagaagtatttgatctcttatctgtatacgaatgtttgtccctctgaatagacgccatgctggaagccccatcgtgacaaatacacacactctctttacagttcaggacatcggtttgaaggtacacaaccttgacgggaaagacccaggcctacttttatcgcgcaccaggtggaaacgcaaatatcctggacttctagttccccgtaccaaaacgtagagctaacagacaccaaactttgtggagggcccacacgccacgtggggttgggttgtctccttcacattgaaaacgaccaggcaattgggcctttagattgggacttttgacttttatccttggcttcgacccttggaggcaccccataccttagggcttcaccttccaaagattccggaacgattacccctttccttttacaggcataagaggaaagctaacccaatcccaaggaacaccaccattattggttgccgaaaatctcgggccacaagccttatgttccaaaagcccgattaagagtaacgtcacggaggataacattcctaggggctaggattttggcgtagtaacattataacagtcttcaccaggangatttggcccaggttcccttttaatcnttggagacctttgtccccttgtaaccccttctccaaggacggggataaagggagagatgggagaagaggctttttagcccggtaggcacaaaggggcccccccacaaagggaatggaaacccccaagggtggaaa

SEQ ID NO: 702025 - DNA, 382 bp, Homo sapiens
  misc_feature (176)..(176): n is a, c, g, or t
aaaaatggggtcctgttataaagtttaaaggggggttttaatatgaaaagccaattttgggattttgggactaacgcttaagaaggccggtttttgaggggggggggttataattttaatccccagggccaaaaccccgggggaaatttccaatttaatttttgaaggttgggtangggattggcccccccccccttttggggggggggcccaggcaaagggtcaatcaaacccttgggatgttttggagggcctttgcccccaggtaactaaggggtaaagccggtttttttgattaggggatcaaattttttgaattttttttttgaaggttggaacttaccagggataacccaaaacccataaaataattaacttttta

SEQ ID NO: 702026 - DNA, 282 bp, Homo sapiens
acgtgtgttgcaacgcaagctgctggtacttcatcaccaaatagcgctcgctccttcctgggaatcctttttcctagacttcaccaccaaatcgtgtagcgctccttccttcttcccggcttccttcaccaaattggactgggtcccgggactccttttcctatcttcaccacgaactgctgcttgctcgcttgctcctcagtcctagcttcatcaaacactggttcctggaatcctgtctgctgctgtcttcctagattcactgaatccacttctgtgtag

SEQ ID NO: 702027 - DNA, 260 bp, Homo sapiens
gtcagagcggtcaagttaagttgaaatttcgaaagtgaccagtcgtccaaagcacatttgacaaacctaggacccagccaggcaaatgtcaatatccaaggaggtttgatatgatgcgtggggcccagttactagacttcctagacttaagcaatgcttagaatgcttagaataccatgttatggttggaggtttatagcggggttaaaatgggaatttatgcaccttaggtttagaaatgaggtcaacagtttacctta

SEQ ID NO: 702028 - DNA, 1276 bp, Homo sapiens
tatgaaagacacaggcggagacaggcagtatgaaggatcttgtggaaggaagagggcttagactggaagtttaagtggcagggttgtatattgagtagatagagcagagattaatatttaagaggaaagagttacgcgaaagtgcgttaggcttggggatggggagcgctcgagtcgtcgagcttgtaggacagcttgggatcctttgtctgaagggaatcgatagttacagtggtgacgaacctaccttaggatagaatgtctggcacaaaagatcgttctaactctgtgtacaggaagcgaagagatagatagactgtaaagttcagtgtgtggcttttagggtagtgtcgctcttccaacaacttgaccaaaagtcccaccttcggcccttttagttcaatgggtagtgaggagtagaatgcagacttcacttgtagtttccacccatataatggtggtacgctacttagggatttgccagttttttagttaaattattagtgataggcaaaaatcattccgcataaaattggcatggaggaatttcaacttagaggtgaatttctcgtctttcttccggatataaattaaacttactaggttgataagacgggaggtgtcaccggaggagtaactgcactttttatttcggggagagagttctcaaccaaagggaacaaagttatctaaaagtaagttagaggggaaaaataggaggagtcgctttggcctgggtattaatttcgcggggcaaaaggcaatagattttggccaattacgttaacgggcgggggaaaccgttgtgtgggggtctgggaaaaggcatttctaaatttgtgccgtgggaacgacgtaagtttactttttcgaaaggtgtttggacatttccaaggtgggtgatttttaaacattgggaatggttgtgagatagtgccttaagttgttatgggtctaccgagagggtattttactgggaaaagtttggctaaatttggacagtaataagcgtgtttagtgttcggacctttaaacgaacggtttacgggagtatcacatgggtaagagggctaggggggtatagcatgggggtataattgaatgggcccaggttaaagggtctaatattcgagggtaaaagaggagtccttaaaactaagcaacaatttaggtttcatgttctaaattaaagttgatgcgatatttgtaaaggagattgtaccgaaagagatacttatttgaagggactagtgccgttcggtgttaaaggtgatga

SEQ ID NO: 702029 - DNA, 1025 bp, Homo sapiens
  misc_feature (1007)..(1007): n is a, c, g, or t
ttttccataccatcaataccttgtggctttaaatgtgcatccatctttttctgtaagtattctacaccttggctaaatacttctatccttctcaaggtcccattcctaaaaactatacttcctttctctttcatgaatggggatccacttcctttcattaccccagactgctcttttctcgatcactctctgatcctcttactttgaggtcctatcaatctcataatccacttacatctcttattattttatttgttcttttcgtccttatcaacgttcacctaacttttatctcagatgccttctttcaatccttttctgtgtattgactccttccccaggaagtctcgcctctgcttgagaccctccatctggtacgccacccattgcttgttcacagcgactactcatgttctaactctgttgtgcctacccccaagtaccgcgcgcagtgttcatccggctctgtgagcaggacacgcacgttcgtcctgtatcaccctgggcatctcgccttggcaggagatataggcatgcctcattcttcggcattagactaccgctatctctacatgtggctttcttctgtatggcagttttcttacaggaagttttcagagagctagagaatctccaatatatccatcgatcaatactgtgactggcaaccaattcgcgcgcaggatgaatagatgtgattcacacgtggaaggctactgtactgtaggaaagtccctgagttactcatctcgaggccagagtagaaggatacgcgcttgagatcgctggcactgattacgtttctatcagctctgatgccttcttccctttccgagagaacgtagacagagctaaaaggagtggtgtggcgtacattcgcggctcactccggttctgctgcggacaaagttgtgattgaggccggcgacgtagtggcaatcatccttcggctcataagaaccttcggctcttccaccactgagtttaccacacactgttttttggcntactccggggagtgagca

SEQ ID NO: 702030 - DNA, 327 bp, Homo sapiens
ggcgacgacgtcgcgggttcaaacagttgtcgtggtgcacctccggagtggcggggagtacaggtgcgcacgacgacgcgtgtaatcccagcacgttggggaggccatggcgggcggatgacgaggtcaagtgatcaagagcgatcgtggccaacatggtgaaggcccatctctactaaaaatgcaagaattagctgggcctggtggtgccctgtggtcccagttgcttgggaggctgaggcaggaggatcacttcaacctgggaggcggaggttgcagtgagccgagatcgcaccactgcactccagcatggtgacaaagtgagac

SEQ ID NO: 702031 - DNA, 152 bp, Homo sapiens
tttcgggttaataaatttgggggggcgggcaaacccccctttcccgggttttttggtttgccaaaaaaatttttggagggacccccgttttaattttttccgggggcccagaattgaaataaaacccccaccgtttcctttggcccctttga

SEQ ID NO: 702032 - DNA, 415 bp, Homo sapiens
gggtttggggcaaccccttaaaggtgctgttacttcatgtgactgcagtggcgctgccctgtgtgcatcaggaagcttcaacatattatagttgtttgtttgtaggtttgtttattatgatatacagattatctcataccttcctttcgattttttaaaattttaaaacagatttactgccatggctggaactaatcaacactaatttttctattgtatctgtatatatatatgtatgtatgtatattcacacacatgtataatgtaccttttaaaaaatagatttaggggctacaagtacagttttaatgtactcttttaaccatttttaaatgtacagttcagtggcattaattacattcatgcccttatgcagccatcactgctatttccaaaactttttcatcagccccaa

SEQ ID NO: 702033 - DNA, 429 bp, Homo sapiens
caagagcggaagtccatctccaaaaaaaaaagggagtaaggagggagagatagggtaggaaggaaggaagaagggaagttagctgccccaccatggaaactggaattggagagtgcaataataattgaggggagtttggttcctaggttagtgtcaagagttctgaccagaaactgcaggcctggtggagaggacgagttcactgtgtttagattccacatgtaagtgagatcatgaggtatttgcctggcttatttcacttaacataatgtccaggtttttccatgttgtcacgaatggcaggatatccttcagttaagattcagcaaatattttgtgagtacttattatatgtgtggcagtggtatacaaaattgataaatatgtaggttcttctcttaaaaagcttctattctgttgagagagatt

SEQ ID NO: 702034 - DNA, 367 bp, Homo sapiens
  misc_feature (60)..(60): n is a, c, g, or t
  misc_feature (78)..(78): n is a, c, g, or t
  misc_feature (256)..(256): n is a, c, g, or t
  misc_feature (301)..(301): n is a, c, g, or t
  misc_feature (337)..(337): n is a, c, g, or t
ttacgacaccaaatcacccctgcaaataagcgccttgccccgggaagcggctgcgcggcngcttgaaggctttagccngtcagcacgcggtggtaggcgtaagcgaagcctgcattgccacccatccgagcgatatggcgggtcgcaatgcggttgctggatgcggtggtggaaaccatcacgccggagggaaagactcgcagtatcacactggctgatttttattcactccgggaaaaacgccgcacattgaaancgccctgcttcccggtgagcttatcgttgcggtgacgttacctcncacgctcggcggaaaacatatctaccgtaaagtgtngatcgcgcctcctacgcctttgccctggta

SEQ ID NO: 702035 - DNA, 293 bp, Homo sapiens
tggcacgagagcaatatacacgtgtttataaccatcactgtgaacccaccacactcatgctcataaggagaagggataaaaaagtgtaaagagctctaggcaatgttaacccgcctgtccacagagtttgagaactatgtggcagagatcgaggcggattgcaagcacgcacagatgcctttgtgggacaaaggtgtgcaggaaaatcatgaacatgctgccccttttctatccacatacacggaggatactgtggcgggtttacattgacgggcctgacaagttagcattgc

SEQ ID NO: 702036 - DNA, 553 bp, Homo sapiens
ggcttcatttaacgccagaagagaaactggggtgtcgtcgagcaagtcattatttagcaatgtgttaccaaaaataaagattggtcagagtctgccctccgagagctcatcgtagccaccattgctgtcagagtacactcagtctagactctgtgtgctacgccaagaacgggcgggttatcgcgcattggagcaggacagcagtctcgtatacactgcactcgccttgcagggagataaggcgaaaactattggtggcttagacaccatccaggagagtgctttcgatgaagtttaaaacaggagtgacgagagcagaagatctccaatgccatcgatcaatatgtgactggaaccattgggaggatgaagatgttgatcaagtggtcatggcactgtgtgaggaagtccctgagttactcactgtaggcacgacgaaggaaggaactgggttgagaaactgactgaacgtttgcctatcagctctgatgccttcttgccctttccgaggataacgtagacagagctgcaaaggagtggtcgtcggcgtacg

SEQ ID NO: 702037 - DNA, 619 bp, Homo sapiens
gaggagagagagagagagagagagagagagagagagagagagagagagagagagagagagagagagagagagagagagagagagagcgagcgagagagacacagagacaggttcccccccgaaagtaccccctgtgtcaactccaactcttgtctaggtctcatgatacctatgaaaagtgggcagcctatgttgtatacatcctgtagcaaaaagaatgccctgtgcagaagactatctatccgcggtcctgaaccacttatgtgtgttgcctgagaaaacgccagttagtgacagactcaccacatgctgcacagtatccttggtgaacaggcgaccatgcttttcagctctggaagtcgatgaaacatacgttcccacagagtttaatgctgaaacattcaccttccatgcacatatatgcacactttctgagaaggagagacccatcaagaaacacactgcgctttttgagcttgtgaaacacaaccccatgcctcgagccactgaaagctttttttggtgatttccccccttttgttgacaacttcttcccggcttgaccttaaagaaaccctcctttgcctgggagggttccttttccccctccttggttgcg

SEQ ID NO: 702038 - DNA, 482 bp, Homo sapiens
catccttaccccttatgtacctgaagggtgtcatcccagcacaggctgttagtaccgaagcggaagattcgtgtctgaacgctaatacagtttgtctggacctccttccttgtaataaatcgatctctttaacggtcatattcctcttacgttttctaaaattctcctagtagctttaactgattattcaaaatggagacagtgctttgcttcttgattttaagatttgtaaaatttaaaggtacactgcctttatttgattttgcttggagtcactgtgtgaaaattaattgagcgttgacaatctatagttagtaccagcgattttaatcaatatgcaatgatgcagcgtaatggcaaagtattggtttatctgttttgactgatttttttctataaataaagcaaacatacacccatatatgtatgatttatggtgatagaaataaaacggagtcagactattaacccagcaaatatgg

SEQ ID NO: 702039 - DNA, 460 bp, Homo sapiens
gacaccactagaatgcagatgtatactagaatacatgagctcgtgtcatcacagaagtttgtgacataatccttatactcacccaaccaaaggtggctaggaatgaggtgaataggtgagtcatgtatacaggtgttagttgataaaattgttatctattcccaacgctgcagcaagagatgagacatgattctgttattaaggctaaaatactgcatttctagcaatatttctcctttctgatatccccttacactcaagtgtgcagtacttaaaatagagcctggattgcctattattgtggctttaatcaccctttacttggctatgaaatagttcatttcatacctcttggcattatacaacgatgtattgaatttagagaaggggcatgtgctatcttgcccacttacaaatgtagttctcggccattctatggtagtgaggatcctctacagtc

SEQ ID NO: 702040 - DNA, 399 bp, Homo sapiens
tactgtcctcctgctgagattcggctgagcacgagtggtcacactgagcacgcagaagacatacgcttcaaccgtctacagcagatcaccacacactgagggtgttgccaaaggggtcatggcatgtgtggtggcagacacccattggtgacctggcgtttcttgtatccccaaatcgataggccgtgggacacgtggattctgggggcggggtcccgttctggagtccagccccatccctgactgcgctgggtacgtggtcgctgcgggacccggaccggcggaatcacacgcagagcccccaagcccatggcagggatgtcacccggggtggcgaggctctcaagcccgggttcaggctctcaggggagctggcagaaccaggagcgaacacactcc

SEQ ID NO: 702041 - DNA, 460 bp, Homo sapiens
cacctctccctatacccccacacgagaaaagaaggcccttccaggctaaccctccgctcaccttctgtgatggaaccgatttcgcgtctctccaaattcatatgttgaatacttaacctgccatgcgatccgtgattggagataattcctttagggaagcaatgaaggttaaatgaggtcataggtgggggcttaatccaatgggactggggtccctacaagaagaggaagacaccagagctctctgtctccacacacagagaaaagaggctgtctgaggacacaggagaatgtaatagctgtctacaaaccaacaagagaagcctccccagaaaatgaaccctgctggaacttggtcttggactttccacccttcagaactgggacaaaataacagtcaaactaaagctctcttgcgtaaaaaaaacctaaaaaaaaaccctggcccccttggcctaac

SEQ ID NO: 702042 - DNA, 391 bp, Homo sapiens
  misc_feature (21)..(21): n is a, c, g, or t
  misc_feature (43)..(43): n is a, c, g, or t
  misc_feature (361)..(361): n is a, c, g, or t
ccaacaaagacccctgacacnggtgccgatgtgggtggacagncccaaatcatttgtcacatgtacatcctgtgtaacctacccactgcaatcaggataaagaagtccccatcccccacaaggatctccctcccccaccttcccctaactcccggtaacccactaatcgttcatctcttcttattttgtcatttcaagaatgttgtataaatgggagcatagtgtgtaagcattcgggattgtcttttttcactcggcgtcattctcgggagatcatccaggcattgcatgtgtcaacagtttgctcctttttattgctgagtggtattccgtggtgtatgcattggccccctgaaggacncctgggatgtttccagtttggggctattcc

SEQ ID NO: 702043 - DNA, 147 bp, Homo sapiens
ggcacctctcttatcggctctctgtcctcctactttgccctgggtctgtggacttactctgggcagatctccacgaccaaccaccccctcccttgtgcatgtcgatcagcacccttgggggaaagaatttggaaagaggagagtggg

SEQ ID NO: 702044 - DNA, 363 bp, Homo sapiens
  misc_feature (53)..(53): n is a, c, g, or t
gggggggggggggggggaaagggccccccccccctttttttttttccctttgnaaaataagggtttttaccagggtgggggttggggccttttaacccccccccccccccgggggccccccttttttttttttttcccccaaccccccttttcccgggggggttttagtttggggggggggggggggtttcccgggtgggaattggccccccccgtttccccggggggtttccccggggtgtcccttttgggggtttaaaaactgggcccccccccaataaggcccctgggggggggtgggggggggccccccggttttttttttcttttttttttttccaaaaaggggggttttttccctta

SEQ ID NO: 702045 - DNA, 463 bp, Homo sapiens
cggtacccccgatgactccacatccgtactggcccacgggccagtacggatgtgcaggaaggcaggctggtctgtttgtgtgctcagagctggtgccaccaagccctcactagcccttgcccaggaagattttgaggcaggcctgatttcctgtatgtcaggaaatcagccaaaccatgaagggggtccttctgcaagattcccagcactgtttggctgccccaggtgactagcccacacccccccggagagaccttggaggcaggaattgggacacagttgatccccaaatcagagaagcccaggggcctgaccccacaggggtggggctagaagcatgtcacacccagagctgggtagtgaccctgtgccagtgaggccccatgctaccacctcaacctcatctgacagcccagagtctgcaggagcgggaggggcagcactacaacccacatccgtactg

SEQ ID NO: 702046 - DNA, 170 bp, Homo sapiens
tcagagagatgcttgcgtcactgttccagcagttcttcaccatgatgtaaacttaatatctgccctaaaagaagtcagggaaataaccgttataagagtggtcctctctaagtacccaaaggtatattggggattaaaccattgggtttggcatttttctcttttttctt

SEQ ID NO: 702047 - DNA, 315 bp, Homo sapiens
aaaaaaaaaaaccccccaagggttttcccccttgaaaaaatggattgttaattttctttcccccctttgggtcctgggtgggggggggattgtaaattttccccctttttttttgggggaggcttgttttgggggccccccaatccccttttcccccgccctgttaaatggggggttttggggccccggaaaaaggggggttttttgtttaatttttttttcccttccccctggaggggaatttgggttttttttctggcttttttttttgttaaatttttttttggggtttaaaataaaaaaggtcccccatta

SEQ ID NO: 702048 - DNA, 518 bp, Homo sapiens
tggaccattactggccgagttatggttgccgttgtagtaagggcaaaattaatatccttgggaccctggagaggttcctggaccttctgggtgagaccaggacgttgggcaggaaggcaggctggtctgtttgtgtgctcagagctggtgccaccaagccctcactagcccttgcccaggaagattttgaggcaggcctgatttcctgtatgtcaggaaatcagccaaaccatgaagggggtccttctgcaagattcccagcactgtttggctgccccaggtgactagcccacacccccccggagagaccttggaggcaggaattgggacacagttgatccccaaatcagagaagcccaggggcctgaccccacaggggtggggctagaagcatgtcacacccagagctgggtagtgaccctgtgccagtgaggccccatgctaccacctcaacctcatctgacagcccagagtctgcaggagcgggaggggcagcactacaacccacatccgtactg

SEQ ID NO: 702049 - DNA, 223 bp, Homo sapiens
  misc_feature (12)..(12): n is a, c, g, or t
  misc_feature (196)..(196): n is a, c, g, or t
ctcgtgcttttncgattcaaactgtgattacatctatggaaaatacagcctttgccgaccaccctctttgtcccgccgccctccgtgctcccctctgttttgtgtacggagtttcttactttgtacaagtccgcagccgcttatgttacagccccgaggccagatgcgtttaaaatcgaggagttctcggagtttngaaagttcgttcccacatgcagggcag

SEQ ID NO: 702050 - DNA, 156 bp, Homo sapiens
agatctctccctgacatcctttcaccttccccttccttccagcttcttctgcctagagcgttcagaatccctacaattttcctggatcagggccatctcccagggacccttttgccttaccaagtaccttttgccctttctccggggcttaggggt

SEQ ID NO: 702051 - DNA, 725 bp, Homo sapiens
aaattgccactcgagatagaggcttaattgtttccacgtttgatcctgttgtgttggaccaacaaagggggcgccaagaaagtgccacagatttgtttaaaaaaacattttgagagggttataattatgaaagggccccacttacttcttatatggttatacaagagtatttttcttaccctccgagagagcgcgggagaaagaaagaccacacatgttttatatatacgccccactgtttgctaacactcttgtgtgttttgtttgcctcggttgtccacgttgcggccacaagggtggtccctatgaacatggcccacgaagtttttttgaccacgagccacgcgttgtggggaagtctccttctttgctgtcgctcattccacacggctctcaatttgttagtgcgcctctctatgagctcacgatataacccctcctaacccctggagtgtagcacttcgcctgggtgctcgtgtttgttgtatttctaagaggtgtagtgctcctctattagaagaaagggaaaaaaaaccccgaggcccaagaatgttcttgtggtctggctgatgagaggccccactcattctggcgaacgcacgtaaaccaagtgaaccgtgactgttaaactagggatgggaaattttgcatcttggggggctggacatttatttatttagttgaagattcactgatccccctttgaaaaacatctttttacctta

SEQ ID NO: 702052 - DNA, 482 bp, Homo sapiens
gtggctttgcagggtacagtcctcctctaggctgctttcatgggctggcattgatgtttatggcttttccaggtgcacagtgcaagctgtcagtggatctaccattctggggtctagaggatggtggccctctactcacatctccattagacactgccccagtagggactctgtatgggggttcccactccacatttgccttctgcactctcctagtagaggttctccatgaggattccactcctacagcaaacttctgcctgggcatctaggtgtttccatacatattctgaaatctgggtggaggctcccaaacatcaattcttgacttctgtgcatttgcaggctcaacactacatggaagctgccaagcactgtggctgaaagggcctctgtagagcccagctcgtgccgaattcggcacgagcgccagcgtgaggagggctgttgtgctgaagcggcggcgggactgcgtggcgtgg

SEQ ID NO: 702053 - DNA, 404 bp, Homo sapiens
  misc_feature (49)..(49): n is a, c, g, or t
  misc_feature (61)..(61): n is a, c, g, or t
  misc_feature (178)..(178): n is a, c, g, or t
  misc_feature (197)..(197): n is a, c, g, or t
  misc_feature (211)..(211): n is a, c, g, or t
  misc_feature (214)..(214): n is a, c, g, or t
  misc_feature (217)..(217): n is a, c, g, or t
  misc_feature (300)..(300): n is a, c, g, or t
  misc_feature (318)..(318): n is a, c, g, or t
aaattcaaaaaaaaaaacgccaaatccctgaactattatatccaacaanacactaaggacnacaaccaaaaaaccctactgaacctattgtcaaaaaccacaaaagcccaacacggcataagcgtccaaaaatggtgctcaccatgcttccagcaaacaggtctaaaaaaccagcttncaaataacagtccccatgnccatccctgtaaangtnacnttagcattacccccaacctcattttagttgcctaagcattgcctgcccttcctgtcaagtctctcccccaaaaaaaaaaaatnaacattccaagaagttgnaagtgaagtctataatataaaacactttgcctcctgtgaactgtgtcataaacaaataaataaactgaatttggactttaaaaaaa

SEQ ID NO: 702054 - DNA, 874 bp, Homo sapiens
  misc_feature (874)..(874): n is a, c, g, or t
ggaccgcgtgggctcgcctccctgggactaggtttcagcggcgctgcctatgaccaaaatacaggcagatcccgacggcccgaggtcaggcggacgcgctgtgtccggtggagcgcacctaccaggagctgctgggtcaaccagaaccccatcgcgcagacccctgggttctcgccgcctcacgcggaggggtctacgaatgcggtcctcgaaggcgttggggcagaagcagattcggcagcgggggtgaagaaaggttcacgaatgttttggcgaacaactggcgcaccggggactcatggttttgcgcaggagaaccatactgcccattgaggtatactggcatcctcccagtcatgtgtgatggaccgaatatttggcccgaatgtcttatatcccctctaagacggaactggtttgcagcctgcaaggctccagagctggggcccaccgtgttgtgatactgggtcaagcccaatgagcagtaccacggacggcttaccgagggaggtgctggcgggagggtgctagtctcttgcacgcgtaaccccataatgagggggctcgggtaagcacacgtgccgcccttgcccgtagagggcaaatagcgcgttggcagcgtgcgaccacgctggtgtcctcctggcccatcgagcacgtggcggggtccttcccatgtgcccaaaggagcggccttcattccacagagaagtctaaacaggccctttcctggaggtgagtggttacgcttatctaggcacaaaactgcattttctggtgaattaacggctctccactatttgggggggccaaagaacgtagtgagtgtacaagaacagagaaaaattggtgggcacaccccgaatttaagacn

SEQ ID NO: 702055 - DNA, 309 bp, Homo sapiens
  misc_feature (46)..(47): n is a, c, g, or t
  misc_feature (153)..(153): n is a, c, g, or t
cgtgtcagaagactagaagtttcgggccgggcgtggtggctcaccnngtggtcttggcgctttgggaggccgaggcggatggatcacccgaggccaggagttcgagaccagcctggccgacatggtgaaacccgtctctgcaaaaaatacaanaattggccaggcatggtggtgtgtacctgtatccccagctactgtgaggtctgaggcaggagaatcgcttgggcctggtaggtggaggttgcagcgagctgagattgagctgttgcactccagtctgggtgacagggcaagactccgtctcaaaaa

SEQ ID NO: 702056 - DNA, 414 bp, Homo sapiens
  misc_feature (64)..(64): n is a, c, g, or t
ctacggaaaccttaattttaacccccaaaagaactgtcgttaaaccctcattccaaacagacanaggccttatactggaataatggaatgttgtacattccatcataatttaaaattaaattctaagaagaggctgggtgcagtggctcacacctttaatcccagcactttgggaaagccaaggcaggaagactgcttgaaacccaggagtttgagaccagcctgagcaacaaagcaagaccccatctctataaaaactaaaaaaattagttgggcatggtggcacatgcctgtagtcccagctactccagaggctgagatggatcatctgagcctcaggaggttgaggctgcagtgagctgtgactgcgccactgcactccagtctgggacaacagagcaagaccctgtctta

SEQ ID NO: 702057 - DNA, 278 bp, Homo sapiens
agcccatcacccaacacactactctactaacatgtagtaagagcgagtttttatctgacagcctggactcatcagggaatgaagatctttctgccgtttcgtttagtttctgcttatgttttttttgagataggatctcgctgtgttatccaggctggtctcgaactcctgctctcaagggatccttccacttcagcctcccgagtagctgtgacaacaggcatgagccaccccacctggctggtttgctgtttttttgtttgccttgttgttttgac

SEQ ID NO: 702058 - DNA, 114 bp, Homo sapiens
  misc_feature (81)..(81): n is a, c, g, or t
catcttcatcaggattattaatgacctccaagcccgcttcaataacttccaccaattcatctcgtttgtctccatctcaanaaaagcctgacttttcatcctcatcaatagata

SEQ ID NO: 702059 - DNA, 174 bp, Homo sapiens
atccccatacaggatctggactgaaacccatgcagtcgatgctccaactatacaaattatgtgcatttatgatccatgatacctgaatatgagatccgacgtactacttacaagacctggtgaaggtggacgtgggctcctatggacctccactaatcaccagaacaaaatgtg

SEQ ID NO: 702060 - DNA, 375 bp, Homo sapiens
  misc_feature (39)..(39): n is a, c, g, or t
  misc_feature (273)..(273): n is a, c, g, or t
  misc_feature (363)..(363): n is a, c, g, or t
ctgaaagcgtgccaccccggagtcttccctttgccatgnataaaaactttggtctcccacaacccccttatccataaccctagacactcctttcctagtgataataactctttcaaccaattgcccaataaaaaaattttgaatctacctataaccctggaacctccccgctccaccttcgagttgtcctacctttctggacagaagcaatgtggatcttgcatgtatttgattgatgtctcatgtctccctaaaatgtatacaattaggctngcccagatcaccctgggcacatgttctcaggccctcctgaggtctctgtctcgggccattggtcactcagattcggctcagaataaatcncttcaaatatta

SEQ ID NO: 702061 - DNA, 439 bp, Homo sapiens
taaattctttaccttttacagatgttctaccacgatatttagctgacgcaatagctctcgtttattccagccaaagtatatgcttgcttcatttgtcgatttaaacgcaataccatcaacgataacactttttgcatttaatggctgctttcatttttttacttttagtcatttcatttgaccaatgttcgtcaaattgttctttgcgactaacccatgctaagttgtcagcattgttattttctgggttatggtcgatatgatggacttctgacttattatctgggttctcaacgaaagctaatgcgacaagccttgctaccgtctttgtcgttcgttttgatttgttagataaactaacggttatttgtttgtataaacgtttcttgctttgtcgttgttttaaattctttcttcaacaatacggtttttgccatat

SEQ ID NO: 702062 - DNA, 146 bp, Homo sapiens
gggagtattaagtggagtcgaaagaggtattttacggtaaaagctatggtgtaagctagtcatatgaggtggtgggctcaggagttggatagttctggggcagtgagagtgagtagtagaaggtttagtgaacccaggatgtggga

SEQ ID NO: 702063 - DNA, 321 bp, Homo sapiens
  misc_feature (12)..(12): n is a, c, g, or t
  misc_feature (245)..(245): n is a, c, g, or t
tgggctgccctnccccattccccttccatagtgtccctttgatgtaaaaaaagttttaattttgatgaagtttaatttatgttctttcttttgttgcttgtacttttagtgtcataatcaagaaattatcgccaagtcccaatgtcatgaagattttcctctatgatttttttttggcagggtcttgctctgtcactcaggctggaatgcattggcacaaacatagcttaatccagcatagactncctgggctcaagcagttctcatgcctcagcctcctgagtactgctgggactacaggtgtacactaccatgccaggc

SEQ ID NO: 702064 - DNA, 247 bp, Homo sapiens
tgagcaccatgctgctcagtcttaacattttaaataaaagtcgaaagtaccaagcagtcaactaagctgttcattccctactggacctatctcagtctctggtgctgctctaatgaaatacttgaggctaggtaatttataaacaatagaaattaatttctagcagttgtggaggctgggaagtccaagatcaagccacctgcagatttgatgtttggtgaggacccggtctctgcttccaagatgg

SEQ ID NO: 702065 - DNA, 581 bp, Homo sapiens
catgcctgtgttgggttgacagtgagggtaataatgacttgttggctgatgggaaatattgggctgctaattgtcagttcaccgatttaatctgacgcagtcttatgcggaggagaaagcattcatgttacttatactaacattagggtcttctatagggtgatcgattgctccaatcgggtgtgaggagcacagttatatgtctgggattttaccagcaaccgcgtgttgagcttgaacgctttcttaattgatgggtgcttttaggccttctatgggtgttaaattttatactctctctacaaggatttttcctattgtccacagagctgttcctctttggacttacagttaacttgacaaggggattgaaaggtgtctgtggccaaatttaaagttgaactaagagaatatcttgggcaaccagttttcaccaggctggatacgtttgacgactatacctatagatcttcccactattatgctacatagacccggtgtgctcttatagctgttcttaggtagcttgtctggttaccggagtcttagctttggctctccttgcaaagatatctctagtt

SEQ ID NO: 702066 - DNA, 576 bp, Homo sapiens
cctacagaagcagaaagggcatggggatttatgtttagaagcagaaaggggaatagggagtgaacgtttactcaatagagtttgggaagatgaaaacgttctagagatgagtggtggtgatgccacataacaatgtgagggtacttaatagcactgaactgtatgtttaaaatggcaaaaagggtaaattttatgtgatgtatattttaccagaattttttttttaaaacttactgcatggggaccaagcgtggtggctcacacctgtaatcccagcactttgggaggccgaggcgggtgggtcacttgaggtcaggagttcgagaccagcctagccaacatgttgaaaccccgtttctactaaaatgacaaaaaatgagccgggcatggtggcatgtgcctgtagtcccagctacttgggaggctgaggttgcagtgagccaagatggcactctgccggggcggcagagtgagacccggtttccaaaaaaaataaaagcttactgtgtggtttcatatacgtaaagtttatcaactggcaaaactaacatatgtgtacggtcagaagtcaatgta

SEQ ID NO: 702067 - DNA, 552 bp, Homo sapiens
cggggcggggcgccgggagcaggatgcggccgcccgtaattaaatagcatttactcttattattactaataataataacgtaatcatacctctagtcatagcataccatttatcgggctcggcgcaggcccgcggggagcgcagcccggcggaggtctccctctgatgccgagccgaagctggacggtactgctgccatctcggctcactgcaacctccctgcctgattctcctgcctcagcctgccgagtgcctgcgattgaaggcgtgcgccgccacgcctgactggttttcgtatttttttggtggagacggggtttcgctgtgttggccgggctggtctccagctcctaaccgcgagtgatgcaccagcctcggcctcccgaggtgccgggattgcagacggagtctcgttcactcagtgctcaatggtgccaaggctggagtgcagtggcgtgatctcggctcgctacaacctccacctcccagcagcctgccttggcctcccaaagtgccgagattgcagcctctgcccggccgccaccccgtctg

SEQ ID NO: 702068 - DNA, 483 bp, Homo sapiens
tccaatatacaaaaccaaaccctttgcttggaccaccctctatcataacctttgcactattgattgtctcaaattgagaaaaatcttaccagagacgttcatcatccataccatcatcaggatctttcacataaagattaacagccaggtatctggtgatcctatcttgtttcatctgttcaaatttgcgcttaagttccgtctgccgttccaactttttctgagctcgaccaacataaattttgttttccattgagctcctttccgttcatctgatccacaggtttctgtgcatcttcatgcctttcaaagcttacaaatccaaatcctttggatttccagtttcatcagtcattagttcacacttaaggcaggccaaactgccaaagagatccttaaggcgctcatcatcatgtcttctccagaatcttgatgtaacattggtgtatcttatgcctagctcaagtcaggtctcggtcttag

SEQ ID NO: 702069 - DNA, 1019 bp, Homo sapiens
ttagccatggatcaaccgccaccgtgttcttacgacattgccgtcgacggcgagcccttgggccagcgtctcctttgagctgtaatgcagacaaggtcccaaagacagcagaaaattttcgtgctctgagcactggcgagaaaggatttggttataagggttcctgcttacacagaataattccagggtttctgtgtcagggtggtgccttcacacgccataatggacactaggtggaaagtccatctatggggagaaatacgaagatgagaactatacatcctaacagcatacgggtcctggcatcttgtccatggcaaatgctggcacccaacacaaatggttcccagtctacaccatctgccactgacaagactgagtggattggatggaaagcatgtggagaaaggcacagtgaaagaaggcatgcatatgtagaggccatggagcagcttagggtaaaggactggaaagcacaacaaagaaggatcaacattgctgactgacggaccccgtcgcaataagttcagcaacatgctgtatatctctataaccgaacacgatcattcctatctgtagctccaggacagcacccatcaaacaccaatatgcacaacaataatctctacacatcctatatgagccatctagacatgtcaagtaccaccaagagaatacaatgtatacccttgtatcccctcccaaatgacctaaccttgacataggcaaacatataaatacatcatcaatgacacacaaacaacacacaaataaacaaatatggtaccattcgataatggaaatcaatcaattaagaaaaagatgtgttgcctgctatcatatgaattatacccatcgggagggagcccgcaaaggtatagagagatccaccgagtactttagaacacaacatggatacacatataggatacagcgcaacatatctataatgtaagtgtactgagatttcacaagcaataagtaacgggaaacaggagaaggtagaatatttagtaaag

SEQ ID NO: 702070 - DNA, 281 bp, Homo sapiens
aaaaaaggggggttttttaaccccccccccccccccttttttaaaaaaccccgggggggaaaaaattttttttttttccccaaaaagaaaaaaaaaaggggttttaaaaaaccggggggggggttttttttttttttttttttggaaaccccccttccaaaaaaaaaaaaccctttaaaaatttaaaagaaaaaaaggggacccccccaaaaggggccaaatttttttaaaaaaaatttttttttcctttaaaaaaaaaaaaaggttttttaattttttta

SEQ ID NO: 702071 - DNA, 762 bp, Homo sapiens
tgccgaccctccagtttatttgttcattaatttaatttatgttggtaaacttatctaactcctacatgtgctaggtttaggatccaaagacaaatatttcagacgagctggatagaaagacaagtgaaaagctcacttcaataaggtctggcaagtgtgacactagagagaggcacagcaggccgggagaacacactgggaggcaccaagtgggtcaacatcaggggaagtttagagtcaggcagccctcaacttgagcctttgctttgttatgtactgtgtggggtgtttggcaagttacttaaggtcactaaatctcagtttcttcaggtgaaaagtggagatattaggtgttcctatcttaggggcattgtgaggaataaatgaagctgtgtgcagaacagctacgtagtatatgcctggcacaggataagtgctcagttaatgtgaggtattatcactattattttttatgtgtatgatttcatggcccatgtggtgaattgtttgagctatgtcatgacagatatataatgtcaatttaactaaaaattttcatttgtatttcttgaactcatagaggttcaggcttagcacataatcacactcctcaagaacatctcttatttttcttccccatctacttctattatgcattcaggagctggccttcctaagacgcttcattcaaaactatttttggttctcatccattttgcccctgtctcatagccccaaagtggtgtcacaaacctatgagac

SEQ ID NO: 702072 - DNA, 803 bp, Homo sapiens
tactctttgcccttacggggcaccacccgccgccgtggtgtgtgctggtgcagcaccctctcctcgcctgagtcgctagcgcgttttgtggtgaattctcacgccccccccttttgtccacggattattttggtacacacagcgccgcgcggtcgtttggtagtcatttgttgccgtcctacagatcgagcgtcccgtggccggttcagtttctggcggcacccactggggaccccctcccctgtggtgacaaaaagcggtctgttcccgcacggggttccactttcgtgtggacagctccccccactatatgggcttcctgtggtccgcggtactcccggaactccccatggcggcacaaatttttactatgggcccccctccctcttgttgggacaatattccgtgggtcctctcgtatcatctgcgcgacgtttggttcttgtcctccccagtcaatttccccggcctcctattactcggggtccccgcctcccggcccatatctcgttggtttgtggctccgctgcttgggactccgctgtctccaggaggcggtttttgctctcttcacgaccccctcgggtggggggctctcgaggtggtggcgatgtccctcgcatggaggcccctcgtcgatatctagaacagccggtcttgagcatatttcgtgcccactaccgccctggttatatgcaggtttcacctgctccccggtcttgttgttttctcctgaactttccccgtggcctgtgtcccccggcatttttaaaaaaaaaaatcttgtacgtacaaacaaaacg

SEQ ID NO: 702073 - DNA, 166 bp, Homo sapiens
ttttagctagagaacattcttctcatagatcactgagtgcactttcctatgcacttgccttggcacagagaaaagcaattcgtctacataagtcttctacatacatttgtcacgtttccatgtggaggagccacctaccatcgtggagagacccctgtgtaccgag

SEQ ID NO: 702074 - DNA, 119 bp, Homo sapiens
caccgctcattctccttcttcttcttcttcttcttcttcttcttcttcctttcttcttctccttctcctcctcctcttcttcttcttctttttgagtttcactcttgtagccaggctgg

SEQ ID NO: 702075 - DNA, 341 bp, Homo sapiens
tacttccacgggcagttaaagcatgctgggagacacatgagagagagggagaaccatctctgggttcctcagacagaacccggtggagcaggaagcacccacgtgtgcctgccagctcccttgggcatctacctgacttgccaacagaccagaagttggtggaaaaactcattgtgttggcctgtttatccagcaggggagcacttgttctgccaagttctgaggccccacattattgcctccagctgccactcaagggaacaaaatcagagtctatgtggctagtgtggggtgaggaggaggaggaaaagggagcaggagaaggaacgagaatatatggg

SEQ ID NO: 702076 - DNA, 1129 bp, Homo sapiens
tcgccgtttatttctgggcccgtcggctaccttcttcgttcctctctctcgtgaccgctcgtgctgtctcgctacttcgtccctcggtgccccgcctctcgttctgttttctctctctcagttgtttcggtcgtctgtgcctctcattttgttattgtcgcgctcttctttgaatctcttggagtcctttttcgatctggacttggtgcctcgtcgggcctgatccctgtgctgattcaggttacccgtccgtaccgtgctggtgcctggtaggcccgcggtgcgtggttgcccttgggttatttcattcgatggcctcgcttgcgggttttctctgtcaccgtagcttgctttttgtctaggcgtcgttcgatgtgtttggtttctgaggttagcctagactcgatgtgttcgtaagcagcctgtcttctagccttggagacagggctacgaaccttggcctgtccagtgcgtacgcttcccggtacttatctccgctaactggtatcatccatggttgcgagttctgcactggcatgtagtggtatgcttaagatgtcgattgaacgacagctattcccagtacatggatagctttttgtaaaaactcagatccagttacatgtattagtgatttgttctaccttatggtactattttggcagggattaagctagtaagactaagactatgaatgtagtagttgggcgaaggagcaggtatagggtatggatacctgcacaccacattggtacctgcacaccactattaactacatataggcaatcttctggctcggactgttctttactactgttcgttaaagtaataatgtgtcattctgctgcagcgtaactagcctccatcttctacaccaaatactattccatgtccatggatagtgctatgctaataactctcccaggtagcaccttatagccgcttaaaagcctttaaaatctccaatgctgaatggtgtcacagtaaagataatgtagaacacttaggaagaacagaagaatgtaattacctgatgaagtcatctatgtccatggaacgggcccgtttgtcactaaaacctgtgctggttaggatttgctgtattttatctaactactgctgaatcttc

SEQ ID NO: 702077 - DNA, 385 bp, Homo sapiens
cccaccagtacttgaccaattttcatgtattcaagtcttggagttttgggtttaacgggtattaattgacttgtcgctttattagaagagagttttacctaaagaagccaacatttgagttggttgcagcatatgagaagagacactggtccttcttgtcaaaattaagcaactattaagagcgccattttatttatgtcatttaaaaaataatctatgcagcatttcaagagacaaccatatggtgttgtatattataaactggtgacattctactattgagttatgtacaacattttcattttgtatgcttcttgaggtggtaatgagaaaaagttttttaaaaagtgtgccttgctgtattcttataccatttattaaaagc

SEQ ID NO: 702078 - DNA, 164 bp, Homo sapiens
gtcgtctctaggaggatccccccctcgaaacccagtataaggactttgagttaacattattttttaaatcctgtaggactagcatttaattagactagctgtacccaggtgcttacacagatagtggattccggtgtaactctacggaagacagctagcagaca

SEQ ID NO: 702079 - DNA, 113 bp, Homo sapiens
atggctttcagtgctccaagaatgctgcccaatacttcagtgttactcttcacccaaatactcatacaatacaacacccaatgtgtcccatcaatacattctccaactcatat

SEQ ID NO: 702080 - DNA, 428 bp, Homo sapiens
tgctctcgacgatccctcactaggttcgcaggtggagagtacagacatggacgatctccagccgtggccttcttttggggctgactctgtgcacagacaaaacagaaaacgaagtcgcgcctgttgatgcccgccctgctgccgaccgaggcgtgcccactcgaacaggttctgggttgacaaatatcaagacggaggagatctctgaagtgaagatggatgcagaattccgacatgactcaggcatatgaagttcatcatccacacacttggagtactatgcagaagcatgtgggttcacaccacacggtgcaatcatcggactcatggtgggcggtgttgtcataacgacagtgcatcgtaatcaccttggtgatgctgaacaagaaacagtcaacatccatacatcatggtgtggtggaggttga

SEQ ID NO: 702081 - DNA, 230 bp, Homo sapiens
gcccttgccgcccaccccccttaacccttttcccccccatggaattattattgtggccgcgaatggcagtcattaacccatttgctggggcccttccccaaattatttaaatcccgtgaaagatctcccttttgccccttttagggaacccttgttgaaggggggggggggggggaaccccttttctccactttttgttttcccccgtttggttttccccccttcccggg

SEQ ID NO: 702082 - DNA, 318 bp, Homo sapiens
ctattttacataatggttattaaattttattatcacaacctgcatctttcactgctatttaagcaggggttggcaggctttcttctgtaaagggccagataataaatattttaggtttctgtggaccagaaggtttctatcacaagtactcagctctgctgtttgtagagagaaaacagtcataggcaatatataaacaaacgagcatggccatgctccaataaacttaatttgtaaaagcaggtggctgtgaggccatagtttgccagctactcatctaaatattgatacagaggattcagatattctaaagctata

SEQ ID NO: 702083 - DNA, 274 bp, Homo sapiens
gcacaaggtgaatcggttgttctttcctcccatttggatgattgtcataaggtttttagcatgttcctcctttttttccccctcccctttttttttttattaatcaagagaaacttcaaagttaatgggatggtcggatttcacaggttgagaattggttcccctccaagcatttcatgaaaaagctgttttttattaatcatacaaactctccccatgatgtgaagagtttcccaaatctttcaaaataaaaagtaatgacttagaacctgca

SEQ ID NO: 702084 - DNA, 213 bp, Homo sapiens
  misc_feature (94)..(94): n is a, c, g, or t
  misc_feature (212)..(212): n is a, c, g, or t
gtgtcacttactttcattggactgctttatttggcttgggaggcacctcttagactctgcgttgtggtttttctagagtaagatcttccagggnctgactacattctggagttcccttacgaacagcttctcctctgtatattttttctgtttcctctttaagtttcttttccttgtattcaaatttttctttcacttcttttacttgtgtnt

SEQ ID NO: 702085 - DNA, 108 bp, Homo sapiens
cagaggtgcagtgagcaagatgcacactgcagtctgctgggtgacagagctagactctgtctcaaaaacagaaaaacaaaaaaacaactttccagtggcttctcactg

SEQ ID NO: 702086 - DNA, 289 bp, Homo sapiens
gtgggctccctgggtttggttttttttttaaaacttgggagcccccaaggaagggctaatgttggtaggttctaaaagtggtttcctccagcctccccaaaatcaaccctggtgtttaaaaaaagtccttttttccattgtgggtaacaacctttgggagggtgcaaaacttttcaaaaccatgggccaggtgggggtgcctcagttctttcccctttggcccttaggaaaggggcccatttccctttttcctaaaatgcttttgtaaataaacaaatggatcccttga

SEQ ID NO: 702087 - DNA, 302 bp, Homo sapiens
caggcatgcagcttggctccaccttactaccagactaaccttagccgaaaccactttacccaaataaagtatagtgcatagaaattgaaacctggcgcaatatattcgtaccgcaatggtacagatgaataattataacctagcatcatatagcaaggactaacccctgataccttctgtcatatgaattaactagaacttactttgcgatggagtagccttgaggctaagaccccctagatcctagcttgcatgctggggtaccgatgctcgaagttctgttctcatagtcatcgctattt

SEQ ID NO: 702088 - DNA, 463 bp, Homo sapiens
tcctgaaagcagcctgctgagggagaagactcgcatgaacccgggagggggaggttgttgtgagcggagatcgtgtcattgcactcccgcctgggcgacagagtgagacactgtgtcaaaaaaaaagaaaaagtgcttaagcttggtcaagtcactctgaagctatcgggagaaaaatgaagtggccctaaggaaaacatagccaataaacccaaggaaacaaactagttaacagttgtcactacagaaagaatcccccacatagaaggcatttggacgatcaatatgcagtggaaggccgggcgcggtggctcacgcctgtaatcccagcactttgggaggccgaggcggtcggatcgcgaggtcaagagatcgagaccatcccggccaacacggtgaaactccacctctacgaaaaatacaaaaagtagccaggtgtggcgggcgcacctgcaatagagct

SEQ ID NO: 702089 - DNA, 387 bp, Homo sapiens
taacagatcttactggagagtcccttgccgagcttaatgtcataccacacctccccttggcaggcgatagacttgacacataggctccagagtctgatacagtgtgaaccagccacggattccccaagcaagactgatcatctatattgaaggtagtcacatcctgagggtactgcacccacagtggcctcatgacaggaatgccttcccgatgtgcctgatataagagggtgtacccagaagggcagcaaagaatatcgctttcccaaggcatctcggattatatcattgtgctgagattgtaacagcccatggatctcgtcgcccagtgtcccaagtggggcatttgcccggaaagaaatggctggtaagcaccccatctggtac

SEQ ID NO: 702090 - DNA, 142 bp, Homo sapiens
tttgggtgctgccctcgagtctgcaggtaagctggccgagctggaggaggccctaaagaaggccaagcaggacatggccctggctgcttgagtgaggtaccagtgagctcatgacacaccaatgctggccctgtgacgtgga

SEQ ID NO: 702091 - DNA, 167 bp, Homo sapiens
ccttaagtgcagtgagtgcatgctgatgaatatagcgcccctttcaaaaggtgagttatgtagtacacacagcccagccttcgatagggaagccctgggaggagatgtagtggtagtcaattgctgaacaccaggaaagagacttggtgaaagaaatccggccgagc

SEQ ID NO: 702092 - DNA, 476 bp, Homo sapiens
  misc_feature (41)..(41): n is a, c, g, or t
  misc_feature (73)..(73): n is a, c, g, or t
  misc_feature (76)..(77): n is a, c, g, or t
  misc_feature (93)..(93): n is a, c, g, or t
  misc_feature (96)..(96): n is a, c, g, or t
  misc_feature (101)..(101): n is a, c, g, or t
  misc_feature (112)..(112): n is a, c, g, or t
  misc_feature (121)..(122): n is a, c, g, or t
  misc_feature (126)..(126): n is a, c, g, or t
  misc_feature (151)..(151): n is a, c, g, or t
  misc_feature (153)..(156): n is a, c, g, or t
  misc_feature (159)..(159): n is a, c, g, or t
  misc_feature (165)..(165): n is a, c, g, or t
  misc_feature (174)..(174): n is a, c, g, or t
  misc_feature (196)..(197): n is a, c, g, or t
  misc_feature (203)..(203): n is a, c, g, or t
  misc_feature (264)..(264): n is a, c, g, or t
  misc_feature (333)..(333): n is a, c, g, or t
  misc_feature (414)..(414): n is a, c, g, or t
  misc_feature (460)..(460): n is a, c, g, or t
gggattggttaattttggtataaaagcagcacagcaggccnggggaaagggtgggggcaggaagcagccgggntcnntttgggcctccctgtngcnttggnagggcccaganatccaaatnntaanttcccaacctcttcagaggttaggntnnnnggngggggnggggagagnggttatcaccacagagaccttnnggggtnggagggcagagcattatgacagaggctgtaatgcaagtttgtgtggccaacagaacgtagnttcccaacttctcccttcgctggtctctagggtttcacagccacttgccctagttctccttttttgggncctggaacacaggaggactcttggcccacattcttcttctcctgcatctgtttcatggcatcagccaccttctcgaagggncagactgagtcaatgtggggcttgatgtggccctggttgtacagancaggaggcgggcaaca

SEQ ID NO: 702093 - DNA, 308 bp, Homo sapiens
tggaaatatatatcacaaagcccctgtaggaaaagcccagacaattgttgcatcacctgggtgagcagtggatagatctgtctcaatgcccctgtaggtagagcttagacaagtgttacatcacctgggtgatcagtgcagggatatgtcaaaaccctcctgtaggctgaccctagacaggagttacatcacctgggtgatcagtgaagagatatctgggaattcccgtgtaggcagagtctggacaagtgttacatcacctaggttatcagtgcaggtataagtcataaagcctcctgtaagcagag

SEQ ID NO: 702094 - DNA, 163 bp, Homo sapiens
gctatcataatataaagtatactacgtactactataaatagctatgagtatgatacataaatctgttatgttaaattttttataataaacttttttgtttgcttcctgggagcatacactcaagtgccctgaatatacattccctatttttaatttttaaaat

SEQ ID NO: 702095 - DNA, 442 bp, Homo sapiens
attgtaggctttattagggctgtcttacagagatcatgttggcatagctgatcatgtctttatcataaaccatgtcgttgaggtagaagaatcaccatatcattcgtcgcccaaatcgggactatatgagagagaaaggggatgctattaattacaccagatcaaaaggcataaaccagacctgtcccaggccgagtgtggaaatatgttctttctagttgtgggtaccctgatctaggtggtttgtaattgtgcattactgactgcatatgtttgtgtatgtgtaactgtgggctccctgttaagtggggctcatggatacgaggcctgaggaagtgtggcttgctagtctgttacgttaacatgcttttctaaaattgcttcacgtgttaattcatttactcctgcattcattgactgtttatgtacttttccattctat

SEQ ID NO: 702096 - DNA, 388 bp, Homo sapiens
tacgctgttcctttagagctgtcaaatttccttgacttttcatgttttctttgttcctatgttgatatctatacatcggtatagcagttgcttcttccaaatttttgactttgcttctgtagaggactttttcctgaaggtgtgtctatgatgctggttgggtaggacactttccctttgattctgggtgtacgcagtagcatactgtatcatttattcagtagtaaatggagtcaatggtatctgtgatttccttggtggcttagagtgaggctattagtggaggctttggtgatgttttgctggagcctggtatgccatgttggttagtcttttgactccattactggcaacagtgcgctgtgtctgcacttggctcaaggcaagg

SEQ ID NO: 702097 - DNA, 699 bp, Homo sapiens
  misc_feature (11)..(11): n is a, c, g, or t
  misc_feature (206)..(206): n is a, c, g, or t
  misc_feature (217)..(217): n is a, c, g, or t
  misc_feature (324)..(324): n is a, c, g, or t
  misc_feature (332)..(332): n is a, c, g, or t
  misc_feature (387)..(387): n is a, c, g, or t
  misc_feature (429)..(429): n is a, c, g, or t
  misc_feature (439)..(439): n is a, c, g, or t
  misc_feature (451)..(451): n is a, c, g, or t
  misc_feature (467)..(467): n is a, c, g, or t
  misc_feature (479)..(479): n is a, c, g, or t
  misc_feature (486)..(486): n is a, c, g, or t
  misc_feature (515)..(515): n is a, c, g, or t
  misc_feature (526)..(526): n is a, c, g, or t
  misc_feature (536)..(536): n is a, c, g, or t
  misc_feature (538)..(538): n is a, c, g, or t
  misc_feature (542)..(543): n is a, c, g, or t
  misc_feature (640)..(640): n is a, c, g, or t
  misc_feature (699)..(699): n is a, c, g, or t
caaaggcaaangaaatctgaataaactaaggactttagtagtaatgtatcaatattggttcattaattgtaacaaaggtaccacactaatatattaataataggggaaactgtgggagggtatgtgggaactctctatcttctcaatttttctgtaaatttaaaacttttctaaaaagtatctaattttttttaaaactagtttgngagtccatagnttttaggagccattggaattatatcaaattttaagtattggtcacttagaccttgtgtgaatgctgacttgttttaagagagggagagtgtcttgctctgttgccangacagagntcagtggtgcaatcacagcgtactacagctttgaactcctgggatcaagcagttntacctaagcctcctagtagctagcaatacaggcacaccccancatgccctgntaatttttaaantttttgtacagatggngtcttgctatgntgctcangctgatcttgagcttctggcctcaaatantcctgactagncctgcaaagnantggnntgatttttttttttttttttagatggagtctcactctgtctcttaggctagagtgcaatggtgcaaatctcgctcactgcaacctcagccttctggntcaagcaattcttcttgcctcaggctcctgagtagcttgggattacaggtgactggttn

SEQ ID NO: 702098 - DNA, 673 bp, Homo sapiens
  misc_feature (11)..(11): n is a, c, g, or t
  misc_feature (206)..(206): n is a, c, g, or t
  misc_feature (217)..(217): n is a, c, g, or t
  misc_feature (378)..(378): n is a, c, g, or t
  misc_feature (386)..(386): n is a, c, g, or t
  misc_feature (441)..(441): n is a, c, g, or t
  misc_feature (483)..(483): n is a, c, g, or t
  misc_feature (493)..(493): n is a, c, g, or t
  misc_feature (505)..(505): n is a, c, g, or t
  misc_feature (521)..(521): n is a, c, g, or t
  misc_feature (533)..(533): n is a, c, g, or t
  misc_feature (540)..(540): n is a, c, g, or t
  misc_feature (569)..(569): n is a, c, g, or t
  misc_feature (580)..(580): n is a, c, g, or t
  misc_feature (590)..(590): n is a, c, g, or t
  misc_feature (592)..(592): n is a, c, g, or t
  misc_feature (596)..(597): n is a, c, g, or t
caaaggcaaangaaatctgaataaactaaggactttagtagtaatgtatcaatattggttcattaattgtaacaaaggtaccacactaatatattaataataggggaaactgtgggagggtatgtgggaactctctatcttctcaatttttctgtaaatttaaaacttttctaaaaagtatctaattttttttaaaactagtttgngagtccatagnttttaggagccattggaattatatcaaattttaagtattggtcacaaaattgatttgtttccaattaaattatgatttatgaggaatattttctaccttttagaccttgtgtgaatgctgacttgttttaagagagggagagtgtcttgctctgttgccangacagagntcagtggtgcaatcacagcgtactacagctttgaactcctgggatcaagcagttntacctaagcctcctagtagctagcaatacaggcacaccccancatgccctgntaatttttaaantttttgtacagatggngtcttgctatgntgctcangctgatcttgagcttctggcctcaaatantcctgactagncctgcaaagnantggnntgattttttttttttttaaatggaagctaactcggctttaagctcctaacttctgagtgcttgattacagggatca

SEQ ID NO: 702099 - DNA, 196 bp, Homo sapiens
catatagtacagaggaagggcatctacaaaaccgtgtagtggagtgccatgcctgacggtacagaacgatcgcgtcttctgagaatgaacagccgaccctgggaacggttgtcaatggcccagcacaacccacacgtactagggtggatactctgtatcctagtaactttaatttttgaaaaactatttgataaac

SEQ ID NO: 702100 - DNA, 173 bp, Homo sapiens
  misc_feature (25)..(25): n is a, c, g, or t
  misc_feature (32)..(32): n is a, c, g, or t
  misc_feature (36)..(36): n is a, c, g, or t
  misc_feature (38)..(38): n is a, c, g, or t
  misc_feature (43)..(43): n is a, c, g, or t
  misc_feature (46)..(46): n is a, c, g, or t
  misc_feature (49)..(49): n is a, c, g, or t
  misc_feature (57)..(57): n is a, c, g, or t
  misc_feature (64)..(64): n is a, c, g, or t
  misc_feature (66)..(66): n is a, c, g, or t
  misc_feature (91)..(91): n is a, c, g, or t
  misc_feature (97)..(97): n is a, c, g, or t
  misc_feature (99)..(100): n is a, c, g, or t
tgtctttacacactatatagcatangtataancatncngtacntancancatgtctnggaagtntncccatatcagcacaggaattacttnctcatntnntcacagctgctcaggctcatatggatgtatcataattaatttaatcttttattgatgagcataaggagggatg

SEQ ID NO: 702101 - DNA, 195 bp, Homo sapiens
tgatgcggttcggacgtcatgaggttcgaatagaagccggcgtacagagtgtctagatcaccccctcccgcagagtaacaggcgtaaagactcgacctgacgttgaaaacgaactccaggtggacacaacatatagatctacgcaagagtggcattgtaacactatcgtgaatcgagcacgaatgagctaacgac

SEQ ID NO: 702102 - DNA, 1393 bp, Homo sapiens
  misc_feature (337)..(337): n is a, c, g, or t
  misc_feature (595)..(595): n is a, c, g, or t
ccagtgagtggcgacatggagagcaccccagcttgaataacccatgataaatagagctgaagtaccacgcacgtctaagtactaccccttactcctatcttccctgtatgtgctgatccctgtctatggagtggggcgcgtcgagcatggggtggacgcagtgaggcctcgaaacacgggattctcatcagagggtccttcctctcgcacctagtgtaggtacgaaaccgcgtcagggacccacccctcagaggactgaatgcgcacaactagctgcgagcgccacgctgtccaaggtgacgaacgcgacaagggagagctggtatgatacgcgcgngctgtgtgctcacgcgtgcatgctgccattcctgtccgtccactgttccgtgcacggcagcacgatgcgcgcgcatgggagccaagggcacgccgacaaccagcgcaagtcgtacggcgcagaccgtagtggatggggggcatacggtcagcggggatgggcgcatgcggagaggcgtactcgtcacgcccggaggcccccccatgcaccacgcaatcgcccccaagacgcatagagccctcgcacgaaggaacacancagaggaccccgtgtgggactctcggaacagaccacggctgagtcaacgggtcggtaccccagaggggcactcagagcgggccacgggggacgcaatcgacaggcgcgcagtcgcacccagttgacggagacgcggctcccacaaacgatacaccgaagtgggccaaaaaggcccagatacactacacgccggttatggacggtgtcacacaaggtcaccgccctggtggtgcttttcgccaatggccctctctggggcttttgtttctcggccactgtccgagttctcgtgttcggcaccaccgtgggggtctcaccggaggtgcgacttcatggggcgagaaaaaagcgccaacttcttgtgccgcgaggaccccaaaaaacttagggctcagcgcctggggagcaaacgggggcaacacgccattctgtatcacgggccaatgggccttctcagttccccccgtttggaatagtccttttgacacccccggatggaacgcctttgcacacccccaaaagcgaattggcatacggcgcacgccggtcggggtgggcgcacgttccaacgcagttgggaaatggcggtgggcaaacgatgaacaaaaaacctcggaaatttctggcactaaaactcccccaaaagttgggttgaaaagcaataaccctggggccgttccgaatggaggaccttggttccgtgccgatggccaaccctggacctgcggatcccttatccaggggacaagccatgagcaacttagattgttgacccgctgggaaagccaattggggccg

SEQ ID NO: 702103 - DNA, 1022 bp, Homo sapiens
atgttgtctcccaaaaattatatgtgttaaaagcccccccacgtaaaatatttagtgggggagacaacatcattggaaatgttttgaaactacccgcgcttggtttaacaccgggggtacgatttgtggggtagcaggccctccatatccccgatgattgtcggggtggggcctggaatggaacgcgccgccttctttccgcaaatggtggggtaggcacggaatgataggacctccggtcgagccatatggatggaattttgggtcctcgcgcttcttggatgtcccagcctgtgaggaagagggctgttttttgtacgaccaggtgctctttttcggcccttaaaagacccaagacagtagttccattgcaggtgcttgccctattgttgggctctccgcagacgagaaatcactggcaccctgatttggcagattagcgagcctctcctttccttgtcaattgaatgccctcgcccaactagtatgtctcgcttggggccctatctatagctaaatcagggaacactctctatattaaaggcccatggcctgctttgcagcacagcacctagcgcttcatattgtgtacttattcattcatagcgactcgcgcgccttggcctaaaaacaggcctcaggccatagaaaccatcctctatatgcgtggtaattgtacagtcccagtatcctgaaacagtgtttggtgacataatgtccacacgggtgagtgacatagccctcgattataaggcaacatagctttatccagggggcttcacccatgggattcccaaaacttatctgagtcacttgaaacttggttcccagtaaacacatgtctggtttataatctcctattatgctcacctgacattaattatcgtatccttgatgatgtgtttggagctgagtagcagaaaacagaggccacactttctgggaaattattaaaggaagcaaccatttttaatgagatgtctatatataacgatttaaaaagctaatgaccaggtgagaaa

SEQ ID NO: 702104 - DNA, 274 bp, Homo sapiens
gctgggattacaggtatgagccaccgtgcccggcaatgtatatattcaaattctaacagcctgggactccttgggaaaaacaggaggcaccagagacgccattttggaaaaaaaacctgttttcctcatggaaccacaggaattggagatggatagatgccccttcagaaatctaaggctctgttctttttgggattcaggatctggtataaaaatgggacccttaatttttggagacctgtgttgctttctgctgagcccacttattatattg

SEQ ID NO: 702105 - DNA, 120 bp, Homo sapiens
ctaaacacagatttcaatgtagatgaaatggcttctattggaagagatgcatctaggactttcatagcttgaagaggagaagtcactgtctgggtgtccaagggacaggctgacttcttg

SEQ ID NO: 702106 - DNA, 161 bp, Homo sapiens
  misc_feature (149)..(149): n is a, c, g, or t
acacagccagcgctgacttcgtcactctgctacgactggcaaagatgagggaggctgaagcggcccaggcagcaggcagagcgatgagcacgtatcttgacatcgttccgcgaccttctcccgtcatggctgtcagaccgacccggagnaagctgacgccg

SEQ ID NO: 702107 - DNA, 669 bp, Homo sapiens
agagtctctctatgtcgcccaagttggagtgcagtggcacgatctcggctcactgcaacctccagctcccatgtgcaagccattctcctgcctcagcctccagagtaactacagctcagcatccagcttggctgtgggaccagctgatccactgtgtggactcaggactcaggcagcaaggggtggcttcattaagaagtggccccagttggaagatgattttcctggtgaatcctttatcacaaactcagagactccctgtgacccatggccaaaggaggaccttctattttccgggagcatcaagaagggcttggtggattggatgagaacagacataggaaatatgcctttgccggaacactattattatataatgaaacctttggtaaatattcataaccaggacctttattggaatcaggcttggtgcctggccttcaaaagataatttcatctttagggcttttattagatttataggggaggggagagtggaccctcccttactggaagaaaagggctgattggaatatggaaaaaaacaattttatactctttacaaacaagaaagaccctcttggccctttcataattatgaaatccctgggcacattagggttggataaagaaaacaaaggttcctcgggggcgaaccgcggcgagtcg

SEQ ID NO: 702108 - DNA, 298 bp, Homo sapiens
aagctttgcgctttatcaggaggcaggactgtggcgggaagggtcccttaaaaatgggtttggggaccagtgggtcaggaagtgggagccaaaggttttactccctttgctttttttttcagggtccaaaacaggtcaaagacaatggcttataaaggtttagtgtggtttcaggatgtgacaggcagtccagcctgccctttttgccccctccagacaaacttccccgacaagctcctttgtgcctttacgtggaaagggggtggaaagttttccccttaaaaaatggggggtttta

SEQ ID NO: 702109 - DNA, 128 bp, Homo sapiens
catgatcttcagctgatatctgctgccggatgtcatgtcctgttgtcctggagggcgttgatggcctccgccagccacgtgtcacgctcgcgatgacaactccgactgtgtacctgagctcgaacttc

SEQ ID NO: 702110 - DNA, 173 bp, Homo sapiens
atacacctccgactcggatccagtgagaagcagcttgtagtacagcgtgtcgtattgctcaatgaagtgcaccatgatggcgaagctccttcttgacgtccgagactgtccctgtccctgcgctcctcacggatcgactcaaacgagtacttcttgagggagcgccgtagcat

SEQ ID NO: 702111 - DNA, 1317 bp, Homo sapiens
  misc_feature (288)..(288): n is a, c, g, or t
  misc_feature (335)..(335): n is a, c, g, or t
  misc_feature (387)..(387): n is a, c, g, or t
  misc_feature (403)..(403): n is a, c, g, or t
  misc_feature (409)..(409): n is a, c, g, or t
  misc_feature (425)..(425): n is a, c, g, or t
  misc_feature (443)..(443): n is a, c, g, or t
  misc_feature (453)..(453): n is a, c, g, or t
  misc_feature (480)..(480): n is a, c, g, or t
  misc_feature (488)..(488): n is a, c, g, or t
  misc_feature (490)..(490): n is a, c, g, or t
  misc_feature (500)..(500): n is a, c, g, or t
  misc_feature (522)..(522): n is a, c, g, or t
  misc_feature (536)..(536): n is a, c, g, or t
  misc_feature (556)..(556): n is a, c, g, or t
  misc_feature (567)..(567): n is a, c, g, or t
  misc_feature (570)..(570): n is a, c, g, or t
  misc_feature (635)..(635): n is a, c, g, or t
  misc_feature (679)..(679): n is a, c, g, or t
  misc_feature (692)..(692): n is a, c, g, or t
  misc_feature (797)..(797): n is a, c, g, or t
  misc_feature (1078)..(1078): n is a, c, g, or t
  misc_feature (1127)..(1127): n is a, c, g, or t
  misc_feature (1186)..(1186): n is a, c, g, or t
  misc_feature (1223)..(1223): n is a, c, g, or t
  misc_feature (1290)..(1290): n is a, c, g, or t
tctgttggcgatgatattcgcttcattgaatggatagttcagagactgacgtggtaggcaagacagtggcatgagtgctgggattgctacaaagataaacggtgctgaaagcatcggtgcactgagccagatgttgaagattcttgtgtcaattaaagcgtacctcgactttacaaggataagttaacacacgatttgttaacatgttagacattgagtggagtcccatcatctacagcgccacgataacatggtcggcttgtgatactgcagggtgcacgcaccatncatgcgcgagcatggccacctttacgaagatgaagtcgtacgtccgncttatgccatttcacttaagacaagcctagttagcagcgggttacgcaacgnaggcgagtccatgtgnttctcnatttgcgccctaatantttgaacatgagtactcncaacaccaantcaataatggtgaaggaactcgcaagngataacantntccatatctntagccaacgatagggctccaangatcttgtgacttnttgcgctatagcgatctcgngtgcaataganagnttgatgcgtaagctaatgagagctagatagcgctccgaccaatgccatttcgacaatttgatatntatatttagctcgagaaagggctccaatggtgtatagcaagcgnttttttgtccgtntaccaccgggtatacaaggggcgaaacaaagacaacggcaacaaagtaacgtattacatcacctattggtggatcgcacatcgtttgtcatctcaactcccgtangtacaaagggtaaagccactatgtccgctgggttatatcatcttagggacgaccagaaatgttatctttctcttaacctggaaccgaaccctaaagttaaagagttgaccccggtcgctttttcccagcttgggttctgtaaaggttctggtcggtattcccccacatttttaaggcgcttcaccccgcttgggccatatttggcccccatatatagaggctttccggagtggtctcccccaggtgtgtttcccttttcgcgagtgggcatacaccttaanaaagttatttagcgccccaaggtggcccttcgtctttttataaatgcangcatgtggcctatgactcgcttgcgaggacagcgactacgaggcgtcaatttccccaantgggagaggaatatcatactgtggatagttctcccancaagacttgtagaatagatacatgtctcgcatcaggaaggccaacgaggccacactcattcgcgctntgcattatctcctcacgagcagcactc

SEQ ID NO: 702112 - DNA, 398 bp, Homo sapiens
  misc_feature (235)..(235): n is a, c, g, or t
  misc_feature (242)..(242): n is a, c, g, or t
  misc_feature (247)..(247): n is a, c, g, or t
  misc_feature (264)..(264): n is a, c, g, or t
  misc_feature (279)..(279): n is a, c, g, or t
  misc_feature (314)..(314): n is a, c, g, or t
cagggcagggcttcttgtcctggggcccccttgagctgtgaactgggcagcaaggccatcagaagctgagtacagcaagggggcagtgagcttggccctcagtccaccccctccgcctcctggcctccaccctgcctgtgtctggggcctgggggcttctcccctcgctgctgcaccctggcttccagcgtctgtgtccctgccctcacgtgccccttcccaggctcctggggcnccttggnactgnacactaaacagaaaggnttaagacaaaatgtncccgagttgggggaaaatccatttgtgttcccccnaccctgcctcctccacgatgtgaccccgctcagagcccttgtgtctgtgaactttcaatgaaatacccatgcagctaccaaaaa

SEQ ID NO: 702113 - DNA, 103 bp, Homo sapiens
cctgttgagaggaatgtgagtcagtgggtactttctgagaattatagaatgttctacacaacggccatctagacctccctaatattgccttattcaaagagat

SEQ ID NO: 702114 - DNA, 128 bp, Homo sapiens
tgggatcacaccactgtactccagcctgggcgacagagcaagactcccacctcaaaaacaagaacactacttagcaacactattacacggaccaagacgggacatatcatgttacaacacacacttac

SEQ ID NO: 702115 - DNA, 524 bp, Homo sapiens
ggtgactctgaggatcccctaatggctgtcagaaattacattttaactaaatactctgtattggtgtgaacttatgtccctaatgtgtcacttcttccctgccttttctccttgttaattcaggtgattaatgtaaccagacgtgtaatgaccaataagaagatgtcacaccatatgccaatggttggaaaattaagcccagtagttggagctgtatattgggccggagtaatatgcagcatccagctttcaagcagatgtgtccctaggcaatgatagcaagcagatgccctatcaggaagagggggtatcaacacttacactcctttaatacattcctggcttcccttaacctactgcagtcaccacggcatgccgcttttcagaggagccccattttgaggggcaaagggcggacaagtatatggttgcattccgagcggtacctccaacagccattcccgcctatccaggaatagtcttacagtaaccaatcattagctgctaaaatacctcaagtgtgg

SEQ ID NO: 702116 - DNA, 234 bp, Homo sapiens
ctaaatcctggaggtcttgaattactgccttactgagacactggacgcacatatccatgtaggctttatgacactcttgcgtcactgaaaccagcctgacagacatcttcagctggccaacggttatggctatggactcagtgaagacctgtaactagctcatacggatttgacggatattgagttgctccaattataagtctgtactggaacatagaatgctacctagtggct

SEQ ID NO: 702117 - DNA, 589 bp, Homo sapiens
  misc_feature (51)..(51): n is a, c, g, or t
tctcgttgtcttaaattattaattgaaaattattcatggctaaataatgcntaggttgccatgagccttttctccttctataaaccgtgtcagcattcttttatatatatctttcagcacatctgcaatgatttctttggaataaatttctaaagttcgctggatcgaaagattcagggatttttagtgttctttcagtttggcaaagtattttccagaaacaagcccatttcagttctgaataaacaaattcttttttatgttgcattaaaatctacctccttgtagcatatgcagggaaaatgaattatttgtcaacatgctttcagatacttgaagattgttctatttctctttatgactattctgttttctggactatacattatctttcccatgattttacattgaatggtggtgattcagtctcaatgtattatttgctactccgaggtatataataaatagatagatgtgattagcttctaattaaagggatatagtaggtggaaatgtataatagtgcgtaagccagacacagcccactgggtttgacaaatctcttttcaagtaagattaccaaaataaa

SEQ ID NO: 702118 - DNA, 129 bp, Homo sapiens
atagcttgcctttttaaaatctgtaatccctatttatttccaggaatattgattatatctttttctcccactggattgtaaattcgccgaaggcacagcctgcatgtgttacactacttcacatatact

SEQ ID NO: 702119 - DNA, 180 bp, Homo sapiens
cgttaagacttcaggtctccaagtgagtgacttaaactcttgcttcattgggaggccgaggtggacagatcacaaggtcaagagatcaagaccattctggctaacatggtgaaatcccgtctctactaaaaatacaaaaattagctgggcgtggaggtgcatgcctgtagtcccagctac

SEQ ID NO: 702120 - DNA, 437 bp, Homo sapiens
cacggactgacgagatcctgtatgctaggtggagagagccacatttccccctggatatgttatgtaaaagtttgaggttgagatgacttatcttcacactctgttgttactctcagaagctactacatgtgaaattctaatgactgcattatcctgccaagtgaaagaggcaggcatgtagcaaggacagttaagaggggggagagcctcgtcatgatctgggagtctccttctgacatcttgggaaaaactgtccacagtgtgaagtcatccacttgttgtcctggtttacagtttgagcatctgttgttatggtgtcgaatattttggtgagttctgagtggctcatgcttcacgtacaagggttttcccatgaaatttacattgagttgtccacctccagcttatagggcttctggaacagagtgggtcttgcc

SEQ ID NO: 702121 - DNA, 80 bp, Homo sapiens
tggtgattccaagaaattggaatgaggacaaaattaaggattaaagaagaagagattacaagaaaatccaggaaaagtcc

SEQ ID NO: 702122 - DNA, 584 bp, Homo sapiens
ggccgatcccaacgaggctccctgtgagcccgacgcagagcagcgcccttgccgggccaagcaggagaccggcatcatggattccttcaacagtagtgctggacggggccaggcaccttgtgggcttccggactgcaatggggcaaggcacttcaatgtgcccctctccatttcccggctcactcctgggggcaaacgcggcgcaggccggagtggccgtgggctgactggtgtgctgagcatctgatggcgagaatgcgggtagcctcacactacatctgaagctcagaacaagatccgggcctgcggggtatcgctctcagcctggtgcctctatgcagggacccagccgtgttcagagacaaagcctgcagaaggcctccgttccccgccgcaggactcctccgtcggtaacacctttgcagcccatgcagtataccctcaatcaatgaccggcccgagcctttgggtgcgcccccgctcccgctgacagctgccccgcaggagaatggacaggccggtccgaccgctggtcccagattgccagcaagcaggcggcttgataggagaacacagaggactag

SEQ ID NO: 702123 - DNA, 170 bp, Homo sapiens
tacggatcttatttgcggtgcctttcactctgcaggaagtagtggctgcacagcaaagaggtggcccgcttggaagacttggatgcgcaaggcaggtgagcagcaggaaacatgcctcccgggagttagtcaaggagcctgcgatgcgcagtgagacagacatgcccgat

SEQ ID NO: 702124 - DNA, 1698 bp, Homo sapiens
ggcctggctacgctgctctgtgctggatgccagtgatctggccccaaaggaccgcaatggcacatctgaccccttctgtcctgagtgctgctacaatggtgcctggacactgtgtgagacctcgatctgtgaatgaatgtcatgctacccactgctggaatgatgactgttttgaattttgatgcttgcagtgaggtgtggccatggatgtgctgcttgtgctgttggacgtgccttggtgacttggtgaccattgtcatgcctgaaactgacttccttggtgcaacatgtgtgtcgatttgattgtccacgcagacttgcgtgggttggttgcaagcacggtgatgctgatgtgtgcttgtcgttctccgtgcttgcatgacccctgaaacccatgttcccaatccagccctgtgttgtgccatcgcaccgaagtgcgccacaccctcggtggcctctctttctcccagcctctgcgcagtcgctgccgtgccttgccgtcgcactgcacgcacccggctgcatatgcacacatcccaggcatcacttaccgccatggccccaaccttgtcgcatcgccacccctttgccttgctcgccccacctgaccgtggctccaactgccttctggagcccacttgccatcgggggctcgcaaagatggccacggccttgcattccccccactctcaatctcgcacgtgaaggaccaagacacaaatggccaaccccggaacgtctggtccgtgcacccagcggactccgcttgtgcgcccaccgggaagcaccccgttgccttccacacagccttaccttctctccttgtatctgccacgggttcggcctctggtgcccaaactgcggacctttcactcttcgtccaccccattggcctccttatcacccaatggccctctgggaactccccttgacgctaccgcgcaccccacaagtctgcaatcaatcctcaaccatccacctccccattcattctctcctctcctacgactccaacaccactcctctctctctctcgactctctcctccatccgtcatctccctgctctgtcacatccatctccatcatcctgactccttccacaagcgtcagtcatgccactctccgtgcacaatctccgcacacatacatcactctctcagccacacatctcgcctctgctctccttcgttcccctccccacacattctcacttctccaccaccaacctcgcgtacctccatcacctccaccaccacgccacccacccgcttcccacccccttctcatcccccccagaccacaacactcatcccacacctctcacgtccatcttctcatccgcttctccctccactctccccttctcctcctctccctcacactcacacctctcgatcatctcactcgctactctcatctcacacacactcacacctcgctcgcctacatgcttcatgatcctctcaccactctctctcccttcactctctcgactcacacgccgcacacactcacgcgacacttcactctatcccaccaccactcaccacttcaccctcctcctcactcaatccatcacacaccactccgcccacccgaccaccgctcactctcctcactactccacccaccaccgctccactcctcaccaccctactcactcctcaccctctatcctccgcctcttcctccctct

SEQ ID NO: 702125 - DNA, 216 bp, Homo sapiens
  misc_feature (142)..(142): n is a, c, g, or t
  misc_feature (213)..(213): n is a, c, g, or t
cggccatggctcacagtacgctagcagctggttgagcagcggatccgagcttccccgacttccccaccccaggcgtggtattcagggacatctcgcccgtcctgaaggacccgcctccttccgcgccgcatcggcatcctgngcgacacctgaaggcgacccacgggggccgcatctgactacatcgcaggcctagactcccgaggcttcctnttt

SEQ ID NO: 702126 - DNA, 124 bp, Homo sapiens
agaagagtcaactgtggagggggcacctgctgaatgaatcctgcgtgagctgctatcagagcagacttacacatcacaacatgactttcctgggcctgactcccggacctgtccccagcgcctc

SEQ ID NO: 702127 - DNA, 1803 bp, Homo sapiens
  misc_feature (35)..(35): n is a, c, g, or t
  misc_feature (266)..(266): n is a, c, g, or t
  misc_feature (371)..(371): n is a, c, g, or t
  misc_feature (1159)..(1159): n is a, c, g, or t
ccttcctggaatgagaacacatataaggactatancagcgattgatatcgctcatagactacataggctcaatatgtgtcggaattatgcatatatctgaatgatcaaggagaacctgtaaccagtagtagagtatcagatgcggtgtatacactaagcatggagattgtacgtctcaaagaggtagcataagtacgtcatgggtacctaaactcaccttgataccactctactggtctgttatagtgcacctaggatacataatncacacataaaaaccttgagcagaaggctccatggcgcaaacgggcttaggaaccacgcacgaccaacaactgtaggcaaagctcgtattgcatatggtaacactngcatacacacggaataaccacacacacgcacctcgtggtgtgtcgtacaaataagtacgcatgacggacatgatggttccatcgcgacatgcctgcatgtgccaaacatcacatcgtaacacacggggggcaccgttgtgtgccgtatgtacgcttggggcctagatcccaaaaggccatacacgatacaatacgctatcgtgtcatccccacacggtctatacactacatcctttgcctccgtacaaggaaacacccaccatacatttagcaattcgctccgatattgaatacattcatggtggtacgcccaatgtgttacttatttccacttaaccaaacaacatgagggccaagggcaatgcgtactctgtggcactccacattacaaagaaggcacgaacacccaagttagcctctcgcatgtgagtgcggattgtctagctccattatactattagggcttggacccaaagctacagatgcactgttccgcttttgcaaagacagggcaaaagaacgccaacaagacaaaacctttggggggcaacaaacgagggctctgttttacccccggcacgaccctggcgacacaggcacatctgccttcaacaaacggtaaattctcccttttatgggagacttatatttggccccacccaataggcacccttgtttactgacactcgggcggtacacgcgactgccgcataccttattggacgttacttcaccctagcgggggaagtcggccattacctccttttaaattctggttttcgcatttnaactcacttggtttcggaaacatccttaggtttcgcctggaactgttggacattcaccactggtcacacaccaaaacttgaacccgttacactatttcctggcacattttctggggcgcaatgaaaaggtcacctttggaacagggtcacagcagttatgttaacaacgcggaacctgcggtgcgggtacctctgggggggccacacactactttttccacccttaggggtcgcggacataactctcatcacaccaaaaattgcaacacaccagggtgtccagggtgtcagcccacactgggtaacattgcgtcagggcaaagagggccgggaggccggcgaacacaccgggtgggcgttaactcaccacgcagaaaaggagacggccccaaaggggaccacgacaccgggagatagcctgggaagcccacttatctggcgttcccacccacgtggcgaccgccacagtaatacacaaaacccgcaggaactatactaacaagcaaacaacgcatgaagagctcaggccagcagataacccacaacacgtagtagcagagccggtgagcagaccaccagcgctgcgcgccctgggtggacagcaaacctatggacgatggagaccacattatactcaatcaagg

SEQ ID NO: 702128 - DNA, 159 bp, Homo sapiens
tgctctagaggccccccgcgtgtgagtgtagtcccagctacgtgggtaactgaggtggtgaggatcactgacgcctaggagctcgaggctgcagtgagctatgatatgtgtcactgcactccggcctgtgaaacaagatcaagactctgtctctaattt

SEQ ID NO: 702129 - DNA, 207 bp, Homo sapiens
tattatttttaaaaatgtaactgaatctcatgaagcaattatttcaaacttttcggaacatgcgcacgtctttgtaaatcatacgagtaaagtcacttttgacttaccaatagtttgggcacaaagcacgcgttatttaaattcccaagattcagatacgctttctgccatggccgcaataaaggagaatagtaaattagatttagt

SEQ ID NO: 702130 - DNA, 297 bp, Homo sapiens
ccccggcccaggtctaacatgatgcagcgtatgcgctccccctttgtccctgttcctgtccagagcactccccaggcaaggcgtctggttgggtcgatggactcccaggttgggacccgaccgacttgataaactcaaaaatcaccactgtactgatctctgcattctgcctcttctagccagtaacgtactttccccagtgtctttgaaaggctgtctctctggaatatcccactcgtcactgatcgtcatatacttgtcaacatccgtaaagaggttgacccggaatgtgtgctg

SEQ ID NO: 702131 - DNA, 886 bp, Homo sapiens
gagcgggtaacgcaggtctctgatgctctgccctcttgtggctgctggctgtgcagctgcctgctcatccctctccatggtgtgtccttggcttcttcctgctgtctgtcccctggtggataactgtgcccctgtgccctgctccttgtttgttgtgtgtgacttgctgatgcctctagtgatgcctgcctggtgaatgccgtgatggaatgcttgagtgcagtggtggcttgtggctgggtgatgtggtcctggtgtgagtcctggtggctgatgtgccctggccctgcctggccctggctgatacctctcggcctaatgcacctgacacccctgggggacgtctctgcaccttgctgggccctggtggcacccctggtgatggtgagacaccccatgtacccgtgcaacacgggctgtagtggttgtttgccctggccctcgtggtccacaacctacccctgctaacacccctactgtgtacacctaatagctgagtctgcgacatcgcccgtgacattctgccaggacgatggcccctgtgcttaggcccgatttaacgggttagccacaatgataatacttgccagtaacagggcatgtttttctctgtgtcaagcgctttaagttctctctgaattgccgcaactctgggagccagactgagaaaactgaggtgcagggagattagagcccattgccaaggttttagagtgagtcagtagctcagctgcactttgcacctggaacccgcgctctcgcccaccctgtctagccctggcctgtggctgggacctccagacataaaccggatgctcttgcccagctctgggcccatttctgctgttctgctcagttcaacctgatggcttccttattgggtgac

SEQ ID NO: 702132 - DNA, 373 bp, Homo sapiens
  misc_feature (40)..(40): n is a, c, g, or t
  misc_feature (92)..(92): n is a, c, g, or t
  misc_feature (94)..(95): n is a, c, g, or t
ctcttgttgcccagttttgaatgcaggtggtgtgatctcnactaaccgcaactttcaccttccaggttcaagcgattctcctgcctcacggntnncaagtagctaggattacaggcatgcaccaccatacccggccaattttgtatttttagtagacagcgtttcaccatgttggtcaggctcaaactcctgacctcaaactcctgacctcagcagaccactctttaacaatgataaaaatccagactctgaatagttatgtaactggcccaacacttggacgtggagcgccacatgtgtgcctattgggttagcggccaagaatattgaccatcagatgaaagaagtgactgggaacatattaccagcaaca

SEQ ID NO: 702133 - DNA, 113 bp, Homo sapiens
gacagtcaccctgatatgtctctatggtccagaccttctgcagacatttacccttcattcacctattaccgttcaggagaaaagctcgactgtgtgcggcttcgtgagaatct

SEQ ID NO: 702134 - DNA, 461 bp, Homo sapiens
gaaatacaaaaattagcttggcatggtgacgtgtgcctcagccttccaagtagctgggattacagtgcccaccaccatgcccagcgaatattttgtatttttttttttagtagagatggagtttcaccatgtgggccaggctggtctcgaactcctgaccttgtgatttgcccacttcggcctcccaaagtgttgggactacaggtgtgatccatcacacccggccaacttttctttttttttttttttaggagacagggtcttgctctgttttccaggttggtctcaattcctgggcccaagcagttctcccacctgggcctgccaaggtgctagtattataggcgtgagccactgcgcccagccctttatagtttttttcttttttttgagatgaagtttccctctgtcaccattgcactccaacctgggtgacagagagagactccgtttaattaaaa

SEQ ID NO: 702135 - DNA, 811 bp, Homo sapiens
  misc_feature (26)..(26): n is a, c, g, or t
  misc_feature (40)..(40): n is a, c, g, or t
  misc_feature (65)..(65): n is a, c, g, or t
  misc_feature (72)..(73): n is a, c, g, or t
  misc_feature (89)..(89): n is a, c, g, or t
  misc_feature (92)..(92): n is a, c, g, or t
  misc_feature (111)..(111): n is a, c, g, or t
  misc_feature (147)..(147): n is a, c, g, or t
  misc_feature (204)..(204): n is a, c, g, or t
  misc_feature (252)..(252): n is a, c, g, or t
  misc_feature (257)..(257): n is a, c, g, or t
  misc_feature (264)..(264): n is a, c, g, or t
  misc_feature (272)..(272): n is a, c, g, or t
  misc_feature (288)..(288): n is a, c, g, or t
  misc_feature (291)..(291): n is a, c, g, or t
  misc_feature (294)..(294): n is a, c, g, or t
  misc_feature (301)..(301): n is a, c, g, or t
  misc_feature (304)..(305): n is a, c, g, or t
  misc_feature (307)..(307): n is a, c, g, or t
  misc_feature (314)..(314): n is a, c, g, or t
  misc_feature (316)..(316): n is a, c, g, or t
  misc_feature (334)..(334): n is a, c, g, or t
  misc_feature (340)..(340): n is a, c, g, or t
  misc_feature (346)..(346): n is a, c, g, or t
  misc_feature (349)..(349): n is a, c, g, or t
  misc_feature (363)..(363): n is a, c, g, or t
  misc_feature (379)..(379): n is a, c, g, or t
  misc_feature (382)..(382): n is a, c, g, or t
  misc_feature (398)..(398): n is a, c, g, or t
  misc_feature (443)..(443): n is a, c, g, or t
  misc_feature (445)..(445): n is a, c, g, or t
  misc_feature (473)..(473): n is a, c, g, or t
  misc_feature (496)..(496): n is a, c, g, or t
  misc_feature (504)..(504): n is a, c, g, or t
  misc_feature (590)..(590): n is a, c, g, or t
  misc_feature (592)..(592): n is a, c, g, or t
  misc_feature (595)..(595): n is a, c, g, or t
  misc_feature (603)..(603): n is a, c, g, or t
  misc_feature (611)..(611): n is a, c, g, or t
  misc_feature (696)..(696): n is a, c, g, or t
  misc_feature (701)..(701): n is a, c, g, or t
  misc_feature (706)..(706): n is a, c, g, or t
  misc_feature (738)..(738): n is a, c, g, or t
  misc_feature (795)..(795): n is a, c, g, or t
tctcatttaacttttttaatgggtcncaaaattctgtganaaatttttggtcaaattgtttccantaaaaannactgattttaaaaacnaanaacttaaaactgccacacncaaaaaaaaaaaccaaagtgggccacaaaacattcncctttccttctgaaggttttacgatgcattgttatcattaaccagtcttttactacnaaacttaaatggccaattgaaacaaacagttctgagaccgttcttccnccacngattaanagtggggnggcaggtattaggganaanatncatttanccnncngagcctncngggcagacttggtgaccntgccanccccancanccttcttgtccacngctttgatgacacccnccncaactgtctgtctcanatcacgaacagcaaagcgacccaaaggtggatagtctgagaagcncncaacacacatgggcttgccaggaaccanatcaacaatggcagcatcaccanacttcaanaatttagggccatcttccagctttttaccagaacggcgatcaatcttttccttcagcccagcaaacttgcatgcaatgtgagccgngnggnaatccaanacaggggnatagccggcgcttatttggcctggatggttcaggataatcacctgagcagtgaagccagccgcttccattggtgggtcatttttnctgtnaccancaacgttgccacgacgaacatccttgacaganacattcttgacattgaagccacattgtccccaggaagagcttcactcaaagcttcanggtgcatttcgacaga

SEQ ID NO: 702136 - DNA, 398 bp, Homo sapiens
gtggctcacggcgctgccactgccttcatgtagctgcgccaggtggcggtgtgatgatgcagcctgacgactggcgtttggtggtcttcattacctgctttcgggacaagattcctaatttggagcgtgcaaggcgggcctgcaaagcatcactgcaggccagaaagtcattagcaagcataagaacgggcgcttctaccagtgtgaagtggtcaggctcaccaccgagaacttctatgaagtcaactttgatgatggctccttcagcgacaatctttatcctgaggacatagtgagccaggactgtctccagtttggtcctcctgctgaaggggaagtggtccaagtgagatggacagacggccaagtctatggagccaagtttgtggcctcccaac

SEQ ID NO: 702137 - DNA, 1035 bp, Homo sapiens
  misc_feature (109)..(109): n is a, c, g, or t
ggacctgttagtgacgtggggacgcacgacggggcactgaggggacgcacgcggggacgctgggggacgtgggggcgccgagggacttggagggcgccgagggacgtgngggcgccgagggacgtggggggtgctgaggggacgcccgccagtggccgctgagggacgtgggagtgttgagacacagacacaggaagcatcaactctgaggctttggccaggatgtgagcccgactttcgcagccccaactggcaggctgacctcatgtgaactccctggcgatggcatcctggagacacccacatggctgagctggcaccataggcactcataatccaggttcagtttctgccagcactaatttggtttattccacatggctggagccactgcgggactccatttgttccggggccaccttcctgtcaccttttactgtttcttgagtcagcaagaaaggcagatccgactgaagactccagcactctcctcagctgcagcccccacagagctccgcgaagtcctttctcccacaggacagatctgaggcacccaccattagaagaaaggagtggagaaatgatatgcaggaagaaggcccattctgattcaccaatcgcatggacgcactttcctaccaggctaggagggaggaaagtagagccccaccctgactgctaagccgtttgctttggtgtcatgaaaaaagagttcagcttcccaaatcagagaggaaaaggttttcaaggggtcccctatttctattatgtaagctttaaatgacaaagtggacctctggggccaacgtgggtgtgtgatggtggttttgtgggattctccccatagccccatcagacggcctcaccttctgggtctcagtggccccaggtgcaacacggctcctccagaaatgatgacagccctggcgaccaaggactccctgtgccactgggtttgcgctcagaagtatattcaatgatttccccagaaaattccaagtcatctcctaatactgtttgtgaaaactaaaaaaa

SEQ ID NO: 702138 - DNA, 845 bp, Homo sapiens
  misc_feature (109)..(109): n is a, c, g, or t
  misc_feature (836)..(836): n is a, c, g, or t
  misc_feature (840)..(840): n is a, c, g, or t
ggacctgttagtgacgtggggacgcacgacggggcactgaggggacgcacgcggggacgctgggggacgtgggggcgccgagggacttggagggcgccgagggacgtgngggcgccgagggacgtggggggtgctgaggggacgcccgccagtggccgctgagggacgtgggagtgttgagacacagacacaggaagcatcaactctgaggctttggccaggatgtgagcccgactttcgcagccccaactggcaggctgacctcatgtgaactccctggcgatggcatcctggagacacccacatggctgagctggcaccataggtgaggccacttcctgcgaaggtagctggatgctcctgcctggagctgcccccggaccacagagcatccaggagatgaatgcacttccagccccgccaccctggggagatatacagctgaggtggcagctttggagcaagcagggcagagatgcttccccctgaggtccctcccagctctgctaccttgtcactcaaggtatgggttggttgtgttccccaaaaatacatgttaaaatctgagtcttcagcacctcagaatatgacatcatttggaaataaggtcattgcagatctaattaccatagtgaccccttatcctggggaaaatgttccaaggccctggtggatgtctgaaacctcagatagtacctaaccctatatacactgtgtttttttcccatgtgtacagaaatacgataaagtttaatttataaatgaggcacaataatagattaataacaatgataaaatagaacagttataacaatatactgtaataaaagttatgngaangtgaa

SEQ ID NO: 702139 - DNA, 612 bp, Homo sapiens
  misc_feature (109)..(109): n is a, c, g, or t
  misc_feature (535)..(535): n is a, c, g, or t
ggacctgttagtgacgtggggacgcacgacggggcactgaggggacgcacgcggggacgctgggggacgtgggggcgccgagggacttggagggcgccgagggacgtgngggcgccgagggacgtggggggtgctgaggggacgcccgccagtggccgctgagggacgtgggagtgttgagacacagacacaggaagcatcaactctgaggctttggccaggatgtgagcccgactttcgcagccccaactggcaggctgacctcatgtgaactccctggcgatggcatcctggagacacccacatggctgagctggcaccatagggtgagggcaccagggccatggggaccgtggttgcttgcctcagacatggccagcaagggaggcacaacatggggctgttgagtgaatgtgtgagaggctgtgggtccccacagtccagccaccagcggcctcgcagcatcataggagtctgaggtccaagacaccggactcacatctcaaccctgccctgtgctgctcagggccaagtntaagctgctgtgacaaagaggcccccacatgcagcagctgccacagaacacggtcatctgtttttcatgcaaaaaaa

SEQ ID NO: 702140 - DNA, 110 bp, Homo sapiens
ccccggggggaattcccttttttttttacccccccaaggggtttgcaaaaaaggtttcccttttgttcccttttaaaggggtgttaaacccaaaccctttttggttccca

SEQ ID NO: 702141 - DNA, 347 bp, Homo sapiens
gcccccccccccaaaaaaaaatgacatcccctgctgctctaataaaatcaaaaaaaaaaattttttttccccccccctttccccatttccaaaaatttggtgaaaattttctattaaatttctaatttattgagggcccaaaggttgttttaggaatcacttccaaaattttgccttttaatgtttttaacaagggccaaaatgttcaaaaaccccccccttttattattgggaagttttggggtttttttttggggggtggacaaagtttgccctccagcctgggtggcaaaacaaaactctgtttcccaaaaataaaaataataaaataaaaagttttggctcca

SEQ ID NO: 702142 - DNA, 1234 bp, Homo sapiens
ggtaagccgccagaacacaggtgtcgtgaaaactacccctaaaagccacaatgggaaaggaaaagactacatatacaacattgtcgtcattggacacgctagattcgggcaagtccaccactactggccatctgactctataaactgcgagtggcatacgacaaaacgaaccattgaaaaataatagagaaggaggctgctgagatcgggaaacgggctacctatcaagtatgcctgggctactaggataaactgaaagctgatcgtgaacgtaggtatcaccattcgatatactccttgtggaaactctgagaccagcaagtactatgtgactatcataagatagccccaggaacacaaagactacttatcaaaaaactatgcattacagaggacttcatcaggactagactgtgactgtcctagataagttgctagctaggctgtacaggctagacatcttgcaaccactgattatactccaatgaataggacagaccctgagagcatgccctatctagcgcttaacacacttggcctgctgccaaccaacttaaattgtccaggcttgttcacgccgcacgactgggcatatcccaccttgagttctactcacatacactgtcctattaaccacgatactcgcagcgacacattggttcacaggacaggtccatgcacctcaacgactgtatgacacactgtgcgctcatctaccctcctgcataacaagactcgacactaccggtggccgcaactacacaagggcccagccaacagggagtgaccaacccctgccggaacaccccaacgtgcccaccaccatgacccagggggaaccaaacgagctacatgccacaaactcacagcacggacaaaggaaaggagtaaaacccaacacgacaaaccaaagcacgaacatgtacagaccataacaacaatggcacatgagtacccaccaacataagacccaccagcacacgcaccacgcagcccagccaccacacgggacaggaccaaacactactggacgcgataaagcacacggaccgcggtagaccacaagtgcccatcagggcagcaaaaacgcaagggaaacgcgtcactccccgcgacccgacaacggaccacccgaaccaaaaagaagacccaaaaccgaccaagcagccgagtgccctgacacacacgcagacacagcgactgtagcgcctcatccagccgcacaacaatcaga

SEQ ID NO: 702143 - DNA, 240 bp, Homo sapiens
aggcttagtttccagttcagactaagtaacagtatgtgtttcataagtgattaaagctatatcatcccagtatatcagttaacacaaatacagccacatactgagtatagtatgttcacctttcagacttggagatactggacctgtccgtgtaaataacactaaggtaaggatctgctaagtgtataatatgaactgctaagcccatccctgagtgtcactgtcatgagatgaggagct

SEQ ID NO: 702144 - DNA, 154 bp, Homo sapiens
gatgaaatctgtaactcttactggattattatcttaatagaagagttaaaatattaaagttgagaacctccgtttattttatgtgggactgcgtagccctctgtgggctgggatattgtggttggtaactgtggcatctggagggaacccacgg

SEQ ID NO: 702145 - DNA, 539 bp, Homo sapiens
gtttcaccatgttggccaggttggtcttgaactcctgacctcaggtgatctgcccacctcggctcccaaagtgctgggattataggcgtgagccactgacccagacttatggttcctttttaaaaatataaaaaaatttgaaaggtttccttctggtacttgtccttatggtatgtatgtatatctatttttacggtagcacatggcatacgatatgtatacaaccatggtagtcatatataagcatatatagcataacaatatgtatagtctatatataacactacactcgaccagataaccattctcccaactctctgatcctagtcttcctagactctgctaaaggggcaaatctgggttcgagcttcacacacctacagtactatttaccctacaacaagttccgtgtgcgcgctcttacaccgaggctttcgacgaccattgggcctaaatgtccatgtagtcgctactaacaacatagttaactctaggattgacattcacgtctacccttgtctttgcctgtgcagtccccc

SEQ ID NO: 702146 - DNA, 187 bp, Homo sapiens
attcgcggccgcgtcgacttttttttttatttaaaataactcctgagtataagcaatttatactgattactgatagaataaaatgcaccattaagcctacaaatgtgagaaataattatctcatatgcacagaaggccaaagtcaatagtctaatagtactgcttaccactgtagtgtaaacttctt

SEQ ID NO: 702147 - DNA, 175 bp, Homo sapiens
ttacgctgaataaatgccgtcttctaatgaggcgtcctgatcaccttgctctagactgtacctcgtcgcaaaacctacctcatattgacccagtccttgcaatatttttttcttccataacatatcatactcctgaattttgctacatacttaaggttatttatacttcatactt

SEQ ID NO: 702148 - DNA, 650 bp, Homo sapiens
cacggtggctcacacctataatcccagcactttgggaggccgagtcggacagattatgaggtcaggcgttcgaggccaggagttcgagaccagcctggccgacatggcaaaaccccatctctactaaaaatacaaaaattagccaggcgtggtgacgggcacctgtagtcccagctacttgggaagctgaggcaggagaatcgcttgaacccaggaggcggaggttgccgtgagccaagatggtgccactgcattccagcctgggcgacagagtgagactctgtctcaagaaaaaaaaaaaaattggcagggtacagtggttcatgcctgtaatccagcactttgggtggccaaggtgggtggcttgcttgagcccaggagttcaagaccagcctgggcaatatggtgaaacctcatctctacaaatacaactagctgagcatggtgatgctcgcctgtggtcccagttactcgagaggctgaggtaggaggatctactgagcctgcgagtcaaggctgcagtgagtcctgatcatgccagtgcactctagcctggcaacagagtgagactctgtctcaaccagaattcgcccagtcgatttagattcggcaagctttgcatgcgcccgaattcgagctcttgccttggc

SEQ ID NO: 702149 - DNA, 132 bp, Homo sapiens
tcccttgggtaaggaatttggatcttttttggggtttttaaaaaaggtttttttaaaaaaggggacccttttccaatggggattttggatttttcccctggtttttaaaaaaggtttttttaaaaattggga

SEQ ID NO: 702150 - DNA, 334 bp, Homo sapiens
tcggtaccccagaacaatacacggtgaactccattgctgatctggctcgccagtggctcggcgatgattcggcgatcaaccgcagtttccggccatcctttggtcgcaagctggctgggtgacgtgcaccgtgattggcacgtgaaattccaacgtcaaggtcatcatcgaatgcggaggttgcagtagggaatcgactctactcggtcgtgggtccgtcctgatcgttgagcgatctggggatctggcgatgggcggacgggacggcgcgctgccaaaacaaacggttctgtcagcacgtgaccagtgtgaggggttgaggctgcacatgtcg

SEQ ID NO: 702151 - DNA, 429 bp, Homo sapiens
  misc_feature (98)..(98): n is a, c, g, or t
  misc_feature (145)..(145): n is a, c, g, or t
  misc_feature (169)..(170): n is a, c, g, or t
  misc_feature (173)..(173): n is a, c, g, or t
  misc_feature (178)..(178): n is a, c, g, or t
  misc_feature (181)..(181): n is a, c, g, or t
  misc_feature (208)..(208): n is a, c, g, or t
  misc_feature (286)..(286): n is a, c, g, or t
  misc_feature (343)..(343): n is a, c, g, or t
  misc_feature (352)..(352): n is a, c, g, or t
  misc_feature (380)..(380): n is a, c, g, or t
tcagaagttcagctggggagtgctcttgccgcgatggaccgacagctcatgaggctggcagacaccccgtggctctgccagtccgcagagcccggcgncgaagagagtgtgatgctggttcttgccaagcgcagtcgcagtggtnaattccgcctcgtgaccaagtttnnatnggggnttntcagcgtgaacaaagaagctcacagtngcctgggagccccggttcacctctgggggacagaggaggttgctgcctggctggagcacctcagtctctgtgagtttnaggacatcttcacacggtccgacttccggggctctgagctcctgctcctggatcggngggacctcntggacctgggcgtgaccaaggtgggccncttgaagaggatcctgtgtgggttcttggttctgtgccgttgtgccccc

SEQ ID NO: 702152 - DNA, 103 bp, Homo sapiens
agtagagattaacagtaaaggagatcagttgatgaggcacaggaaggagcagatgacccatcagaagcatatgcagggaaagggcagttactgggcttctggg

SEQ ID NO: 702153 - DNA, 355 bp, Homo sapiens
ttgaagaacttggagaatgggggccctttaaaaggccccccttctttttttttggcgggaaagccttccccccccggggcccccataatccatttaattttccttactgggcctttagcttggcccgttttttttcccacccgggccctggggggcaaacttgggcccccctgtgaggggggtctatttttaaaaaaactggtggggcccagggcccgggccctttcccattggctgattctgtttaatccttttctaaaaaagcttccccgccttatattccccccccgaaaggcccaaaaaatggcccgtttttctatatgtgaaaaaaaggggttgggttgtttttctccca

SEQ ID NO: 702154 - DNA, 81 bp, Homo sapiens
ggcggcttgtgctgagagctaaacccagcatattctatgattttttcagatatagataactaaacttactgaacagcaact

SEQ ID NO: 702155 - DNA, 181 bp, Homo sapiens
cccctttcccccccccccccccctggggggttcccactttgtgcccctttgggggggggggggccccccccccctccccaggggcccggggccccgcttcttttttttttttcttttgggcccctggggggggggggggtttttccgggaattttttttttttcttttcctggggccccga

SEQ ID NO: 702156 - DNA, 709 bp, Homo sapiens
tgccgctgcgaagcacggtgggcctagccctactagtctcaatctccaacacatatggcctagactagtacataacctaaactactccaatgctaaaaattattcgtcccaacaatttatattactaccactgacatgacgtttccaaaaaacacataattggaatcaaacaaccacccacagctaattattagcatcatcccttctactatttgttaaaccaaatcaacaaacgaacctatttaggctgttccccaaactttttcctccgaccccttaacaacccccgctctaatactaagtacctgactcctaccctcacaatcatggcaagcaaacgccactttatccagtgaaccattatcccgaaaaaaatctacctctcttatactaaatcctccctacaaatctccttaattataacattcacagcacagaactaatcatatttaatatcttcctacgaaaccacatttatcccaacctgggttatcatcacccgaatgaggcaaccagccagaaagctgaacgcaggcacatacttcctattctacaccctagtagggtccttcaccaatcatcgactaattaacactcaaaaacctaggctcactaacatttactatcactccatgccagactatcaatctggccacattatttgataggtacacagaagttaagaagatctcttggtcatatgtctagc

SEQ ID NO: 702157 - DNA, 147 bp, Homo sapiens
acgggcacaggagggagaaggcagggagggaagaggaaggagggatgagcatccctcctcaagtatacttcaaaggacatttaactaaaaccccctacgcatttatataaaggagggatgagcataaggagggatgagcatatggag

SEQ ID NO: 702158 - DNA, 1260 bp, Homo sapiens
  misc_feature (450)..(450): n is a, c, g, or t
gctggcttagacgctgacactaaggagaaagtcctacaacagtggggcgtgcaacatggcggcttgagaaacggatgacgacggggacttggttgccttttctcctagtgacgaggcacagtagacaaatggctcactgtcactacgctgaacggagtgacatcgttccgaaatcgtacatctaaagacgaacacaagaggaggtgccgagcgggacctaccgtcccaccggtgtgcttcatggaggcgctcccgaaaacatggctgcaatcccacatactgatggacttctagcgtactcggccttgactagactcggggccttgttagcggtaagccaaacacgcagactaatcatagtgtcgaagccgggtcatgctcgcaggagcatgagcaggaccttgtgtagatagacgttgcgtggccgaaagcggcaatatggtgctctgncgaccggagaggaggcatcaccactagaaggcgtacgactattttctcgcacaaagttcccacctcattaccgcgggggcgaacgcgttgatgcattgaggttgaggcttgtacctacgttccatcaaggaacgcgggctggggtcggttcgccgtggaaaggtgtaggataaccaatcgggcatcgaccgttccgagcgatggggctccatggggaatcgggggagacaaatgggggattccccatctctatagggacaacaccgctcgggagagccctcgacccaggtgcgctatctcctctagatggccacggggggggacttgggcccccagcacctatggggccacccccaagcgtggggcaacgaaattccagggccgtttcgatgggggttcgccaagtccggaggaggggaggttcgcggacccgatggtcgaaatttttcacctttgaaaacggaaaactggctactggcgggcgagagaaagggatggttggtgccaattcattggcaccccttgttaaggcaccctgtccgtgtggggctaggtttgacaatagtgtggaaatacttccggaagtcgctggggaaaggccaccgggggaacggggcgcacaacacaaggaaacgggcccggtcgttggaaagcttccccaggataaattccttccctacgcgaaatgaacattttctcccaaggactacacaacggacacgggagtaacagggagagtgcaatgccttacaatcaaaggtggacacaaggccagggagttgtgcttgagcttccttcaacattccgccg

SEQ ID NO: 702159 - DNA, 612 bp, Homo sapiens
actctagcggatcccctcgatttggtggtattcgggggtattcgtcagaggagtttgttattacccaccttttgaagcctccttctgtcaatttgtcaaactcattctctgtccagttttgttcccttgttgttgagttgtgaacctttggaggagaagagacattctggtcttgcaattttcagcctttttgcgctggtttctccccatctttgtggatgtatctacctttggtctttgacattggtgaccttcggatggggttttggtgtggacgtgctttttgttgatgttcttactattcctttctgtttattagttttccttctaacaatcaggcccctctgctgcaggtctgttggagttttctggaggtccactccagatcctgtttgcctgggtatcaccagcagaggctgcagaacagcaaagattgctgcctgttccttcctctggaagctttgtcccagagcggcacccaccagatgccagttggagctctctgtatgaggtgtctgtcgatcactgctaggaggtttctcccagtcaggaggaatggggatcaggaacccccttgaggaggtagtctgtcacttacgaataccaccaaat

SEQ ID NO: 702160 - DNA, 236 bp, Homo sapiens
ggtggagaactctatgacagacgaatgtcttcatgaatatcacggtatgtatcacatactgtctccatggcccatacaaggactccttacggtactctctaacatacaacctatcccccacacctcagtagagaggtttgcttcccactggaagtcgaaagtccttcgctctcacttattacagtctaaaaatccacactggactatatgatatgctttctacgcatgaggctcag

SEQ ID NO: 702161 - DNA, 503 bp, Homo sapiens
  misc_feature (493)..(493): n is a, c, g, or t
gacgttggcgatcccaaatgcgtgggaaaaaataagaaggaggcgaaaggattctgggtgcggctgtgagctgaatggcaccttctacccatgattattgatcctgacacctgggcttataggacaagaggcctccctaccctgatactccacaagccctggggacaagggagccagctggaggaagagccttggggcttccagggcacaagcatgtgacagtgacccctacaaaactcgggaaggaccacaaagttccagcctctgtttgtttcagagcggcaagcacagcatgggagtcagggggtcttcagcctcagagacaagggcagggctgtgggtctgtcttctgggcctgcgaatattggggagcccccagctaggctgtccgggtcacccttctggaatcaccagctctctcccctctcctcagtgtgccaggagagagggtggggggcatccactcggcatgggcccatggtgggagcccagncccccttccc

SEQ ID NO: 702162 - DNA, 1296 bp, Homo sapiens
  misc_feature (430)..(430): n is a, c, g, or t
  misc_feature (434)..(434): n is a, c, g, or t
  misc_feature (438)..(438): n is a, c, g, or t
  misc_feature (441)..(441): n is a, c, g, or t
  misc_feature (452)..(453): n is a, c, g, or t
  misc_feature (474)..(474): n is a, c, g, or t
  misc_feature (485)..(486): n is a, c, g, or t
  misc_feature (493)..(493): n is a, c, g, or t
ccctgaggctccagcacgttgagagtagatcaaaagatcctttcagcagggtgccaatgcttagacgccatctgggagtctgggagccttccgcagacctgtcagtctcttccacgtactttattctcttaaaaactcagtctgtagtgtttcaagttcttagaaaacacaaagtcctcaggaaagcttagggagctgcctctgccctgttgcctcttcctgggcagctggacggaaccctgcctgcccaccccagggtttgcttccggctgcctgtgcctcttcccgggtagctggacggagtctgcctgcccgtccccagggttgttcccggctgcccgggctcttgtggacccagctgtgccagaggtgattctgctccaggtaatggctccagagtccaagcacagctttgccagagcacagtccngtcnctgntgngtcttcatgtnnacgtgcatctgtgctgtcacncttggagctgnntgacatnccccatcctgtcctgtgctgtcccctccgggggtggggactccaaagagaaaggctcaggcatccctctcatccgtgctcatcttgttccatttcaacttcttgtcttgagtcgtatttgtgcatcagctgtggccccggggatatgggggagggcgcggcacccctcgggggacaggtggctgagcccacagcaggtgaaccactgtctggcccaggggatggccagctgctctgcagggcccatgggtgtccatctgcagccctgcgggagccgtgagcctaacctgccttctctggatgcccccatgccagggctgggctggacgctctgccacgctgtgtccctgggtgtgggcctggcctggtgggggagccacaaactggtgtgtgcccggttcaggcctgtcttgaatccccagctcagtggtgatgtccgcccctcactgggaggttgtggctggcctgccccggaccaacacccgacctgaccctgcacagaccacaactgctgggagggtgatggatcggggatgggggcaacctgacttgtcatagaggcacatagtggacattgggggtcaggcagccttgcagacagcgccatggtactccctgacacagaaacgcagcgtctatagtcatgtgagctctgtgcccagagatcggaccgtaggcatccagcactggggaatccctgaggcatcgggcagaccaggtggcacaattcacccatggagttacgccctaccaaattaaaaacacagtataacacttacagagactcccattagaccacgtcca

SEQ ID NO: 702163 - DNA, 196 bp, Homo sapiens
ctatgctcatctgattgtggaagttctatcagactttaagttccgtggtcctttgatcagcagctcgtaaaactggggttctattgctccaacagtcataaataccccatctgctgtcctgtatgtcttatagaagggtgctccaacatccaactatgtcagtcctcgaggtgcttcccacagacatcaagtttct

SEQ ID NO: 702164 - DNA, 484 bp, Homo sapiens
gcaggtattttattaacttttttcccagaccatatgactatcttcagtggtctcccagcaatgtttagaggcatagaaaattattttcatgttatggactgaatgtttatgttccccaaaaatttatatgttgaagctttcaatgtgatagcatttggagttggagactttgggaagtaattaggtcatgaaggtggagccctcaagaagaatagtacccttacaaggagaggccagagagctagctagctatctttctaccatgtgaggatacagtgagaagttagcagtctgcagcctggaagaggtcttcaacaaaagccagccacaccttcaccttgatcttggaattccagcattcagaactgtgagaaataaatttccgttgtatataagccaccagttaatattatttcttatagcagcctgagcgaaaacacttcatatagagagaagatctgggaagcacatatcaaatattaaa

SEQ ID NO: 702165 - DNA, 115 bp, Homo sapiens
ttgtccccactatgcggcctagccgccgcattacagattattctatttcccccatctattgattctccgaccttccataatatctacatacaatcgaagcgacgtgacaatctat

SEQ ID NO: 702166 - DNA, 378 bp, Homo sapiens
attcgcggccgcgtcgacaaagattacgtgcgtgcatgtgtacgtgtgtgtgcacgtgtgtgtgtgtgtgcgtgaatgattgaagaatgttgtataatgagactggaggtggtggctcacgcctgtaatcctaaacattgggaggccaaggtgggcagaatacctgagatcaggagttcaagaccagcctggccaacatggcgaaatcccatctctgctaaaaatacaaaaattagctgggcatggtggcacgtgctggagttccagctactcgggaggctgaggcacaagaatctcttaaatctgtgagacagaggttacagtgaaccaagattacaccattgcactccagcctgggtgacacagcgagactgtctc

SEQ ID NO: 702167 - DNA, 534 bp, Homo sapiens
cccctcccggtgggtgttttcccccaccgggggggaggaggttctccccccccctctctttgtgggccccccggggggaggggtggtggtgggggcccccctttttttgtggggccccccccccccttttgttttttgttggggggggggggtgggctccccaagatgggggccccaccccccccccccccccttttttgggggtgttttcccgtggggccccccgccccccccccccccccctctgttgggggggggccccccccggggggggttggggtttctgtttcccccacgtttttggggccccccccccctgttttttgtgggttccccccccccgggggcggggagggggggggagtttttcccccctttttttcccttgccccccccccccttttgggggggggttttttttccccttttttttttccctcgggggtttttttttttccccttttctgggggggtttctctcctaaaaaaaaaaaccaacaaaacaaaaaaacataaaaaagggataaaaattta

SEQ ID NO: 702168 - DNA, 806 bp, Homo sapiens
tgtgtgtgtctctctgggggtcttttttttccacaaatatggcgccccaaaaacaaaaaaaaaaaacatcactccgcgggcccccccgggggcgccccccgcgaaaaagcgaaggaaaaacacccgacaacacgcgggcccccaggggtgtactcctctcgcgacccgccccaaccaggagagactaaggggggcgccacctaacccccgccgacaagagagggtgggggcggcccacaccacaccgcgcgggcccccccctcccgccgcctcgcgggcgacgtccgcccccccccccgcgcgggggcgcctccccaacacaccccaccccccccccccccgcccggcccctcttttcttctcctctccctctgtctgcgctctctctcgccggcgctcgccctccccgcgcggcagcgcggcggccgccccccctcgcgcgccggcgcctcccacaccagtctctctctccgcgcgccccgccgcgcgccactctctgtgcgcccccccacccgcgcgcgcccctctctctcccccgcgcgcgagacccctctccccccctcgccgcggcgccccccgcgctcactctcccgcccgcgcgtgtgtctctcttctctctcccctccccctctcggcgcgagaccgcgcctgcgccgcctctccccccctccccgccccccccttcttccccgcggcgcgcgcgcgccccgctcgcacgcgcgcctcccccccctccttctccacccaccgcccccccggcgcccccgcccgcccccccccctccccccccccgcccgccccccccc

SEQ ID NO: 702169 - DNA, 722 bp, Homo sapiens
  misc_feature (272)..(272): n is a, c, g, or t
  misc_feature (333)..(333): n is a, c, g, or t
  misc_feature (362)..(362): n is a, c, g, or t
  misc_feature (411)..(411): n is a, c, g, or t
  misc_feature (435)..(435): n is a, c, g, or t
  misc_feature (471)..(471): n is a, c, g, or t
  misc_feature (494)..(494): n is a, c, g, or t
  misc_feature (498)..(499): n is a, c, g, or t
  misc_feature (502)..(503): n is a, c, g, or t
  misc_feature (507)..(507): n is a, c, g, or t
  misc_feature (511)..(512): n is a, c, g, or t
  misc_feature (533)..(533): n is a, c, g, or t
  misc_feature (547)..(547): n is a, c, g, or t
  misc_feature (622)..(622): n is a, c, g, or t
  misc_feature (628)..(628): n is a, c, g, or t
  misc_feature (631)..(631): n is a, c, g, or t
  misc_feature (635)..(636): n is a, c, g, or t
  misc_feature (640)..(640): n is a, c, g, or t
  misc_feature (642)..(643): n is a, c, g, or t
  misc_feature (645)..(645): n is a, c, g, or t
  misc_feature (647)..(647): n is a, c, g, or t
  misc_feature (669)..(669): n is a, c, g, or t
ggagtggcgggaaaagcgaccttttctgagcgcgttgcctgttgagtggtagcctttcccctcaaccagcaatggaggagcagccccagatgcaagacgccgacgagcccgcggactccggaggggaaggccgggcaggcgggccaccgcaggtcgccggcgcccaggcggcgttgcagcgaaggaccgcatgacccgtgctcctcaggtctgagagcacagacaaaacaacaactcttagaatataaatcaatggttgatgcaagtgaagnaaaacactccagaacaaattatgcaagaaaagcaaatcgaagctaaaattgaagacctggnaccaatgcactttgacagaggtaaaagtntgcttttgagataaaaaagcttgcattagacaggatgagactttcaacntgcacttaaaaaaaacctggaganaaattagcagacagtctagtgtgctcatggataacntgaaacacctattagagctaaantaannttnnctantganntcacagcaggaatcttgggantttagaggaaaaanctgcttgattattagaacagaagagattgggcaattaaaacaagcttcagaaagtaagctttaagaaatacgacntgaaangancaannagangnntngntttggacagtatggaaaactcngagaggatccaagagtcctttcggaaaacctaaaagatggagataaggatttc

SEQ ID NO: 702170 - DNA, 350 bp, Homo sapiens
gtcagtagacacttttgcatctgatggcttgaaatagttttctgtaatcaaatcctgactaaaatccattttaaagcctatagagagttaagaccaagtataaaacttgctagcggcgctctattgaccgagcatattacatttgtctgagaagagatacgcacactaaagtcccctacaagaactaatgggaaaggtcaaaaggtaactccactcttaaaatatgtcatgaaggtaattgtagttggcttatgggcatctcttgagggggaaccaccaactctcaattgggtcagacataagcatcagttatgcagccaaacctctttgttggtcattctagggaactg

SEQ ID NO: 702171 - DNA, 1444 bp, Homo sapiens
gagttctggttcgctgtcatcaaagtcgtcgcgattcttgcgatgatcgtgctgggtgtccttatcattgcaactggcctgggtggtggccctccgaccgggataggtaacctgtggcgacacggaggattctttccaaccggcatcagcgggatgctgtgcggttttgtcgtggtgatgttcagctttggaggggtcgagctcatcgggattacggcaggggaggctgacgatccgcgtcggtctattccgcgagcgatcaatcaagtcgtgtatcggatcctcattttctacatcggtgcaatttcggtcatgttgtgtctttttccatggaaccagatcggcaaggcaggcagccccttcgtgacgatcttcgacaaaatcggagtcgcaggtgcggcgaatatcctcaatgttgtggtgcttaccgcttccatgtcggcctacaactcgggcctatactccaacgggcggatgctttacagcttggccgctcagcacaacgctcccgggatcttctggaagacgaatcggctgggggcgccgtgggtgggagtgctcgcctcctcggtggtgacggcaacggcggtgctgctgacgtacttgattcctggaaaggtgtttttgtacatcatctcgatcgccttgatctctggggtcatcaattggacgatgatcatcatcaccaacctaaagtttcggcgaaggatcggtcctgaaggtgtcgcagcgttggaatttcggatgccggtaatcccgtcaccagttacgtggtgtgggtttttctggcgctcgtggtggtcatcatggcgatgatgccgagctaccgagtggcactcgttgttggtcccgtctggttggcgttgctgtgggtgggttatgacgtgtcctgcctggtgcgacgccgtcatgcctgaggggacgagcgtactgccccggtagcggggagaacagagcctagagcgcgtgcgggcccggcgcgattccccatgtgggttattgatccgggctgtgcacgcaggttttgtccgtgcgccctggacatggttcatcgcaacgggacggtccagctcagtggtgctccatgttggttaaacgttagtgccactggttggccgttagtaccggtcgtggttgtacgtcgagtgctgtgatgtgtttgcggttcaactctctctctcccccccccccccccccggtggcgtgtgtcgcgcgttctgtgttcagtgaaatgtcaagaaatggtgatcgtcttgtcggtgtctccgggcttgctggtccgcgatagcggcaggatggggacagtaatcgaggaaggatgagatcgatggccgacaacttcccccagttgtccgacgtgttgcgctgcccacaagctcccgttgacgtcaacagcattaataccgacgccactccgcaagctcctggaggcaaaagggagacg

SEQ ID NO: 702172 - DNA, 960 bp, Homo sapiens
gccgatcctacctgttggccccgatctcgtgtgctcggtcatctctgagatcttttgtgggacgccttggcaatactattgttctcgtcgcgcttctccccctcagggggtggtgtgccgcccctcacactgtctgtgtgacgggcgtgtacctccctcctcccatgtgcggtattctttgaggaggcctctttcttggccccggccaattttgtgtgggccccgccctgctcccatgctgtgtgaccccgtgtgaggcacgtctcgggtagattcttgccctcccggggctgttcccccttttctcgttatagtgctgtcgccccaaatacccgggcgcccctccttccatgcgggtgtcaaccaacccaacctctatagttccctccatatttccgagaccagatttttctgttctcctgccaaactcccctctctggtcgagagtaaaatatacgcgggtgtattaaacagctaaaagcgcatcccactaaacggcgcccctccatttagcgccccatcttggccgtctatccggttcccctcaacaagagcgctgccacatcacacactgtagacatacatatgtcaccaaatacttccccccactctacgtccgacacaagcgtcttcttacccccctccaccgctattcaatgctatcgctcttcatgttaaaatccttttagttcgtcaccaccttcctaatagtgtacagcagacccaagtttcacaccatattctccgcgtgtctttatacacaatgagtagaacacatcttcttaggaaaagtaccgaactaaataacacaagccaccctctccgcctgcccccgcaccacctctgttgcccaacccctttgttctcttccccttcaagctccctgtctccccttcctccctgcctcctcatctccactccccccccccagaccccctttccccctccccccacaaaaca

SEQ ID NO: 702173 - DNA, 303 bp, Homo sapiens
  misc_feature (58)..(58): n is a, c, g, or t
  misc_feature (64)..(64): n is a, c, g, or t
  misc_feature (105)..(106): n is a, c, g, or t
  misc_feature (236)..(236): n is a, c, g, or t
gtctaaaacttgccttgcaaatgttttagaaagttccccagtcggcccaggctatggntgtcangcctgtaatcccagcactttgggaggccaaggtgggtggannacctgaggtcgggagttcaagaccagcctgaccaacatggagaaaccgcgtctctactaaaaatccaaaattagccgggcgtagtggcacatgcctgtaatcccagctactcgggaggctgaggcagaanaattacttgaacccgggaggcagaggttgtagtgagctgagattgcgccattgcactccagcctggc

SEQ ID NO: 702174 - DNA, 420 bp, Homo sapiens
  misc_feature (115)..(115): n is a, c, g, or t
agcgggaagcccaaagcagatcaaagtggtgggactcgcgtcgcggccgggagacgtgaagctctcgagctctccgctgcgggtcggcgctcgcctcgctctcctcgccctccgncccgtgccccggcccggcacgcatggagagatgagctggatccagaaggcccaaagctggtggcccgaggcaggcgcgagcgcgtacgacgacatgtgcacctggattaaggcagtgagcgcgacaggggcccagactgtgccaagagagagagcgcactgtgctctgcgtgcctaacagagcgtggtcgggcggccgatgtgccggctggagggtcatctcgtacatcgagcagaagaacgacacctccgacaagaagttgcagtgattaagactatcgggagaaagtggagtcgagtgagatc

SEQ ID NO: 702175 - DNA, 129 bp, Homo sapiens
cggtgccttagctatggattatacatcagtctacacttatctacatagattacaagtgatgatataattttagtctttatcataagtacagggttttaatacatcattagttctgttaaacattaagtc

SEQ ID NO: 702176 - DNA, 716 bp, Homo sapiens
tgggtggagcacggggtactttatggagggtacatgacaaggtgcggctccctaggcccctcccctcttcagggggtctacttggcaacggtgaggaggggaaatccagggtggggggggactgattgtggcagggactccccagcagtgagggtctctctcttcctctgggtgctctgtgcgggggctgggggtccaggggtctctactcctgggaggccattgtgggccatgaggctccaccacccgtgtggctgtacgccaaatcggtggctcataccaggaaatgagcttgacaacagtggtcgatagagggcaagtgccagccccagcgtcaaccggtggaggacgtgggtgtcgctgtgcgaagccagcaggaacaccaccgggcggcccaggtggtacgccacaggatgcccttgaggggcgcccatccggacgccggcttcaccacctacgtggacagtcaccactactcgggcaggctccccaaaaaccggcaggtcaggtccaccagtgaacccgtatggcacgcgggcgacccgcggaaacgccacggccagtgagctctcccgaacagcaccagcgaatggacacttgacccaacagccttggcagggccagcaagagggcagggacagatcgacccgggagacgccccggggacatacaccccacagctcccgaagggggccaacacagcactccaggagtga

SEQ ID NO: 702177 - DNA, 111 bp, Homo sapiens
aaacacaccaccccccgaccaccaccacacgacacacccgcaccacagatgtaagaggctgccctgtttattcactgaacgagcgggcgctcgagttactgagctgaggaa

SEQ ID NO: 702178 - DNA, 1026 bp, Homo sapiens
tattgctgtagctcgagaacttcaaccttctataatttttatagatgaagttgatagccttccgtgtgaaagaagagaaggggagcacgatgctagtagacgcctaaaaactgaatttctaatagcaattctgatggtgtccagtctgctggacgatgaccgagtacttgtacatgccgtgcaactacactagcgccacaacgagcttgcatgaggctgttctcagcgcgtttcatcaacacgggctatatgtgtctttaccaccctgcagcgacgacccacgactaccttttgacttaaccacactctgcttatgctaacaccagcgcacagtccacttgaccccacacccacgaacctagcccacacaccttgcctcccacctgcacctgactgcgcctcactcacgcgacgctgaccctcaccagtccttctggccaccaccgcactgcccgcccaccttgcggctccctacttctccgcagcacagcctacgaaaaacgcaaggaaaaccaggggtgcccccgcaccctccttgctcttcgcccacgcctgcaggccctcgcacgcacccacctaccttccgcagctccccttcgtgtacccttctccgccgtgcgcacctcccgttctgcacctgcctcccatcctcacctcacccgtcccctgccgctccacagccccccttccccccccccctctctagccacaccccgcctccccagtacccgttcaggaccacccaccgcgcagcctctctgcgccgccatctatcccaccctcgtttctcccccccacatccttcaccccctgtcggctcctcccccctgcccacgcacaccctccttctgctcccgttccgcctcctccaccggccctgccttccccgccaccccccattcccgactgacacccggctcgctcccagcccctaccgcgcacaccgcccggccctaacagccacctccccccgcgaccccttccccctacacaccgccctctcccgcgtgcttccgcgggcctctc

SEQ ID NO: 702179 - DNA, 210 bp, Homo sapiens
accgtacagctcagatcccagagaaaatatgaagacttcgaagagtagcatgaggaaggagagatacaaggtgtctaaaacatgacggaggtgagatgaagcttctgtcatggagtagaaaatgtatttaacatgacaatagagatacaaggactacagagccccgaacttactaccaataagaagggcaaagtcttctacgattaaaat

SEQ ID NO: 702180 - DNA, 371 bp, Homo sapiens
  misc_feature (114)..(114): n is a, c, g, or t
tgtgaatgatccttcccggcccacagtcaataagggctcttgtgaaacttggagtacacttattatgggttgcctttagtcctgttgtctgggccctgattttttagatccggnagagaacgctccctcaggggtctgagttctaacccttggccctatcgttaactccctgtgccaccctaacaggtgacgccttcctattctaggcctcagtgtttctcatctgtgtgcaatggtttataatgcttacctcacagtgttactgtaaggattaaagaagatagtatatttgaactggggaggcggaggttgcagtgagctgagatcatgccactgcacgctagcctgggtgacagagtaagacttgtctc

SEQ ID NO: 702181 - DNA, 1147 bp, Homo sapiens
ctttcgcttcccttcccgggagaggctgggacccggactccagaggcagtactgtggccgcgtgcgtatctcagctccgactgagtcagggttgcgtgagcactccaggcacgcttccaggggcgagtacctcctgatagtcgacatcacagtacatccccatggggcgaatggatgcttgatcactgggacaggaatacgtcacgatcgtagagtagcctaacataggatgggttactggcgagaagtctcttcagctggcactgcagtggaggcgatcagggggtttggagccttgtgaacatgggaagctgccccccaacacttggacaggacctgggtttcacgtgcatgagacatggggtatgatgtaacccgtttccacgggggaatgttgacgaagatcttatctgccctattggcagtggagtcttggaggagccagtacaggcacctcattgtgaacatgctttctgcaacgcctgcatcacccaggtggttctctcagcaacagacatgtccagatggaccgtagtgtagtgacggtaagcccatctgcgcccagtacctcggatcatgcggaacatgttgtcaaaagctgctagatttgcctgtgacaacgctgtgttcggctgtagtgccgttgtccggacttgagaaccctcatgtctcaacctcagcgactgtgagcacaagccgaagcgggctgtgaccttgtgaacaggggcctgtgggccttggaggatgccccaaagatgaagctgaccgaccattaattggcttagcaactgggctcaatgggtgcacagccaagcagagagacgcatcgtctccgagaagccggacaagaatcctcaggcttgaaaccaacacacacacttgggcgaggagaaaacgggacaccccgaccggctaaagaccatacgggggtaaaaccccggggttatacccgctcctttggaaaccgcggcgagcgaacaggagacgagacgaccaacacacggggagaacaacccatcacagaaagaaaacacgccgaggaggaccaaacacacagaagtgcgccgagaagagcgacggcggcagagacaccctcacatacaaaagcagcaccgagcagccggcaatgacagaaccagtcactgct

SEQ ID NO: 702182 - DNA, 366 bp, Homo sapiens
tctctgtgatgcaacaagcattcatttggattagtctcaagttgcgctcagcagtgatccatgtcacagtaggtatgagcaagagttgcaagctgtgcataatctgtagcaccacagcgtatatagtgagcgtctcaagcctcacgttgattcatcagcaacgcatgtgcccgatcattcagtcaattcattcacggagtttacatgatcttcatcttctaccgaatctttaatccatagagcagcttaatccgtgtgtgcattacgagggatcacacccgtgcaataagttgagctaaacatcaacagaacagtaattaaggttacgcacttcattgtgccaaaggcgtggatggtgcacataag

SEQ ID NO: 702183 - DNA, 440 bp, Homo sapiens
ccaagaggacccggtgtccttgtctcaaaacgagttatatttcaacggtttttacagctaagacttgtacttactgcctgctgtgacagtgtatgcttcatttgtatcccaccagcaagtctacataaaactttaaaaccatcatgactggattgtcaacatcgtgtattggggcagatgctttttaaaactgtcggggtggagaaaacttttatattaagggccatttgggattttattaaggtggtaagggaaaggagggcttacaaaaatggtttcggtaaaatattttaatactggtttaaggtggttaaaacaccaaacccctggtcttttctttttggggttgaggcttttttaagaaaagtcgaaggtgaaatggttggcccagaccaaaggggaaaaccaccggggtaacccgcagctccgaaattccggta

SEQ ID NO: 702184 - DNA, 1062 bp, Homo sapiens
cagcgtcgtgatttatagggcgctgggtgcctgtcatggatggtgtggcagagattcaagctccctggcagtggagaagcgagtgtgacgttccaaggaagggtctttgagaaaggggtagggagactgagatcaggagaaggctcccagtgaactgtctcagtgggagcagacagtgtttgtgagggtgacagctggggtctccaggtagatagaccacggtgcatggctgagaggaggtacttcttggcgacaagggcctcgggtaggcagggggcgaagtcctcgaagaagtggggggaaggctagaggaagtggctgggcctgaactggcactgtgcctgccacaaggtcttgtgcatcccccagccctcagctttgccttctgaagccactcctcaggggcacagaccctacctacctcctaccatctctaatgtagctctgacccctggttacctgtggcctgggaacgaacaaggaccagtctctgagcctaggagtgaaaccaaacgctggtgattagcacttcgtcttagtttctgggaatttggatttatgactcttgtatccacgtcagagggtagcactagacatgctgctatcatatccacccgatctatggattgctggctggggggtctgcctgccttccaggactgactgctgacaaataattcctgaggttctacacaggtctcatggtggctgcaacctagctggaccctgtaagcctagacacattgtaacagaacagtcaggagcctgacaaggagacgaacaagaaggaggaagacgacagagaaaggaacatggaagaaccaaaacagttagccgaactctgacatctatccgaagaatggagacgcaacagaacacaagagcctaaccacaagagaggatcggaagacaaaaagggaatgagaacggaccagataatgtacccatgatgagagccagtccagagccagtcagcgacatgagcgaggacagagtcggggcaccatgccatctctaccaaaagcagcaggacaaagtcgagaacaagcgacaaacatacga

SEQ ID NO: 702185 - DNA, 332 bp, Homo sapiens
  misc_feature (1)..(1): n is a, c, g, or t
  misc_feature (107)..(107): n is a, c, g, or t
ncggcgagggaatggtggggaagctgaggaaacttcctattatcattattttttggagacagtctcactctgttacacagggctgaagtgcagggcacaatcttggntcactgtaacctccatctgtcaggttcaatcgattctcctacctcagcttcccgaacagctgagattacaggtgtgcgccacccgcccggctaattttcgttttttcagtagagacaggtttcgccatgtgggccagactggtcttgaactcctgacctcaagtgatctgcccgcgtgggtctctcaaagtgctgggattacaggtgtgagccattgcactccgg

SEQ ID NO: 702186 - DNA, 111 bp, Homo sapiens
gagcagacaggagagtgctggtacaaggtgactttgaactgtctacagagactaatttcttgctgtatttaagacaaggcatctcacatcttgcacggaggtagaactgag

SEQ ID NO: 702187 - DNA, 1151 bp, Homo sapiens
gttattatttctttgtgtatttggttgtgtgtctttatatgttttcatttattattgggttaataaatttgatgttgtggtgtttttggggatgtgtgttatttttgtagtgtgattagtttttttttggtgtgattgtgcttttgtttgttgttttgtggttatgttcaatgattttttttattttatctaggttattttgtttttttattttagtgtcttatttgttttttcgttatgtattactaactctttttttgttagctctggttttaattagtttgttgagcctattctttatttattgtatttggttctttacggttgttattgtgtagctttctctttgggctttattggacgttcttatagggtcctgtgtttaagatggcattgtcgtttgttttgtgtgtgtcgtttttttttttttcccttgttttgtgatttgttcagttggttgtttatctcttgtattttgtgttgagatgctctgcgttattcgggtctagtaattttgcttgttatcagttagtacacattaggtgatttatgttatcgccttttttatcttgtagtactttactaggtagtctctattatctatgtctttttctatctcttcgcatgtgtggttaattcctgtgctaggttccctgtgttctgttgttgttaatgttttgcgcgaagatactgttgattgttgcatatgtagcagtggttatgtgtctattggataaatttgccgttgagtttcatatgatatattagaaatttttcattttctttcttgttttttcccccctgctccacacttcaaaactcccgttagatgcagcagttctactacaagagtgaaaggaaaaccctaacagatctgtcctagtgatgtgttacctttgttcgtagaaggcgctcctttcagggttgtcggtattcttaggtatagcggagctgtttgtcctgcttattccccacccatgctcgccgcaatattgcaccagttagttaaattaacctctttctttaggttggaagccgtggcagttctgctcccttcctaggagtctgcccctgcactctgtagcttgcttaacggagcacttctcctttttaccaaaggtctacattctagggtaagggcctgagttgcc

SEQ ID NO: 702188 - DNA, 610 bp, Homo sapiens
  misc_feature (404)..(404): n is a, c, g, or t
gattattcctctgaacctcataattttttctttgtaaaatgggaatatgtcaacccaaactaaggtgattgaggcagaaataatttgatcaagttttgttggaagctggatgtgaggatcggccaggaagacacacgcaccaagttaggcatgttccagaagctgttacaagtgggaatgctttcataagaaagtagaagggaaggggactcctcagatcagagttgtcctttgtcattggagggttacaataattggctacagattgcaacatacagactaaaatgtctacatgccagcaatcggtacaacttcatgattcagaaatgaatcagcattttttcatgtcaatagattatgcattaatcagtacatcagcaatttgaggagctcagataagattnttcactcgggcaggatattgccgtaaatcacaagacctccctgaagcaggttaatttggaagcctggcaaatgtgaactgtagattatcaacgcccatagtagtaagatgtattgaaagtgcctgattcgtaatatgcttttctacgcatcaccatccctatacacacaccaagaagtgcaaaaaaaaaacaaggggggttggggc

SEQ ID NO: 702189 - DNA, 406 bp, Homo sapiens
taggcccttgctacacgggcactcactaggaggacctgtccacactggggatcctgcaggccctgggtggggacagcaccctggccttctgcactgtggctcctggttctctctccttcccgctcccttctgcagcttggtcagccccatctcctcaccctcttcccagtcaagtccacacagccttcattctccccagtttctttcacatggccccttcttcattggctccctgacccaacctcacagcccgtttctgcgaactgaggtctgtcctgaactcacgcttcctagaattaccccgatggtcaacactatcttagtgctagccctccctagagttaccccgaaggtcaatacttgagtgccagcctgttcctggtggagtagcctccccaggtctgtc

SEQ ID NO: 702190 - DNA, 368 bp, Homo sapiens
  misc_feature (11)..(11): n is a, c, g, or t
  misc_feature (289)..(289): n is a, c, g, or t
  misc_feature (313)..(313): n is a, c, g, or t
  misc_feature (331)..(331): n is a, c, g, or t
attgactccantatgctacagagaaatctttcatgaaaggaagagtcaactcatgcgaaaagcttcaccgatgtcttattttaggaaattgccacagccaccccaaccttcagcagccaccaccctgaccagtcagcaaccatcaacctcgaggcaagaccctctaccagcacattactattgcatcttcccataacttatgggaccccatgagccattgatctcttcttttcctcctgccatccagcttacagcaaccctcttaacaccttccagagatgtaaaattnttaaatccaaccaccctcctcccnattaagtatttccaattntggaatcccccatttttgcctaggaccttttagggct

SEQ ID NO: 702191 - DNA, 532 bp, Homo sapiens
acgttcgcacaccggatcttcgccgagtgccagggcgcagcgcgtggggcgtgtgcctcgcttggtcccctccagcgtcaccatgctgccgccacagctgtgctggctgccgctgctcgctgccttgctgccgccggtgcccgcgcagaagttctcagcgctcacgttcttgagagtcgatcaagacaaagacagagactgcagcctggactgcccaagctcccctcagaagccactctgtgcctcggacgggaggaccttcctgtcccgatgtgagttccagcgggccaagtgcaaagatccacagctggagatcgctcaccgtgggaattgcaaagatgtgtccaggtgtgtggctgagaggaagtatacccaggagcaggcccggaaggagttccagcaagtgttcattccagaatgcaatgatgacggcacctacagtcaggtccagtgtcacagctacacaggatactgttggtgtgttacaccaaatggaagacccatcagtggcactgctgtggcccacaagacc

SEQ ID NO: 702192 - DNA, 404 bp, Homo sapiens
acgatgcgtgacgtaatggagtgaggggtgtgccgtagtataaggcgacacgggccttgagcgcatcggagagggcggctgcatcctcaaaaccgttcagcacgtcgaacatgccgaggcctttactggcgtccgcaggaacggcgagcatgcgcacctccataccggctttcagctccttgttggcatccgccatgtgctgcgccaacgtcttctcgccggccgagagaaacagcaagcgccactcctgcacctgtcggcccgcttgtccttcgatcattcgcccgggctttgccggtgccattgccgagcatgtacaccgtctcgccgataatgcgcgggtcgcacatgccgatttcatccagtaccaggaggccgtctgagtgcgcagcggacattgactc

SEQ ID NO: 702193 - DNA, 167 bp, Homo sapiens
tgcagaaagaaaaaaaaaatccaaaaattagaaaggcataggggtagtagcacatgcctgtaggcccagctactcaggaggcttaggtgggaagatcaaggctgcagtgagccgtgattgtgccccctgcattccagcctgggcaacagagtgagaccccattgcca

SEQ ID NO: 702194 - DNA, 293 bp, Homo sapiens
cccaattttatttttttaccctttttttatttcttaaaaaaagaaagctgaaatttaaagggagatctatgggggattctttgggttttttaaatggttaacccctaaaaaaatttgggggtccggatttatggttttgttaaaaacaaacgaattgttaaaatggaaagcaagtttttcaaaagccccggtttaaaaggaaagggtggttttttgttttataaccccagcccctctttttttgtgttaatcataaacaataaacaaaaaaaacccgggggccctttttaata

SEQ ID NO: 702195 - DNA, 390 bp, Homo sapiens
  misc_feature (48)..(48): n is a, c, g, or t
  misc_feature (147)..(147): n is a, c, g, or t
agcttcacccgctggccttactgacgcgttctgaaacgcggcattacnggtggcgtaccagccagcgttaaaatcagcaaaacggtatatcggtgcgctataactggcgggataattcagtaaatggtaagtaccaaaccacaaccngccgcggcgactgaagacttcctgacggactgtaccgtccattttccacggataccctttggtatgctgttcggcaaaagcaatgctgacctgcatcggcccaccggtgcgcaccggattgagcgaaccaaacagcgtctgccccattggcaccatgttgatcagatcgtcaaaaatcgcgctcaattgcttttctgtacgcaccgaatctaaccgttcgctataacttttgccgtttggcga

SEQ ID NO: 702196 - DNA, 1266 bp, Homo sapiens
caggctgccgaagtgtggtgtggcgcacaactctgttcgtaagcccctagaggggggaaggtccccctgtttgggttataacgccataaacccctcttgtgagactttcttgcgcccagaggggaattttgcgtccaggaggctatacaccatatggtcgatgtcgacccctctgtttgtggtgcctaaaagcacggggggtgcaccaacggtctgtgtgcaaagaaaagctgtctctcctgtttgggtttctggggaattactccctggtggtggccgccggcttccaaagagattgtttcccctttcccgcgtttttttttcttggggccttaagaagaaaagccttccaatgccccggctgttgttccgggcgttgtttttttatatgaaggttctcacagatgttaccacagatggggtcaacggaagatgctccacatcacaacggggggagaaaataagctggtgaagcgcctcttctttcgggggggggttctggtattgtgaagccccctgcgggttttaaacccttcgggggagggcacccaccctctttttcgccctctgtccccgcgatttggacacccttgggggaaattggttgggtctcacgcgccggtgggcccctctgcctgttgtcgcctgggcgacaacgtgtgtgcctttctttcgggaaaaaaggggagagataggcccccccacggggggtctttatggggcaagactggccagaaaacccctcgttatagagcccctggggcctctctccgaggggccctctcttttctggagcctctcacaagggtgtcaccacacgcccctctctcaagagttctcttctgtcacacgccactcggtgaaatgtggctcggctctcgtgggttcttgtctggtccggtgcacccgaatgcgaccaccacccgcacccccacaccacctgtagactcttgagaaattgggcgagagtgagagttgaggagacgccacagcttttcgtctggggtcatatacacacgcacagccacatgggttgtggcctgccgttcactggtgggtctttcacggttattcttggcaacaatgaccacgtggttttattttttttcttttttgctttcattggacacagtgcacgtgatctataaaaatttttcttttgaggttttaatacctttgtagcattttagatgacaattgggtttgtactttgttgtgtagagctggaagaaattgtgttgaaataaacccaagatcggaaagcca

SEQ ID NO: 702197 - DNA, 337 bp, Homo sapiens
cggatccctacgaggtgtctgctgctgtaggcagagcctgagtaggctgaataaggctggatcatgaaccattctttaaagcataggcctttggtatagcagtctagttgacatacatgcatacctaccggtgtgggtgcccgtgtaactgaagaacagctttcacaaaataataatttagcacactgtggaattttctctgataacaggctcttctctttccatggataaaaataaattccgtggattatcacacccaatttgggacccttttaaaaaataaccacttaagaaagttgggataagcccagggtatcagaaacttaaaaatgggacc

SEQ ID NO: 702198 - DNA, 760 bp, Homo sapiens
ccacgctgtctggccgagtctgagtgctcgtgacttcgctgatgtcatggtggcaacccggtgtgagaggtaggatgtccggcggcgacgggccgagtcaccagccgccgggcagtagtcgaaggccggcgcggatgtctgggtgccgcggtgcgggcgtgacgcgcgccgggcggatgggccggcgccgggcgccgagctgtccgggctcgttcccgttgtacgcgcttcaggtcgaccccagcatgggctgtcatcgctggggcggggaggcgccgccaatgacaggcataaagaatggcgtgcactttctgcagctagagctgattaatgggcgcttgagtgcctccttgcttgactcccatgacacagagacacgggccaccatgaacttggcactggctgtgtgacatccttgctgcaggcaggatgcccactgtcagctcctgcgcttccaggcaacatcaaagcaggacaacaaggcagagacggccggttccaaggagcaggggcctcgacaaaaggactgggagcaggccccaagcagaagaacgaacatgtggcggcggaaaccccagcaacgaggggctaagaactccagggtagaggaatacggcaggcggtgcagacaagacattagctccgatccacttgcagaaagatgggtgctacaccacgataatacctgcttgccgtggacggaaccgatggcaagtccgtgctggaacgtgccagctgggaaggtctggagttaaagcca

SEQ ID NO: 702199 - DNA, 110 bp, Homo sapiens
  misc_feature (98)..(98): n is a, c, g, or t
gtgtacaaggaggctgctctgagttgaggacatttgaactaaggcctgacatgagaagaaatcagctatgcaagatctggggaagaggcattcctggnagagagaacagc

SEQ ID NO: 702200 - DNA, 123 bp, Homo sapiens
ggctccccctgactccccctgactcccccccgtgaccttctcctggacggtcgtgcttttcttactactgtcaccctggtgccggtggtctcgctgggtaccgacgctcgccttcgtcctcct

SEQ ID NO: 702201 - DNA, 217 bp, Homo sapiens
ttactcatgcaccccaatgtatccaagctgtagttgagccctacaactccatcctcagcagccacaccactctggagcactctgatggtgccttcctggtagacaacgaggccatctatgacatctgacggagaaacctcgatatcgagcgcccaaactacactaaccttaaccgccttataagccagattgtgtcctccatcactgcttccctgaa

SEQ ID NO: 702202 - DNA, 369 bp, Homo sapiens
gttggcagtcgaatgctatacacatatatcactgtctttcttgctcccatgagacacagagccgattcaaatggtgtactcatgggcagctctaatgtggtaaggtggatcaatgggctcttcagatgacctgagttgtggagagatgtatgattcaaacatagatgactggattcctgttccagaattgagaactaaccgttgtaatgcaggagtgtgtgctctgaatggaaagttatacatcgttggtggctctgatccatatggtcaaaaaggactgaaaaattgtgatgtatttgatcctgtaacaaagttgtggacaagctgtgcccctcttaacattcggagacaccagtctgcagtctgtga

SEQ ID NO: 702203 - DNA, 413 bp, Homo sapiens
gtcaacctttatttcaaggcagcccaaaaggacggctctcccttctctttcactctcttctctaggtgtgaagctgatgcagcacaggcgagccccaaaattgaggcttagccgggggggttcttggcttctcctagaaactaattcaagaagccgggcgcagtggctcacgcctgtaatcccagcactttgggaggctgaggcggatggatcacttgaggtaaggagttcgagaccagcctggccaacatgctgaaaaccccatctctactaaatatacaaaaattacccgggcatggggacgggtgcctgtaatcccagctgttcaggaggctgaggcaggggaatcgcttgaacccgggaggcggaggttgcagtgaacagagatcgtgtcactgcactccagcctgggt

SEQ ID NO: 702204 - DNA, 268 bp, Homo sapiens
ccgagcagaatacagcgccagagttagggtttgcgactccgcactccctgggacctggatagggtcagaatgcctgtcctatggaggggacaaggttgactgcttagagagagcgcgacagcacagaggcatgccaggccatggacccatcatctgggcaaggttgagagctgagcatgggcagcacctgctcccttcactaccagcatccgtactaggattctttatcacaccgataatgtatacataacagccttgaaagcagaca

SEQ ID NO: 702205 - DNA, 747 bp, Homo sapiens
  misc_feature (13)..(13): n is a, c, g, or t
catcgaactcccntttcttcggaaggcgcgccattgggtgggtccccggaaattcggccataatggccgagggtaccacccttttattaaataactttttccgttgtttaagttgaagatttaattcaggaaaaaaaaaaaaaaaaaaaaaaaaaaaaaaaccaaaaaaaataaaaaaaaaaaaaaaaaaaaaccttgtggcccccttggcccaagcggattttgaattgggcaaggttatgccttgggcccgaatttggggttaattggccaatttgcccttatggggggccgatttaaatttaatggcccgcgttttaaaaccgtgggactgggaaaaccctgggggttcccaacttaaatggcttggagcaaaatccccttttgccaggtgggggaaaaaccaaaagggccggaccggatggcctttccaaaaggtggccaacctgaatggccaatggaaaattgaagccttaaaattttggtaaaaatcccggtaaaattttggtaaaacaggtcaatttttaacccaaaggcccaaaatgggaaaaacccttattaattcaaaggattgccccgaaaagggtttaatggtggttcaatttggaaccaggggcccctttttaagaacgggggcttcaacggtaaagggggaccggtttttagggcgaaggcccaattacggagaccattccccttataaggtttttggggtccaggggccctggccttaattggacccttggg

SEQ ID NO: 702206 - DNA, 104 bp, Homo sapiens
tagatcgagctcggccctgtttaggcatgctgttggcaggctcgcttgacatactctcctgcgcagccttcaggttctccttcttcccgccccaggccttcagg

SEQ ID NO: 702207 - DNA, 159 bp, Homo sapiens
ggtctcaaactctgactcgtgtccaccaccttggctcccaaagtgctgggattacaggcatgagccaccatgcccggctacggttcaccatttaaatcctggccacggctcgtgcatttctgctcggttggtgacagagatgttgacattgtttgagac

SEQ ID NO: 702208 - DNA, 104 bp, Homo sapiens
gtcacacccatttcctcctctttccctctccccgctgccaaaaaaaaaaaggaaccgtttaccaggaattaacagggtttcagcccttatcaagggagttgtgg

SEQ ID NO: 702209 - DNA, 348 bp, Homo sapiens
ttacaggtggtaaacccgaagaaatgttcattatagatgtctgatacatgtatggtctcggtagtacatatgaaattcactgtggggaatacacagaaagaggcagcctttctcaggagaattaaactgatgttgggaaagatgcccatatgagggaagagagagacctctcatattattttatattgttttatactcagtacctgttttaagaaaaaacaacaaggaagtaaaaccaagagacaggcagcccggcgtcaggcccaaaaccaggcctgggcctgcctggcctaaacccagtagttaaaaatcaactcataacttacaaaccgatgttattcatagatt

SEQ ID NO: 702210 - DNA, 547 bp, Homo sapiens
  misc_feature (259)..(259): n is a, c, g, or t
  misc_feature (283)..(283): n is a, c, g, or t
  misc_feature (311)..(311): n is a, c, g, or t
  misc_feature (315)..(315): n is a, c, g, or t
acctccctaaaagtaaatacaaagagaacttatttacacagggaaggtttaagactgttcaagtagcattccaatctgtagccatgccacagaatatcaacaagaacacagaatgagtgcacagctaagagatcaagtttcagcaggcagctttatctcaacctggacatattttaagattcagcatttgaaagatttccctagcctcttcctttttcattagcccaaaacggtgcaactctattctggactttattanttgattctgtcttctgtataactntgaagtccaccaaaagtggaccctctanattncctccctttttatagtcttataagatacattatgaaaggtgaccgactctattttaaatctcagaattttaagttctagccccatgataacctttttctttgtaatttatgctttcatatatccttggtcccagagatgtttagacaattttaggctcaaaaattaaagctaacacaggaaaaggaactgtactggctattacataagaaacaatggacccaagagaagaaa

SEQ ID NO: 702211 - DNA, 143 bp, Homo sapiens
tgtattctgaggatccctcatagcttcgggctaccctcatcctcacgggactcctcgccaggtttctctaaggagcttgcagctgccctggctgcagtgcctggctttgagtgtgtccgcagctggattggagctcgggcttg

SEQ ID NO: 702212 - DNA, 296 bp, Homo sapiens
atgccgtcctctctttcgtagtgtgtaacagttatgcatgatattgaacttgtggcagtaaatatctacatccatgtaattgagatgtattaaaattactttaaatattataattatatctcagagttaaaatatatttatgttgttttgttcaattgtgtactaccaataacttgtgatacttcgagaagatgtttttcttttacatttagagcctagtagtcagaggaaaaaagtttcactcacatatatgttacagagtacaataagatggtcaacaaaaaactttaacacat

SEQ ID NO: 702213 - DNA, 132 bp, Homo sapiens
ggtggacagggtagctccccgccagtgtcgtttgagagctggggcacatagctatgtctctggggcggccacgtctgtcccaggctgacacgggacattcccagctgctagtgtcgctgttgctgctactgt

SEQ ID NO: 702214 - DNA, 228 bp, Homo sapiens
  misc_feature (59)..(59): n is a, c, g, or t
ctcgggctgctcctgagagcctgtctcatttctagttgtgtgactgtgctgtcacttcnctccttggtcctcacttccctatctgtatgtgaggctttgcaagatgagtgccagggtgcctcccggctcagaaagcctaccttggttctagagggagagattcccagactggaggggaagggaaaggagggcagcaagctaaattcccgcggacctgagcaagccagg

SEQ ID NO: 702215 - DNA, 322 bp, Homo sapiens
ctcagcctcccgagtagctggaactgcaggcatccaccaccacgcctgggtaatttttgtatttttagtagagatggggtttcccatattggccaggctggtcttgagctccagaccttgtgatctgccagcttcggcctcccaaaatgctggggttacaggcttgtgcaccatgctctgccttgtgtgtgtatttctatgtcaccaaatcttcctcttataaggacaccagtcattggattttagaccaccctaatgcaatatgaccttatcttaatttgattaaatttcttcaaagaccctattttgaaataaggtcaca

SEQ ID NO: 702216 - DNA, 107 bp, Homo sapiens
tctccaccgtggaacatgggatgcaccggttgcacatctgtgtcgctgtccctctcatcgtggtttaactgacaggaagcacagagtacgatatggcacacaaatgt

SEQ ID NO: 702217 - DNA, 201 bp, Homo sapiens
ccctaggggactcttattaaaaatcaattgaggataagtataatcggttatataatctaggactctgatatctgttccgagtatagatctgtgttttcctttcttttgccattatccactaactactgttttcatataactagtacctatcgtaggtataagtatgagaatttgagacatttggaatccatccaactttca

SEQ ID NO: 702218 - DNA, 374 bp, Homo sapiens
taggtttctttttaaattaagaaataataacaattaaaggcaaaaaaccactgtatcagcatagcctttctgtatataagaaacttaagcagccgggcatggtcgtcacgcctgtaatcccagcactttgggaggccgaggcggatcataaggtcaggagatcaagaccatcctggctaacacggtgaaaccccgtctctactaaaagtacaaaaaattagctgggtgtggtggtgggcgcctgtagtcccagctactcgggaggctgaggcaggagaatcgcttgaacctgagaggcggaggttgcagtgagccaaaattgcaccactgcacactgcactccatcctgggcgacagtctgagactctgtctca

SEQ ID NO: 702219 - DNA, 328 bp, Homo sapiens
  misc_feature (46)..(46): n is a, c, g, or t
ggagtcggccctgtgtgtagcacaataaggaagggccccaggtggngagagccccaagtgagaacaataatgaacaattatgtatgaacaatagttagagacagctaatcacaaacaacctgcgggcacaatgacctcattccacacgtagcacccttcagcaggaccctataaaactttcctccagcccttgcctctttgcaggtagccccttctctgctgagctgcccactgcaacatattttcacaatttctctaataaatctgcccttctttacctacaactatcttggtaaatggctttaccacctgcaaaactgaccctagg

SEQ ID NO: 702220 - DNA, 455 bp, Homo sapiens
  misc_feature (119)..(119): n is a, c, g, or t
  misc_feature (154)..(155): n is a, c, g, or t
  misc_feature (375)..(378): n is a, c, g, or t
  misc_feature (383)..(383): n is a, c, g, or t
  misc_feature (386)..(388): n is a, c, g, or t
  misc_feature (391)..(391): n is a, c, g, or t
  misc_feature (393)..(393): n is a, c, g, or t
  misc_feature (399)..(401): n is a, c, g, or t
  misc_feature (404)..(405): n is a, c, g, or t
  misc_feature (407)..(407): n is a, c, g, or t
  misc_feature (414)..(415): n is a, c, g, or t
  misc_feature (417)..(417): n is a, c, g, or t
  misc_feature (429)..(430): n is a, c, g, or t
  misc_feature (435)..(436): n is a, c, g, or t
  misc_feature (443)..(443): n is a, c, g, or t
  misc_feature (445)..(445): n is a, c, g, or t
  misc_feature (453)..(453): n is a, c, g, or t
ggcgcggcctggaagaggccagtgtcccgggggaggcggcggcagcggcggcggctggggcagcccgggcagcccgagccccgcagcctgggcctgtgctcggcgccatgagcggcggngggccttcgggaggcggccctgggggctcgggcannggcgcggactagctcgttcgcggacccggcggcggaggcggaggaggcggcggcggccccggaggctcggcctccggcccaggcggcaccggcggcggaaaggcatctgtcggggccatgggtgggggcgtcggggcctcgagctccgggggtggacccggcggcagcggcggaggaggcagcggaggcccctgcgcaggcactagcttcccgccgcccnnnnttaancannnccntnacatcnnnaanntnaccacanncntatccacccaannccaanncccatancncacccaanaa

SEQ ID NO: 702221 - DNA, 433 bp, Homo sapiens
gatgtcagcactaaggcctcaccccccagagcttcccaggacattccttgcttggacagcagtgccccttgagagtgggcacacctatgtggtgccctgggcgactggcctgccccctattgaggagcgtgagagcccggcagcccagcccctgctggaacaccagtactgagctaccttgcgcccactggaccacctcctaggattcagtaacggacctgctctcctgcctctctcctggaccacagaactgagtggctttgggctacatgtctgaaccctgacctttggctgccttggcgacgagtaacaaaaattagttacccagaacctcttaccttgacccctgatcttttttattcccaggtcaggggctggggtcccagatgagggaggtaggcttccagcaggcctagagcaaacatgggtggtc

SEQ ID NO: 702222 - DNA, 502 bp, Homo sapiens
atgtatcatgtagcttagcagtgaatcacaatttgagattgagaggcaggtaaaatggtggatattgatagtttccctgtgtaaggctagtatgcttatctttcttccccaagattgttaagtgacttctacccgtatccatgatgtgtttgataatggatgcagtgggctgccattgagccttctgtttcttatatttcagtttcccacgtgatggtacattcttaaattcccaagaaatacccattgttatttcaagcagaataatcattaataggtgaccatgacagctctgttttctcacctagtgctggtgttctgtaccatgtattaggggaataatgtgaggagggggacaaaaatttgcagaaggtttatacaaaagaggagttgtcaaatagggtccagctactgataagagtgaagagaaaagcattacagatattcctcaataagaaagcaaatgacatgaaagaggacctgggaatacaagcatagtgta

SEQ ID NO: 702223 - DNA, 924 bp, Homo sapiens
tccattaaattaccctttatttataaatagcatttatctcagtgggctctatgccagtgggcctgggtatgggggtaggggggtatggcagggtaaaaagagggtgaagcaaatttcgtggcttcacagttctcttatagcctcaaaaattcccacgcaatctcccgtgtgtagtctctgtgtgcatctcccctctccccaccctcgtggaattagaagagcagggtctcttattaaattatgtcgctgtagaacaagtggttcacctcatagtttattccataaccctcctgtgtgtgtcaagaagccgccagaagggtttcctcctctcataggagatatattttctatagtgggcctctgtggacacttggactcatgtagaggttttccccttctcctcaaattttattacatttctccgagagaacacaactctactctcctcagaggtgtgtgctcccccccctcgctgtgagagaagagacgcccacaactttctccccctgtggaaccacaatgtgtgggtgggccccaatgaggcgggggcgagagatggagagaaaatccccaagacgtaggccctgtgaccgaggggggaccctctccgctgtggagagcaccaatatgggagagactcctcggtgggatcactccccgaaaaactgcctcgaataggtagtgaaagagcgggggaataaacgggggggggtgtttacaactcctcttccctctctattctattaagaggggacataatagagaaagaacacttcggcacaacagtactgtgtgggtacaaaaatcagaggagtatccataggaggaactcttggaactttcaaattcagactgtgagctgaagcgttggataataatccaacatttacccgggggggaaggactccccattttatacacaat

SEQ ID NO: 702224 - DNA, 343 bp, Homo sapiens
gccgcctctagaggatccaccttatgttctgacccacctgctagggggagtgtagagagcttgattgatgtaataggccatccacgcggcgaagccccagtgggaggggcagttcttgaagatgttgcgcaaaggcatactgccatgggagaagcggtgcacgaagggcgattccagcaggcgcttgatgtagtggaatgagtgacagatgcagccgaggctgttcggggggagcagcctcagctggggctgttccggcaggtcttttgccttcccctaccttcctcccacctgccccatttactgcaccactgtgtgccgactgcacttaaagtcatatttg

SEQ ID NO: 702225 - DNA, 193 bp, Homo sapiens
ccatgtcttcgagtttcgactcgatcagatgtgattggcccgtaccctgattctcgatcctaacagcacaccctcaggcccgggatccaaaagtggaccccatctcctctggcctcactcccggggctgccctgccccaccgcccggccgcccgcccggcctgcgggcaccgccgccgccggggcggccgccc

SEQ ID NO: 702226 - DNA, 859 bp, Homo sapiens
  misc_feature (1)..(1): n is a, c, g, or t
  misc_feature (62)..(62): n is a, c, g, or t
  misc_feature (134)..(135): n is a, c, g, or t
  misc_feature (137)..(137): n is a, c, g, or t
  misc_feature (139)..(139): n is a, c, g, or t
  misc_feature (153)..(154): n is a, c, g, or t
  misc_feature (188)..(188): n is a, c, g, or t
  misc_feature (192)..(193): n is a, c, g, or t
  misc_feature (208)..(208): n is a, c, g, or t
  misc_feature (211)..(211): n is a, c, g, or t
  misc_feature (214)..(214): n is a, c, g, or t
  misc_feature (274)..(275): n is a, c, g, or t
  misc_feature (278)..(278): n is a, c, g, or t
  misc_feature (288)..(290): n is a, c, g, or t
  misc_feature (292)..(292): n is a, c, g, or t
  misc_feature (295)..(295): n is a, c, g, or t
  misc_feature (303)..(305): n is a, c, g, or t
  misc_feature (307)..(308): n is a, c, g, or t
  misc_feature (395)..(395): n is a, c, g, or t
  misc_feature (431)..(431): n is a, c, g, or t
  misc_feature (516)..(516): n is a, c, g, or t
  misc_feature (520)..(520): n is a, c, g, or t
  misc_feature (525)..(526): n is a, c, g, or t
  misc_feature (533)..(535): n is a, c, g, or t
  misc_feature (537)..(540): n is a, c, g, or t
  misc_feature (560)..(560): n is a, c, g, or t
  misc_feature (782)..(782): n is a, c, g, or t
  misc_feature (789)..(789): n is a, c, g, or t
  misc_feature (825)..(825): n is a, c, g, or t
nacatgctctggggcgcagactttgttgcttgtaagtgcgtttccggagacccctggaattnaaatcattagcaccgcgcccttgcccccgaagagtctctcgaagggcttgccgcttttcggtggcgcagttnncngnagaacgcgtgactnnctttctgcggtatttcctggttgtccagaatccntagnncgaggcggaaaaaanatntcncccaccttgtgttgatgccgcgattttgactcgagactcccttcccacgatttctgtttnngcngggggggggnnnanggncccccccnnngnngccgccggcgacaccaaggggatgcacgagcccctcctcgctttccccgcctcggggcgaccgaacccttctggtcaggcacctgcnggctgagcttactgctgaggagaaagaggacttgcngaagtacttcggggctcagtctgtgcgggtcctgtcagataaggggcgactggtaagggcgcgcccctccggagtctcccgggantttnttttnnaagtgannntnnnnggggagcgctgacaagagtnaaatggaaacgagtggggaagatggacttgtgtgatgagagctcccccatcctacctcttttttatcaaaatatctgctctgcgaagtggagttttaatcggctcgagtctggattagtcatagcactgcagaaaagggcaagtgagaacgacaaagcagaagaatggaaattagcttagttatattgagttttcggatctatcctgagagctcacaacttntttgaanttgggggtatttctcctggactcaagagtatcttanaaatgtgcatcaagggatttttgaaagtcctact

SEQ ID NO: 702227 - DNA, 159 bp, Homo sapiens
tatacaccagtaacaaactagctttaaaaaatcaagaaaaagccgggtgtgatgcttcatgcctgtaatcccagcactttaggaggatgaggtgggtgcattgcttgagcttaggagttttgagaccagcctgggcaacatggtgaaccctatctctgc

SEQ ID NO: 702228 - DNA, 984 bp, Homo sapiens
  misc_feature (18)..(18): n is a, c, g, or t
  misc_feature (39)..(39): n is a, c, g, or t
  misc_feature (42)..(42): n is a, c, g, or t
  misc_feature (61)..(61): n is a, c, g, or t
  misc_feature (87)..(87): n is a, c, g, or t
  misc_feature (585)..(585): n is a, c, g, or t
  misc_feature (633)..(633): n is a, c, g, or t
  misc_feature (644)..(644): n is a, c, g, or t
  misc_feature (647)..(647): n is a, c, g, or t
  misc_feature (653)..(653): n is a, c, g, or t
  misc_feature (663)..(664): n is a, c, g, or t
  misc_feature (685)..(685): n is a, c, g, or t
  misc_feature (689)..(689): n is a, c, g, or t
  misc_feature (692)..(693): n is a, c, g, or t
  misc_feature (698)..(698): n is a, c, g, or t
  misc_feature (700)..(700): n is a, c, g, or t
  misc_feature (707)..(707): n is a, c, g, or t
  misc_feature (711)..(711): n is a, c, g, or t
  misc_feature (723)..(723): n is a, c, g, or t
  misc_feature (727)..(727): n is a, c, g, or t
  misc_feature (816)..(816): n is a, c, g, or t
cctggagtgctgtgtcgnctgctcaccaccatcggcaanganctggactttgagaaagcanagccacgcatggaccagtactttaancagatggagaaaatcgtcaaagaaagaaaaacttcctccagaattcggttcatgcttcaggatgtaatcgacctcagactgtgtaattgggtgtcccgaagagcagatcaggggccaaaaactatcgagcagattcacaaagaggccaaaatagaagaacaagaggagcagaggaaagtccagcagctgatgaccaaggagaagaggagaccaggcgtccaaagagtggatgaaggtggatggaatactgtacaaggggccaagaacagtcgtgtactggacccctccaaatttttgaaaattactaaacccaccattgatgagaagattcagctggttcctaaggcacagctgggcagctggggcaaaggcagcagcgggggagcaaaggcaagtgagtccgatgccttacggtcaagtgcttccagtttaaatagattctctcctctgcaactccagcaccttcagggtccccgtcggcacacccttagagtttgntcccgaagggcgttaccagtcgtgggagcatggcagggagaaagagcnaaaagcaattncantggaanagccgtccannacgttctgagggggcaggaangacntgnnggcancngtccagnagancagcgcaaaagntgtnggaccgggaacagtgaagggggctgatggtgagggccacattgggccggccgagaaaggggcttccaattggagtgtgggtgggagccncttaaacctgctgtaaaggaggtgggagccctttctgtgagttcatagattgggggacgtattaagccgccctgtttggggtggtccaccgcacacgaagcactctcgtgtaacacaccatatgatatagtattttggccgagtaatctgtgtctgcgtcgcggcgag

SEQ ID NO: 702229 - DNA, 679 bp, Homo sapiens
gaactataggaatagctctaggagaacaaactgtgctttctgtaaaaaggcagaccaggcatgtcatgtttttaatgtttcagaagcctaactttttacacagtggttacatttcacatttcactaatgttgatatttggctgactggttgagcagtttctgaaatacacatttagtgtatggaaatacaagacagctaaagggctgtttggttacgcatctcatcttgcattctgatcaattggcaacggaaagggcacgatttcaaacattatatttcttgatggtatcttttcaacttaatgtatctgtccaaagtttctttgtaaatactatgtgttctggctgtgtcttacaattccaacacaaaatgatccctgcactttcctgaacgcatgctttacacgtgagagtctggtaggcacacagcagtctgacgacaagaaataggaaatgcagacacataggttccgtctggttgcatataactcttcgctcttttctaagctctgctgagctctgaaactactacttccgggttacttcagtgtgtttgacaagacagccttgatatttctatcaaacaaatgactttcatattgcaacaactctttgtaagaaccactcaaatcaaagtctcttaaaaaggcaacacaaaaccccaccacccaacacaagc

SEQ ID NO: 702230 - DNA, 814 bp, Homo sapiens
agcgggggtgtcattgaggcaggtccagagcctttgctgaccctcggggctccttcacccctgccccgaaccttccccgtcttggcctgggcagaccttccatgctagccctgggctccacatcagctccttacctgcagctgctcgctcatgtcagatctgccgacagccccaggaccatcgagccccaggccatcgtgacagctaggtcccagctcgcccagatctgaatgcatgatgccgacaggggaacccgtctgcttgcatgtcccacacctctgcaaggagctgctggccagggacaccgtgcaggtgcgagctcattccggagaagaagggcctcttcctgaagcatgtggagtatgaggttgtccagccagcggcttcaagtccgtcggtatatcaggacggtacaatgacttcgtggtcttcgcaggacgatgctcctgcacaagttccgcctaccgatatggtgcctgccctgccacccaagcagaatgcttgggagcttgacaggggatgttcactcggaggccaggaggagagcccgtgaagcgcttcggcaacctggtggcgcgatagcccccatgttctccgaggatgtggtcctcaagctcttcctgtccttcagcggctcggatgtgcacgaacaagttaaaggagtcagcacagtgcgtcggggacgaattcctgaacttgtaagctggataccagggccaaggacttcctcccagctgacatccagctcagtttgccatcagccgggagctgatccggaacatctacaatagctgtcacaaagctccgcgacagg

SEQ ID NO: 702231 - DNA, 294 bp, Homo sapiens
  misc_feature (21)..(21): n is a, c, g, or t
  misc_feature (103)..(103): n is a, c, g, or t
  misc_feature (222)..(222): n is a, c, g, or t
  misc_feature (230)..(230): n is a, c, g, or t
gttcctttttgtaaatatgtnacattcctgattgatttgggttttttttgttgttgttgttttgttttgttttgtttttttaagatggagtctcgctcttgtngcccaggctggagtgcagtggcgccgtctcggctcactgcaacctctgcctcctgagttcacgtaatcctcctgagtagctgggattacaggtgcctgccaccacgctggccaattttngtactttnagtagagacagtgtttcgccatgttggccaggctggtttcaaactcctgacctcaggtgatccg

SEQ ID NO: 702232 - DNA, 322 bp, Homo sapiens
  misc_feature (22)..(22): n is a, c, g, or t
  misc_feature (75)..(75): n is a, c, g, or t
cttttcctggtgttcataagtntagactatttccacttcagaaagttaacttttaggctgggcacggtggctcantcctgtaatcccagcactttgggaggccgaggtgggtggttcatttgaggtcaggaattcacaaccaggctgacaaacatagtgaaaccccatctctactaaaaataaaaaaaattagttgggcatggtggaacatgcctgtaatcccagcactttgggaggccgaggtgggtggttcacctgaggtcaggagtctgagaccagcctggctaacatggtgaaacccgtctgtactaaaaatacaaaa

SEQ ID NO: 702233 - DNA, 164 bp, Homo sapiens
tccaaagaggagggtggtctcagtaccatggagggtctggagctgcctgtaggatgaggaggagaagaagaagattgcagaagaagcacggcaagagtttgagaacctccgcaaggctcatgaagagaaatcttagataagagaggttgagaagcgtgacaact

SEQ ID NO: 702234 - DNA, 259 bp, Homo sapiens
gctcaaccggaccatcctcatgtgtgggctctcatcaaagaggagactcacatggttagtggagcctcgtctccgtggagatatgggaaggggcccctgactctgtacacataggggggtgtgagccagatgtgggtccattccgacctgggaatatgctctggagaagggtagagtggtcttggggatgtttccaggtgtgctctgtccttttccgagactgcatgacctggtcctccctctggtcatgggtgtacag

SEQ ID NO: 702235 - DNA, 186 bp, Homo sapiens
gtaatactctttggagtttgttgcctcaggagtatttggatgtggtagcaggagggccccgtgcttgtttgcctacctgatgccagagcagggagtggattcgtgggtacattccgtggtgagcagtcacagggtaactccttttacaacaccagctgtggtcattacctttactctcttgaccta

SEQ ID NO: 702236 - DNA, 533 bp, Homo sapiens
agccttgaagggtattgggaactaaggagttttcctctgacccgaaaaatggtgtccagatcaaaaattgcccttttggacattcgaacagagttcaagaagcattagggctattccctatattcagcaattaaatcggatacttttggagactatgaaatcccccttttaaaaatctgtggtggagatgactgaaccaagaaaataatctccaaaggtccacgatgggcttttccaacagctcccccttattttttttcatactatttaagagaacaagcaaaaataaacagcaacttgtgttcccaacaggaattttcattgttctaaaacacccaccacaaaaggcggatttatttttttagggcttttcatttataatgtagcagctcataaatgaaattgaaaatggtattaaagatctgcaactactatccaacttatatttctgctttcaaagttaagaatttttatagttttaatccattaaaaataaagcaagataataaaaattgttgcttttgttaaaagta

SEQ ID NO: 702237 - DNA, 225 bp, Homo sapiens
gcagtattagtgtatgatcaaatcaggctatataggatatcatcaccttaccatttgtttgtgttgggaacatttcaaatctgtcttctagctattttaaaatatacaataaattattgttaactatagccacctgactgtgctatcaaacactagaatttattcctttttttttttttttttgggcattctcatagtgtggtgggggactccctcatagagtct

SEQ ID NO: 702238 - DNA, 172 bp, Homo sapiens
tgagcgcaagtcccgtactcccatttggcggcaggacgaggtccgtgtgaacgatgacgctgtgtacggcccggtgtaaagcgtgagcaggccggccgccgagggggtcccgttctaccccagcccggtcgtgtgtgggttgacacaggaggccatctccctaaagaaatta

SEQ ID NO: 702239 - DNA, 280 bp, Homo sapiens
tttttggtcgattaaggatctcagactaaccaccacaccagcagtggataatgaatgatgaggaggctgcagtatgttcatgtataatgatccatatgcagatggggatcctgcttgggcccccaagaattatatttgagaacagttgttgcacatatactgattatacaacaagacaaggactgatgagctgtcatttatgagagggtgcaatcactttatgttgataaacgaagaatgactgatggctgtgtatgaaaggagtctgcaactcgaagtg

SEQ ID NO: 702240 - DNA, 416 bp, Homo sapiens
  misc_feature (290)..(290): n is a, c, g, or t
  misc_feature (407)..(407): n is a, c, g, or t
  misc_feature (415)..(415): n is a, c, g, or t
atgtagtagtttgtgtgatcctcatttgtaaaatggaaatactatttacacccttatgggttgttgtgagggtcagaatagattgtgtgcatgacagtgctttgtatacgcagacagaaggaaaaaagcggctgttattggctcaacttatttgacctttattttcatcatcatcggccactatttgatgtcaatctactatgctgtgagcaaacattaaaattagggaagccagggggtatggggaaccactggattaggcattcatatgcccaggatgttgcttcccntcccaaaggcacatggaacaggaatggattatttaaatttaccaagcctattcaggggaaccaggacccagcttttcttggcctccccttttctatgggattacccaaggtcccccntggaaccnt

SEQ ID NO: 702241 - DNA, 118 bp, Homo sapiens
ttgcagaacagatccgcacataaggtctcctgaccacactctcactgattaggccccatcaccaggctcactaactagattcccgctgccaggcccacagtgtcaaggaccccacgct

SEQ ID NO: 702242 - DNA, 428 bp, Homo sapiens
gaggagagagagagagagagagagagatatatagagagagagagagagagtgagagtgagagagacattgctagagacacctagtgctaaccttctcatgttcttgggttagagattatgcctgatcactatgacatccttccattagcacggatacttcttggctgattccttgcggtagaactcaatgtggcgcctgactgcgcttgcagaagttgtgttctagattcttgcagtaacggacttcgtttaagactattactggcttgaactctttttgcacttcataacagaagaagacctttttcctgattggttgagagacacttgccacgacctccctgagcaggcccgtgactgatcctattgcctacatgagagtagtgacacttttatgggatgctctgtgcgccgctgtcctccccgcc

SEQ ID NO: 702243 - DNA, 341 bp, Homo sapiens
aatgaaacatttggatttgaaattcagtcttacaggccccagaatcagaatgcctgctcctcggaaatgttcactttggatatgcaaaatacaagggggcaagccagcttcaactgtcttggcctcaaggttggtattgtccttccaaattatcattgggtgtagagcaaagagggtttaccctccacacaggtcgttgacctgtatcagatcgtccggaaacctgctaaccgatagagactctcaatggcacactgattctgaaaagaccggagcttgaggcatagctgcaggttttaaagcacactctgacacacaattggggtggagtacagatctct

SEQ ID NO: 702244 - DNA, 288 bp, Homo sapiens
  misc_feature (188)..(188): n is a, c, g, or t
  misc_feature (216)..(216): n is a, c, g, or t
  misc_feature (235)..(235): n is a, c, g, or t
  misc_feature (253)..(253): n is a, c, g, or t
  misc_feature (256)..(257): n is a, c, g, or t
  misc_feature (267)..(267): n is a, c, g, or t
  misc_feature (269)..(269): n is a, c, g, or t
  misc_feature (272)..(272): n is a, c, g, or t
aaaaattggctttgaaaagaatggttttttgaaaacccccagttccagtttgttctcccctggaaaaagcccttgcaaagcagagtttgaggattcagcccccgaacccagtaccagtgaaacatcaaatgccgatgcctggaagtaggcatataaatgctcccagttaaatctgacccagtaaactntgtgtgtttagggagtatacaaaagaantcgttctttcccttttctnatgttgttgaatacttantcnnaagggaatantnatntccaaagggagagaat

SEQ ID NO: 702245 - DNA, 281 bp, Homo sapiens
agttggcgggacttcctgggccagtttggggatttttacaaaagccccccatgactcagggttttgagtttttaactgatcgaatgaaggattcaaaattaccccctccaaggggggattgaaggaagaccccctcttaatggccaaaaagaaaaaaaggggagggggtaccagggatatgagctctaccccgcccaagttagcaatggccccccttcggggtccccttccggggtgtggaagttttcctttggattcattcaataaacagctgcggctca

SEQ ID NO: 702246 - DNA, 557 bp, Homo sapiens
  misc_feature (557)..(557): n is a, c, g, or t
ggagagaggaaagaaaacccccttgtggtttgggggggaaaaaaaccccccgggcgtttttttttttcccccccccccaggggggtgtggggaaggggccccccccgggggggggggggggcggggggaaaaaaagggccccaatttttttttcttccccccccaaaaaaaggggggggggggaaaaaaaaaccccccccccccgtttttttttgggccccccaacaacaaaaaaaattttttttccccccccccctccaagaggagggggggagctccccctcttttttttttgtttcccccaggaaaaaaaaaaaaaccacattttttttttaaaaaaaagggggggggggcccctctttttttgtttttcttggggcccccccaaaaaaaaaagggttttgaaaagggggggtttttagagaattccccaaaggggggggtttaacaggggaggggggcctttttttttccccccctggggggtggaaaaggcccaagctttaaaaagcattgccttgcctgggaaacaaaaagggtgggaagggctcaccatn

SEQ ID NO: 702247 - DNA, 138 bp, Homo sapiens
ggcaggcccatgtaggccttccaacagcagttgctcgaggacggttagcctgaaggcctcagggtccttcctttgcttgtgtttgagacagccatggcgctaccacactgcagtggctcctgtgtgggaggccctgac

SEQ ID NO: 702248 - DNA, 168 bp, Homo sapiens
cctagagtacaacccgctgagcctctctggtaaactggagcggattttttgttgtttgtttttatgtttttgttcaattggctattcctgagatgaatgacaaatttccttgattccattgtatatcaatttatactataatatcaataatagaatgttgaccatgat

SEQ ID NO: 702249 - DNA, 238 bp, Homo sapiens
agccatatttgagcataccaatgaaaatattcatacctatgccagttgcacggtggctcacgcctgtaatcccagcgctttgggaggccgaggcaggtggatcacctgaggtcaggagttcgaggccagcctggccaacgtggtgaaaccctatctctactaaaaatgcaaaagttagccaggtgtggtggtgcctgcctgtaatcccagctacttgggtgatgctcaaagatcttgg

SEQ ID NO: 702250 - DNA, 328 bp, Homo sapiens
  misc_feature (230)..(230): n is a, c, g, or t
  misc_feature (286)..(286): n is a, c, g, or t
tgagagggagtctcgctctgtcgcccaggctggagtgcagtgacgggatctcagctcactgcaagctccaccttctgggttcatgccgttctcctgcctcagcctccctagtggctgggactgcaggcgcccgcaccacacccagctaatgtcttttttgtatttttagtagagaggggtttcactgtgttggcccaggatggtctcaatctcttgacctcctgatccgnccatctcggcctcccaaagtgctgggattacaggattgttctcaaatgcttttaantaagtatcttgccctgcacatgtgttaatgggtaaaaagcca

SEQ ID NO: 702251 - DNA, 263 bp, Homo sapiens
gggcacgtgtgaattgtacatgtgtgaatgtggcggtgtgtgcatgtgtgtgcatgtgtgggtgtgtgtatgcatgtgtacatgtgtgagcatgtgtgcattgcttgtgtgtccgtgggcatgtgtgcgtgtgtgcatgtgtgcatgtgtgtgcatgtggttgtgtgcattagtgagtgtgtgcatgtgtgagcgtgtgcatgtgtgtgcgtatgtgcgtgtgctgtgcgtttgtgtgctgtgtgctcgtgtgtgtgctgtgt

SEQ ID NO: 702252 - DNA, 261 bp, Homo sapiens
gaaccccaaaatctttactggtttaactttaaccgccccccttggtgaaaatttaattttttccttaattcccaaacatttgctggtttggaaaaatagttaaaatacaaaaacaactgttcttggaatcccccaggactgcctcaaggactgggggggaccctttgttttccatccacacacagtgaaatggatgggagggatgagggaacaacccatcttgggagacaaagggaaaaccaaggaaagggctggcagtct

SEQ ID NO: 702253 - DNA, 106 bp, Homo sapiens
agtgtgactctatagcgatccccggttttacattcatttgcagtgaccgctgtcccaggatttggggcacagcccgtgagagagaccagtgtggtcagcgagtggt

SEQ ID NO: 702254 - DNA, 161 bp, Homo sapiens
gataaccatggagccgctcggcccgatggtccgtcacggcgacgaccagtggttcgacatcgtcaagtggcgcggtttgcgatgctcaacgccgaggaatccggcgtgacccagaagaacgtcgacgagatggccaagtgccgcgggttgtttgacgcaat

SEQ ID NO: 702255 - DNA, 847 bp, Homo sapiens
  misc_feature (503)..(503): n is a, c, g, or t
gtgagatgtaagttctgtcagatgcagatgtggaactcagccactggaatcaaatgtctgaaaaatcacattaatattatgcccagtattagaacaatatacaagatggttggcgaatgtgaaatgaccacatgtaagaccaagttcttctttgatggtcatgacaaatatgagagtaatgaagtaagctgtttcactgatacagtcatagtgtctaattgataatactacagttaggggctagagtgttaaaatactatctatctatgtgctaattgttgaaaccctaaaaatatggattgagaattgacgatgagagaagaggtttacggatagcatgtaaatacatgatgcgaagaagagagatgctcgagtgcaaaagtatagtatgctcacgacacagggtgggatggtataagacgcgatggcgtggttgtacggcgttgtgtgtagcagaagttgcatcaagcatttccagatttctaatttgtattggtaagcanacgagtatacatcggtaatcgactagagaattatttgagctataggtgtagggaattcttcatctcccatttggtcgcattgctcgattactaaaacagtgtggtactcttggatcatcaagacatcatcgttgcatagaagtcttaactcgagagcgtacgagtatgaataacgcagtgacgaaaatttatgggacctaggaagcagtttaagaaatccttaggaacgatctctactctcacccatgttaataccctgcttcctgggtagtccctcatttcgaacgtcgtggcgaacattatcgggagtgtccgaaatggcaaatatggaggctaatggatca

SEQ ID NO: 702256 - DNA, 606 bp, Homo sapiens
  misc_feature (33)..(33): n is a, c, g, or t
atctgttgatatttttgtttctttgttttgggnagataggtaagaaatagttacccaggaaagttgaagcatggtttgatggctaagaattttaaattgtttctgaaactagcattatttattttgctgctgccaggctatttaaacttaatgattttttcccctgtgtatgaaatatgatgctacttgggttcactttagagcttgcatttatttatgtatttattattttagctttagcttgtaattttccagtgatagaaattaccaaaatttgtgtgtgtcaatatgtttttgtatattttattaagtatatttttaggtagctaggtgaatggcagcataaattttctctttaataattattttatattgttcaaaactacttggctaatgagtatttttgctctagcatggaattctggaggagaaggttgcaatgtgatcagtatagacagtgtcttaatcttgagtttaaaagagaagaaagaaaaatacccattcaagtgaagatgataccaagcagtaggatgttgccagtgctgctgtacttatcaaaaagtgtttttaaaaactctttgtttattgtgtgcagctgaggagaaa

SEQ ID NO: 702257 - DNA, 271 bp, Homo sapiens
taggtgactctaaggatcccttgctttgggacgggccagaggacaagcgaaagctttgcagaattttcttaatcaagacgaaagtcggggtcgagacgatcagatacgtcgtattcgacataagatgcgacggatggggggtaatatcctaaccggcgggagcttccgggaaacccaagtctttgggtccccggggggagtattgttgcaaagctgaaacttaaaggaattagacggaagggcaccacccaggagtggagcctgcggctgt

SEQ ID NO: 702258 - DNA, 106 bp, Homo sapiens
aacttagtcatcccttccacctcctactgtgaagacaggccctgggtcccacactgaatcccctctagtcacccattcgaccccccaggagctgcctccaggcagg

SEQ ID NO: 702259 - DNA, 110 bp, Homo sapiens
gaagaccactaatgtattatggtatatgagcttccaataatgcccttgacagctaacacaaggcaaaatcatgtcagtgtatataaagcatcctcctgtgcctctttgtt

SEQ ID NO: 702260 - DNA, 223 bp, Homo sapiens
aagggaggttggacaaatggcccccccccactgttttcccctttcctttcccgtcccccggtgctttttcaaggcatttcccgtgggataaccgtggtttggttctttttacctgaatgtgttttttctgtttgggggttgtttttttttagtttccctggtttaaagtgttttaaaaaggggggccgggggaaattcttttaaaggccctttttctcctgga

SEQ ID NO: 702261 - DNA, 105 bp, Homo sapiens
acgttctctactacggatcatccttatgccagaaatcacatataaatcaaatcatataatgtatgatattctgtgactggcatctttcatttaatcatgaggttt

SEQ ID NO: 702262 - DNA, 395 bp, Homo sapiens
cgttttcacagggaaacaggtcttatcgtattgactcgggaataacctctcgtgcgtggttttctcaactactaacagactctatagatgttctggataaaagctcactgtgcgttgagtaaaacgctacatacacgattctgatctgcttcagtctggactagtttcttccaggtccctgaaacttttccttctgggacctccactgaccttcttcctggagattcttgtcaactcctccttgtgccagattacctgtttccagggttcactactgagaaagtgtgcacctaaggagaattctgaggactttgtctatttagaaacatctttactcttatcttgaattaattttggctgagtgttgaattctaagtttacaatcatttttgatc

SEQ ID NO: 702263 - DNA, 799 bp, Homo sapiens
ctggacaagaacttgtgggcaacaactttttgttttatcagacggacactcactctgtcgcccaggctggagtttagtggggcgatcttggctcactgcaacctctgcctaccttgttaagcaatttcgtgccttggcctccaagactgggactgaggtgaacattaccacacttgggtaatttttagtagagacagggtttcaccatgttggcctgtctgggtgattttttataccattttgttagtggtagggtggtatttattaggaattcttagctttgtgtctgtgtactaattatacagtatactttgtttctagtttcctccaaaaagcccagtatttctaacggcctgatgctctgtgcgacatataagtccgtttactaccttaacctgtgaacaccaaacctatttttctcgttctgtaatgccgaacctattcgcttttctgacatcacttcaatccatcgtctgttctttcatctataactaaacgtacttcataaaacaaatgtactctcttcttaatttgttccctaccataattttatctttactttgtccgtcgtagctgacgacgtctttcctagtcacacaccatcaacacgaagtcttttccttcttgcaattaatctgttttgtatagtttcatccgttctcgtgacccccccccacggcacactccacaccacctcactacctccacgcatccgcaccacccacccacgcccaccctaccttcccaacaatcacactgatttccttatcgcacaccccccgccaaacactcctcaccg

SEQ ID NO: 702264 - DNA, 893 bp, Homo sapiens
cgcccccagcccagagggccgcctgcgctctcgcccccggccctggccgcgcgtgccccaggtcccccagtagcgccccagcgccgctgctgctcagacacaccgaaataggaatgatttaatccaacgacacctcccagggctgcccagtcccggttccgccggctcctgagattggggaggggcagaattgggtggaactcgggctggggggcggaaatggcccgagtgggagggaaggcgcggagtcggacgctaccttgtaaccgagttagatttctgcagaagaggaggacgaaggtcgcccacggaccctcgggtgacctcgtgtgcggcctggtggccgggcacacccgcgcatggacgaggtccctcccaggggtctccctgcaggggtctccggggaggtagtgggcacgtgggtccttaacctctccattgcatcatccccatcccggtgggtacagaagcgcagcaaccccgcggttgctcccggaagacaccgcgtctccaacatttacacggagatgctgctcggctcaggtcgggtccgtacgcttccgaggtgcgtactacgcgagccacacacatcactaccgatattcctgagaaagtcggtgccacagtaagtcagctgcaagcgtggggtggccggtgacgcgctgtgcccgtgaatacgcccattgtgccggtcagacgcagccagggcgcagcgttcaggaggcgggtgggcagccgaactttcactggccacgagcgcttcaccttctagaatttgccagggactaggcatcaactcccagtgagaaaatcacatgtgaagttggaagacacatgctgcccttcacttttctacggagttcacatcagtttcagcatctccgctttggaaa

SEQ ID NO: 702265 - DNA, 384 bp, Homo sapiens
ttggtggtgctcgctgtatcggtggtgctcggttgtatgggtggtgctctttgccagagtcaacagtctccaggttgggccggaagtggtgtgtaggcgttctcaaggccgaatcgtgctctccctcagattctggtcttcccagatggccgtcttctggaagatgccaggtgtgccttcctttcgccactcttgaggcacatcatactgttccctgtgccgttttctctgggataggctgaataagatgattaggatgatcaatgcgagcagcagcaccgccatcacagcccccacgatcccatacacgaggctcgtggggatgttgaattcacaggtctctccccagtaccagtgtgtgttcgtatttgggcacaggcagcg

SEQ ID NO: 702266 - DNA, 196 bp, Homo sapiens
tcacaaaaaacggaatagcctcatcgagtccccacgcatcatagccagcatcaccctccttaacctcgtacttctacctacgcctaatctactccgacctcaatcacactactccccatatctaacaacgtagaataaaatgacagtttgaacatacaaaacccacccctctgacatccggcctgcttcttctcac

SEQ ID NO: 702267 - DNA, 450 bp, Homo sapiens
  misc_feature (24)..(24): n is a, c, g, or t
  misc_feature (314)..(314): n is a, c, g, or t
  misc_feature (345)..(345): n is a, c, g, or t
ccctaatttatcgcccaacacagncaacataacagtaatgactataggtctaacagcagacagaaacagatatgatcttgactcctaaacaagctatttaatctttcttagtttcaatttctttatctgtaaaataaagataatattacctaacccatagggccaacggggagggagggggcaaatgacttaatataaataaggtatacagaatgacatcttacagttagtcaaaagcaagcacgatatgtacacaaaatgccagttctttttttttttctttggagatggagtttcgctcttgttgcccaggntggagtgcaatggcggatctcagctcaccanaacctccacctccagggttcaatcgattctcctccctcggcctccccagtagctgggattacaggcatgcgccaccacgcctggctaattttgtattttaagtag

SEQ ID NO: 702268 - DNA, 383 bp, Homo sapiens
cgggttccccttcctgctgatgctcgtctacgcgggctgctgtcctgcatctccctcgtactggccgagtgtagtggctcacgcctgtactcccgaatacttggcaggtgaggagggaagatctcttgagcctaggagcttgcgaccagccgggccagcattgtgagatccccctctctacaaacaaatcaaaaattagttgggcacagtggcacatgctgtgtaatcccaggagttcatggctgcagtgagccatgatcagaccaatgcactccatcctgggccagagagagagatcctgtctcacgaaagaaaaatctccctccttcagttccccaaggatgagtcaccctgagggctccccaagagccatcaaccaggcc

SEQ ID NO: 702269 - DNA, 174 bp, Homo sapiens
tgtgtattagaggacccattctgttgtagtgcgttgaagtgaggctgttgtcagtgcgttgtagtgaggctgttgtagtgggcaagatatggttctgtatgtaggtaatactgtgtctatgggcatgtcatggtagaggagtgtgatgtaaatatgactcaatagccagagctg

SEQ ID NO: 702270 - DNA, 259 bp, Homo sapiens
gtgactgtgtctgatagtgccggcattggggatcttttgacatttggccacagcctgttcaagacctgttccccggcctgccctatcccagaaggcgtcaatgttggtgtggcttacatgggcattagctgttgccatagctttctgtgcaatttcagtgctgccaatggcgggctgctggcaagcgtcaccctgctgggtgccgagctgatgttgagcctggtgccggtcctgctgtagtatggcccctgaccgacca

SEQ ID NO: 702271 - DNA, 169 bp, Homo sapiens
gcagtgtctcattataggctaggagttgtttcacatattgagcatgtctagaatatattagggtctcaccatgcgaaacatgatcacacatctcaatctgtcacgtgctccctagccatactgggaacctgctgtcccccaagatcccctgtgctatcaagaaaccatg

SEQ ID NO: 702272 - DNA, 167 bp, Homo sapiens
  misc_feature (9)..(9): n is a, c, g, or t
  misc_feature (62)..(62): n is a, c, g, or t
  misc_feature (79)..(79): n is a, c, g, or t
  misc_feature (94)..(94): n is a, c, g, or t
  misc_feature (107)..(107): n is a, c, g, or t
  misc_feature (111)..(112): n is a, c, g, or t
  misc_feature (136)..(136): n is a, c, g, or t
  misc_feature (159)..(159): n is a, c, g, or t
ggcttttgnccccccatttttactatttgccaaaccctttttttaggaatgggctttttttnggacccatttttatccnttttccattttaaancagggtaagttgnaaannactgttttttatggccaaggaccnccaataaatcatatggaaatttnttttttta

SEQ ID NO: 702273 - DNA, 905 bp, Homo sapiens
gggatactgcgagtatggcggcgtcaaaggtgaagcaggcatcatgcctccgccggggggctatgggcccatcgactacaaacggaagcttgccgtcgtcgaggactgtcgggctacagcatgctggccatagggattggaaccctgatctacgggtcactggagcataatgaagtggaaccgtgtagcgcaggcgcctacaaatcgaggcacttacgatggtctcgcagtcgcgctgttgcacacgtgtcacagtgcagaaacctgaccggaggacctttgcacgatgcttcgggagagcctggaggaggaggccatcgtcatgaaggacgtgcccgacgggaaggtgggggagtctgtggttccacaaaaaccggtgggtgcacccacctatgagtcggggagctgtacctgggctgcgcagccacagaggaggctcatccatgccagaccacggcgttcaatgtggtacactgtagggccctgtgccctccggtccatcgtggcatcgcctgaccccgtcccgcaatggtggagcggaattaatatgctcctgcaggaacctaggggacaagcaccagaagagacaataatatggaaggcacatttttgcacgtgaacattccgtatcaccgagaacgagttttaaaaaaaaagggggagggagaggcgcgggacacgagagagggcgaacaggcgaaacactgggcgcaaaacgggggtgccacaccaaagagagaacgctcggggcgacgaggagcagagaggcaggggaacgaccaacccgcggctgacgacacgcgccgcagggcagggagcacgccaacgggggtaggaggagcgaaaccacgggagagggagggcccagaggagaaacacacgggggcacgacgcaagcagggggc

SEQ ID NO: 702274 - DNA, 206 bp, Homo sapiens
  misc_feature (62)..(62): n is a, c, g, or t
ctcggaccagtgattctctgctcagcctccagtggctgggattacaagcacgcacaccatgnccaactaatttttaatagacacggagtttcaccatgttggccgggctggtctcgaactgctgacctcaagttatctgcctgcctctgcctgccaaagtgctgcggattacgaagtgtgaaccactgctgcccagccagcgactt

SEQ ID NO: 702275 - DNA, 1918 bp, Homo sapiens
  misc_feature (726)..(726): n is a, c, g, or t
  misc_feature (1266)..(1266): n is a, c, g, or t
ctcgtcgtcggtgttgtctctactgctcagttgtctccgtctatcgttcgtctttcctctcgaccgctcctgttgttttggtggtacttctcttgtggtcgcgtctctctattggttgctcgttgtgtgcaacttcttcgttgtgttttctctaccctccgtgggtcctgcccacgtgctacttcgctctgtggtgttaacacaccggtggtttccgcccaccgtcgtaggtcttttgatcgggtcgtctcgtttgttccccgctgtggttgtgccttcccgcctcttagtgggccctcttgaggcattatcttgctccaccgggtgaccacgatgggtgccgacgtctctacggtgggtggtggttgttgtatcctcgccggtgacccacttcttccccctcggtgtgtgttgtcccacacggccgggggtgtttgttcgtcctcgctccgtccgatgtgtgactcccttttccctagtaggggtatgcgtctttgtcggtgggcacccagttggtgcccacatccgtgttgtcccacagagcccgggtctcgctgctcctcggggtcgccctcgccggaacgtagtcccgccgcgccccacaggctttgtggtgggagaagtccacacacttgcggcgagttgtttagaggtcccgccccgatgtgcccgccgtggggcgtgcccacagacgcgggtttcctctgtcttctctttaataaggcncccacggcagaatgtttgctgtggaggaccgccccccgtaatacgggtgataagtccttctcttttgttggggtgccccccgtggtggccccccgatcttatttgaacccccacgcgtggcggtgggggaagaaaccacggcttggggcaacccccgcgacatgtttgttgggcgtgagcccccggtgggtgtgtcaacgcttcgttggggcccacttatgaattatggcgaacgcccccccttgtgtagttggagacgccccgtctctctttatatcctcgcgcctctctgtagggagtttttgccccccacgagttggtgtttgtttccctcggcgcgtgtattttcccccccgggggagaatccgccgccccccttggtccccacgacagatggtgcctctgttcccacacggctctgttctctgagagaaaatatcttataggggtggaaatcacactctggagtgaggacataccctttattaggtagatataaattcgagctgttcgtagagagagatatgtttcgcgagaggncgctttatagacacacacaacattatttgagagcgcctgtctgtacgcctacatacccgcactctgggaaattacgagagttgtctctgtggttgataaaacgcgcctcttccctgttatacgactcttatatttgtgagagatacagttattgttgtctctctctgtgaagagaggagatagagaggagatagagtcctcacatacacctgtgtggacgccaccgagaaactgacacctctctcgaaaggctacacacctctgtgcccacagtgtttcacaggattgggcgcttctcctcgggacgcctcttataactctttatagagtcactcgtgtagctcgaggaccactataaatgtgtgtgtggtggtaactaaccgttgtggtattttggtctttatttgtgttcttcttatctatagagacagtcttttctttataaatggtgggtgttggttacctggtagccacctgttgttaccacctgagaacgtagtacattggcaccaggttccccacctggacacaaaccagtacctgtatgaagccttgtcctctgactaggtttttaatattctatgtgggatttcctattcttgccagcctcccgtaaataacaccattccagtcccccccttttttgaccttc

SEQ ID NO: 702276 - DNA, 1006 bp, Homo sapiens
gctaaaccatagccccaaaaccgcacgtccacgcttactaccgagacaaccgttagccaaaccaatttacccaaatcaacagtcataggcgcatcagaacatggaaacctggcagcaaatagatatagtcaccgccaagggacaagcatgcaaaacattcatcagccaaagcgatcacatcatagccacaggactaaccccgtatcaccttctgccatacatgcacattcaactcagcaaatcaactttggcaaaggcagcagccaagagcttaagaccccgcgaaacccagacgagactacctcaagaacagctaaaagagcacagcccgtcatatgtacgccacaatagtgggacacgactttatacggtcgaggcgcacaaacctaccgagcctggtggatagctggttgtccaagatagaatctctagttcaactttacatttgcccaaagaaccctctaaatccccttgtcactttaactgtaagtccaaagaggaacagctcattgggacactaggcaaaacagcctgtagagagagtaacacaatttaacaccatagtaggcctaaaagcaggcaccaattaagaaagcgtcaagctcaagaaccaatacctaaagaatccgaaacatcatacgtgaactcctcacacccaatgggaccaatctatcaacctatagcacgacctaactgtcagaataagtacactggaaagccattctcgttcggacattaacgcctgcgtcagcattcaaaccgttgaagctggccagtagcagtcccaaatctacaacaacgcacaagtcatagtaccccgacggggaaacccaaaccacacgcagtgccaacgggacaggtataacacacgaacagggactcggacaacttaccccgcggtacgcacaaaacacgctgagaccaacagaataaaagccgccgccacacacaccgccacgacggcgcaaaccgcggagcaacacggcaaaagccaacaagaccgagc

SEQ ID NO: 702277 - DNA, 100 bp, Homo sapiens
cccctcccacagtcggcctggaagtgcactgaatggaacgctgagcttatcctgtgtggcctgcagccgcttccccgacttcagcaccctctgagaatcg

SEQ ID NO: 702278 - DNA, 510 bp, Homo sapiens
gatccttatggcatggggtctgtaggcaactcagtatacttcccattctcatctcatgcgaggaatttggtcttgcccggttcaaaagcaacgtgacccagactatgaagggttttgaatatatcttgggtgaactgcaggtgagtttctgggtatgtggatattcctcctaaggagaagctcattcaggctagcgggcgtggagtctgggttagtccttgtccgactcccagaagctggggcccactgagttccaccagtatttattgagtgtctattatgtgtctagatactgagacacctcagagaaccaaagccaaaggcctggccttgtcgggcttacagtctagcacttaacggcagttaaactgcagggtacctggagcccccggcaagtcaaccggacctctgtgcctcggtccctcagttgccccatgggagaataagcagacctgggtcagaccttaatcatgtgcttggtgtactgcaaatgccaaactgtgttccccc

SEQ ID NO: 702279 - DNA, 1068 bp, Homo sapiens
gctgtccttccagtcagcatgcatccagaccctcaagactgcagcacgaggagtttgtcaccagcctggcccagcagcagcagcagcagcaacagcaggcagcagcagctccagatgccgcatgatggaggctgaagtctaaggcctacgcctccagccgtcctgctccagccccggtgtcctgcacgtgcctctgggatacctcgatcatgcagccagcctgtatgagcaggtcaagtctcctcagtccagggactggccgtgtgggtcattcagaagttagcgaagacgtcccagagacgagggatccaaggattccgtgcagacgtgtcggccacccacggttgccaccgcgagtggccaactcagaagcaaggagtcaccagccgaaagcatatggcaccccctttggatttagaagaaagactcgacagacccgatggtcttcctatgaggtgccccaggcaatggcaaggctcgcacaagacgactagggaccatgaccttagcactcagaaacgcaagcacaagagggccgagggaccagactccccaaagttggacaccacagcgaatagagatggccacgggtaaaggccctattggtaccgtgcgccaaaattggattgcgatgtgccgtgaaggcctccgcattgacggagttggtaaacgcactcaggcggtcaatagtgggaacccgggaggcaagggcagcgacgacatcgagcctggtcccccaagtgttgaattcatcggaacaccccttgaggggaacacttggacgctagccgcaaaggcaccaataggggacgacccaaacggctcgaatagggtccttccaggatacgaaagatcgcaacaccacaaatagcggttacacataacaatcgaccccataagcaaggcaagaagggtacaagacggttctccggcctccccacttgttgggggaggcaaggtgatgggaggagtcttataggagagtgccagaaaattagcgccaatagacacacagatatttcgcccttgtacaacaatttggctcatagcgcaggacgagcaccccct

SEQ ID NO: 702280 - DNA, 1273 bp, Homo sapiens
gaccgcgtcgccccgcgagcacatgagcctcgcctttgcctgatcctgccgccctgtccacacccgccgccagctcaccatgtgatgatgatatcgactgctgctcgtcagtcagacaactggctcctggcatgtgcaaatggcctggcttctgctggtgctgactgatgcccccccagggcctgtcttcccctccatcgtgggtgctgccccaggcaaccagggctgtgcatggtgcggccatgggtccagcaaggcattccctatgtgagcgcgcactgcagagcccagcagccaagcagcaggcatcctcgacccatgcaagttacccacatcggagccacggccatccgtcgcacaacctgggaacgaccactggacgacaaactctgcgcaccacaaccatatctacacatgagctgcagtgtggcctcccgcaggagcaacccccgtgactgcatgaccgagggcccaccatgcaaccccaaaggcccacacccgccgacgacagatgaccccaagactcctgtcctgagacacttacaacacacccagcccatgtacagttgcctactccagtgcttggtgctaatccctgtaacgcctctgcgccgaacccactgtgcatccgatgatggcactcccggtcgaacgcgcggtcaccccaccacttgtgacccaatctacgaccgcgctatgccctcccacaatgacatccctgacgtctcggaccctgcgcctgggactgggcaccctgactgactacgctcaatgaacagcatccctcaacagcgccgctggcctaaccagactctccccatcaaggtgccgagaccgggaacatcgctgcgcgacattcacgggagccaccgtgcccacaggcccccgtggcactacgcaccaagagaagtgccactgccggctctccagctccctcctgagcaagagcctacgcaccgaccgaccggccccggtccctcccatcgcgcacgtcgacgaacgcagacaccctgaaggaacaaatccacagccaacaacccgggtgccatggggcccgcggcgaccacccgacacgcaacccagcaccccaccacgaccagaacagccaccacgcaccaacacgcctcacaacaaggcgagggcgcacacgcttaccccatagccacgcaagagaagacagtggaccccacaagacaaaacgtgaccatccacaaccgacacgccacacacgaccaacaaaaaccgactgcacgccccagaacgctcaccagac

SEQ ID NO: 702281 - DNA, 345 bp, Homo sapiens
taccattgaggaggtggattaggggcctttgttctttagtatgtttgtctttgaggtggactgttgggactcaaggactttgctgctgttttcctatgtcatttctgcttcagctctttgctgcttcacttctttgtaaagtttgaacctgatggaaattagctggcttcattatttttgttgtacaaccgatatgttcattagaattttttgcatttaaaggttgatacttgtaagggtgtttcttttcccttataatgaatcaaatactgcacctttctgaccgagttaggttggtcatttttttttttttttatgtgctggggaaaaacccttcaaaggctt

SEQ ID NO: 702282 - DNA, 258 bp, Homo sapiens
ttcccccccccccccccttttggggggttgttcaaaggggcccccggtttaacgaaaaaaaggggggaaagggggggggttttttttttccctttttaaaaccccccccccccccctaggggggggatcaccttttttaaaaggattttggtgttttgggccccgggggaagggggtttaaaaaaaaccccccccttttttccaattccccaaaggggtggtccaaaccccttttaaaaccccaaagtttttttttta

SEQ ID NO: 702283 - DNA, 107 bp, Homo sapiens
cagattagctgggctccaaagtggtcacagttgtaccgacagatggctgagatatgctgtgaatgccgtcctcactgtagcagatatggagcggaaagaccgacgat

SEQ ID NO: 702284 - DNA, 1074 bp, Homo sapiens
caaatgctagtcgcgtaacgtgccccttctagtgtcacccccaagcgcggcaagatctctcgtcccaattaggagtccatggccgaccctaagtcccgctcgaagtaatccctgagaaagcatcaccccggtccacttcgtttccttgattaaaacaaagaagacaggaatgtcatagtcccacaaatatggctgcagttattgccagcacggccattatagacggtgggccattaagaacgtctgtgaccggcacatatgcctccagacttcctggaaccagaaaaccgtgcaaacaaccaaagaacgacaaaagaagaacaacgggttatctgtgccaactggcttgatcaacttcttgaggtcaacaagtcccaagaaccatgttgtaactgttcacacccgccacgtttgctctgtaaagactgctctcccgtcacacctccgggctgacatcccgttgacacggattcaagcccagctaaagaaccgaagatgacatcaaaccggccttggtagctcaacaagagagaaagacgaaagaagaaaacaaggcgcgagaccggagcactaagagaggaacccccacacagagggacccaagacaaacacgagataccacaagcgctcacagtgggtacacaaacaggggaggccccgataagagaagcgagcacgacaaataaacagacgcacaaggcaaagatgacccgcccatgctactacgcaagggaccagagcaacgtgcgccaaaccaacgagcacgacccacggcgcaacacgtcggagagaaacgcgaaacccgaaaacgatcacagtggagtgttacaccacataaagttttggcgaccaaagagagtagccccgaaagcaacaaacaaatagacaacagcacgaaacagcgccaacagacagagcaacatgcacaaaagaccgcgctaacaagcgggcgacaaacaaccaactagggccagcaaaacgaaagcaagaggtgggaagacaaagtcgcgcgacaagcaggaacaactagacccagggaacaaacagaatacaacaggggccagagacaaaacg

SEQ ID NO: 702285 - DNA, 186 bp, Homo sapiens
tctcgtgatacttggtctctagacctgccccgcgcatcatccaaatatggaattggaccctcttgtctggtgcccggcaacggcggagcacagtcgcgggccatgtaaagttcacccgcccacgtgtagagtgacaggtccctgtgacgttccccgcgccccacacaatgcaccctttagactcgg

SEQ ID NO: 702286 - DNA, 327 bp, Homo sapiens
gacagagttttgctcttgttgcccaggctggagtgcaatggtgcaatcttggctcaccgcaacctccgtctcccggtttcaagcgattctcctgcctcagcctcctgagtagctaggattacaggcatgcgcaccacacccagctaattttatatttttagtagagacggggtttctccatgttggtcaggctggtcttgaactgccttcctcgggtgatccgccttgtctccgccttgctgggattacaggcgtgcgacgtgcctggccagcaagccatctcttttgagagagtgggctctccagcaaggttaaaagccaaactgt

SEQ ID NO: 702287 - DNA, 175 bp, Homo sapiens
catttatgacattgtgcttcgtaatcaacagcgaaagtcatatataaaaaaccacatgcttttataatctaaacgagtgaaaatgatgcaaaaccgattaaagtagaatgcatgccactggttcatggacgtcatcggacaagaaaacgcaacaaaatcccaaacccagaacacc

SEQ ID NO: 702288 - DNA, 997 bp, Homo sapiens
catgttcgtcacgaattgttcgcgagaccctgttattagtctccccgccgtcattttaaagggcggcccctttgatgaatcctcggcccacacacattttgtctgtccgccgtctctccgcttgcccttgtgtttgtctgcgcgccaccgtgtatgtttggtgcacccccgcgcccgtttgcctccttataacccgccctggccggcgacccttgccccagggtgttccttagacaccccccatgcgggggtggcaccccaccccgggagcaaaacaggcggcacacacatcttgaggggacgccctcctcgccaaacagttgattctgcagataaaaacggtctccacaataaatggacccctgttccctcatacacatgctcccgatcccccggggccctccccctccgcactcctctctgtatttggcggaaccccactcgcgtggtgaagccacggagtgacaaggaccataatcccccaggggggaggatcgggggcaggataaaatagccaatatcactggccctcgtcccggcctcttcgcgccaaacgccggggccaccctcaagcgcgccctcttggcccaacaaagtgcagggaccccggggagcagcctagcacaattagggtagggaaagctttgataaacaaaacaatacgagaccaaacttgtgaggagtgttccccaaattttaaagccacggggtctcctcgccagttgcaaactacagaaatttttcttcctctgtgagactgcaaccagctcgtctccctcccctaaggtccactacgcccggagaagtctcccgcatctatcattttgaagagaacacgtattgtcccccctcgtgagctaataaaaaaggaggtgctcctccacggacttcttttacaagaatatctgtagacattctttgtcgagagcggttctttgaaaaagcatagaaccattttccctctctaaaaaaaaggccaaaaacacaaacaaaaaca

SEQ ID NO: 702289 - DNA, 401 bp, Homo sapiens
ttaaaacgactcacgggataggtttatttcttgactgatattcaccactttgaaatttaaagcttcaatctccttttcatagcaatccgtgtgagacttttaatggctctccaaaacacgtctttctttctttagtccttcataagcaaaccaaagttctccatcctcatttaaatgttccagatcttccacagagagcctgcttcttacatcttcaatgtcatagctttcgagaagttgcttggtgatctctgacatcttttctctcatttcccgttcttgtgactccacatgtttctccacatctatcttctgtgcctgaagtagttctatctctttttcgaactcagagattgtctttgacctgcttgctcaggcgtgccacttcctccttcaagcca

SEQ ID NO: 702290 - DNA, 842 bp, Homo sapiens
  misc_feature (21)..(21): n is a, c, g, or t
  misc_feature (81)..(81): n is a, c, g, or t
  misc_feature (163)..(164): n is a, c, g, or t
  misc_feature (169)..(169): n is a, c, g, or t
  misc_feature (215)..(216): n is a, c, g, or t
  misc_feature (218)..(218): n is a, c, g, or t
  misc_feature (362)..(362): n is a, c, g, or t
  misc_feature (397)..(397): n is a, c, g, or t
  misc_feature (405)..(405): n is a, c, g, or t
  misc_feature (413)..(413): n is a, c, g, or t
  misc_feature (416)..(417): n is a, c, g, or t
  misc_feature (421)..(423): n is a, c, g, or t
  misc_feature (425)..(425): n is a, c, g, or t
  misc_feature (428)..(428): n is a, c, g, or t
  misc_feature (434)..(435): n is a, c, g, or t
  misc_feature (438)..(438): n is a, c, g, or t
  misc_feature (463)..(463): n is a, c, g, or t
  misc_feature (478)..(478): n is a, c, g, or t
  misc_feature (495)..(495): n is a, c, g, or t
  misc_feature (522)..(523): n is a, c, g, or t
  misc_feature (525)..(526): n is a, c, g, or t
  misc_feature (543)..(544): n is a, c, g, or t
  misc_feature (548)..(549): n is a, c, g, or t
  misc_feature (572)..(572): n is a, c, g, or t
  misc_feature (633)..(633): n is a, c, g, or t
  misc_feature (638)..(638): n is a, c, g, or t
  misc_feature (640)..(640): n is a, c, g, or t
  misc_feature (645)..(645): n is a, c, g, or t
  misc_feature (700)..(700): n is a, c, g, or t
  misc_feature (720)..(720): n is a, c, g, or t
  misc_feature (830)..(830): n is a, c, g, or t
ggtcaatacaatgcattaganctatgtacaacgcacagtttagtatcaaaatcgtttctacactgtagagttttacgaaantgttaatgacatcaaacactaagcacttaagacaccatttgttttttttctgctaccacattaggaacgtcaatggacaggnnatttnaacttgcagcatccatccatttctagtatgaaattaagtaattttnnanttatacaataaagtatatctacacggttcttttgattttgatccatagcagcaaaggcactgtacatcagcagatccacagacttaaaagatttttaaagcattcaaacaaaaaataataaaaaaagaagtcacatattatagnttaacagcaacaacaacaacataaaagataacacnatgtttcnggggcagnggnncggnnngngtncatttnnggngcatccaactaagacatgggaaggnccgggggtagaaggnagcgagtcctcatcccnggagagagtccattctttgtgtttttnngnnggaggtctctgcgaacnntccnntgctgtccttgttttgtaaaagncttaacttgcacagcagtgggagtcctccccataactgtgcagctcccaaagagcatgccncgtgntngcccntggtttctcgtggcggcaaaactgactaaagatatatatatctccttttgcaaanaaatgtggcaaaaatatccngaagggagtaagttctctctttgaggccaaatttaatttgttcatctgcctataatacaacaaaaaaagggaactaaaaacatattacaaagacacttgtcaacgagtcnaaaaaagaaaaa

SEQ ID NO: 702291 - DNA, 259 bp, Homo sapiens
  misc_feature (153)..(153): n is a, c, g, or t
cacagccccagtccaacccatctccaggcaatacatgcccctgggacgggctcagtcccagcaccaccctggaggctccaacaaggtgggtttgtcccctcgtgctcctcctctgtgctgtccacctcctctgtgcctcctctgtctgtccanctcctctgtgctgtccacctcctctgtgctgtccacctcctctgtgcgtccacctcctctgtgctgtccacctcctctgtgctgtccacctcctctgtgctgtcca

SEQ ID NO: 702292 - DNA, 328 bp, Homo sapiens
tggagatggagtcttgctctgtcgcctaggctggagtgcagtgggtgtgatcttggctcactgcaacctccacctcctgagttcaagcaattctcctgcctcagcctcccgagtagctgagattactgatgcacacacaccatacctggctaatttttgtatttttagtagagatggggtttcaccatgttggtcaggctgatctcgaactgctgacctcaggtgatccacccatctcagcctcccaaagtgctgcgattacaggcatgagctactgtgcccggcccagtatcatccattttttgccatgaggatacttccccgcccc

SEQ ID NO: 702293 - DNA, 280 bp, Homo sapiens
attcagcttccctctttttccaatttgggatgtcttttatcttttttctcttggcctaatgctcctgctaagacggtccgtacctatgtgagatatagagatggagagaaggttggcacatcctggctcttgttcacattctctacacagagaaactctttcacaactttctctacatcacagtgtagatgttgcgctgtggggtttgtacatatatgggatgggcctctattatttgagagccatgtctcttctatcgcctagtttgtagagggtttat

SEQ ID NO: 702294 - DNA, 556 bp, Homo sapiens
  misc_feature (52)..(52): n is a, c, g, or t
ccctgcatgaattgaccttatttacttcctatcaatagatgccttacagatnaattcttaccctgcagaatgggttaaactgtgcttaacagctttagtttttgtgagattaacagattgtgaaaaataaacttagccaaatctcatgtgaggattaaaaaaagcgatgtcccagataagtcaatgtgacactaaagatctaaacaattttttttaacttttaagttttttatcaaatttcagcacccagcaaataataggcactgttaatatttgcttaatataacgtagctgtgaatttttgcccacatttaggcggacgggaaaattaacgccagaatatcccgaaagtcaaattttgtcatcttacacttaggaagttacgttaaaaaattctcaagtctcgtagtatttttcttaagcgccatttgggaatttcccgttacctcgtggtttccgtcatcaggttcttggcaaagattgcaatacagtagttttagaactatattaactaggtattccattaactaggtaaaaaccactcgactgacctcgt

SEQ ID NO: 702295 - DNA, 347 bp, Homo sapiens
  misc_feature (60)..(60): n is a, c, g, or t
  misc_feature (80)..(80): n is a, c, g, or t
tgttgtggcgcggtgccctgcgccgcgcgaccccaaaccgagccccttagagttttacgnggccttcgtcctagagccanatgatttgcatcgaccaccaaactgggcaacgaaaccagcatcgttttccgggggcgtggggtgagagacataaaacaaaggtgaactttggcatgtacctgatgcatgcatcattggatttatcctccccatgtttcctgtctgtaagatctcacgtgctccctgtgttgaaagagaatgtggaaggtcatgatttacctgcatcgggggggggcagcatgttacctcctaaaaaaaatttttagcatacattaaagctgctcttt

SEQ ID NO: 702296 - DNA, 274 bp, Homo sapiens
agactaggtgtggctgtggctgtgttaggagggttcttatatgctgtaggtggctctgacgggacatctcctctcaacacagtggaacgttacaatcctcaggaaaacagatggccactatagccctatggacccggagaaaccctaggctgtcagtttatcggactgatctatgccgtgggaggtagagttaccctacgagctagcgtctgaggtccaccccgaaccaaccagtggtctcgtggtgcttacttccctgtgagttgcctcagtg

SEQ ID NO: 702297 - DNA, 226 bp, Homo sapiens
cgcacagcttctcaagtagctgggattacaggcacgctcaccatgcctgggtatttttgtatttttagtagagacggggtttgaccatgttggccaggctggtcttgaactcctgacctcagctgatctaccccccttgacctcccaaagtgctaggattacagaagtgagccatcacgcctggcctctaaaagacctgatgtttgtggcggccgagaagctgtgg

SEQ ID NO: 702298 - DNA, 158 bp, Homo sapiens
gagagaggcaccctggatctaagacgtggttcacgtaaaagatgccaatgcaacagctttgccactcgactttccaacattattgttattggcaagggcaacaaaccatggatttctcttcccgaggaaagggtatccgcctcaccattgctgagaga

SEQ ID NO: 702299 - DNA, 162 bp, Homo sapiens
gcaggcagtgtgcttactggtagagttgaatgcagtgtgctgtgccatcagccccactgtcctgcattggaaacacctccacaaactccttcttgaagacatgacatgcagtgtgaaatggtgggtgatcctctatgatgtcgaccgtgcagtgcactgcaa

SEQ ID NO: 702300 - DNA, 552 bp, Homo sapiens
  misc_feature (299)..(299): n is a, c, g, or t
  misc_feature (301)..(301): n is a, c, g, or t
  misc_feature (490)..(491): n is a, c, g, or t
  misc_feature (496)..(496): n is a, c, g, or t
  misc_feature (503)..(503): n is a, c, g, or t
ggaggccgagaccagacgcggagccatggccgaggtgttgcggacctggccgtctcacaggtccttccccaggtccaagaggctcttctgtgtcctgatgacaagtagctgcctagccgtggtggcacctcctatcacatgttaagggacccctccccagggccacacctggcagaaggtggcttatgatgttcgcagcttgaaagtagtgtaaaccaaagataaaattctaagcccactcccccagccatcggaatggacccctcctcttggccagggcactccaaagttaacctgananaccggttcaggctgtgaagagaaggtggagtggacatgcctcatttatgtcctcctcccttttggaattcagcaaagctgaccagcatgaacattaacacagaccttaagtctgattagtggcatttacaatctatactctctgaagcgtgctacctggagtcttcctttgcatgataaaactttggtnnccacnacccctnatcaggacactagacacgcctttctagtgataataactctttcaaccca

SEQ ID NO: 702301 - DNA, 265 bp, Homo sapiens
aaggttgcgctgcccatcctctcgcccttcggaatttacccctggccgctcagggtctcgcttctagaagaagatgatggatactagggcgatcctcctattgcctttatatttaacaggcccgccgaggaggggctcccgctggtgcccacataactctattagaccatctgaggcgacttcccccaccccctccaacgcgcctcacgcacgactctagcaaaagacaggttccgcggtggtcacgtcgtttgagactatactg

SEQ ID NO: 702302 - DNA, 282 bp, Homo sapiens
catgtccatgcaaggagagattaagattgggaaacggcaggtgttttcccagtcaggaagatgaaaacgacggccagtaaatttgtaacagaactcactatggcgatttgggccctacgtagtataaaaacagtggctggcaggtgacttggaagtacaataccacttcagttgtccggtaatgtcagccatcagaagactgaaggagttgaatgaccagtagaccgcttatactttatagagaatattagctggcctataatgaatgggttaatttttgta

SEQ ID NO: 702303 - DNA, 432 bp, Homo sapiens
tagaggcaatcacgagatatctacgaattcccgaactatgctaaccccttgctgtgacgtttttatccgaaatcagtcctggcatcttatgaagataaattgtagacacgaaataaggttgttctccattgcttgcagcaatagggcaggatgtgagagaacccatgaaaagtacgatgtatggcagtaaacagtttccccatatttacaatctggtgctccaggactcttatccatggttccgtatatatataattctttatcttggttgccatgccaacctgcatcattaagggtccatttgcctcactatattctgcaagaataagatcaccatctttgcctgtgagtgtcctgtggtgtgcgcaaaaaaaacatctctccaccacctgaagcttgcctctcttgttctctcatcttggccttatcgag

SEQ ID NO: 702304 - DNA, 131 bp, Homo sapiens
aaggggagagatcgagacaggagtacagacacgccaggtcagatgtcagctggggctttactccttcccctcaaagacttccggggcggatacggggggctccacaccatgtgaacgagcacctgctgccg

SEQ ID NO: 702305 - DNA, 306 bp, Homo sapiens
gttctataatgtctttaaaaatattatctggtcgagtgtggttgctcatggctgtaatcccagcactttgaggggcaggcagatcaattgaggttatgggttcgagaacaggctgggcaacatggtgaaaccccatctctactaaaagtacaaaaattagccggatgtagtgatgcatgtctgtggtcccagctactcgggaggctgaggtgggagagtcccttgaacctgggaagcagaggttgcagtgagccaagattgcatcactgcactccagcctgggtgacagagtgagaacctgtctcc

SEQ ID NO: 702306 - DNA, 1330 bp, Homo sapiens
tataacagacgaggagctgctgaaggcatttggcagacgagtgtccaagataacaaatcactaacacccttttttcagtgaaacttagaagaagcagctgtcagtggcacagcgaaacacagacattaatactggatttgaacagactgagcatcccacacagtatcaggtcctcgttcaacatgtgccactggtcatttcactcaacaacaatgcaacaagtccacccttgtctttctctcagacaaaccttcggttggtcacatgtgtatgtggccaaattgaactctctcaaacaaacttgggcacaacacccatgacacacagttgggcaaaaagcgcataattcacagaccttgcacctaacatggtatacccatcgtgatattataaccacacacttgcattgggcaaagcccccaagcgttgaacgcactcaaatgagacttcggtccaggagctattcacaacacacttccggtagtacacgcggagaattgacaccaacaagtgttgtaccccagataaaggccatttgaaaaccccaggctgctctccacaggtcccagacctctctagggtctcctctacttccctgggaagcctccaaaaccacacgccattaataccctttccttgtcgcataactagatctgtcctactacctaataaattcacttcacccttggaaacggcaacgttcacaacaagccgtggactccttctcgtgggacacacccttatgcccccccttaaagtactcacgattcaaacaccacacacagagccaccacacaaaacagcgacggctctgctctcaccgcctatacttgtgctcactcgctacaccaccgcacagacacctctagattagcacctgtcgtgtgcacaacttgccaggtttacataacgagtattatcacccattaattgcccaccacccacaacgctgccgtctgggtcaatcactaatcatctgtcgcccaccccatggcgcggagtcacacaattaccccaacaacctaccgtggctcgcaccctaccacactcaccgcggacacaaactcatacacacaccgacaccaccccgtgcatcgcaactactatcaacgcatcacagccagcttcctcacactcatttcagcgcgaacaacatgggtagcactagcacttacaagacacagacacggaagcagacgcaaacgccatctcgtttccgacacacaacacctcaattcagccccccaccaaacaatactacagcgtagacaaaccacccgagcgaacgcaccacttacgactggcgcatccacaacaacatactgcacac

SEQ ID NO: 702307 - DNA, 219 bp, Homo sapiens
ttgggaggtgaggcaggtggttcacctgaggtccggagttcaacaccagcctgccaacatggtgaaacctcgtctctactataaatacaaaaattaaaaaacgagcatttccctttttttttcccctcccatcaacaaggctgtaaatgatcaacctcatgcattaaatcttggtctgaatcccgggtcatttccttagaataaagtccaagaagtgag

SEQ ID NO: 702308 - DNA, 179 bp, Homo sapiens
tctttcagaatggctattattaaaaagtcaaccatgaaggaaagatattgaggagacccctgacccaaaggaaatagactgcagcaccgaatggaagactttggagtcacggaaacttttcttttgagctatttacagcttttaaccattaagtaacagactaggatacagtagggaga

SEQ ID NO: 702309 - DNA, 308 bp, Homo sapiens
ttctcagtgaggatctttcaagttgacatgaagacatggccatccgctggaaacgtcgtggatctgccgtagcgctcttgtaatttgtgaggcaggctcctgatgaaatgcactgcgtaagtgggaaatggtaggatgttctcccatcctccccttgccgaaagtgctgcctgcgcaggttggtggacggtcctttgagcaggaagaaacacggagcacattcctgttagctatgacagagaggggcagggtacacactggggaaggacctgagctcactgagaatcagtggactagtagtagtagta

SEQ ID NO: 702310 - DNA, 298 bp, Homo sapiens
gacttatcccaaaataatcactgcacaaaatgtaaagggtggcggttatgctcgtgatattacattttcctcaattaatgtaaaactatgactagtacaagaacaaattaaagtttcccacggcaaatttgtattcaaaatgccgaattgcgaaacaattgctggcttcacgtttctgaatacctttaatagtttctctgcgttgcagttagtaagtttccttgtcatgacacagtcgattactaaagaaacccaggtaatcaatgttttcaatgcgatcattgagcccctagatgct

SEQ ID NO: 702311 - DNA, 1600 bp, Homo sapiens
gtcgggactgttctttagtctggtaggttctcccccgtgggtggtcttgtagctcgccgtgttttttccctgtcagtagttgtttttgggtatactagcgcgagcgctggcacccctgttgtccctctgatgatgttctgtttttctgtccccctctgtgagtctctatcctcttttgcttttctatcgtgggtgatgcccccgcggatccctgtgtgttggttcatgactgtagggtggttgtgtaatgtggctgtgccataaccatccttatagttgatggtatgtgtgtgaaataatatggtggcataatttgttctgtcgggtattgtgtcataataatctcatatatctcctttgtttcgtctgtatactatggcatggttataatgccgcccccccttgtggcaaatctcaccctcgtgtaaaatcccactgtagttgattgttatatttgtggtagaattataaccctcccaaaggggttgtatgttcgctagagctcacacaccatgtgtgaaacgttgtggaatggggatgttagctaatcgccagctgtgtggtccgcacacaagggagaggtgtaaggttagagaagagttggtagtccctacaaaagctgtcccaatattggccgcccagatgttaatgtgattggcagtatgataaagagaacgcggggtggtgtgagattgtttcccccctgtggactcccagagacagagatctcaatttgtttttctcgcctcacatggagagcgggatatagataatctctgttattatggtcgcccgacacacacagactttgtgtctgtagtataaataatcccgtgtagtataagcgctctcgcccggatagtgagagccacgggttggttgaggtgttgtgttgtcaagataaattatatatagcctccctcagagatagacgctcttaggagccgctgtgtagatagtgtgaagatgcgccatgtcggggcgctcacctctcacacagagcgcgtttgtagtagcgctcagccctctctttttactcacccttgtgtatagttggtgcccagaagagcacatagcgctcacatagagcacaccttgttagagtgtgtgagtgtgacacaagaaggtctacatgttgtctcatctcgtccggtgttgtgtcccaacgcgcagagcccatgtacacccactctaatgcggtcttctgtgagcttgtgtgccccaagtgggcacaacccgctctctcgttgctccctctatgggattgtgaacatgtcacacctgctggtgccatggtccagaaaaagaagagcctctggtgccccaacctgtattttcttgctctcccaggagacccagatgacacatagaggtgtccagaaggccccacacccagccccctgacactacatgccccccattttatcctggcgtttccccagaaccccctctcccaccaccagttgcacccctgattctccgggttctttgatggggtgaaggtagggggaaccatttgttaatgaatgactggactgtttgtgcccaaagaaaagagaaaaaaaaactcgagcattaacgtcagtgcgagaatatgaga

SEQ ID NO: 702312 - DNA, 646 bp, Homo sapiens
aggctctcatcgctgctcagtacagcggggctcagtgtccgcgtgctctccgcaccaccccacttccattttgtgccaaaccaaccgcacccctgaatttctccgcaaatttcctgccggcaatggtcccagcatttgagtggtgatgataggattcttgtgttgttttgatgatgcaactgccatttgcctaactatgtgatgcaattgaggatgcttgcggtggaagtactccatgatggcatgcatgcccagtgtggttgcagtgggtgagctttgcttgattccgatatatgtgcccccagccagtacctgggtgttccccaccttgtggcaatcatgcaccacaacaaacagtgccactgagaatgcaaatgtgaggaagtgagtgcgaattctggtgtgctgctggatgcttacttgaagacgaggacttttctgtgtggtgctgaactgagtgacatatggctgacatcacagtttgtctgcaccctgttgtggctctataatgcatggttctagatgccttctttcctgccaggcctttcccaataccaacctgctgggttcctcacctgcattaaccagcccccagttcctgggctgtcttgtggcgaagtgaaactgttgtgagaagatggcccag

SEQ ID NO: 702313 - DNA, 274 bp, Homo sapiens
ctgcaacgatcacgaacatgaacatcaaaggatcgccatgggggtccctcctgcgcgctggttacgctcagtgccctgatgcgggcggagacttcactgcggcgctcgtcctttacctcatcgtcataggtcatgcggtctacgctaggcatctccctgcccagacaggagcgcagttcagtctgacgttgttggctagcccgtcgtcgtctgtgcgaccggtcatcggaatggcacaggtgtgtattcctccgacgatgttccggtgttcgct

SEQ ID NO: 702314 - DNA, 153 bp, Homo sapiens
  misc_feature (43)..(43): n is a, c, g, or t
ataatactaatatatatgaaaataatttatgtatgtgaattanttatatgtaatatatatacttacagatgattatatagtggtgagctcatactgtatatacagtttttgtgccttctttattattataaaataaacgctttcaaagccatt

SEQ ID NO: 702315 - DNA, 153 bp, Homo sapiens
gtctaatgtttattatacaatgttacaaatatgcagaccgtgttgtttgctccagtgataccttgataagctacgcagtgatgactgtccgagccccatcgagaaagccatctccaaagccaatagggtagtgaagtcgtcgctagtagtgct

SEQ ID NO: 702316 - DNA, 266 bp, Homo sapiens
tgacgcactatagtcccagctactcaggaaactgagacagaacatcatatgaacctgggaggcggaggttgcagtgagccgagatcatgccacttcactccagcctgagtgacagagtgagtctccgtctaaaaaaaaaaacaaaacaggaactagaaaagaaccaaatggacatttctaacaggtacacagttaccaatgttaccaatacaaagggtacaggtcagatatagataggggactcctctaaagctcgaccatgcagg

SEQ ID NO: 702317 - DNA, 930 bp, Homo sapiens
gcaccatggcactccagcctgggcaacgaggagtgaacctcgcgttctcagaaaagcacaaactaacatacagaataagtaagattctaattcaggaggttcgggagtgtgtgcatttctaatgcgctccaaggctgcttgttgctgcctgtttagaaccatcactattcaggtcagtaagggtctcagaaacaatcacgacatccacacacgtaccatcatacaccagcagcgccagtgtggatacatcacatatccagaacatcgtctctagtggaaatgcatttctgtcgtaatgctgagtcgccgctagcttctaaccattatatcgtagggggcaacggagtgtcaatggcatcagcacagtcttgcatggggcacttagcgcggatccccaaacagactagcatcatagggtctgtgaggtggtatgcatgcatcaatgcatactatcaggcagtcctgggacatgctgacgtgctctaggcagggcaaggtcaggcaaaaacataggttgcgattaatacttatttgtccatatcccttggtcactggtgcatacacacatgcacaatgggtaagcctagaatatagactaagctgggccagcagggattgcgcatgtttttacacgcatgtctacatagagcgcgggaacatgcggacgtaagggatactacaagtatagggaccacatgccaaggccatgggtttctcgggggccactcggttccacgagggagggcaccttttggggggtcatatggaattgacctcgcaaacttatggcctcggcaatcacctggggagcttgttaagacggggacatacgggggttcaccaccttggccgtgtataacatcttggaaggcagaatacgtggtgagaaactccccaaaaatttgtatagctccttcggacgagcacgaa

SEQ ID NO: 702318 - DNA, 1210 bp, Homo sapiens
accaaggcctgagccagaagttcctccacagtgatgggctgtgccatgccctggctgcccgctggttgttatggacacctgcacgggcatgtgctgggctgtgccatgctggcttccagccctgagatctcccatgccgcatgaagggcctggaatgcccctggtgacctatgatgcattccactacatgccctgagctctgctagtgtgtggcctgtggaacccggaactggacccccaggatctgggaacgtggctcctgtgcctcccagggctccgggagccatggcagcctagacccacaatcccatagctttccgtacggcaagtaccgtatggacccccagtgatgctagcgtcgacgacccgatgcatactgcttgcgcttccttaggcatttacactatcgttgggcatgcgacccattgcaggtacccaacttgccggaccccacggctaaggacccagggacccacagaactcctacacatatccccagatacatacccaatcacccaggctgggacaaggcagcacccaagtgctgccacccacttcacccccatcttcctaactacaacgaccgacttgcacactggcgccaacatcaatccgcaccaccccaacagactagggctctgacctccctacccaccacgagggcaccacccccgaaggaaaaaggcgccaattgaaccttaccattagccccacaccaaaacccaacaccaaatccacaacacccccaccgtttccaataggaagaaagcttccaacacttccccatatactcactcgcccttacctccctttcccacgtgcccacaggtcccaattccctccacgcagcaccaaccacccacttactcatacacaaccgtccacaaacgcaaccttccaagcatgccgccccccttggaccttcggcatgcagctgtgacgcgaattgctgatgatgacactcccacccctgtgaatcacaacactaccaataacctaacacctaaccccacacagtcacccatcaaacccctaccttccaacatcaaacttccttccccttcaccacacccctcatcacacaaccctaccacctcacgcccatatcccccaaacacaacacatacttacccatcaccatacatcctcatccctatgcttcacactcaccaccacccacacccaccatatatccaccactgaacccact

SEQ ID NO: 702319 - DNA, 896 bp, Homo sapiens
ggcaccgtcccgttctccagccaaggctccgggctgaggcatttgcttggctgcagcctccttccgaactgcccggcgggagccagtgggacctaagctcgatgccgagccgcggggtccgctccagcccggccatgagcgcaggcctgcatgatgctgtccctgcctcggccgctgagtcgccggcgccgccgccgcaggccgggaggagccgtaggcgcctgggcgactccgcccggtgcctcggagtccgatcgcataggacacgtatgcagccttaggatccatgaaggaaacggcaacataaatgttcaagtgactgtttagaaactaacctgtgtgcagggtgcgtcatgggaacactcatgcagatcatcatggacatcagggctccgggcacgtcggaagtcatcatcctcttcctggtctgcatagacatgacatcctcatgacgtcttcatcgtccatcctcctccgatgtctgacgttgcgctgagctggagtactggttcatccgagacggcttgcgagcatgatctcgctgctgtgcatgaccgttggcttactggtcggactatgcaagaacttacgtagagttgacttccggacaatgctactgccctttccaataagactgctggatacgtctgtggttcaacggggtcatctattaactgcttgaggacgtgcatgccctgtgatacccaacgtgagaaaccaatagttcaccgagcctgaaaaattcatgtgacttgcgagccatctggcatggcacagtgaaaagtgcggctggaaccaagacctgggagggcagatagtggtgaagggaaaccgaaggactgagcaaaggcctacctgtatgggaaagacccagaaggaaaagttaagaaagaata

SEQ ID NO: 702320 - DNA, 386 bp, Homo sapiens
agagaaaaaatcaacataatacagactaacgttgtgctcctaatgtcagagtggtcagagttctggatcacatggtgggagtgtatggaagtgtaaagaagttctttcattttctttgttactctcagtatgcctcatgtgtgaagcagtgtcaatctcaaagttgtcttggaacagggtaaatgaaattataaatgtaatagcacggggcctgtactcataggagtgctccgtaaatattagctcctaatcattattattactcagtacttggcaaaaatcaagttacagtttcatctaatctgagttgatcacatgcatatttttctttatttaaaaaaaatttctttacaaacatgaaatacatgggatggaaagggggatct

SEQ ID NO: 702321 - DNA, 843 bp, Homo sapiens
agcgggcgctcggagcggccgccggcaccaccggctctgggcagtgaggggcttagcacctgggccggcagctgctgtgctcaatttctcgccaggccttagctgccttcccgcggggcagagcttgggacctgcagccaccatgcctgagcctccgccccctccgtgggctcctgtgcctcccgagcctccccgactagtgtcgccccctgctccacggcgcccagtcccatcgacggcccaagggctgaggagtgcgggcgctcggcgcgggactgtcaggcagctccacctgcagccccggtgcgggatacactgggtgaagccagctgggctcctgagtctggtggggacttggaggacctttatgtctagctaagggatcgtaaatacaccaatcagcaccgtgtgtctagctcagggttcgtgaatgcacctaattggacactctgtaatctaagctagtctggtggggacgtggagaaccttggtatctagctcaggtatggtaaacgcaccaatcagcgccctgtcaaaacagaccactcagctgtggtgaccctgtcaaaacagacccatcagcaggatgcaggtggggccagatacagacacataaaacgcaggctggctcgagccagcagtggcaaccagcttggtccccttgcacactgcggaagccttgtctattgctctttgggtccacgctgccttttatgagctgtaacaactcacccaggaagggtctgcagcttccactccctgtagccaggcgagaccaaggaagccaccagaatgtaccaaaactcccggcaaatccggccttaacgaacagttaccattcac

SEQ ID NO: 702322 - DNA, 706 bp, Homo sapiens
  misc_feature (222)..(222): n is a, c, g, or t
cccgttttttagccccaatttagaacccccatctctcctaagtatatatagggagaacctttttggttttccaagttaggtcacagagaagggccttctttccactcataggtaaagccctccaggcttttttaataatggaaaatttttaaggctttttttttttttttttcacaaattattgataagtgtaatattgtcttcaaaaatataccaccgccnctccccataggtccaagttatccacattagtattatgttcttggaaggccccctcccgaaaagttacaattcactgggaaggctgcattaaagtatatctcttatctatgaccaaatatctggggtacttttagaagttttcagtacacccccttagagaatagcttatgagttatttcacacattcctgagcacatggctgtgtttagaatgatctagtgtaattcatacatgagctgacatacgttgatactttgacgagtaaattgtacagtcaaatgttcattgatttcatgttatttcaaagcattttcttattaaaaatatatctttcgttaatcctattttgctatgctttctagtaaagtaaattcactgtagctaatgatgttacagacttacgtatacccttgtatacctgggacagggctgttttataccaataaacagcaaaatattgtccttactaattcaagaattaaaa

SEQ ID NO: 702323 - DNA, 656 bp, Homo sapiens
  misc_feature (35)..(35): n is a, c, g, or t
  misc_feature (63)..(63): n is a, c, g, or t
  misc_feature (77)..(77): n is a, c, g, or t
  misc_feature (96)..(96): n is a, c, g, or t
  misc_feature (109)..(109): n is a, c, g, or t
  misc_feature (151)..(151): n is a, c, g, or t
  misc_feature (168)..(168): n is a, c, g, or t
  misc_feature (178)..(178): n is a, c, g, or t
  misc_feature (182)..(182): n is a, c, g, or t
  misc_feature (190)..(190): n is a, c, g, or t
  misc_feature (192)..(192): n is a, c, g, or t
  misc_feature (211)..(211): n is a, c, g, or t
  misc_feature (247)..(247): n is a, c, g, or t
  misc_feature (258)..(258): n is a, c, g, or t
  misc_feature (279)..(279): n is a, c, g, or t
  misc_feature (282)..(282): n is a, c, g, or t
  misc_feature (312)..(312): n is a, c, g, or t
  misc_feature (438)..(438): n is a, c, g, or t
  misc_feature (455)..(455): n is a, c, g, or t
  misc_feature (484)..(484): n is a, c, g, or t
  misc_feature (533)..(533): n is a, c, g, or t
  misc_feature (583)..(583): n is a, c, g, or t
  misc_feature (596)..(596): n is a, c, g, or t
  misc_feature (605)..(605): n is a, c, g, or t
caatacaggccgctcccctcaaaggaatggacaangtcacacacaccacaaaacaatgtcaanactcatgtataatntactctaatctcatttgtngtcatcaatcccnttagtatctcagtgcctcggggaatatcctcaaccaaacccntcaagcctctcgcaganagtataggcntaanaccctccncngtcattaggtctaattccntcccaccagtctaacacaagtccagaattcccgggnttctccatacntcacagtcgcctagaactccngcnggaaggtcgtgtaccatattcggttgtccnagcaatggacaacacgccgagtctctgaaattctgtgtctttagggctctcaggaaaggagaaggaaggctgccggtggattctgaggttttataatcggtaacatgtcgacatgtgaaaatagtnatctgcatgtccttccntggacaagagccaaaaaccttttccagcnactcacactgtcgacctcctgcaacacagcacactgcactaacagaganaaaccgagggattggattttagatgataaaacacacaaaaagcctctttngaggacagaagtntagtgtctnttgttctacaccatttattccagagtttagcacaaccaactccctcccaga

SEQ ID NO: 702324 - DNA, 317 bp, Homo sapiens
atacggaactatctgtagagagacggtttcacctgtgtaggcgggcttgtctcaaactcttgacctcaggtgatctgcctgccttggccttccaaagtgctgggattatgggcgtgagccaccatgcctggcctcattcttccttatagctgcatagtactccactgtgtagctgttatcataacttattcaaccacactcttatatttggacatttaggtagttcgacattttgcaattacaaatcatgctgtaatcaataaccttgtgcatatttattttcatattgttggaagtgaatcttcagagtatattcc

SEQ ID NO: 702325 - DNA, 299 bp, Homo sapiens
  misc_feature (144)..(144): n is a, c, g, or t
  misc_feature (164)..(164): n is a, c, g, or t
agcatcgcggaccgcagattgcaggtgcacgggccagtactgcgtggatcacgccgagctatcgatgtcggctgtataactgtgtaccgactgtctgtagtaaaattggcgagtaggatcaaacgatgtgacttgtgctttgancctttgacagcttaatcaancccggtattctgctgcagcaccgacacgcggttgagcgaaacggcgtaaagcacccttagacgggactctggcgggatatcatgtggttgttcgtgggctggcatctcggcgttcggccaaccaagttgactctc

SEQ ID NO: 702326 - DNA, 600 bp, Homo sapiens
aagatagtaggaaggaatatgaattttgtcaaggctttctgcatctattgagataatcctgtggttttgtctttagttctatttatgtgatgaattatgtttattgatttgcataggttgaacaagccttgcatgctggggatgaagctgacttaatcatggtgggtaagctttctgacgtgctgctggatttgatttgccagtatttaattgaggatttttgcattgatgttcatcagggatattggcctgaagtttgctttttttttggtggttatctctgacaggtttgggtatcaggatgatgctgtcttcataaaatgaattagtgaggaatccctccttttcaatggttgggaatagtttcagaagaagggttatcatctcctcttaatatttcgggtagaatccagcggtaaatccatcgggtccggggcttttgggggtgggtaggctatttataacggcctcaatttcagaactggtggatcggtccagggatccaacttcttccgggtccagtctgggtattaacccatttcttctagatctcctagttaattggcatagaggggctaatagtagtctcggatggtggca

SEQ ID NO: 702327 - DNA, 216 bp, Homo sapiens
gcaacctcctctgcctcctgggttcaagcaattctcttgcctcagcctcccgagaagctgggattacaggcgtgagccaccgcgcccggccggtgcctagactgtttcatcaggacagcataaagtgtaccggggggtaagaacaggttttatcctgctgaccaaccttaagcacaagaattaatccctaactccatttagtgataaggaagttgg

SEQ ID NO: 702328 - DNA, 748 bp, Homo sapiens
  misc_feature (577)..(577): n is a, c, g, or t
tgggcgccccacttttttgttttttaaaaagggacattaaaaaaacacacacaaccgggtcaaaaaaattactcccaaactctcttttgatttggaatactcttgtgggaaaatattttctcgcgcttaggaaccccctctcttctcctctctgtgccgagggcaagcgttccttctttccttctttccttcttctcccttgcgtgccttcttctcgcgtggcaacggtcttctcccttttctttatagaatttctcaccttatgggttctcaacatctccacacaggttggtgtgtttctccgggaggtgataagagcgtgtgtgctgtggtgtaaaaatataaaatatacgcgaagatgtgtttatttctctctctcgaaatatactctcgagcgtgtgttcccacgcgctgtgtgtccgaggtgtctctctgtgtgtgttcttctagaggggtctctatttctctaccacagcgctttatagagagagtgtgtgcgtttctcgtgtgtgtgtgcactatctctcacacacactctctcacagagagaggatatctaatctctctcgtagagcgnggcgcgcccggggtccaccccctctcgtgtgggtgggtccagaaacacggcacacacacagagatatcactctgtctcaagagcggaaaaaacagtggcggcggggagtgtggcgaagatgtgtgagagtgtggcgcgggcaaaaaagtattgagagagcaaaaaagaaaa

SEQ ID NO: 702329 - DNA, 909 bp, Homo sapiens
tagaacgggcgtaagacaaggtgcgtccccgagaagggcctctctgggcacccgtagccctctgcgagcggtccacaaattgttgtataggcggccaaaaaaaggtccgcgtttgcggtgtttcccacggagccctcttgtatgagtgtcgttctcctggcagaccccttagtcgctgcccctgccgaagcgggctgtatgtccgccccctctctcgacaagtgggggttctgcggtggacctccttctaatgtagcccgctcacgatgcacgtcaccccggcgggtgccgccacaatagttaattattgtaaggggcttttccattgccaaaagtttcacgtggtcgtaatccactcccccaggaaggttttggttccattaataaaaacaggcggctagatgaatataaattgaaaaattgtgagatgcggcgtggtccccccaagagtacaacctcccaccacccttggtggacattcaagggaaactcctgtcgcagtgactccctacagtaaagaaactcttgttgggacacaacacgcattagggggtccccgcaaaacagagatgagacaaacgcaggtcttgaagaaaacacactgagagacgggtcacacactatgcgggacacggtttcctttgggcccaccgaagagggccacagtccgcccatggtgagatcgcgcgtacccccaccgttggaacagctggcaccaaacgcctcgccacacagagatctttgtatgtagcccccctgccacagtaaccctgagttgtcaacaatcacggtcctctcagacaatttcccgccgaatgaataccaccggggcttcctccccacagtggcaacaacacttgagacacagttgggggaaacaccccaaacaaaccccaagcccaacatacc

SEQ ID NO: 702330 - DNA, 307 bp, Homo sapiens
tggggctcctaagagccgcggggggcagatgggctggctctcgatcctcgcctcgccgggtggcctcccaccctgcgatggggctcctaagagccacggggggtagaggggctggctctcagtccccgcctcgcggtgggtgcctccccgccctgtgatgtgtgtggtcccgaaagagcagcgggggatgcatgaggggcttggctctcaggtccccgaactcgcgctgcgggtgcctccaccccgctgcgatgggcggtccctcagagccagcgggggcgaagagggagctggcatctcaagtctt

SEQ ID NO: 702331 - DNA, 185 bp, Homo sapiens
aaatcgacggcggtccgacaaaggaggtcaggtgtgctggatcactggtgaaatcccagcatttgggaagctaaggcaggaggatcacttggccaggagctagagaccagactgtgcaacatagcaagacctcatcttctcacacacacagacacagacacacacacacacacacacacacacac

SEQ ID NO: 702332 - DNA, 126 bp, Homo sapiens
ggagaacttcctcaacttgtatttaaaattaccctgcaaattcccttacagttaattgccattatttcattgttgagaaattttaagtttttcccatttggggttcaaggaccaagggcacggttt

SEQ ID NO: 702333 - DNA, 444 bp, Homo sapiens
  misc_feature (198)..(198): n is a, c, g, or t
  misc_feature (293)..(293): n is a, c, g, or t
ctagcaggatctacggtgctgatgtgatgtgcgtctctgtgtgccgttgtgtctgattgtgtgtatgtggtgtggtgtatatccgtgtatgtgtgtgtggcagcatgttggaatataacgtggtgggttgtgtggaggtattgtatgtcatgtttgggtgtggctcatggctcagaggtgatggtgtatgttgcgttngtttttttgtttttgcttgttttagagataggatcttgctatgtttgccaggctggtctcaaacccctgggctccagcaatcctcccacctcaanctcccaaactgctgggattacaggcatgagccactgcacccagccgtatgttgcatttgggcactggggtctatgaaggtccaaccccatccccttcccccagggcatcatcctggatgttgtcctgtgtggccagaatataccagaatca

SEQ ID NO: 702334 - DNA, 186 bp, Homo sapiens
  misc_feature (39)..(39): n is a, c, g, or t
  misc_feature (72)..(72): n is a, c, g, or t
  misc_feature (82)..(82): n is a, c, g, or t
  misc_feature (149)..(149): n is a, c, g, or t
ctcggaaatgtccggtcgtggtaagcagggtggcaaggngcgcgcaaggctaagtcgcgctcgtcgcgcggnggctgcagtnccccgtggccgcgtgcaccggttgctccgcaagggcaactattcggagcgcgtgggccgtgcgcctngtctatctggccgcggtgctcgagtacttgactgccg

SEQ ID NO: 702335 - DNA, 1397 bp, Homo sapiens
agctggagtgtgctgtgcgtgcggcatggctagtggctgcgtgctggcgcggtggagggttctgcctgctggtttgcctgccggtggtcgggctccgtgggcctggggcagtgatgggaccagcacctgaagtgcctggtgccctgcatgtccctgcgaccttcagcatgcgcacgtgctggcgtgcgcatgattgcttgctgctgtggtgctctggcgcgcataccctggttgtgtacatgcggttgcgtgcttggctgccgtgggtgcctggtggacgcggccaacgatggatggattttggacagttgcttcttatagacacgcaaatggcccacaattggtcctggagaagcaagacgcattgtccaggggctagctggccgacgtgttcagcttgggaccaacgcgtggcttctggcttgcccatgctgagcatatccacgcgcttttatcctggccagcgcgctcaggcgtggaggaccgccgtcgccgaggggacggcaaggcggcaattagattgagacctggaagtaatgcgactgaagtggtgccgcggaaagggagggaaggcggagcggcgccgcgggggtgcgacgacatgggggatggccggaagggaggcaaccgggaagtcactggcatgaggagcgcagaggtgagtagcagccacgcccactaagggagctggacgtaggcgggggccagcgccgagctgtcgatggcgaggccaacagccgccggccgatggcgaagcgaggaaggaccaaccggaacccgcagggagagagacacaagggagacagagggaggagcccacgagagagagagagcgcaagggggaaccggcggaaggagtacgcccagcagcgacacagggagagcggaccgcgcaagcaggcgaagcgagcgcggaccggccagagtacgaggccgatcaccggcggagtaagcacgacgacgagcgagacacagccaggaagggagacgcgtagagaggcaagcgagcggacacgagaccacagaggcagagcacaacggcgcggcgggcgacccgcgagaacgaacaacacagcaggcggagcgtagacacagagcgaggcggaggaagcgggagaggcgggaaccagcgggcacaggggaggaggcgacgcagtactggccgagaggggagcaaaagcgcaggaaggaacgagagcgcccgcagagcacgccagcgagcacaccggcgctagcaactcaacctagcacggcgacatagccgcagacaagcgcgagaagcggcgcggaaccagaggagcacgcgcgaagcgagcacggacgagcggcgacgcacaaggcgcagccggcgggagagcagcgcggtcgcggacgcgaaaggcggcgagagacgcagg

SEQ ID NO: 702336 - DNA, 210 bp, Homo sapiens
tgctggcggtgacgtcatttcaaaaaaagttatcgccgagaccaactatcaacaaggttcttccatatgttttcttcactgagttttaacgactttcatgctcttaatattcagctcttcgcttttgacagtctgaaacttagaacagcatgatgcactcggccctccacaaagctgctggcgacttacacggccatgagcccaccaaca

SEQ ID NO: 702337 - DNA, 356 bp, Homo sapiens
acagcacgttgcctgtgggccatgggttttcaagggttatgcggctggagctttcgcctcctgcagcagttgctgaatcatcttttcctgcgtctcgtagcgaccttctccgaagtgggtgaaacgcacttgccctttggcgtcgatcaggtagtgcgcgggccagtactggttatcgaagttgcgccagatcgcgtagttgttatcgatggctaccgggtaagtgatgccgagctttttcacctcatccctgacattgctgatgatgcgttcaaaaccgtattccggggtgtggacgccgattaccaccaagtcatccttctcgtacttctgcgcccagtccctcacgtacggca

SEQ ID NO: 702338 - DNA, 188 bp, Homo sapiens
  misc_feature (154)..(155): n is a, c, g, or t
tgtggtcgatctagaggatctggttgtgctgggatacaggcatgagcactacgccggctagacacaagtttaaccctgtaaattctgtgcctctaactgcaaccaaagccccaattcatcgcattctgcagagtgctgcccacattcacttggnnaatcagcagcatgtacacctcattacttcacct

SEQ ID NO: 702339 - DNA, 1022 bp, Homo sapiens
  misc_feature (32)..(32): n is a, c, g, or t
  misc_feature (111)..(111): n is a, c, g, or t
atttggtcaccataaataggggaggagggggnggcctccagtacactcgcgtctcgtttcggggccgcaacaatagcagcccaacctttggtttgacctgagaacaaaacntctaaggtcggggggagagaccggaatggtgctccgttcaatcaccagtggcttgccatgagacaggcttcaggagggtccaagcagctgcccgagagatttttcttggggaccctcccgagggctgacccctgtgcataactgcacgtccctttcactactggggaggaacacagatcacaatcagacacgctcaaagggtgctgtcttcaatgccccgaaacagattgctactgagaacaaatcaacctcttccactccactgatggtgtcggagccccataacgacgaccccctctcagtaggaagtatccataatgattacaactacccatctccctgcgattctcatgataaataaatatccacacgtgactaaaatccttgtaaattgacagcgggggactggtgacaagcattgtctaacgtaatgcagaacctaccttaacaactggtgtcagtgtctgactgaagtggttaagttaaatagtaaaaaaccagtgctccttatacaagaggctgtgaatgtaacaaaaaggccaccaaggaggttttggcctaagcctctccctgagacctcaagagccttgattaaagcaagtgtttgcttgggagggcggcaagagacctcccccaaatccttccgtttgtgttaccaccgcagatgacaaacgaagtggcaataaccgccaccacgcttgcgacccatgttggagatacactaagacttgacttgatggctcacacaagaagggtgttccacaacctaagacccttagtgtgtaggatcaaaagcaagctaatcgcttgatggctttagaacgaatcgaaccctgtcacctatagttagagggcttacacagttattggctccgggaaatggacttccattgtgccctgcgataatccag

SEQ ID NO: 702340 - DNA, 676 bp, Homo sapiens
gagcctgtcagtatacagttagttttctagtgactcataaaataagatttcctgtttcatgtagaatagtgtttgtcaactgtcttttctctgtcccagcacatgccgtactctttatatgtacgcattggttagataattgataagtgattcatattggacttgacagaaagatgtgtcctccaggcacatgtattctgaatcacttgggggatttatgattctaccctcttgtggagatacatgctcgtcttgttcaaccccccatcctccttgagtagccacctaatgttgatgataacagcagacatcatctgaggggacacatagagcacactattctcacctaaagataaaccgtttggtaaaccttaagattttttccaatagtgtgagtatatccattgctggcagtggagggcttgccatgaaaatgcaacttatttaagacatttatgagacatattaacttgtgctgtcgccttttagaaggagaaacttaagtgtggaatgcattatatgggcaaagaagctatgaagatacatgatacactttgtacaactatcctgcagcccattggttgcttatatttatcgcttggctcaagttctgccctttggagaaatactgagcaagtctttcattctctgtgtgacagccctctgaatatttgaa

SEQ ID NO: 702341 - DNA, 439 bp, Homo sapiens
  misc_feature (6)..(6): n is a, c, g, or t
  misc_feature (18)..(18): n is a, c, g, or t
  misc_feature (31)..(31): n is a, c, g, or t
  misc_feature (61)..(61): n is a, c, g, or t
  misc_feature (365)..(365): n is a, c, g, or t
  misc_feature (432)..(432): n is a, c, g, or t
  misc_feature (434)..(434): n is a, c, g, or t
cggggncgagacacaccncagagaaccctgnggattgtgggattgggagggaaactttgcnattccttgcccccatccccacaaatttcctgaccttaaaaacactgctgtgccccccagttcagtatttgccctttgacaaacactgtagggcccagtgagaaagttgaagagatttttcaactgactagcagtcggtagacccgttaactgaggccaccccggccagagcacattgcattcctgccaacagatggtggcctgtatgatgacagggcctctcttgcatatggccttttataattaaaagaaagaagtaataggtagaaagagagagagagagggagaaggcaggagaaaaaaanttgcagcatgcttttaaaatgtcatcgcaccactgcactccagcctgggtgacagagtgaaactttntnttaaa

SEQ ID NO: 702342 - DNA, 300 bp, Homo sapiens
gcgctggccaacatcagcggccggctgtcgggtatggccaatgccttccggacggtgtaccagctcaacggcctggccgctacttaaaagcatccagcgcgtgtcatctaccagatgcctccaccgccatttcttgtctgctatgagtcttcaagtacttctcacaagcgcatggaaaatcgagctccatactaaaggagggatcatagatctgtcttaagtcatctctgctgcatcagcccttgcctctctacacgtgatcattttgtttcagggtctgctatggccttgtccaagcta

SEQ ID NO: 702343 - DNA, 288 bp, Homo sapiens
cacgaggagcgatgttgccctggccggtggcgtgggagaaccgggtgaatgcctccgtcatcatctgattgaaaggcacctcgatcacgcggaagtggtgtcgcgcctggggatcccccgtggctgcgcgggcggctttctccgccaatcccagcagagacggtagcgactggaacaggggatgatcggtctccactcggaaggcgttgaaggtggaaactccgtaacagcggatcttgccggcgaccgtcgcccgctccaaggcgacgaaggcccgctccagcttgc

SEQ ID NO: 702344 - DNA, 499 bp, Homo sapiens
  misc_feature (178)..(178): n is a, c, g, or t
ttttcaaaaggcaggctctggcaaggttggtcaaagacaatggccccggtggcagttaagcagagattcactgatgacttacagggtgccctattctgaggtacaggaacccccggctttttgatgggggaaaatccgcccttaggctggagccaacatgactgtcctttaaactcangtggctggccaggcacggaagctcacgcttgtaatcccaacacttgggaggccgaggcaggtggatccctgaggtcaaaagttcaagaccagcctggccaacatggggaaaccctgtctttactaaaaatataaaaattagctgggtgtggtggcgggcacctgtaatcccagctactcgggaggctgtggcaggagaatcgcttgaacccaggaggtggaggttgcagtgagccaagatcacacccctgcactccagcctgggcgacagagtctccatttggggaaaaaaattaaataaataaactccccgggcctgcca

SEQ ID NO: 702345 - DNA, 273 bp, Homo sapiens
ccacgtagactactacgggagcgcgagcgagtggggcgacgaggctgacggcggccagcaggaggatgattctggagaaggagaggatgatgcggaggttcagcaacgcatgcctgcataacattttccaacccggagcttatatcatgtgaaccctcctatcttcaaccactctgcaagagtgtattttcatggcaggcagggtctccatgagaatgttatccagactcttatcatgaaaactacaccgcgtgtggcccagcacttgtgaac

SEQ ID NO: 702346 - DNA, 259 bp, Homo sapiens
  misc_feature (45)..(45): n is a, c, g, or t
  misc_feature (233)..(233): n is a, c, g, or t
ggggcccacaggtgtgcaccacaactctcagctaaattttaaaantttttatagaggtggggttttactatgctgtccagactggtcttaaactcctgggctcaagtgatccccctgccttggcctcccaaactggtgagattacaggcgggcacctgtgatcctagctacttgggaagctgagacaggagaattgcttgaacccgggaggtggaggttgcagtgagccaagntcatgccattgcactccagcctgggc

SEQ ID NO: 702347 - DNA, 523 bp, Homo sapiens
  misc_feature (445)..(445): n is a, c, g, or t
tgtggagacgggggtctcagagatgtggagacaatatgagcggtgccaacaggcaggtaagggcagtcccaggagagaaaagggggcagaaaaagtatttggaagacaaaaagggccagacatttcccaaattggataaaaacaacattcatctacaaatggaagaagctcagtcaacccaaagtaggataaatacaaagagatctaaaactaaactccatctcaaaaaaaaggtaataaaaaaaaagagagagagagaacatacaatgtgatcaaagttcaggaataaaagagcgtatgtcagggacccggcagaaactaaagggtttctaagagaatattaggaaggctttataccaacaaagtaaaatacttagatgaaagggatgatttcctataagggcacaaactttaaaaggtgacttaagaagaaaccaaaattggnaaaagatctgtaacaacgaaagacatggaactagtcatttaaaatcttctggggggggggcgggggctcaggccggta

SEQ ID NO: 702348 - DNA, 152 bp, Homo sapiens
tcttgcgagtgtgtgacgtttagatacatttgaatttagaaagttagactgcttctcgagcgatacacaccttcgggcctcatttggcccagcgattttgggcgtcaggttttccaaaacagaggcagcgtttgacgttagatttagcatca

SEQ ID NO: 702349 - DNA, 103 bp, Homo sapiens
ttgaacggacgactcggaatcttagagagcttggaggcgcaccgcctgtcactttggcgacgcgcagttgggacagctccaccttcaggtcgtctgttccaag

SEQ ID NO: 702350 - DNA, 533 bp, Homo sapiens
  misc_feature (29)..(29): n is a, c, g, or t
tcgaggtgccttagacagcagtggcatcnacttgtcaggctttgggagtgcgcagctagacaccaatgacgagagtgatgttaccatgtacactaagttacatcttaccttatttctcagccgttaacctagatgtgcaatcactgttactacctgttcattacaactagccacagcaccaggggaaaaaaccatgtcctggcaacagattcaaactgtaggcaaaaaccggcagagactgaatagaggtccctcattggggccccaaaggcagcatccagaaaaggcacttcaaagcaggtaggaaagggcaagagcattcagggaggggaaccagggttgccaggcatctgtggagaacactggccgaaagaaacaaaggctcggaaagtccagccccaagggaggctgaaaccaggcctcattacacagcaggggcctgagaagttagcgggagacgccgtctacaccaagtccttcgttcaccccaatgagccattaaggcagcagatctcctgtgctgaaaacccttc

SEQ ID NO: 702351 - DNA, 996 bp, Homo sapiens
tggcgtctgccggtcgttggccaagaggcgctgcctaccaaatccattgtcatccccagtccataactttcgttgtgctcaccttacgacccccaactaattgacaaggatgctcttacaacggcaagaattctggcaagtgttcgtttgtcaatccccaggcccgggcttgggatcatgtagatggcacgagtcaaagccaattgtgattgaatgaactgaggcctggctgtcaattggcggtccctgagtcgcctctattgcgggatgaactccgcgggagcctatggtctcccacaatggccccatctcctctgtctctgcagtcctggacaaccgcgggccaaggaagagttcggggccatgagacgagcagtacatgcgtcgctggaccacggcttgcctgctcggtgttcgccattaatgaccggcagagtattcaacgatggttgggcaagctcttcacgcagattctgcgggtacaaggaccgcgacgacttccccgttagtgttggtcgggaacaaggcagatctggagtcacagcgcacaggtcccccgaatcagaagccatcatgcccttcaggcgccgtcccacgacgctggcccataccgttgtgaggcctcggcacaaactgcgtcatcaacgtggacgaggctatttgagcagctggtgcgggcagtccggaaataccaggaacaagagctcccaccgagccctcccagtgcccccaggaagaagggacgggggctgccccatgggtcctcactgtaagcccaggcaagagagaagcaaccaccacaagctctacgggagctatgcgtgccttcgacaccttgcatagtgtgacactgaggccctcactgagcctcaagtttcctcatctgggtctcccaggacacatacataccaaccctaacggtcctggcctcttctgggctactagccactgtgtgccttcagccaacgcctccgtgtccccacctaagcctggtgg

SEQ ID NO: 702352 - DNA, 1273 bp, Homo sapiens
  misc_feature (226)..(226): n is a, c, g, or t
tggaaaaacccagttgatattaatggcccggggggcagggggcccaggaggctctggggggggggggtccgtttcctcttcaccatcacagggcttactgggctggcccaggatgggcggctgtgccctggaggggatgggttggccattgcagcaggtcggggcggacttggtcctggcggagatcatggtgtgtactaagatcgctgctgagagctgtggccgngacgcatcctagtgtagatgggtgggtccgcacatagagagttgggcagggctctccggttgggccggaaatctcccgtctaaaatggacccaccagagacaaccttaggccggaacaggcatggccgggttaccacggcccaaaaggtctgagcggggagaatcaagccctgttgagaagcgggaagggaatttggggggctcttcaaggtctatgggcgctcaagaggctggaagggttctgggtataatccccttattgggatcaggagaaactctgggagcaagattcacgagaaagagacccataccaatatgggaaaagattagcgagcagaaaatatggggcggagggggggactccccatacgcagaaagtggccaaagccccatggaaagttgtacagagaacactatgggcgccccacaaccccaaaaaggggtgggagaacgctccagggggtggaaagccccaccccttgtgcgtgagggagcacttcccacccaaaaaaacatatttgtggcaacacaccaatatatgagccataagttgataataacaaggcgccagaaaagctcacaaacacggtggacagagaccccatcagtgaggaatcacacagagaggacactgggagcgccaagtaggcgccaaaaaagataacaaccatgtgggaacaatagactattcaaacacacgcaaaaaaattggcggacaagaacaaaacaacagacgtgaaagaggggaccaaagcgaacccaaatagtataagacaacccacgatcaacaccaagtagacacaacaccacgtgtacactactgatagaccaattgtccagtgaaatggtggatagagtaaacacctaataacgaaagatacgacctattaaacaagaaccgcccatgacgaccccagctgaaccaaactgagtaagcagaacactatggcacacagaggaataaaagaggagcaacgacgagaaccacacaaagtaggcgtaatcactagtatgtaacagccaccaaaaaatggagcaataagataa

SEQ ID NO: 702353 - DNA, 775 bp, Homo sapiens
gggcccgtccactggtttggtccccccccgctcccctttgtgctggaatacttgtcgggcgtcgtcttagagggtctctctcgctccgtcggcctctggctgatactgcacatcacccttctcatgtcgcaggggggtccttctgggcgtggcgaccgcccccaccagcccttgttggtggtttagtctgcttttgtcgtggaaagattgccgcaggccctacgactctgcggcacgcttatctgtcgcgtagggacaatccccccacgggggccattccccccccgctgcacttgccttttttgtctatctcgtactcgagtataggctagagagtggcgcgctgcgctgccttgttccccccacactgagctgccctcccatctgactccagtgagtgtgccacgcctcccattgtctttaggcaccggcgccttatttgtgtctctctccaatgggagtccctttgggcgagacttgtgttgtatgctgacgcccccgctcatgtcttgggcagcgggcttgtttcttgtcttccccgccctctgaaactagcgtcgcctcttgttctcctaagctcctgctctgacgtttctcctcggttgctgtgcgcaagcctcctccccttccctccacgtgtgtctgctggtggcaccccagctgtttctacgacgactggcccgagtcgcccacgcccccggttttatgtcccccgcctggtccccgcgctcccggagaatcccccccgcttgatcccgcccccccaaacataaca

SEQ ID NO: 702354 - DNA, 313 bp, Homo sapiens
cgtctgctgttactgagggaaaatagtactaggtatatatcagaacaactactccagctgacacaggatgccatcaaacattaaaatataagatcatacttagattttctgaaggctgatcaacagatacgacagagatgggaaccctttcgggaaaacataaaatcccttctaccccagtttcgagcactgttaagaagttataaaggaatgtgaaattatttaagatatttcaaaagagaattaagaatggaagagtatattctgctggaaaagatagggcagctttacagtcgtgcaagtaaatagtcta

SEQ ID NO: 702355 - DNA, 675 bp, Homo sapiens
  misc_feature (19)..(19): n is a, c, g, or t
  misc_feature (64)..(64): n is a, c, g, or t
  misc_feature (66)..(67): n is a, c, g, or t
  misc_feature (70)..(71): n is a, c, g, or t
  misc_feature (75)..(75): n is a, c, g, or t
  misc_feature (82)..(82): n is a, c, g, or t
  misc_feature (84)..(84): n is a, c, g, or t
  misc_feature (86)..(86): n is a, c, g, or t
  misc_feature (88)..(88): n is a, c, g, or t
  misc_feature (90)..(91): n is a, c, g, or t
  misc_feature (100)..(100): n is a, c, g, or t
  misc_feature (103)..(103): n is a, c, g, or t
  misc_feature (106)..(106): n is a, c, g, or t
  misc_feature (108)..(108): n is a, c, g, or t
  misc_feature (115)..(115): n is a, c, g, or t
  misc_feature (120)..(121): n is a, c, g, or t
  misc_feature (128)..(128): n is a, c, g, or t
  misc_feature (130)..(130): n is a, c, g, or t
  misc_feature (134)..(134): n is a, c, g, or t
  misc_feature (151)..(151): n is a, c, g, or t
  misc_feature (166)..(166): n is a, c, g, or t
  misc_feature (168)..(168): n is a, c, g, or t
  misc_feature (177)..(177): n is a, c, g, or t
  misc_feature (237)..(237): n is a, c, g, or t
  misc_feature (242)..(244): n is a, c, g, or t
  misc_feature (258)..(258): n is a, c, g, or t
  misc_feature (263)..(263): n is a, c, g, or t
  misc_feature (274)..(276): n is a, c, g, or t
  misc_feature (278)..(278): n is a, c, g, or t
  misc_feature (280)..(280): n is a, c, g, or t
  misc_feature (286)..(286): n is a, c, g, or t
  misc_feature (290)..(290): n is a, c, g, or t
  misc_feature (298)..(298): n is a, c, g, or t
  misc_feature (301)..(301): n is a, c, g, or t
  misc_feature (305)..(305): n is a, c, g, or t
  misc_feature (310)..(310): n is a, c, g, or t
  misc_feature (313)..(313): n is a, c, g, or t
  misc_feature (316)..(316): n is a, c, g, or t
  misc_feature (319)..(319): n is a, c, g, or t
  misc_feature (337)..(339): n is a, c, g, or t
  misc_feature (358)..(358): n is a, c, g, or t
  misc_feature (404)..(404): n is a, c, g, or t
  misc_feature (556)..(556): n is a, c, g, or t
  misc_feature (591)..(591): n is a, c, g, or t
  misc_feature (601)..(601): n is a, c, g, or t
  misc_feature (662)..(662): n is a, c, g, or t
agtggtgaaggtgaatttntagctgaaggaggaggcgtgcgtggcccaagggttgtggaaaaanannaanntgcntgcaaanantnanannggcccttcngcnctnangaaaaanggaannaaaaaancncttntggctgcaggaagaaanggttgaatgaagaantnaaaaaaaantttaaaaaaaaaaaaaaaaaaaaaaaaaaaaaaaaaaatgaaaaaaaaaaaaaaaaaaangaatnnnaatcgttgaacaanaaaanaaaggaaaaannnanantgtgantttncctcagcnaanaaangtganaanacntanaaccgagtgtcagaagannngagaagaagaattgaagtnatgaagaacaaagtcatagaaaaagtacagcatatccagcttctgnagaaaaatgttagagctcagttggttgatatgaaacgactggaggtggacattgatattaagatccgatcttgtcgagggtcatgcagtagggctttagctcgtgaagtagatctgaaggactatgaagatcagcagaagcaacttgaacangtcattgccaaagacttacttccctctagagatangcaacacttntcactgataaaaatgaaaccagttccagacttggttcccggaaattttaagagccagcttnagaaggtacccca

SEQ ID NO: 702356 - DNA, 150 bp, Homo sapiens
ttagacgagcgacgggacacggtgggaatgcttaccgcaggtcaccaacagccactatggagtcagaagcaggtatgagaggtggcggtgtgcatgctggtcccagtgttacaccatcccgatcacgtgtgctgtactgcatgccggaag

SEQ ID NO: 702357 - DNA, 670 bp, Homo sapiens
  misc_feature (9)..(9): n is a, c, g, or t
  misc_feature (126)..(126): n is a, c, g, or t
cattttagnggggggctctctttctctttcccggtgtgaagaccgcgcccccccaggccaaaaaccggtggtttcttttccctttttttgcccccacagcgccccccccccgggggggggcgggtnttttagggtgtttttaaaaggcccgcggaaattttaaagtggggataccaaaggggtctccccccgcggttttcctatttggggttcccgcccgggggggggggggccaccccaaggccccgggcccaagaataaaataaggggggggggattattacccccttttggccggccccttaagggtttggaattggggtaggccccttttttaatttttttccttcccgggccctggggcccttttaagggggaggggttggggggttttccccctttttgggggaccccccccctggggtgggaaaaatgggggccccaatttggggggttgggtaaccccaccccccccgaaggttttttacccttttcccgcgggtgggggggggctaaaaaaacccaaggcccattttttccccccccccccaagggggggggggggggccctggtgggggaatattttccccccggggggaaggggggggcccataaattttcccccccccccccggccgggggggggccttcctttttaaggacccgggg

SEQ ID NO: 702358 - DNA, 384 bp, Homo sapiens
gaccattttgtgggggttgggttctgaaaagtagctcagggcacgtgttaaggatgtctctaggtgactctaacttccctggctattgtttgaaaccgttatgaccttcttgcttatcagcttgctggtttccttctcggggcgagctgggtgcctggagttttcggtgaaggaaactcaagattctcctttatttctgtgcttgtgggaatccccctgggacaccccaaagaggggtccctgctccggtctcacagggatcttttaggatattcggcttaacatcatacatttggcacgttgtttcatcatctggctaatttactggttttgaatatttcatttgtttctaattgttactacagataatggtggggtgagcaa

SEQ ID NO: 702359 - DNA, 135 bp, Homo sapiens
catgatggctttctaaactaccagtgttcaaatacataaatgaaccaggatcccgtagtgaaaaacttgcagcacataataggcagccagtgacgtcgttataaaagattggagcatgggcatatagtggaaagt

SEQ ID NO: 702360 - DNA, 305 bp, Homo sapiens
tactgggtcatccgcagtcacagaccggtgtgggagagctgcatggggaaaccagattctggcatggaacggactactgcacatttcgtcttacaaagactgggttcaactctgacaaaccttttgctagataatcattgacaggtactccacgccccggatgccctggcatgacaattgcctctgcagtctacgggagggcggctcgtgatgttttacgtcacttcatccagcgctggaacttcacaaacattctgaaatcaaactatcggtccctttcttatccttttctgcttccggacgaa

SEQ ID NO: 702361 - DNA, 316 bp, Homo sapiens
  misc_feature (239)..(239): n is a, c, g, or t
  misc_feature (257)..(257): n is a, c, g, or t
  misc_feature (259)..(259): n is a, c, g, or t
  misc_feature (270)..(270): n is a, c, g, or t
aggggccgggggtttttgcccagggctcccctggaccaggacgccaggtagggcagggaacctcagtagtcctccccccagccattttcagagatgaatgggtcaataacctcaatgcaggcctgttggggccggaggtggctgtggtcctcatcaccctcgtggtttcggtggcacttttccagctccctgggggttgaccaggagccggtcaaagatggacctggccagatgtttgncccccccccaatttcagngntaacatccacncttccccccatttcctgcttgccagtaaagccttcgataaacgcta

SEQ ID NO: 702362 - DNA, 243 bp, Homo sapiens
aagtcggtacctgccaaagcgtagtacccaaagtgctgggattacaggcgtgagccactgtgcccagccaaagttataaagtcttctaaggcctaaaacaaggcagaaattactaagagtctcactctattgcccaagctagagtgcagtggcacaatcatggctctctgcagccttgacctcccaggctcaatcgatcctcctgcctcagccttctgagtagttgggtactacgctttggca

SEQ ID NO: 702363 - DNA, 82 bp, Homo sapiens
ggatctcccccttaagaaaggaaaactgaaccatcctttagaagaggaaatatgatttacctgaggaagagacctgatctcc

SEQ ID NO: 702364 - DNA, 318 bp, Homo sapiens
  misc_feature (58)..(58): n is a, c, g, or t
  misc_feature (90)..(90): n is a, c, g, or t
  misc_feature (254)..(254): n is a, c, g, or t
  misc_feature (290)..(290): n is a, c, g, or t
gcgccatctgggctcactgcaagctccgcctcccgggttcgcaccattctcctgcctnagcctcccgagtagctgggactacaggcaccnaccaccacgcccggctaactttttgtatttttttagtagagacggggtttcaccgtgttagccagggtggctcgatctcctgatctcgtgatccaccccgcctcggcctccaaagtgctgggattacaggcgtgagccaccgggcccggccttgacttaacctnttctaccgctgcaaggccttttccttagtgggtttncagaatgggtttcgattggtgatatttt

SEQ ID NO: 702365 - DNA, 651 bp, Homo sapiens
gggttttcttaatggtggtcttccgctccctggctgggtgatgatattttctccgtgttggggggcgccgcttttttggtgggacgtgtggcgctcgcttggttgtccgtgtggtccttccgttatttgttgtctgctggtgggctctctttcctcctgtcttcaggggcgggttggttgtcgtatagacgtctcgcattcgggtcctgccccagtgccggcggtgttctttcgtctcgtcccacacgtgtctctctctcattgcggcttttctccttcgcccgcctctctgtttgttgtgccggtcctccaatccctcccccattgtgctttttctggcccgccagaggtcggtgtggccggcggcttctccgcggggtgtgcacacccctcttgtagtaacgcgtcgtcgctggttaccccgctggtgtgggtctcccctccgctgttggcagtgtgctcaccccgcgaggcatattcccctcggtacggctgttcaatttttgacccaaatgtatcatctcccgctaggcaattcctccacaatttctgatgccccttatctccccacaccccccttttctccccgcttttctattaactaatcgcctctttcaacctttgtgttacaacccccccatcattatcaca

SEQ ID NO: 702366 - DNA, 275 bp, Homo sapiens
gattagaggacccggaaaattagcgacgcatgagctccaggaattccctttggcctggtggtgaaggacttggtgtgtcactgctttggctcaggttactgctatatcttgggtttgatccttggcccggaaactgtggcatggccaaacagaaaaagaaaaagacctaggctccagaccatgactacctggactcttttagacgatgctaatgcctatttcttaacagaaaaggagtgtaatctggtgtatttacgagagactttctattgggg

SEQ ID NO: 702367 - DNA, 380 bp, Homo sapiens
tggaaacagagtcgtcggtcacccaggcgggagttcagtggcacaatctcggctcatggcaacctccgcctccggggttcgatgccattcttctggcctcagcctcctgagtagctggtactacagatgcctgccaccatgccgggctaatttttttggtattttaagtaaagaggggtttcacggtgttagccaggagggtctccatcttctgacctcatgatctggccacctgggcctcccaaagtgcggggattacgggcgtgagccatggtgcccagcctcatggtgttttggatatgctttttactaatgattagtaagcggtggagtatttttccaggtgcttctgggccatgtgtatatcttctttggaagtg

SEQ ID NO: 702368 - DNA, 417 bp, Homo sapiens
  misc_feature (205)..(205): n is a, c, g, or t
ggtttttaaaaatttttttttccaggggcgggccatgcaaaaacccccggggggggggccctttttttccaggaaaagtttttaaaacttgggcccctgatttttaattgccggggccttgggaaacagtgggaagtaacttggggcccccccgggggatttttggctttttgtgttggaaactttgtaatgtaaaaggaaaaantggaaatcccccccccctgtttcccttttttgttttggggggggggggggtcaatttgtttaacccaaatttttggtcccggccggggttaaactgggtccaaaaaatggggggtttggcccccagttttttttaattggggggggatagggttcggggtttccccccttgttttaatgtcaaaaaatgccccccctgttttgttagggcca

SEQ ID NO: 702369 - DNA, 712 bp, Homo sapiens
gggggcatattctctgcagaatttctgaaagttttccttccatctctgctgctctctcattgctggccatcggatggggatctatatggaaggcgtctgacaacctccaccagcacctttgatgaagaaccggagtctgacttggttcgttagtggattacttctgagcttgcaacatagctcactgaagagctgttagatcctggggtggccacgtcacttgtgtttatttgttctgtaaatgctgcgttcctaatttagtaaaataaaagaatagacactaaaatcatgttgatctataattacacctatgggatcaataagcatgtcagactgattaatgtctactgtgaaaattggtagtaaattttcatttgatattagatataaatatctgaatataaataattttaatatactagtcatgatgtgtgtgtattttaaaaattatctgcaaccttaattcagctgaagtactttatatttcaaaaagaatgaataacattgataataaaatcgtactttaaggggttgtccaaaataaatatgtggcttatatatcacactatgtagaaagtattattaatttaatggtgcaggtgtctactaaagaagattatttttactatgcaattgtcctaatcaaagaaacaagatagaggtacaaatcggtgtcgttcgacactaactttgctggtttaaggataggtca

SEQ ID NO: 702370 - DNA, 347 bp, Homo sapiens
ccaacgccatcatagctgaaggcatccctgaggcccgcacgagaaacctgatccagaaggcggaccagaagggagtgaccctcatcacacctgccactgttggaggcatcaagcctgggtgctttccgcttggcaacacaggtgggatgctggacaacatcctggcctccaaactgcaccgcccatgcagcgtgtcctatgtctcacgttccggaggcatgtccaacgagctcaacaatatcatctctcggaccacggatggcgtctatcaaggcgtggccattgctggggaccggtacccgggctccacattcatggatcatgtgttacgctatcaggacactcca

SEQ ID NO: 702371 - DNA, 121 bp, Homo sapiens
ttgatgctaatttcgggtggcgcgcgctaactgagtggtcaggtgtgctacgctagcgggggcgggttaccggtgaccccttcgtggtgtggctcggggttgcgattttccccatgaacga

SEQ ID NO: 702372 - DNA, 606 bp, Homo sapiens
tgcaatatctctgtgctctccagttgaacttggtggcaataaaattaagaatctgccagtgccccccaagcatttctactctgtccataatgtttagtgacaattaactattaccaggtgtagccacccttacttaatcttagtgttatggtgcaagtaatccttagtgaaattattgttctgtagagaatgctgtgatctaagtgaagtgactttcatcctgagatgacaatggagttgtttttgtcactgtaaaggctgcatttactcgcagttttaaagcattattgctacttatatatggtctcaacactgatttttatatttgactttgtagctttaagtgtaaaaatttctgttaaggttttatatgtgttagttaatttttcccatttcaataaccatgttttattattgatggagtctcctaaaaatatacccttaaaatctgcttgccctgtgcctgcacacatattttaaatgttgggtatggagtctttttttttttttttttttagacagagtttcactctgcagcccaggctggagtgcagtgagccaagattgtggcactgtactccagcctgggtgataactccttctcaa

SEQ ID NO: 702373 - DNA, 589 bp, Homo sapiens
  misc_feature (44)..(44): n is a, c, g, or t
actagtaggtttaattagggataggggggggggccttatttctntactctatcccttcctacatcttatcatttttctccatctcccaaactacatcttaacccattatacagtacatttccttcttttacaaggactagtaagctgtatatctatatattatggctgcattctctacctagggggggggcaatactttcttccatcctgataagtgctaaacgctaggggactcttttgagctcggcctggaacctttattttatgtgatgatgaaactttatcccatgttccttgaactgacgacacgagtgcgtcttaggactctatgcccagcttatgctaacggtcagagctgaggtgctgcaaagacagtccgttaatgagggactgttctttggccctgttgagacttatgcttcaccaggactcgcatcagctccgctttcacatagcttagggtacatcacctccctgaagggctatgctcttttggttcctaagcaaggacataaggccgcattgtggtaacattccacatgaggtgacggcgctgccctccgagtcttctttttccttatggcggcag

SEQ ID NO: 702374 - DNA, 1024 bp, Homo sapiens
aaatggcggatgacgccgtgtgcagcgggggtggcccgtggggccctgtgtggccctggtgctggggaaccgcggtgtgcttccgcggaggtttcggcacgtggcagtccggtggccggggtcgcggccgtggaccggggccggggccgagtgccgcggagctcgctggagtgcaaggccgacggataacggagttggaatgcccagtcacacaaagttgggccgctttgggctcaagggactttgacggatcaagttcccgtggagggagatctagtcgtcttctcccgtgcccatttaagggaactcaggaagaatcactctgatttccttccgtgggggccatcttctcagggcatgaggtcttcgaagatttatgccagtgcagaagcagacccgtgccggccagccgcaccaggttcaagggcataggtggctatcgagggactacaattggccacgtcggtctggggtgctaaggtgctccaaggagggtggccaccgccatccgtgagggccaatcatccttggccaagcttcttccatcgtccccgtgcgcaagaggctactggagggaacaagatcggcaagccccaactgtccctttgcaaacggtgacaggccgttgcgggcgctgtgctggtacgccctcaattccctgtagccagggggcactggcatcgtctccgacacctgtgcctaaaaaagctgctcatgatcggctggtaattcgatgactgctacaccttcagcccggggcctgcacttgccacccttgggcaacttcggcaaggcacctttgaatgccaattctaagacctaaagctatcgtgtatcccgcggaactctgggaacggagcactggtatttcacgaaggtttcccaatatcgggagctccactggaccacactctgggtaaagaataccacaccgaggaagatctgctggcgcggggaaccaagggccccccagtggggcctcacaacaacgggtgttatattcagcaacaacactgtgccgtac

SEQ ID NO: 702375 - DNA, 428 bp, Homo sapiens
  misc_feature (152)..(152): n is a, c, g, or t
  misc_feature (167)..(167): n is a, c, g, or t
  misc_feature (402)..(402): n is a, c, g, or t
  misc_feature (420)..(420): n is a, c, g, or t
  misc_feature (426)..(426): n is a, c, g, or t
gtaccctggtggctggcataattctaagggcaaaataatatgaccatctaatcatgtatacccatggctatcaggaggatatagcaattatataagataatacatggtcaagaatctacgcatcggatgtattcttttcttcttctttactngatgcattcaaaagncaccactggatttttttcaatgtaaaaaagaaaaatagatacccatgccaaaattcatgggtgtaaacagccaacagagccaaacttacaaagaaaatgaaagacttgtttctggacagtggtttattggtaaagatataggacatattggctactattaaaaactcaggtaataaagcactaagcttgatttattgtatcgctacagtctctttcttctaaggggaagaaaatntccccaagaataggatgntacctnag

SEQ ID NO: 702376 - DNA, 638 bp, Homo sapiens
  misc_feature (521)..(521): n is a, c, g, or t
aaaaaggtttgtatttgggccaaaatgtctgggaaacaggcccaaattaattattggggtgattggggaaccgttcaaagttgttcctcaggttgggttgtgcagaaaaagacaaaaagaaccccgcacaatttttttggtatagtaatggatttggcggtttgcttttgttcggaaaaccacctgtggattttctttgggtattcccccctctttaataaaaaattaacacaaccagggggcactctccttttgtttagctcaaaagtccgttccccgggcgtaatgggttttaaaatactctcatgttcaaaacagtcatggtgaccatgggttcggcttgtaaccagctaaggggggttcgcttccttccttttgtgtctagattttatgtaagggggtacttcgaatgtgtgaaagcgtggggagttcacatattgtcactccgcgtttagggtgggttcttccacaatcaggacttttcgttgggaacagaaggcttctcttttcttgtctctaanaaatattcttcctgttatagaaatgcaatcagcattctttgatgcgtatgtctcggtgggtgtatgaaaaaagcttgctctggttttgtcgggacgtgctctatctccctatatagc

SEQ ID NO: 702377 - DNA, 857 bp, Homo sapiens
ctgtaattcaagcacttttggaggccgaggcaggcggatcacgaggtcaggagttcgagaccagcctgcccaacatggtgaaactgcatctccaccaaaaatacaacaaatagccgggtgtggtggtccacgcctgtaatcccagccactcaggagaccgaggcaggagaactgcctgaacccaggagacggaggttgcagtgagccgagatcgcgccactccactccagcctgggcaacagagtgcagagtgagactccgtttcaaaaaaaaaagcttatgacaacaaaacgttataacgtgatttgggattagatgaggaaaacacactaccggaggaccatttctgggacaagtgtcattaccgaagtggtatgatccacgccatcattgcctgtcaatgggataaacagtgtgatcactgatgttgcctgattctgatcactgtctgtggttatagaagaaaacatccttgtctgaggaaaccccaccctaaaatagtaagggcatcatgcctgaaactgttccaagggctcacaaatagaggcgcatgactaagcaattgtgtcaagatgttgcagcaccggaggttaagtttcgagagtttcacaacaacagctgggctgtgtggctcacatttcgtcattcccacactttagggaggccccgtggggtggactgtgggaaccaggaggcacaaaccgcctggttacatgcaaacctattttagaataccacgttaacgctgggcgtaccgtatccggctgtgggatgcaaggccctgcatgtcaccgggtcagtaatgatcaagcacagctcccggaatacttacaaaaaaagggcgcccaatactgggc

SEQ ID NO: 702378 - DNA, 944 bp, Homo sapiens
gagaccgtgcttcgccgagagtcgtcggggtccctgcttcaacagtgcttggaacggaacccggcgctcgttccccaccccgggcgggcgcccatagcaagccctccgtcacctcttaccggagcctccggattgtgccccaagggcccctcgtctgcggcttccaaggcgccgaggagggccagcggcaggccatgccctgcacggtctacatccgttgaagtacggccagccaatagatggaagcggtgattcaaaccttttggcagggatcgccgccaaaaaaattaacaaagcccaaggggatccacaaagaggccccggctattgcaaccctgggtaggaatacaccctggggagagtttgctatgacctgacctcaacgcgttcacaccctttgtacccggatgtccatttagctcaacctttttggacccggacagtagtgctggtcaggagttctcggaagggcaattttctgctgccgaagaatgacctatttgtcttaatcaaccaaacttcctccaatgagaggggacaggacagggggcacaacattcgcgtgggaagaacatcgtgggtgagccaagtctgcggcatgagaacccatacggaacgggggggggcagaaatatccgtcttccgttgtcaggcggaattgacttcgcaggaagccccaggaactgtgagtggacactcgaacctgtggggaaagaactgcggcggacttagaacatcggcccaggtggtactgtcggtggggcattacaccctgttttctggcgccacacaagcacgtggttggaatcacacaggaccaatctaccgtgggcacatcttggcaaaccaaaaccgttggcgtccgacttgggcaacgcataaaaatgtggtcgcccccaccagtggggttggaagcctcaccacattgctgggacgaccacttt

SEQ ID NO: 702379 - DNA, 293 bp, Homo sapiens
ctccatcggcacagtcagtattgccttgatacacggtagtgtctgtgcgccctcccgcagggtcgctgttagctggttggttttctgatgtaacacatagcacatatagtgttagcaggcccgtttctctgagccttgagatcccttctgtcatcgtctgtcatagctgttccgggatttcaaagttcatttaatgtgggccatcattttttccaaacttcctagagccatcccagtagtatatttgagcctccactgagcccacgcctcagtgttaatcctatgttaggtca

SEQ ID NO: 702380 - DNA, 127 bp, Homo sapiens
  misc_feature (1)..(1): n is a, c, g, or t
  misc_feature (30)..(30): n is a, c, g, or t
  misc_feature (52)..(52): n is a, c, g, or t
  misc_feature (70)..(70): n is a, c, g, or t
  misc_feature (107)..(107): n is a, c, g, or t
  misc_feature (112)..(112): n is a, c, g, or t
naatcaataagtaatctaggactagcattntgtttgctaaacctggcttttnctcggttcatagggttcnatgtttcctttcctttttttatttattttatattttncaatnttttttttccataat

SEQ ID NO: 702381 - DNA, 199 bp, Homo sapiens
atgacagacaaacaaaattatttctgaccagtgttccgggatgaaaatgtgtgtcgtacgcaaaaatgcaagtgcctgtgcctactctcacatcgagacgactatggattttattgcccatctgagtgccttaaccttgaagccttgactcactgtagcacgtgcatatagcacgctactccagtctccatgatacttg

SEQ ID NO: 702382 - DNA, 812 bp, Homo sapiens
tagctgccacagttattttaattataaattaataaaagcctacattaaattcatcttattaactacttatgagagtgtctaaaaactgatgaagccaacattattgggacttctgatacttccattcgcttcaacttttctttctaaagtagaaaattaaaagatggcaagccatttacaaaaagacatgtaatttggttaatcaggttgacatttggaacatcttcctctaacagtgacagctgtcttctcatctatcttagcataggagtcctctgctgcctttacaataccgtcgggtatgtctccaaagcagtttgcaagtttagaaatattcccggggacttcagtttctccctttcagcagcatctttaagttcgtagaatgccaagtttaatttttgggatttctggataaatgggggttactcgttcatagacagcacctcttttgtcttgaactttatggcaatcctcaatacgggcgttgtatggcttaacatcttcatgcttcttattcatttcgaatggtgctggggcaagtttttccttccttcacgaatcatcaagtcttttggaaccggaattttcttcaggcttcacaaatccttcaagtcctgactcactcactctccaagtgtgggcgctccaagtgagaggcccccctttaaaaaaaggaaaatatcccataatttgaaaaggcggaatacgttgaaaaagaagggttcacaaggataaagggggcgcacaaagggtcccagaattaattttccccctttgttgggggaggcagagagagaaaattttaaaaa

SEQ ID NO: 702383 - DNA, 91 bp, Homo sapiens
ccccccccccccccccctttttgggggggggggggggggtttttttttatttaagcccgggcccccccattaaatttttggggggttccca

SEQ ID NO: 702384 - DNA, 229 bp, Homo sapiens
tgggcttgaaaaaaaactgaaagggaataaaatttctttgggggcggaatatgagaaaatcaaagacccccagtttgatgactggaagaatattcggggacccaggccttgggaagatcctgcccccccccaaggaagaaatccagaaagccttaagactaagacaacttgaccctgcggattcttttttccttttttttttttttaaataaaaatactattaactgga

SEQ ID NO: 702385 - DNA, 175 bp, Homo sapiens
aaactgcacaatgctgaagcagtctaaaaaagaatcaaacacaccactgcatagttacttcaaggagttactttttttaatataaaaccagtttggaccggcaaaatgtccccagatcaaagtctcaaccataaagtcacttgtccagtgtgcgggacgccacaggggccctggc

SEQ ID NO: 702386 - DNA, 1076 bp, Homo sapiens
  misc_feature (140)..(141): n is a, c, g, or t
  misc_feature (152)..(152): n is a, c, g, or t
  misc_feature (154)..(154): n is a, c, g, or t
  misc_feature (196)..(196): n is a, c, g, or t
gccggcagcggcagctcaagtggccaaggcaagatgggtcaaagtcagagtggtggtcatggtcctggaggtggcaagaaggatgacaaggacaagaaaaagcaaatatgaacctcctgtaccaactagagtggggaaannagaagaagaanancaaagggaccagatgctgccagcaaactgccactggtgacanctcacactcagtgccggttcaaaattcactgcaagttcagagcagcaattcaaagcactatcttctcatggaggacagcaattccattcagaaatcaggaacaaatgaaaccgattagacagagaaagccaagcaggcaggacacagatcaaaagtggatgatctgagggggaccccgatgtccgtaggaaccttggaagagattattgatgacaatcatgccatcgtgtctacatctgtgggctcagaacactacgtcagcattctttcatttgtagacaaggatctgctggaacctggctgcatcgggtccatgatcaagcacaaggtgcatgccgtgataggggtgctgatgggatgacaccggatcccctggtcacacagtgatgacaggtcagaaaagggcccccaggagaactatgacagaatataggggggtggacaaccaacttcaggacatcaaggaatctcgtggaggcttaccgtctcacccattcccttgaatattattgaagaggatgggaataaaggcctcctaaagggagatcaatacacataaggaccacctggacacaggtaaagaccatgtatagccaacagacagaagaaaaccaaaaactctaacaaatcctcgacgaggagggaagagatctggacactaattcagaaagtacctacggtagaatgggaccaagaaacgcacacgaggaattaggtccccgagagggaggaacgacaatgcacagggcaacaaggaagaacagaagaaaggatgcaccattgggaagcacaaggcatagacacaaagaggggagacagcagaaaaggagaaatgaagcacagggaagccagagggaacaggaaggaggagagcgacagt

SEQ ID NO: 702387 - DNA, 236 bp, Homo sapiens
  misc_feature (46)..(47): n is a, c, g, or t
cagaggacccgacgagttgtccgagtatgttattattagatacagnnttcactctgttgcctggctggagttcagtggtgattatggctccctaaagcctttatcttctgggctcaggcattcctcccacctcagcctcccaagtaggtaggactgcagctgtgtacaaccacatctgactgtttttaaatttttttctttcttcttcttcttctttttttttttttttttttttg

SEQ ID NO: 702388 - DNA, 258 bp, Homo sapiens
  misc_feature (70)..(70): n is a, c, g, or t
gagggttgggttagtggtaacgataatataatcagaaaagctcagccgggcgcagtggctcacacctgtnatcccagcactttgggaggctgaggcaggcagatcacgaggtcaggagatcaagagcagcctggctaacatggtgaaatcccatctctactaaaaatacaaaaaaattagccgggcatggtggcatgagcctgtagtcccagctactcgggaggctgaggcaggagaatcacttgagctcaggagttt

SEQ ID NO: 702389 - DNA, 163 bp, Homo sapiens
atcgctgggtcaatagtacttgccgcagtactcttaaaacttgggggctctgtgatgagacacgactgggtatttttggtgactgccccatggcacaagaggtacggaatatcattattcacccgacctccctgaatggctacttaaaactcgtctcttattg

SEQ ID NO: 702390 - DNA, 899 bp, Homo sapiens
tggtaagtgaacaacgtctcttaattgggggaggagcccggggggacagtaaaagtaaaccctggccggttaattgaacgggccgaggtcctgcggggagtgtggggtgggacgtgaaggggcagcctccttagtgacaaggccactattgtgctaatacgcattgcgcggtttcttcagcgccagctccgcccccgccgcagcgaggcgggataggtccgcccgcgcgcactatacgcccgtgacgtcagcgtcgcgcgcagcgcagtgacgaaactcggcgggtatatatgggcgcggcccagacggcagaggtctcgtgcggcgcggcctcggaggacaccgcgggggttgtcctggtggtgggccatgggccgaatacctggattagggggggcactgtcctacgtgccagacgagggactcacagcacagcagctcttcaactggcgggagacgggctcacctacaagtggcggggcctagggggctcacctggggcagaagagagggggggccccggggggaaaagggcagaggggggcttccgagagccgcctggggcggggcgcgcgggggacagtgtttcggggaatgggcacccacctcgcggggctcactttgagacatctggacggggctgctgggggtaccggaagaaacgcatctcaggaagtgctgaaacctcagggcggagatccatggtcccagaacattggaatttggccggtggccggaagccttgatgacactcggtggaaaaaaggccctggccatttccccttggttgtgtcggacccaacttggctggctcccgcacatgcgtcggtgaggacggagaggagatagggcaagagataccaaaagcatctcgagagtatcccggcagacggcacagg

SEQ ID NO: 702391 - DNA, 104 bp, Homo sapiens
aggtgaaaggcggtggggaagatggtcctcttcccaccaccgtagtatcagtagtcttgaacttgaagccacggtcacccacaagccacggtcagcacacaagc

SEQ ID NO: 702392 - DNA, 653 bp, Homo sapiens
tagacgaatgtactcacgggtttgtggatcgtgctttaactggtcatctgtttatacagatagtttagaatgtgtcgcaagcccgctgtaggtgctggcgcaacacagaggccgcctcttcgggggctctggcttcagcaagcgacactaatgcctcgtggtcgtcctgtgccatttctcccagccccatagccgagaggtgaagtcgcaagaagcgctcctcttcctgcaattcaatgtcgatcagacgcagcagcttcttgttgggcgtgcgtcgatatagagacatgtgaaatagcctgttgaggcgtccaaggctctccaaatctgtttcactttccatagcaacaatatgtaccctagctagtttgaaatcctccttgcacagatagggaattgattggcgtaacgcctccggctcaagcaacaggcgtatggcatatgtttcgacggcatcgtcaacattcatctgaagtacgatggcgcctttgttgggtacatttcgtaccagtccttgagcctcaagtttcaacagcgcctcgcggacaggcatacggctaacgccgaacatgcgggctagctcctcctgccgtcaggctgaacagccgccaggcgactgttcaaatcccatcccttacgtttctccacaagat

SEQ ID NO: 702393 - DNA, 184 bp, Homo sapiens
gcaacattcaccatctttcgtttgagtctcacggccatgagatccactccagcgacagacccctgacaagagcaggtctcttgaggcttagttgcattgggcctagtaacaccaagccagtaagcctcttatgctacttcgccctgtggggctcccagggccttggcaacttagggtcgtcaac

SEQ ID NO: 702394 - DNA, 740 bp, Homo sapiens
agcggggctggtgtccccgtgcctcgcgtgcggcggtccgggccctggctgggctgaggggcgcgcgctgtcggccgcaggaggtcgggggatgacgcggtggagaggggccggtgctcggccacgtccggatctgccgggtccttggttgggcggtggtgtccgggcgttccctgtcgagactactgcagtccccgctggaagctcgccggcgggtagcggttggggctgtgaggatacaggacgcccgcttctcggcctcccttcccgggcctgggcttgagggcaggcgttggtgggtatcagggcctgactggtgcagaatgtcactgatggacgagtggcggcgcagcccctgatcaccgatatgcctggtctatccaggagtctgtcctgatgcacctggcgacccgtgttcgagagctgactgtgtcgacacggtgctgagtgtggccgtacaaatggacaggtgccgtgtacgacgggaacgagttacctgtggagggaagcagattctagccgaatactagcctggtggtccgggacgtgccccgacaaccaggggccatgtgctggtacgaggaagtgacagcggctgtatgacacggtgccctgcgtggaggtgcagacgctgtcgggaacacgacatgagcaggtctctgcgacctcaatttctcgcattccgggtaccagttcgcgttctgctccaaggactgcactgtgaagatctggagcaacga

SEQ ID NO: 702395 - DNA, 195 bp, Homo sapiens
aattcgcggccgcgtcgacaggcttccacgcttgcgcaccgacactgaacacagcggtgtaaccgataccccgggacataatttgtgaatttctcgcttcaatgcctcgattttatcgccagctacgtcggcattggtcaggacgacctgaaggggaatcctggcatcgctaccgagccgctggatgaggttgac

SEQ ID NO: 702396 - DNA, 347 bp, Homo sapiens
  misc_feature (2)..(2): n is a, c, g, or t
  misc_feature (36)..(36): n is a, c, g, or t
  misc_feature (210)..(210): n is a, c, g, or t
  misc_feature (290)..(290): n is a, c, g, or t
  misc_feature (330)..(330): n is a, c, g, or t
  misc_feature (344)..(344): n is a, c, g, or t
gncgttcttcatgttctgcccagactgtttccaagnactggggccgtaggaatttccatgttttcagggagcctaaggaccctcccaggaggcccaggggctttcaccgcaggaccccaaggccattgaggcacatcacccaaaggcagtgggccaacatcgcggacccctgtgccttgtcacagatgggtgctggtcctcagggcgttngggacactgctgggtcgatggggtcggattctgccagtttctgctctgcagccaaagatggtcagaagcattgtcacttnagtaacatcaagtgcttaaagacatggcaaccgttcagtnggacttaagtattnaaa

SEQ ID NO: 702397 - DNA, 533 bp, Homo sapiens
gaagtaaagccccaccccgctcccccgggagtaggaaggaatgggtgctttggcccccagggctccggtcctggcatggcctgggccgcctccccgactccatcatcgctgtcattcccggcctcaagcctccaccgcccccacacgtgccgccacagggagcggcccgatcaaggcgtgacgctccgaagggtggggcctcacttattcccctatttaaaggggaaagaggccgcggcgccggccccaggacccgacccggccccaggagagtgtgctcgttctgttcacggagctggccgcgttagcgacgtcctcgagtccgcggcgggcacgatgcagctcttggtgagggtaccctctcttccggagcggggcgagctggactgcaacatctgctaccgtcctttcaacctcgggtgccgcgcgccccgccgcctgcccggaacggcgcgcgcccgctgcggccacacgatctgcaccgcctgcctccgcgagctggcggcgcgcggggacggcggcggggcggccgc

SEQ ID NO: 702398 - DNA, 701 bp, Homo sapiens
  misc_feature (127)..(127): n is a, c, g, or t
  misc_feature (155)..(155): n is a, c, g, or t
  misc_feature (164)..(164): n is a, c, g, or t
  misc_feature (180)..(180): n is a, c, g, or t
  misc_feature (182)..(182): n is a, c, g, or t
  misc_feature (184)..(184): n is a, c, g, or t
  misc_feature (211)..(211): n is a, c, g, or t
  misc_feature (224)..(224): n is a, c, g, or t
  misc_feature (237)..(237): n is a, c, g, or t
  misc_feature (253)..(253): n is a, c, g, or t
  misc_feature (315)..(315): n is a, c, g, or t
  misc_feature (330)..(330): n is a, c, g, or t
  misc_feature (332)..(332): n is a, c, g, or t
  misc_feature (335)..(337): n is a, c, g, or t
  misc_feature (340)..(340): n is a, c, g, or t
  misc_feature (342)..(343): n is a, c, g, or t
  misc_feature (347)..(347): n is a, c, g, or t
  misc_feature (355)..(356): n is a, c, g, or t
  misc_feature (359)..(360): n is a, c, g, or t
  misc_feature (365)..(366): n is a, c, g, or t
  misc_feature (382)..(382): n is a, c, g, or t
  misc_feature (402)..(402): n is a, c, g, or t
  misc_feature (424)..(424): n is a, c, g, or t
  misc_feature (433)..(433): n is a, c, g, or t
  misc_feature (442)..(442): n is a, c, g, or t
  misc_feature (449)..(450): n is a, c, g, or t
  misc_feature (458)..(458): n is a, c, g, or t
  misc_feature (485)..(485): n is a, c, g, or t
  misc_feature (493)..(493): n is a, c, g, or t
  misc_feature (506)..(506): n is a, c, g, or t
  misc_feature (528)..(528): n is a, c, g, or t
  misc_feature (549)..(549): n is a, c, g, or t
  misc_feature (553)..(553): n is a, c, g, or t
gctaggggttattcgtcccaggaaccctgacttccctttctccccagttatgatgggaagcataattattaaaaagcatccagaacatcctaactggggagaaagggaagtcagggttctaggggtnattcgtcccaggaaatagaagtgaaatngtctttatnaagtgaaaactttccncntntgccctgcaatgtagctgggcattcanacggagggcaaancgatgatctaaancaaccacttggaaaancccaatggggacattgtaaccagagggtcctggaggtggggttgatgggtttccttatcccnaaagtcactcctgtntngtnnngtntnncttngggggttnngtnnatttnnggggctggcaatccanaatagaaaatctgatccttngaggctctaaaggaaaatcagntgcctctancaaccaccntctatcnngcagtggnccaggaaggaggtcaagcatcttcggncgatattnaaacatgggcagnttccttcaggatgatcaccgangctcccgtgactttgaactcnctantctccagaatccaggggctatagcgatggggactgaggaattacgagggctggctgtaataaaccggtcacatttctatgggcagtgactgcatcatgggaaagggctttgaacggaactacttcagtgccacaacacaaggtacgac

SEQ ID NO: 702399 - DNA, 128 bp, Homo sapiens
aagaggcagcgctcataaattgcttctacaaacgactacaaaatcttttgaaacaggccgggcatggtggctcacgcctgtaatcccagcactttggaggcaggcggatcacgaggtcagagagatca

SEQ ID NO: 702400 - DNA, 196 bp, Homo sapiens
gtggatagtggaaacaggatgatccgtggatcctccttccaaaaaattggaggatggaaagcccgtttggggccaacaccctacagatgggatttcagatgggcaatattgttggatatttggcccccgcagctttaacaatttgaaccccttggaatcagaaagggcaagacattttttgggctctcataaacca

SEQ ID NO: 702401 - DNA, 821 bp, Homo sapiens
gatggaatcatggatgcttgccaattatagatcagttttttgccatgataggatctaaagtgaactggaaaagctgggaaccttggatggagtgggtggtagaccatcgaaaggagcaagagcaagatcaccgtgacatccgaggtgccttactccaaaaggtattgagaatatctcaccaaaaaatattgatgaagaataactctactggtgactggttgcgcgtagttgctaatcagtaaagagagttcacagaacttacgttacttccagattaaccaggacgaagaagaggaggaagacgagggattaaatttcatttatctggaaaagttttgtatgagttcttgaataaaaatcttgtggaaccaataatggtgggtttatccttgtatctctgcagtgtggattgaacatgaagcatttggcacaccctcatatggtcaaatgggcttcccttgagttcgccactcatatatttgtaatcttgacttcttatccctcactgctataaaaatttcaattgctcgtggtactaccaagacgtcaaacggagagggtgacttacctgaattgacatgccacttgcgggaggctgatccgggtgttggaggtgtgcggctgacaggtacgtgacctgtatttgatcttctactcactgtcgttgactcgtcaggttgtcaccctagctggtttactcaactgctctcatgggtgtccccatgggggttctgctcgttcatttggagataatcgccaattctttctccggattacgctgcggggaccctgactgtcgaaaatgggggttcttggggcct

SEQ ID NO: 702402 - DNA, 107 bp, Homo sapiens
  misc_feature (51)..(51): n is a, c, g, or t
cggtcttcagtcaatcgagcactgcacttgttgagatgtcttgtgactttncagtgagtgatctcatcttctagctcacagctaagtggtctgagtggcagtcctca

SEQ ID NO: 702403 - DNA, 140 bp, Homo sapiens
gggcatttcagttagaggagggtgaagaaactgaaccagattgcaaatattcaaagaggattggaggagtcgagagaacaataacaataatgagaaggtcttgatttggaccaaaagttgtaaagataagactgtaagaa

SEQ ID NO: 702404 - DNA, 122 bp, Homo sapiens
tcatcacgctctctccccttttccgggtgactctgtgctgacttttctgtccagtacaggttcagctcatctctcaggcacccggcactcatctctagagaaattcttggctcagcgctccc

SEQ ID NO: 702405 - DNA, 742 bp, Homo sapiens
  misc_feature (431)..(431): n is a, c, g, or t
cgcatttaaaatcatgtcacctacaagtttaattttcaacatctcatgtttttatttgtcccattacagcctcaaatgttggtcataaaaaaatttaggctaccaaagtttaaagaataaaatgaaaattttataagaacttacattaaaaactcagtagtttgcatgagtaataactccttgagatacacagatccccccacatttgtatttaaaataattggtgaggcattgaaatccagaattataataaagcattactgaatatgtgtgttataaaatcaatattattataaacaaaataggaagctagaaatatttgggatcacagtaatagcttttctcaaatatacttttagaattgaatgtacattatcctataatgtaaaaaagcaaattattaatttaatggagctctcgattgacctttntagcatacttttatagcatgtatattaaaatagaatatattttagcaaaagattgccataaaaccctgacttggcttattttgaaaattgcactgtgaataagggcttacatttcaatgtacaatgtggtggcagacaatatactatgtaggtcttttaccgtaatgcctaattgttccaaatttgctataattggaggtgctttaactggactttccggttggcttttttgacttgtgggagcacaatcttccttaacgctttatccttgaggggttacctacattcactattttgatggacccccacct

SEQ ID NO: 702406 - DNA, 780 bp, Homo sapiens
ggctgctgcaatgactggtcaacgtcccccgcgtcctccaacagcctgcgcactgctcgatgccctcatacaaggtcagcagctgctgcaggatcttcacatcgagtggctcgcacattcctgaagtcatgggctggccaggacattggtgacccgccaatccggtatggacgactggaagcccaggccccctcatcaatgccctttggggctcggaagaagcggagctggttaccgttacctggaagctatagcatctgacaaaccagacgggccctgcggcagattctgtcagacagggcgccgctgctctttcctgcctggtgactgtcattgtcaagtactcaagtctgatcctggacactcggcgacccatcacttgaagccaagtgaatgacccagagccacgagcaagactatgatgaggccctaggccgccgtggagccccccacggacgcagaggccagtggctccccggccgcggtactggacgctagaggctgctattcaagctccgcatccaagctactatgtggcacagcgatggcaccacggcgccttggactggactcagcgccccgcgcaacccacgcgccgcggggcattccgcatggctcaattaggtcccttcaaacaccaaacgccctacgggtggcccaccggtagcaatggcacatcaacggctggtgatatgaaccacgtttccctcatcactttcactgaaccggatgcacggccctgtgcgagcctaattctcgtcaccgatgggaagtggcccg

SEQ ID NO: 702407 - DNA, 254 bp, Homo sapiens
  misc_feature (27)..(27): n is a, c, g, or t
  misc_feature (49)..(49): n is a, c, g, or t
  misc_feature (51)..(51): n is a, c, g, or t
  misc_feature (69)..(69): n is a, c, g, or t
  misc_feature (109)..(109): n is a, c, g, or t
  misc_feature (144)..(144): n is a, c, g, or t
tggagtaaaggtaagcatgttttagtntctggagtattatattgtacgntngagctaggtatttaagantattttggaggtcgagagggaagactccaatttactggtngtgcttggccagtaatcaaggtgacagtttaagtnttgggtcttgcactgtaaactcctgcttatctagacttcagactaccacagagcccacacagccagggaagtctgtctccccatttagtctttattgagcaagattggat

SEQ ID NO: 702408 - DNA, 110 bp, Homo sapiens
cggacacttgacactggacttagaaaggacttggaatgaacactgcaatgccctggacctcaacatgtacatggaactggaacctgaactcaaacaggacgttcacactg

SEQ ID NO: 702409 - DNA, 209 bp, Homo sapiens
catatttgaaatccttttcaaatcagatcagtggggccatctatcaggagatatcaaccttcaggagcctgagcaagaagactgaaacttactggctgacttaggatagctgcagagagctggaatctgacacaaaactagttggagcagccctgtctgtcttcaagcaaggcggggtggaattccataatgctggcagcagggggcat

SEQ ID NO: 702410 - DNA, 894 bp, Homo sapiens
atcgcgaaggaaccaatgcctgtcgtgagagcacacgacactcatttctcaagtgtagtcactgcttgttccccactagtgcgttaaaaggctggcgaggaatttgcaccaacaccccggttaatatgcgtgcgtcgccttaaaatatgttggccgtatttccgatatgtaccccgccaaacccggttaaatttacgttagcacagatgtgtgtaaccccgtggcacagtttctacccacagagggtagttactctggtcaaaggaactgccccaaaaagatacaatcaactgggccattccccaatatttctcccacctcgtattgccccccttgaccctatgtcttaaaattctcccccccccccttttttttatttagaccgccaatgttaccagcgatacatcaagacagagtgtttgcatgtagccttcccgcaaggcacaactttccccccaccaccccctcgcggagtgcataaattttaaggctcccccccgctctttaaatgagttccggcgtttcactagcagcaaaaatatatagcttctaacaccccaggttgagcgaccatattctttacatattggatcctcatacccccatcccaagacccctgggtttaataaatacattctatgatttttttctaccacccccaatagccacttcttatcaaaaataatgggccaccgaaaccccgaaggacgatatcccttattcgcccctacttatacacctcgtgttcttcacagccaaccattctcccttctgcaattgccaatgttcctgcgacacgccgcaccagctatgctatgcccccttcaccaactaacacgtaacaaaaaacccgcgccttctccccgaaagagttctttcgtaacaaacaaaaca

SEQ ID NO: 702411 - DNA, 346 bp, Homo sapiens
tataggcaggctgaggcatgagaatcatttgaacccgggaggcggaggtagcagataagccgagatcacaccactgcactccagccgtggcgacaaagcgagactctccatctccacaaaaaaaaaaagagttataacccttttctccactaaaaaatattaatttttggctaatttggcacattacaaatatttttttcccctaactacagaaacctcgtggtcctgaaaattccaaggatcaattggaattaccagattaataccagcatgaaacaactagacaactaaaatctatcccaaaacataaacccgagtcgtgtatcataatcccaggcaagccagc

SEQ ID NO: 702412 - DNA, 198 bp, Homo sapiens
gcggttgacgtctgaggactctggcccctgaccactctcccgacgacaatgctccacgcagagcaaaatcttgcaagtcattcgcaagaaacatgttaagaagtgccttgagctcttcgtctgagctggccgcagccagcggagccttacagagaaattctatgaggcattctctacaactctcaagcttggaatcca

SEQ ID NO: 702413 - DNA, 301 bp, Homo sapiens
  misc_feature (58)..(58): n is a, c, g, or t
  misc_feature (71)..(71): n is a, c, g, or t
  misc_feature (112)..(112): n is a, c, g, or t
  misc_feature (132)..(132): n is a, c, g, or t
  misc_feature (157)..(157): n is a, c, g, or t
  misc_feature (203)..(203): n is a, c, g, or t
  misc_feature (257)..(257): n is a, c, g, or t
cccccggccctcccctaatgtaggaagaaataaacaatcccagtttgggagtccctgntcctatgaactgntccttaagcctatatgtttcctcatagcagaatatttcaantcaaagactatttaaatttntttatttaaatttaaatttaaaaantcaaagaatatttacattcaaagattatgctcattagacagtgctnagcgatttgcttttgtgcaattatacttcttgttgagcacatgatctggggatncaacataaaattcaaaactttaataaaactatattctctgtctc

SEQ ID NO: 702414 - DNA, 419 bp, Homo sapiens
gatgccatctaacctgtgatcacagacaggccacctctcaaacgtggagagcctgtacataattacacatattgggtatgaggaaggccaggtagactgggtatgggaatcacagcaaacccatatcagttttcccacagacagttcccaggcaggatggcctggagcccagggaacataggtcccggtactgaattggcctagaaaagccttctgatctagccttatttctgagtcatgattgtcacactcccatgctccaggaagtaacagtactttttttcattttccttgtcccctccctctcttttaatctttgaggactacatctctgcttatggtgtttactaaatatttttgggtttgaattttgaattctaagatgcttataacactgggctcaccgtatcagccttaag

SEQ ID NO: 702415 - DNA, 171 bp, Homo sapiens
ccaatcaacatccaaccccaatcaacatccaccacccacggaatcgagaaagagctatcaatctccaatcaacatccaaccccaatcaacatccaccacccacggaatcgagaaagagctatcaatctgtcaatcctgggttggatgttgtttgggttggatgttgattgg

SEQ ID NO: 702416 - DNA, 597 bp, Homo sapiens
tcaggcttccttctccttcttttcctagccacccaaattttattgtgttattttcaacctaataaaagcaatggggggggctcatgcctgtaatcccagcatttggggaggctgaggcagacagatcactggagctcaggagttcgagaccagccggggcaacagggtgaaaccctgtctctaccaaaaacacaaagaaacttagccgggcaggggggcatgaatccgggtcccagcaactggggaggctggagggctagagcccaggggcccaggtggcagagatccggagatacatgccacttgcactccagcctgtcgcaaccaggagcaagagactcccatcctgcattacaaatcactacaaaaaaaaaatccacaaagagaatcttcaggaggcgggttggggggagagaaagggggaacaaaagaatggggacaaaatgggcgccaccggtggccacggaacacacgttctgtccggcctaccgcggggcaccatcgggggcgagccccccaaagacaacacccaataatcgaatccaaaaaaccccggtgaaccggttaacgtcctccaagctcgcacaacaacaaaac

SEQ ID NO: 702417 - DNA, 307 bp, Homo sapiens
  misc_feature (249)..(249): n is a, c, g, or t
gagccgcgcacattcagcttgtttctcatcgagacagaggacagcattctgttaagtttctgctgctgccatgataacagattttgttgtcacattctggctcccgcaggctgtgccccggacacaaagcaactctgtctttaccctcgtgagcgcagcttgggccataataggacttttctttcatttgtatctatttcttattggaagccttagatcatttattcccttccttacacttctagaggngaaagaaaacccaagtctgcctttgtaaaaccaagctgtggcctcaggagtcagggct

SEQ ID NO: 702418 - DNA, 529 bp, Homo sapiens
accttttaccagtatggccttaacttagtcaagtgtatcgatagctgaatattaattttggcagtcattgtttgatgctgagtgaattctgtatattactcttttgctcccgtgtcataatagctggtcgtgctttgtggatgtgataccttcttgaatgcaatattcacttgaatgcttctgaggctactcattagaatttttaaaagtctctcttttgttcctgaatcacctcttctttcttcaggtcagttgttagtccaaaagatgtcaatgatccctagttatcagtttacatttattaataaagaactaggttgcctaatacaagtagctggtgtgagttatagcactatgttttcttaaccactttatccccaggataacagggcatgatcactggcagacttcacccaaggcctcgggtgggagacaggcagcagggtgagcaggcagtacacttgcctattcctcaactccacaccaaaatgaggagggctaacttggggggtcatcactacagatccat

SEQ ID NO: 702419 - DNA, 156 bp, Homo sapiens
acagcctggtcaatttggacctgcaggcctcctacacctacctctttttggggttttatttcggccgcgatgatgtggctttggaaggggttaacccctttttccgcgaattggccgaggagaagcgcgagggctacgagcgtttcctgaagatgc

SEQ ID NO: 702420 - DNA, 569 bp, Homo sapiens
catcccccgtattatagtgaggagttgagcctaaccttttcatatctagggaaggcatactcaagggggtggggttgtcaatgaataaataatactagcatttaagttgagttcacctgttataatcaaccctagcataagattatgtttgttgcagaatcaatgctaacaggaatctgtacatgtgctgttattatacaatatccaagaagggagaaacctctggcaatctttctaagattttctaaggaaaagagccatttgcaactttagtgaccaatgtatccacagaattcattttcatttagtgacgggacaagcttagacctcttcctccactccccaaatacctgattttaatagcaaaaggcaatcactatatggtttctctagttatgtatataagaaataaggaaaattatttattttggcttctgtgaaactgaggaaacattacattttcttcatggtaatgcacatgtgaagcgattttcctcacaccagattctacttttctgtaattcagcagcacagctcccagaagtttcctgactacaaatgctatgggg

SEQ ID NO: 702421 - DNA, 174 bp, Homo sapiens
gcagcctggcccccaaatgtattcattcttaatttatgtaaggttttttttgtacgcaattctcgattctttgaagagatgccaacaaatttcggtgttctactgttatgtaagaacattaggccccaaaaacacgtcattgtgttttgcggcataaaagtgctgccgtaaaca

SEQ ID NO: 702422 - DNA, 224 bp, Homo sapiens
tgggaggtttagtattttaatataatacagttccaatcaatgtgtctgggtcatttcagttccttcactggcaaaccggggggcaaggactgcttcaatttctctggcttctctttgtcagtgatgaccagggtgtaaagggatctgctgcatcgaactttaaacttcacgttggccttatttttcttgatcttgacagatttggcatcccttctggcggcttc

SEQ ID NO: 702423 - DNA, 1331 bp, Homo sapiens
  misc_feature (435)..(435): n is a, c, g, or t
tatacgcaatgagggcatagctaatgccactgaccgtgtcgcgcgtatcaagagacttctgttgcagtccggtgcatgatctcgcagtgccgggagacgacgaagttgtgaccattacacagcggtgcccatctgctagtgagtcaactttgctgcgctcctcgtgacgcgagactgagtctcataacttggtttgccgtatgcgacaacgcttacgtcatccaggtagcaatcatgcatgctggcatatatgatgcggaataaaagttcgagagaagttccgctcaggaagatgatgctatgacaaactgttgggacttgatgtaacatttcaaagtgattgagaggggagcagtgcgcgtacttggagtcgtgcttttcaagtttggccatatgaggtagtcgcttggttgagtaagatgtgatgaaggacgntcgtgtgtacatcggggaaaataaggaagggtcgccaagtatcctgaataagaaatttaggcatcattagtaatttgtgagtcctttggaacggaaaaggtaaaatacccgtgggggtaattagacgcctttcgcaagcaatatatggtggagcgtactaggaaatttgccatacggcttgtgctaggagattgcaagaatgtggatagcaatgatcgtctaatggactcttggttcgttgagaacgctctcatttgcagcgggtacgaatagcaggggttagtgtgtcagggtacccgaagtgggtcatttgggaatatttcggagctgcggttattagctgaaagtacttaacacggcaaggtaaagaagctatgcgtaacttggtgaagaatgggatagccatgtacaagtcgtggatgaaagatattgagcttagcgtatcaggatcttgggatagtattagtgcagagacgagagcaattagggcagagatggggtttcaagtcaattgggggcagccaggcgtacaaggagggttattaataagggtggcgagtttaaggtactgatcaacgaagtgaagacataagtgctacagccacactgggacatagtacgacgaaggtgaaggacagacaacaagtcgcggagtgctggaactccacgcccgcgtaagagtgttagtgtggcttactgcggacctcacagcagttgattactgacgagtgaaataacgttgaacccaacagtggacggcgcaataactcgtgatcggtccaaacaatgtcactcggtgctcactcgacaccgtacagcatcgagaacgcactaacaaacgaaggctggggaaggtcgaggcgcagacaacagcgccagccggaccatgtcacgtt

SEQ ID NO: 702424 - DNA, 163 bp, Homo sapiens
cacctattgtgcagaagatcacctcatcgggcagaagatcacctatcgggcagaagatcaccttatcgggcagaagatcacctcatcgggcagaagatcacctattgtgcagaagatcacctcatcgggcagaagatcacctatcgggccagaagatcacctt

SEQ ID NO: 702425 - DNA, 821 bp, Homo sapiens
  misc_feature (1)..(2): n is a, c, g, or t
  misc_feature (4)..(4): n is a, c, g, or t
  misc_feature (16)..(16): n is a, c, g, or t
  misc_feature (21)..(21): n is a, c, g, or t
  misc_feature (46)..(47): n is a, c, g, or t
  misc_feature (50)..(51): n is a, c, g, or t
  misc_feature (59)..(59): n is a, c, g, or t
  misc_feature (247)..(247): n is a, c, g, or t
  misc_feature (331)..(331): n is a, c, g, or t
  misc_feature (375)..(375): n is a, c, g, or t
  misc_feature (544)..(544): n is a, c, g, or t
  misc_feature (591)..(591): n is a, c, g, or t
  misc_feature (600)..(600): n is a, c, g, or t
  misc_feature (657)..(657): n is a, c, g, or t
  misc_feature (685)..(685): n is a, c, g, or t
nntnaaaccaaacganccggncccgccccctgccaacacatttaannacnnaaacaaanacgccctccccctcacccaccgccagacaacctatcccccctgtactttttcctacaaaccgaaaggtagcacaccacactactaccacagattatttatcaccacaaccacaaacgaaaggcccgcaccgccacctcgccatttcaccccccccccacctcgggccctgatccagtcggcgtctatnacaccccccgtcgcagcagttgctatgtccgggtctttgccagcgttcgtgcttcttcgtcctaggttgacgtttctataatanataaaaggagatacaagtctagaggggtacgttacgaagttacnttgcgatcacgtccactaccgtctatttcacccttcacatttcgacacacattctctgtccgattttgttcgtgtagagtaaaaggagttataagtgacgtataggatcagtgcataggcgtgacggaacgacatcgacaataacaattactataaatgaatgagaatntctaattatataattacggtaacgatcagtaatcttatatctcttcntctgtagtnttacttctttgaatactgtgtctagaacaataatagtataatatctgtagtcactanccctatcctacgtctccacctccatgtnacttctcgaacatacccactccgtcacccacacacctcctacaactttcactctcctccacatctgtagtctcgcccgcgtacccctcaagcggtccacactccactcaacatagccccgccgcctcagcccctat

SEQ ID NO: 702426 - DNA, 1140 bp, Homo sapiens
  misc_feature (52)..(54): n is a, c, g, or t
  misc_feature (61)..(61): n is a, c, g, or t
  misc_feature (92)..(93): n is a, c, g, or t
  misc_feature (98)..(99): n is a, c, g, or t
  misc_feature (260)..(260): n is a, c, g, or t
  misc_feature (364)..(364): n is a, c, g, or t
  misc_feature (489)..(489): n is a, c, g, or t
  misc_feature (736)..(736): n is a, c, g, or t
  misc_feature (739)..(739): n is a, c, g, or t
  misc_feature (821)..(821): n is a, c, g, or t
  misc_feature (838)..(838): n is a, c, g, or t
ggtgtggcaagaaggtatgggtcatgaacagaaccaaggagctgcgctgctnnnagatgtnaccacttctgtggctgctaccccactcctgnngccgnnccctgaagctcctacatccaagtgtggagcgatgatgactcgtgctagaaagcgagcgaacattcctcgcactaacaggtgtagctgcccaggatggtgagatcctcaagtgtggtgaactactcctgagtgcgcttactgcacgggagagacacagcgtntaatacttactgtgctgacattctgcaccagtaagcacgtacggtgtagccatactgcacgtgaccgctgatatattgcttgcactgggggctccccaggatanagagggaagcaatgcctccctgaccgaaatttatgatatggcacaacaggagtcttcctgcagacgtcgtgaatgacttccgagcgcatagaatacgggcctagaaacatctggatggcgcgaanaaatgcccccgcgtgttcccacgtaggtcgaaacttcgtgcaggcgaatccatggtcacgttccactgttgcgacacgagacttttgggcgccatacctttttctgcttcttcatgcgtagtaccgatcggacccttcacgtcgtatccaagcggctcgttgtttgctataaccttaatacaatcattgctagcacacacacgaaatccgtcgcatagatccattgtctccgttcccatggactatntgntagaacatccatccgcaacatgtgtatgccgcattaacatcacaggcaattctgacccgtaatatgagcgatcaccctcccntgtgagaagcagcgacntggacctcgtcaaggactcgtttgcatgcgcgaagaactggtggctcgatgatgagcgtcgcgcccatattcgaggcatggaaggtggtcggctcggaggacgaatcaattctcggccgggggcaatgttggtgtcgctctactctagtgctaacttctcccgtgggaacgaccatatgtcatcggagtgttgcaacgtgacttcctctgaccaagaaacccaggagggtttgggatcgcccaaggaggctatcggggcgattccaaaacggagaaggaatcgccaacgatctcctcagcat

SEQ ID NO: 702427 - DNA, 113 bp, Homo sapiens
agcgagactagagaggatcccctcacagagtgcgactccatcttaatatatttaataataataataataatacaaccggctgggcacggtggctcacacctgtaatcccagca

SEQ ID NO: 702428 - DNA, 797 bp, Homo sapiens
  misc_feature (52)..(54): n is a, c, g, or t
  misc_feature (61)..(61): n is a, c, g, or t
  misc_feature (92)..(93): n is a, c, g, or t
  misc_feature (98)..(99): n is a, c, g, or t
  misc_feature (292)..(292): n is a, c, g, or t
ggtgtggcaagaaggtatgggtcatgaacagaaccaaggagctgcgctgctnnnagatgtnaccacttctgtggctgctaccccactcctgnngccgnnccctgagagtgtcctactcacatatgtggccatgatgacctgctaaagatcacacattcctgtcactagcgagtgtactgccatggatgggatgtcccagatgtgggactctctgatggcctacgacgagagactcaggctatctctcgttctttcgacttttgcccatgaatcactctgggtgtcctcgccntggcctgagatttgctgactgggactcaggatacagggagatgctcctgtccatttgatctgaccaaaagagttctgcgagtgggatgatccacgcaagataggtgccataatacttgactgggaaaatcccggtgtccagagggtttacctatcgcatgaagtgttcacagctgaagcgccctggagttgggctaggcccaatactttggtacatgtaagtccagtaatcgtcttcaccatcgcgatgcgtgacgagtgaacttggcgagcatcaatgccagtccactgttggaagggatacggggccgtacgttattagtctcagccttgtcggatggagtcaagcttccaggcctatatcttatcttgaaaggttcacaccagagaccttcgtgacattttctcctgctattgtgactcaccgaaatttgatcgctactacagcaacttgcctaatggggtaccccggaacgcactgggcctcagaatctgctgcagactgt

SEQ ID NO: 702429 - DNA, 258 bp, Homo sapiens
  misc_feature (43)..(43): n is a, c, g, or t
agcagcaatacgattttgccaatggaataaaagatttgggggnattcttgcacccccccccttccccaacccttcctcaaaagttgaagggatcccagcccctaggtgggcaaaggcagaccctccccaaagctctttagaaaaaaaacaaattggttccttgaaaccccccttatttatttttggtaagaatgcaagcgtggggccttttggtttttaaagtggggggctcacccaataaatcccttgaatctccca

SEQ ID NO: 702430 - DNA, 887 bp, Homo sapiens
  misc_feature (444)..(444): n is a, c, g, or t
tgggggggggtttcccccttttgggccgggtggttttggattcccggattggggggccggccggctgtgtggccccccaaggtggtggggggaatacacgggcttgtgaaccccacccacacgttggtctgcttggtcacatgtggctttgtggggagcacgaggagttctctcccttctgtgttcgcccgagggtgtggtagtttgccgtggcccaggtactcattgacacctcgctgtggtacatctctcctacttttcgtggggtctgcccaggtgtgatatctctgcgtgtgcccttcgacgccctccgtggaagtacaccggggcggaataaatcagtgtgtgggcgagcacaaatgtagtgcccacaccaaaaccactgtgtgacatctaaatattctttctctctctgaatatcttttgacaagtacagacaagacnaggagagatattttcccccacccagagtgttgtggcgcccagagcggtgtgggtctctctcaaaaacactctcgtgtgggccccctcaaaagtgtgacaacttcgtgccgtgccccctcgtgtgtgtgagaagtgggtcaacaactttgtgagcgagtgtcgcctaccatctcgagagggggcgtctacaaacaaagatgtgcgcttaaagacactctcgtggtgtaaaaacaccgctattaaactatcgcggcgagggtgggtcctgagaaagaggcagttttgagcccccacgagggtgtgcggaaaccttctctggaagttccttggtggaaacacgacagtgtcgcgggaaaaaatatctctccgccctccacaggtgggtgtccaacccaactccaatttcttcgaatggggggcgccccccagaagaaacattaaca

SEQ ID NO: 702431 - DNA, 1540 bp, Homo sapiens
atggcgctctaaggtatatcaatgcaaactgtatgtaaacgaaaggccttcaggatcgcatacaatctattccgacagatctgctattcggacatacttctcagtggctatgcggtgacgtagcgtgccagggagacgagaagccgcgcgatagacgaccagcagacagcttcattgtctcaatgagttttaggccacgtcaacatgcgagacttatgtatcatcgtacgagatcgagtgccaccttacatcattgatcccatagagtggagacctactggttaagcccgctgaagcgcgaatttacactatggcgtctaactgctatatttgctagatgtaccaattatgacaaggaaaagttagggtgtctagcggaccccatgcgcacttgctctagatagtgccacgaggagcaattgcggcccgtagttgaggtcgagcgacgaactgtcctcattggaagagagggtctaccggtttgtggatctcccatagcaggagtatgaaccacgggtgctcgttgcccagtgtggcacttctgggatgatcttcgagcgaaccctgtgaagtttgaaattgccaaagaggtacccgcgggtatatgcattagtaccttatctggtcattacattttcgcttacacgcctggtttatccggaaacagcgcatctaccaagtacgcaaaaagtaaaaggggtcacttcatcgtgtacaaccaatatacggctgaacgcagttatttcctgggaccagtaaaacaacataacaccaaagaaatagtacacagagagatggccataagagaaaaacgggggaccatatggtatttgaagacgcgtggacccaaattgggaacgcgcgcttggttaaggatggggcacatggggtacaaaccagaagaaaacttttggcacgaggggggaaaacgagaccaagggggacaaaggtttaccccaaggagtgacgaaatcacccaaaaacagtgggccaggtaagttacttccggaggggagcccagtataatgccagaaagggcgagagattaaggaaacaggagtggattaggttcacaatatggacacatggatttgaagagagggaattaaaagacaacaaaaaaagagagttggcaacaatgggttgcacagagatgtttggaaacacgcggagtatatagaagttgttagcaaggcacaaatggatagagggggcacttataggttcagacagtaaggtgtggggggtagggaaagacaattgtagagcgagaggttattaactattcacgttttatagaagagttatagctcgaacgtagtggaacggataaaagagttggcagattatattaggcaaggaacataggatacgcccagcgcggactatcggtggtggtgtagttgccgatacataggagatacaagttgatatagattagagtatcagttgttatgcgattgctaatttatttaaagcagtacagattgctaatagttagacagatagacagttaggagagcgccgaaagggaatggat

SEQ ID NO: 702432 - DNA, 502 bp, Homo sapiens
  misc_feature (4)..(4): n is a, c, g, or t
  misc_feature (76)..(76): n is a, c, g, or t
  misc_feature (121)..(121): n is a, c, g, or t
  misc_feature (449)..(449): n is a, c, g, or t
  misc_feature (488)..(488): n is a, c, g, or t
attncgggtttataattcctgcttgagtatggtggttaactcccttgtatttaggaaagatttcagattcatcccntctcccttagttttcctttttaagggtgacccccatctgtgatanaaatatagccttagtgctaaaatccagtgtaacttatacatggccctaaaatgtttcctacaaattagagtttgtcacttattcccatttgtaccctaagagaaaaataggctcagttagaaaaggactcccctggcccaggcgcagtgacttacgcctgtaatctcagcactttgggaggccaaggcgggcagatcacgaggtcaggagttcgagaccatcctggccaacatggtgaaaccccgtctctactaaaaatataaaaattggctgggtgtggtgcaggagcctgtaatcccagctacacaggaggctgaggcacgagaantgcttgagctcaggagatggaggtttcagtgagccgagntcacaccactgcac

SEQ ID NO: 702433 - DNA, 122 bp, Homo sapiens
ggaaccaatcccaacacaactggattctactgaaattaccacatatttgaggtccacaagcacaagtatagatctaatgcaaactgggctcagattagcagatccatgccaaaaaaaaaaaa

SEQ ID NO: 702434 - DNA, 143 bp, Homo sapiens
  misc_feature (66)..(66): n is a, c, g, or t
  misc_feature (139)..(139): n is a, c, g, or t
aacaacctgggcctgtgctgcttctatgcccagcagtacgatatgaccctgacctcggtttgaacngtgccctttccctggctgaaaatgaagaagaggcagtgatgtctggtacaacctgggggcacatagctgtggnaatc

SEQ ID NO: 702435 - DNA, 166 bp, Homo sapiens
aaaaaaaaggggggggggggtttttttaaaaaagccccccccttggggggttttttgggtggggggaaaaagggccccccttgggctccccaaaagggggggggggggggtttcccttggttaaaaaaaaattttttttttttttttttggttgccccccccccca

SEQ ID NO: 702436 - DNA, 171 bp, Homo sapiens
ccacaatgttcttgtgccatcatgacattggggagcattaactgttagatttgtgcttccaaatcactttttggcctctaagaatttcttgaaactcttataacctgccttcaattttgatcctttattccttctatttgtgaggggcacaagaataccttcctgcattag

SEQ ID NO: 702437 - DNA, 195 bp, Homo sapiens
ttttttttggtttcccttttaaggggaaccccctggaggcccacgctccccttgggggggtccgccccccacccccttggccccgttttttttaatttggccccccggggggggggcccaaagcctgggggggggggttaaggccccccccccgcctcccggcaggatccagggccggaaaaaaagggtttttta

SEQ ID NO: 702438 - DNA, 395 bp, Homo sapiens
ctctgtgaaatcatggtacagtcactgcccagaggtactgaggaaaatgtactatgggattggcaaacggtggcggtaaataatcagcagttgttggcaatgcgagctcggcttctgtggcgccactgtgtgaagtgcagctgcagaagaagcaggagcgccaggaacgtttgtttaatgtcactctctgcttccagatgataatatatactagatggcaagaaatgagtcctggagaagtaatgtatgggagagtttaaaaaacacactaaggaaaggatgacaatgtgaaacttgtttcagtgtgtaaggctggagccccttaagagcctactgccccgtggccacatttctctcagaagcagaaacccgaggacgtgccatagagtggtggc

SEQ ID NO: 702439 - DNA, 311 bp, Homo sapiens
gatacgcttgtgccaggtcagcgttagtgcaggcatctcagctctcataccagaatattctctccaacaaaaatgtagggattgcaaacaggatatccatcagctcattgatgcaggccaggcacttcccccaaatcactggctacatgtaggttgccaggaaggggtagtagtcatagagagaggcgactaatattgaacttgatcttgacactgacgccctctcccaggttgttttccgctgcaatctgacccagcagttgcagcagctcaatctgggcagcacgatcagtacccttcttgcctcgtgc

SEQ ID NO: 702440 - DNA, 228 bp, Homo sapiens
tgactctagaggaccctcgcttttgataggaccaacctgcctcttccccctctcttctcgattttagtaaatgccacgccacatatatttgcctaagtcagacacccatcttcaactttcctttttctcatatattcaatcaatcactaagacgtctcagttgtacctattacatgtgtctcaagttcacccaactctctccatcctgaatagcctatcaaaagacga

SEQ ID NO: 702441 - DNA, 240 bp, Homo sapiens
ataacatcgtatatgagtgtatcctggcgtgagctggagctactttgatcctaaagccagtttcaaatgagcaaatcggatgtcatttgccttttatgtaacctttaaatgaaataattttcatggtcaattttcttatttagattattattccaccttaaaaatattttggtttaaaatccaccaagaatatgtattctttaaataaagataatttatgatcatggtataaaaaaaaaa

SEQ ID NO: 702442 - DNA, 542 bp, Homo sapiens
  misc_feature (262)..(262): n is a, c, g, or t
  misc_feature (264)..(264): n is a, c, g, or t
  misc_feature (279)..(279): n is a, c, g, or t
  misc_feature (390)..(390): n is a, c, g, or t
  misc_feature (430)..(430): n is a, c, g, or t
  misc_feature (511)..(511): n is a, c, g, or t
gccactgtttggttatttttgatagtttaagagaattataaatcaagttgttctgtctactagagtcagaaattctgtgctagaatgggacttgaaaattaggtggtcctgtcactttctagagaaagacccaaattcataggtttaagtggcttgtctgacatacacatacagccagttagtaacagaattcagaatagaatagagttcttttttttctgtcagtccgttgttctacttctcccctttgtccccttttttntntcttttccaatgggntctggagcagcttttggcaaaatgtgttccatatagcagtagttccaagagatgttaatagatgtaagaaaaaaagtcgtgagtgatgttggaggagtgcggaggaattcngcatggtcaattaaaatgaaggaatgctgagtttgtttcncttacttggctaaaggggaacttctaagagttttgaacatgctattacacattgtgaatttataaaaggggacaaacactngtttggacccttagactgcactccccttctt

SEQ ID NO: 702443 - DNA, 442 bp, Homo sapiens
  misc_feature (171)..(171): n is a, c, g, or t
  misc_feature (175)..(175): n is a, c, g, or t
  misc_feature (209)..(209): n is a, c, g, or t
  misc_feature (216)..(216): n is a, c, g, or t
  misc_feature (218)..(218): n is a, c, g, or t
  misc_feature (220)..(220): n is a, c, g, or t
  misc_feature (433)..(433): n is a, c, g, or t
ctgatggtgcaaaaacagcaggaggcactttaggagcaggcggctttggagcctaagctggacctgctactggagaagaccaaggagctgcaaaagctgattgaagctgacatttccaaaaggtacagcgggggccctgtgaacctgatgggaacctttttgtgacacccnccgngtttttgccggcccattttttccgcttttgggangaaaatnananccagggctgttgttttggggcccttcaaggcaaaagaccaggctgtctggaaaatggaaagccccaggaaggaagcggcccctgatggtgattttggccctctccatgttttttacaaaaagctgtggggattggccctgtggtctatcaggcgaaaaccccaaattttccttttagttagtaaagcgggcttaataaaaaaggaaaaaactnttgcttcca

SEQ ID NO: 702444 - DNA, 899 bp, Homo sapiens
atagaaaccggtctgaacgtatcctgcccgcgcatcatcctagttcctcatcggcctcccatccctacgacatcctttacataacagacgaggatcaacgatcccgtcccttaccatcatacattcaatgggccaccacatggtactgaagcctatcgagtacaccagacatagcggtcggactaatcttcaacgtcctacagtacgttccccccaggcctgtgtggggggacatgacctgccttgagaaggggcaccacataccccgtcactgccacggtggccccggtaagggaagctcgtaggcctgggactttccccgcgtggccccagaggatgaggtcatttgtgaactcagatacgtgattcggtctggcccctcggcctcggcgggttcttcggcggcggtaggtcgagcccctggagtgccccacctgtgggcgctcctactagtgtgcacccagcggatggccccgggtgctgtcctgcctgcactgctgtgtgtgagtcgtgcctgcggatgtctctacgagtcctgctcctaggtagcaagttcatctcctggccctacctgccggcgtgagattgtgctcttcagcgagtactggcctggtcgcgtctgggctgtccaacacgtggcatcctgagccgcctgcccggctgaggcgctgaacggcaccatccggggtcagtggggggctgagcccgaagggaggtggtaccaagacccccggcggacgtggttgggccggtttacctgcccgttgtggaccacttgtcgggctggcctctgggttcgcctgcgttgccgcgatgccggtgactcgcccgtttttgggaccggcgcctgggggggactctttccaggttgccccccggtttttctcctttcctaactg

SEQ ID NO: 702445 - DNA, 1036 bp, Homo sapiens
ggagagaggtcagttcggttcagagcgactcagcccctcgactcgggtcttaaaacctccgagccgccagttctgcctcagtgccgctgccccctataaagctgccacgcagactgctgcggcccctgttaaatgctgcctaccagactgcctgctgcccctgtccctgtgcctccccctgctgctgcgtggctgctggtgtgctttcttggtgccagggctgggtgcctgtgctgaacttgctgtgccctgtgaactggcttgagtgaagtggccctgtccctgcacttcccctggctgctgccactggatgcccctgggctgtgttgcatgaatgcctgtgtgagacgtggtgcaggacggatcgtgacttattggacacgctctgacgtgtcattacagaccagtgatgcactctccatgagctttcaccgttctgattgattgccgcagacagtgagtgacccgtgaatgagaactcgagcgagagcatgcattgtgtcttcctgtaccatgagacacaaggagcttagcacagaccattccctaccagttgatcatcatgtgcttgcaagagttgtcacgatatcacttgtcgccgtggaaccgcagactggacttgtgaccctgttcacctaggcccgcctagacagcctgcgaggccacgtatgagctcatcacagcgccaattgcgggcatgaagtcccccgagggttccatctttactgtcccatgcaaggtatgaccattgtgcgaagactaatggcagcagcacgctctccatcgagacgcctgaactcgggaaccctgtactgactgatggcagcttctttctgactcccacattcaggaactggttgctggcttccaaggaggactatcctttgggggtggaaaccgtgggggaaagccacagtccactgggaatccacgaacacggcccccactttctccatcctacgaaaacccgttctcattgaagtcgcagtactgtccatgaatttgccttctggatccagattacttcatcatcctg

SEQ ID NO: 702446 - DNA, 335 bp, Homo sapiens
  misc_feature (138)..(139): n is a, c, g, or t
  misc_feature (294)..(294): n is a, c, g, or t
gtgtctagagatccacgtaatgtacatcatgtactttagaaccaatgaatacactataaaatagtatattccagcaaataatgatagagacatctggagtatttatacatattataaattatgaatgctatcatttgnngggggaagatttggcaggaaatgagactgaagctgtcatatagttttggctagattgtagttataggatatcgttagactttatttatccatgtactctcttatctgttattagggtaacttaagatttgaccaggatttgtttttggatttttngggagcgatgggaaacgttctgcatcttgattgtggtgatg

SEQ ID NO: 702447 - DNA, 150 bp, Homo sapiens
agaaaacgcaatcatcaggcaaaagcgaggcttgagtgaccactatgaggcagaagatgggcgtaagagacaatcctgagacagggctggtgtagagagggcccaaaagaggccagtattgggcagtggccgcgcccctcagggcctacg

SEQ ID NO: 702448 - DNA, 105 bp, Homo sapiens
ttttttacaccaaggattttttaaattaagaagatgggcaaagcaggctttcttttcagaatcaaaatgcagaacaaatcggaaaaattatggtattaacctccc

SEQ ID NO: 702449 - DNA, 130 bp, Homo sapiens
tttcttgtcgaggcactccatcgtatccgtaacagaatcggccatgtcgcccatcgcgatgaggagcgcacccttgtttttgagaatgccgccgaagtgtttgcaggcgccgttcttcgggtcggctttc

SEQ ID NO: 702450 - DNA, 182 bp, Homo sapiens
aggatacctgtaactatatatatatataatgtgtgtagtatgtgtgcacgtgtatgtgtgtataacgtgtagatagctcccttccccaaagatcagctgtttcctatactcatctgtattagtgtcaacaaacggctacagatacatatttctatatgggtagtccagtgggtagtcacaga

SEQ ID NO: 702451 - DNA, 163 bp, Homo sapiens
  misc_feature (10)..(10): n is a, c, g, or t
  misc_feature (44)..(44): n is a, c, g, or t
actctgtttnaaaaaaaacaaacaggaagtgaattattggccangtgaggtggcacgcttacagtcctagcactctgggaggccaagacaggtagattgcttaagcccaggagtttgagaccagcctgcccaacatagcaaaaccctgtctctactaacatta

SEQ ID NO: 702452 - DNA, 560 bp, Homo sapiens
cagtcttgggaggcagagatggaaggattgcttgatcccaggagtttgagaccagcctgaggcaacataaggagacgccccgtctctacaaaaatatacaacaaatcaaaaaggcatgggattgatggtacacatttttgtcccagctacatcaggaggcatgacgcttgggaggatcacgttgagtccaggagggcgacggctgcagtgaaccgtgatcaccatcactgtactccagcctgggtgacagagtgagaccctatctctaaaaataaaggccgggcacagtggctcatgtctgttatcaccagtcacttgggatggtctgatggagaggtggatcatgaggatcgttagacgcggctacgacttacacgtagacacactgtatatacagatacgactttaggtacactagtagaactctgagatccatagtttgtacaatagacaggcgttgtagacgacggacagacctataccggtcacagtaggggctagtcgcaaactcgcacgaacatgtgctctgagcttagtatcataactggcagtaaaatctc

SEQ ID NO: 702453 - DNA, 622 bp, Homo sapiens
  misc_feature (522)..(522): n is a, c, g, or t
  misc_feature (547)..(547): n is a, c, g, or t
atttgagcgactcttctaagatgaacattcgcaacatcaaactaggtacaaggtctcggaaggggccctgcttattaagctgtcttagcgtcacaatacgtccggatctgctggcgcttgctgacgctccagtgagggaatcttaggctaatacgattggaagagcgagctgttagggcagagcatgaccttcaccatagcctctcttatctcacatatggatgaacatgaggctccgagtcagcgcatgatcattgcatacctcacaagcgtgaatgtctgggtatcggccaacctatgactctggagggtggagacatgctagtatatcattgaggcaggaggctgtaccctaggcattctgagagggcttactctacagctgtgtgtcagagagcctaatgcttttcagcatcggtaggacactagacggctagtggtctctgcctgagctggcgccatagtgcaagcaggatgcctgctggacgtgtgccgtgctgaatgtgtcgtgattggcgtgtntttgcatgagatgcacgtaggcttncgtgcgtacaagtgggtgtaagactttgcgacttgcctacgtatgccaccatttcatgcgaccctgtctgccggc

SEQ ID NO: 702454 - DNA, 478 bp, Homo sapiens
cccgtagcacttccttacattcaaagagaataaaatacctaggaatccaatttacaagagaggtgaaggacctcttcaaggagaactacaaaccactgctcaatgaaataaaagaggatacaaacaaatggaagaacattccatgctcatgggtaggaagaatcaatatcatgaaaatggccatactgcccaaggtaatttatagattcaatgccatccccatcaagatactaaggactttcttcacagaattggaaaaaactactttaaagttcatatggaaccaaaacagagcccgtattgccaagtcaatcctaagccaaaagaacaaagctggaggcatcacactacctgacttcaaacaatactacaaggctacagtaaccaaaacagcatggtactggtaccaaaacagagatatagaccaatggaacagaacagagccctcagagtacaggaaggttggtacaggaagagg

SEQ ID NO: 702455 - DNA, 492 bp, Homo sapiens
tagaggatcccactggatgttataggcaaaggtgttgtaattacatgatgtcaaataggacgtaatagcataaggtcctggaagacaaaggtgttgtagattacctgatgtccaaataggaggtaatagaatacggtcctgaaagagagggctgtaaattacctgatgtcaaaataggaggtactagaataaggtcctggaggacagggctgtagattacctgatgtccaaataggaggtaatatcatacggttgctggaagagagagggcttaagataacctgatgtccaaataggaggtactatcgtacctgtgctgtaagagagagggctgtagattacctgatgtccaaataggatggacatagcataaggtcctggaagacaaaggtgttgtagattacgtgatgtccaaataggatgtaatagcatccggtcttggaagagaaaggtgtagcacatcacctgatatcccaataggcaggtactaga

SEQ ID NO: 702456 - DNA, 194 bp, Homo sapiens
atccagggactcgtccgtgccgcgcagagactccaggtcgcacgtcaaggactgcaactggcgccggtagtcgtcggcttcgtgcttggcctggcggagcagctccgcgcttgcgggccgcagcgtctgtcaggtctgcaccccttggagcggcacccctcttcggcttcatgcatgttgctggacgccattgc

SEQ ID NO: 702457 - DNA, 107 bp, Homo sapiens
ctgcaggtgactcatacaggatcccggcgtgcgctggcacttacgcctggatcacttcgctttggtctctcctcgcaaagtaatttctatttcattcattatgcaaa

SEQ ID NO: 702458 - DNA, 431 bp, Homo sapiens
cacgagtcggagtttgataccagcctgggcaacatggtgaaaccccgtctttgcaaaaaatacaaaaaattagccaggcacagtggcacctgcctgtagtcccagccactcgggaggctgaggtgggagaattgcttacacctggaaggcggaggttgcagtgagcgagatcatgacactgcactccagcctaggtaacagagacagaccttgtctcaaaacaaaaaagcaataaaagatctagctaagataattaaagaaaatggctataataaacagatttttcagtgtagatgaaacagccttctattggaagaagatgtcatctagaactttgatagctagagagaagtcagtgcctggctgactcttgttaggggccaatgcagctgacaactttacgttgaagccagtgcccatttaccattctg

SEQ ID NO: 702459 - DNA, 360 bp, Homo sapiens
tttttttttttgagacacaggtttactgtttcccaggctggagttcagtggcacaatctcagctcactccaacctctgcctcccaggttcaggcgattctcacgcctcagcctcctgagtagctgggattacaggcgtgtgccaccatgcctggttaattttttgtgtgttattagtaaagatggggttttgatatgttgttcaggccggtcttgaactcctgacctcagttgatctgcctgcctcggcctcctgaagtgctgggattacaggtgtgagccactgcgcccagcctccaattgcaaagatgtattaagaggtggaaccttttggaacttattaggtcatgaggcgtcgacg

SEQ ID NO: 702460 - DNA, 341 bp, Homo sapiens
agcgaaaggttctctctccaggctggacttaataactttgaagctgtccaccggtgtcacgtcctgaacatgagcctcctcctctccttctacctgctggggttgcttgtcagtagcgggcaaggtaggagtgtggcgctttattgcatttactttccctcccccttccacccggccaagagaggcaaagagggaggcgcaggaagaatgaaatgaaagaactaaagttacagttattgctgttgttgttattattattttcgttctttctcctagctgtccctaaaattgtatctgttgtgtggagacccttaaataagagaagggaaaatacagaattg

SEQ ID NO: 702461 - DNA, 871 bp, Homo sapiens
ggcggcgccggctggacgctgtagtggcttcgtctcggtttctcttccttcgtaacgcctcccggtctcgtaagcctcccgccggccgtctccttaacgccgaacaccatgccttcaataagtgcagagtctgatggagagatattgagttgatgtggaattgccaaacactctgtgactattaagaccatgtgggaagattcgggactggctgatgacggagatgatgacccagttcctctaccaaatgtgattgccgcattattaaaaaaatggtctttcagtggtgcacccaccaaaggatgaccctcctcctcctgaggatgatgagaacaaagaaaagcgaacagatgaatatcccctgttgtgggaccaagatttcctgaaagtttgaccaaggaaccactttttgtgaactcattcctggctgcaaactacttagacatcaagaggtttggttgatggtactgcaagacttgttgcaatatgatcaagggggaacactcctgaggagattcgcaagaccttcaatatcaaaaatgatttacctgaagaggaggaagccatgtacgcaaaggaaaccagtgttgttgcagagcagttgcaatgtgtgcctgaacactgtacactgttcgctgttcaatactaagtgcctgctctgtttatgtattttgaccaccgtcgacaatgcgcgcagtcatgtttagcgaatatgtctctgctttgtgtttgggcgatccacttgcgagttttaatggaaggtttttgtgcacaaggaggggtctttaaaaaaaaaaaatgtggcggccgaaaatgggcggagatatgtcattttttctaccgaatgactacaataaccaaaaaaaaatgg

SEQ ID NO: 702462 - DNA, 703 bp, Homo sapiens
  misc_feature (603)..(603): n is a, c, g, or t
  misc_feature (647)..(647): n is a, c, g, or t
  misc_feature (685)..(685): n is a, c, g, or t
acaggtggatcacttgagcccaggagtacaagaccagcttggggaacagacgaagctctgtctctacaaaaaataaaaaaattagccagacatggtggtgtgtgcctgtagtcctagctgtttggggggttgaggtgagaggattgcttgagcctgggaggttgaggctgcaataagccatgatcacgcccctgtacttcagcctgggtgacagagtgaccccttgtctcaaaagaaaaaaaaaaagataaaagaaaaacttaaaagagagcaagtaagaaacaagaatacagttaaatacttagaaaggcatctttgaaaaaaaggaaaattaaatattgttttgaaaacctggtttaagtttagatggatagaaaaaaataaaggaaaaaaagataaaatagctcttatatgtaaaatctcataaaagctcttatacatgacaaattgtcaaaataaaatgagagactacagtctggtatgataatatttatgggcaacataatagactgagatatgtatccaatatataaacagtttacttttatttcttgtttggaatatatttcattcttgttttttttttttttttttttttttggngaacagtcttgctctgttgcccagggcagaggttgcagtgagcngagattgtgccattgcctccagcctgggtgacagagcnagattctgtctaaaaaaa

SEQ ID NO: 702463 - DNA, 233 bp, Homo sapiens
cggcacgagaaaagcaataacaacaaaagtccatccatattgtagcttgtgtccgtttacgttaagtattccttacccaaaatgcttgagaccagaagtgttttggatttcagatgttttcaaattttggaatatttgcatttacataatgagatgtcttccagatgggacccagagtctaaccacaaaattcacttgtttcatatacatcttatacacatagcctgaaggta

SEQ ID NO: 702464 - DNA, 261 bp, Homo sapiens
cgtagtaatcaccgataatactgatggagggcagctacacaaagtgtactggccagggtacatccccgccgagatgctacaccttcttcattgacatcctgctcgacactatcaggcatgagatcgctgggtgcatcgagaaggcctacgagaaaatccttttcactgaggccacccggatcctcttcttcaacacacccaaaaagatgacagactacgccaagaagcgagggtgggtcctgggccccaacaactactaca

SEQ ID NO: 702465 - DNA, 1151 bp, Homo sapiens
  misc_feature (472)..(472): n is a, c, g, or t
gactccatttcgtggacgccgtgtgagtgtgagagttggttggtgttggcgccggagtgagagcgtggaagactgtatcgtgtagcctgtgtgtgattctcgaatgcctgtcgcatttgtgttcacaccgctagtatcgtctggataatgtccgatcgtgtattccatgtcccattgggacatgttaaggtttattgttaggctaatctttggtaaacgaatggtcaacatagacgtgaagttggaatctgggcctttttggtataacgtactagagacacagctacgcgaaaaggtggtggatgtgagatatggcataagaaagagtctcaggctcgaggatttatggcctttatctcgttttgatactttgtggagaagtatcctctcgatgaattgcaagttgcatttgtcatgttgccgatggaggctatgatttgggacacgaatccaactaatgttggcgtcctgncccgttggtaagggacgtttgcgtataccctggtgttctggatattggcgcttgagataaagactgatacgtaggacatactctggtggggcgcccactcgtcacacatactatgtggggggtacggtccggcgcccctccgactgactgactttattcggtgatgagaggcggaggggtcccctgcgcattgcgttcgtgtcggccaaggaattcgtgcacgggtaaacgtggatgaaagtccatttgcgtcttcgtgcacggtgcccggtaggcacgtgttacccctgtttgtacttgagaatgatttagggacgaaaccgacgaggaagactcgccctgttcttcgggagaagcaacgcaaatcaccaaagggcgcaggatcaccctgaaaatcacttttcttccgataagggttccttcgataaggatcctgatatcgtgagggtgctaaaacttggattaaggggaaacattgaagtaaggagaacaggtttgggtggcacgtaaggaaaagtttgggttggtaccaggggagacagatttaccttttcttgtttgggaaccaccggaaggtaattgttaccaagaataaggatttcagaaggttttgtggttttggaacacaccctttctcagttaatgccttttgggatgccatttttttcaaggaatggtg

SEQ ID NO: 702466 - DNA, 162 bp, Homo sapiens
ccccatctctattaaaaaaaaaaaaaaaaaaagcccaggcaaggtggcaggtggctgtaatcccacctacttaagaatcgtttgaacccaggagatggagattgcagtgagccaagatcacgccattgcattccagcctgggtgacagagtgagactgtctc

SEQ ID NO: 702467 - DNA, 813 bp, Homo sapiens
  misc_feature (11)..(11): n is a, c, g, or t
  misc_feature (64)..(64): n is a, c, g, or t
  misc_feature (100)..(100): n is a, c, g, or t
  misc_feature (104)..(104): n is a, c, g, or t
  misc_feature (107)..(107): n is a, c, g, or t
  misc_feature (110)..(110): n is a, c, g, or t
  misc_feature (115)..(115): n is a, c, g, or t
  misc_feature (122)..(122): n is a, c, g, or t
  misc_feature (131)..(131): n is a, c, g, or t
  misc_feature (152)..(152): n is a, c, g, or t
  misc_feature (216)..(216): n is a, c, g, or t
  misc_feature (230)..(230): n is a, c, g, or t
  misc_feature (238)..(238): n is a, c, g, or t
  misc_feature (271)..(271): n is a, c, g, or t
  misc_feature (298)..(298): n is a, c, g, or t
  misc_feature (345)..(347): n is a, c, g, or t
  misc_feature (368)..(368): n is a, c, g, or t
  misc_feature (402)..(402): n is a, c, g, or t
  misc_feature (411)..(411): n is a, c, g, or t
  misc_feature (431)..(431): n is a, c, g, or t
  misc_feature (458)..(458): n is a, c, g, or t
  misc_feature (484)..(484): n is a, c, g, or t
  misc_feature (496)..(496): n is a, c, g, or t
  misc_feature (514)..(514): n is a, c, g, or t
  misc_feature (527)..(528): n is a, c, g, or t
  misc_feature (532)..(532): n is a, c, g, or t
  misc_feature (559)..(559): n is a, c, g, or t
  misc_feature (562)..(562): n is a, c, g, or t
  misc_feature (571)..(571): n is a, c, g, or t
  misc_feature (574)..(574): n is a, c, g, or t
  misc_feature (587)..(587): n is a, c, g, or t
  misc_feature (589)..(590): n is a, c, g, or t
  misc_feature (594)..(594): n is a, c, g, or t
  misc_feature (599)..(599): n is a, c, g, or t
  misc_feature (622)..(622): n is a, c, g, or t
  misc_feature (625)..(625): n is a, c, g, or t
  misc_feature (634)..(634): n is a, c, g, or t
  misc_feature (637)..(637): n is a, c, g, or t
  misc_feature (668)..(668): n is a, c, g, or t
  misc_feature (725)..(725): n is a, c, g, or t
taatgcctcancatcccaagtagctggaattataggtagtgcacatctcacctgattaattttnatatttttagccgagatggggtttcaccatgttggnccgnccngcntcggnctcctgncctcaagtnatccgcccgccttggcctccnaaagtgttggggttacaggggtgaaccaccgtgcccggctaacattttataactttgacttgcnaaagtatgcgatgnggtcagtngccttcaccccagattttaacactttggggaanggggctttgtggtcttccatgaaaaanacaaaactaaagataaggttggggagatgacaatgtagtgggaaaannnggggaaaatgaaacacctggntctagaacctggaagtgtctcttagggtattttnatttatgcncacttggggcttccaatgcntccggagggcttgagaaatactttttnttgctggtgtgagctgactgggtatnattattggggtnacggatacgaatgatgtntacatataaatgnngagnggactggaaagattcctatcaagctgngtnaaaagaggngtntactgggtggggngnngggnagggnctttgttttcttctaatacaggngtnccaattgcntgnggtgaatgtgggcggtgtgggtcgaggagcnacactcttggctatgggacctcttcatctgtctgcatccctgctgccctcgtgccancgggattggccagcataataggcaaaccataaagccatgtgatctttgtagttcctccattaactaaatttctatgattatcttacag

SEQ ID NO: 702468 - DNA, 742 bp, Homo sapiens
  misc_feature (9)..(9): n is a, c, g, or t
  misc_feature (100)..(100): n is a, c, g, or t
  misc_feature (124)..(124): n is a, c, g, or t
  misc_feature (169)..(169): n is a, c, g, or t
  misc_feature (178)..(178): n is a, c, g, or t
  misc_feature (235)..(235): n is a, c, g, or t
  misc_feature (271)..(271): n is a, c, g, or t
  misc_feature (282)..(282): n is a, c, g, or t
  misc_feature (322)..(323): n is a, c, g, or t
  misc_feature (333)..(333): n is a, c, g, or t
  misc_feature (380)..(380): n is a, c, g, or t
  misc_feature (402)..(403): n is a, c, g, or t
  misc_feature (410)..(410): n is a, c, g, or t
  misc_feature (436)..(436): n is a, c, g, or t
  misc_feature (467)..(467): n is a, c, g, or t
  misc_feature (554)..(554): n is a, c, g, or t
  misc_feature (578)..(578): n is a, c, g, or t
  misc_feature (581)..(581): n is a, c, g, or t
  misc_feature (590)..(590): n is a, c, g, or t
  misc_feature (622)..(622): n is a, c, g, or t
  misc_feature (655)..(655): n is a, c, g, or t
  misc_feature (658)..(659): n is a, c, g, or t
  misc_feature (670)..(670): n is a, c, g, or t
  misc_feature (732)..(732): n is a, c, g, or t
caagatcgngtcaatgtactccaggctgggcgaaaaggggagattttgtgttaaaacaaaataaaaggaaaagaagagaaaagaaaaagaaatggaggtnccttgaaattgaaatttgttaggnccaacaagctaacgacagatgaatttgcggggtcctgcgagaganacaccagcnccgccgccacagcacagggttctggaggtggaggtgttttgggggttttgggggggngctgggaagagagggggcccgggtagttttgttgtnagggggttggnggaggggggggcttttttagttcagtgctgccgccgtcgnncgggaacgcnaggtttactccagctggggaaggttggaattttttagattggggatntgtttgttgttgcttcgagatnntggtggntttggggtaggtgttgtgttgtgatngtgagtttttagttttgggatatgttggtgnttggtgtttgtgattggttgtggttggtgggttgttaaggtttttttttttttggtgttattatagtgttgttatttgtttctggantgtgagatttttgagggttttggnttntgtgatttncgtgccacatgtgccgtgacagcaaaaacgcncgctccgcgccgctggtgaaagagctaaagaangcnnggtgctgcganagtgaacacgggaatagaagggctcggatggagaatggggaggccagagcaagcaggaaaangttttgtttg

SEQ ID NO: 702469 - DNA, 527 bp, Homo sapiens
  misc_feature (2)..(3): n is a, c, g, or t
  misc_feature (487)..(487): n is a, c, g, or t
tnnaaggggcgagggggggcgcggatattccgaagatgcgcgagggatgtgatctcctccatacgggactttctcatctacgggggcctcctgcgaggcagggaggggctcccgggcgtggggcgtggagaccaggggggaggtcaccggcgggcaccccttaactctaagggggcatgggggccttcgaactggggtgagcgctccatttatcttaaagaaattggacagcgtatgaaggcaggacatcacatatgaatgcgcgatatgaagaggctgggtacaggttcgactcctctctggaagggaataggcccagaaggggggaagggactctttggagggacataaaattctggttggtaagaacaaggttggctctgggaactggccttcaaaggtaaaatatctgggacggttggcctctggacatactgggataagtggaaataatggcaaactccggtttctagcagggttaaggggnctgggtctgaaagggcactggcttggcaggcatttctggt

SEQ ID NO: 702470 - DNA, 180 bp, Homo sapiens
tggggtctcaccatgaggcaggatggtctgggatctcttgaccttgtgatccacccacctctgcctcccaagagtgctaggataacagggcgtagagccaccggtgcttggccagtcggcctggctaattttggtatttttttggtaagagacagggtttcccgatgttaccacaggctg

SEQ ID NO: 702471 - DNA, 596 bp, Homo sapiens
tcatttgagacggagtttcactcttgccgcccaggctggagtgcaatggtgcggtctaggttcactgcaacctccgcctcccaggttcaagctattttcctgcctcaacctcccaagtagctgggattaccggcatgtgtcaccaagcccagctaattttggtatttttagtagagacagggtttctccatgttggtctggctggtctcgaactcctgacctcaggtgatccgcctgcctcagcctcccaaagcgctgggatgagccaccatgcccagcctaaactttattttctcaggccttcttctaaatattacatgttactctataaaagtctcacctttttaaaagacctatttcaacgtatctaacagcttttatgcaagaatgaagaaaggtttctttggtcttctcagatgtgctgccatgcaggtggctgatgctgatcaactcccttattagctccaggggataatctccaggctcttttggattatccatgtagttatgtcatctgccgataatgacaatggacacttccacacttttattgccttggaaatccttgggcgtgacctggactgatgagtagaggg

SEQ ID NO: 702472 - DNA, 93 bp, Homo sapiens
gaactgaggcgcactacggccattgccttggacaagactcttgccacaaggcagggcgggtctgtgtcccatgtgtcctctcagtcccctcag

SEQ ID NO: 702473 - DNA, 241 bp, Homo sapiens
ctgcactgacatgtcatgcacccaagtttgaagctatttaagtttaaatgacacaatgcattacttcaggtaaatggaaaacaaagaaaactctgatctcaaaaaaaaaaaaaaaaaaaagatttctgttccctaaattcatccacttggtttcctcgcatggtaaatttcctctctatttggttctgacaaacccaggttcaggggcctgtgggaagacttttgaccagcgggcggggaa

SEQ ID NO: 702474 - DNA, 595 bp, Homo sapiens
tcgagctggtaccggactgagatgtctgagtggagatggaatctgctctctgagagagttggaatcattggtttgaaatgtgatgaaatcactcaatgcaatgaaggtgggtgtgtatggtggggagtactttgccataatattttaaaacattacctggttagagtacataagtggtacttattgttgtaaggtaaggggaaagcctgaataaaaacagaaatggacacataatatgcatattccatagtactcagggaggctggaatgtgcctggaattcgggtctaagtgtatagcgtattcttaccctacactaaagaatgtggcttgtccgtgctccttttggtgagtgactaacaacgtctgggcttccctgtgtgcgtgctgacagcaaaggcacgcagagggctgtgcaaacggtgtgagcagggatcacggtgcaatctggaggatacatcttggcttgcaaactgcctctgtctcctgggtgggactgttctgtccttgcactgctgttctgtgttacctcttggggtgtaacggttttgcttacaggagacaaactttgggcgtagaatggaagccactgcagc

SEQ ID NO: 702475 - DNA, 419 bp, Homo sapiens
  misc_feature (24)..(24): n is a, c, g, or t
  misc_feature (41)..(41): n is a, c, g, or t
  misc_feature (59)..(59): n is a, c, g, or t
  misc_feature (144)..(144): n is a, c, g, or t
  misc_feature (169)..(169): n is a, c, g, or t
  misc_feature (195)..(195): n is a, c, g, or t
  misc_feature (220)..(220): n is a, c, g, or t
  misc_feature (345)..(345): n is a, c, g, or t
  misc_feature (409)..(409): n is a, c, g, or t
  misc_feature (419)..(419): n is a, c, g, or t
tccttcgggagagacgcagggtgnggcggcctgacatcagnatggcttcctgtcaggcngagcatggcccatcaacagccccgggcccatgtccccttcggcaatgaaggggactcccagtactacccctcctactccggcagntccggcggagagcggcagacggcancatagacacgcagcccaagaaggtcnggaaggtcccgccgggtcttcatcntcggtgtaccacccagctcaggtgaggactacggcagggatgcaccgcctacccgtccgccaagacccccagcagacctatcccgccccttctacgtggcagatggagctgacccctcagctgantctggagttccccgggcaggagggttcgggccatgctgggtgggggctcatcccgctgccctcngcccgtaggn

SEQ ID NO: 702476 - DNA, 113 bp, Homo sapiens
gctggtaccatctgggggcagagggagcagagctaatggggggaagtgaaagcagccatcttctctgcagctaagccaggcaaggcactagagacccacatcttcccatgcca

SEQ ID NO: 702477 - DNA, 838 bp, Homo sapiens
  misc_feature (465)..(465): n is a, c, g, or t
ggtggttcgcaatacatctcactcgccgactgaaatgaggtccgtgatgtgatctacggttcagttcccagactccatgagccaaacgcgattgaggtcgtcggacactgacttggtacaacgactgatcccctgcctcatgtgttgagggcgtctcatcgacatcctgaaggatgctggcttccttgtattgatctggttgaccctggcaggatgtccacatcgtggcctgccctgttgcttgtggtccttgtgcagtggtctcaccctccacgcggtcacctattggcatgcctgcatggttcagtatggagagcgtctagcgatgggtgacctcagtggtcgaatactgaggagctcccagagagcagtagcccgtgtacacgtggtgcctagcagggccccctggctgagtacgcgatcatgagtactcgtgtatgcgcgagcgagacgagcagcttcgcncagctgcggcacataacgcgtcatgcagagccagcgtcaggcccgttagtggctacatctcacctggtgtggatgactatgtatctcaattaaatagccaagtgacttatttctgcaaaccttcagcccccttgtctgggactgagagtgccttccttttctcactcaggaaatcacagcactgagagcctatgagttgcaggttcggggtgagggcactggcgtgctgggctcattatccctgcccctctcagagctcctcgtggctgaccagctctgcttggaccgctggtttaccgctcagcagtggtcaggggccggtgctactgagagcacagctatgggatcctggtgtcccagcactcgggagtgg

SEQ ID NO: 702478 - DNA, 364 bp, Homo sapiens
atagaccagacaatagccatgatactgtatcctaaccaaccctctgtgggactgcttcctacactacgacagtgacgacggcttggagacggccgggtacttagcagacatactgactctcgaggaatgctaaggacgggcaagagacaaccgattcctatacggcctgggctctcacggcccactagctagactgactgtagtgcaaggagttctagaacatcaagagggcagggagcgcagagagattgctacttgtagcaagaggcagtcaactctagcggctgaatcatgagcctgaatcaagccttgaataaccttagcttgcccgtgacactgccacattcctatagagtcagttgct

SEQ ID NO: 702479 - DNA, 643 bp, Homo sapiens
gggagatccaggagtctggacaaggaggacgtagatgcctgcgataagtatcaaggatggccctgctgggaccggtggcctgtttccgcagagccccgaacgatctgccaatggtcgtggttgactggactgtagccctgggtgtgctagactcaggactccggagaccctcatggaagctggacctgacgggcgacctggagagcttcaagaagcaagtcgttctgtgctgataggagggtgtggagtaccggatatagatctctttccgggttagccgagagatagtgtccggcgatgaattacatccagtcatacgtacaggaaaggcgtcaagattgacaagatctgactacatggtaggcgagctacagcatctaagtcccgcttcacagactgacgagaagaccgaccacctgtcctgggagtggaatctcaccatcaatgatacggactggaaggtactgtagtcccagccagagtgcgggacatggtcagactgacggacggacgagcggacaggcggattgttgtccccgctgagaagattcggtatccaaagtggaaaaatgacaattgatgacctggtagataatgaaatgaccaaagagaagacctcttgtaaaaggatgcttggacagac

SEQ ID NO: 702480 - DNA, 323 bp, Homo sapiens
ttctaccgccagctgctgttgacagctgacgaccgtgtgaacccctgcatggggggtgtgatcctgttccatgagacactctaccaaaaggcggatgatgggcgtcccttcccccaagttatcaaattcaagggcggtgtggggggcatcaaggtcgacaagggcgcggtccccatgtcaggacaaatggcgagactaccacccaagggtaggatgggctgtctgagcgctgcgcccagtacaagaaggacggtgctgacttgcccaagtggcgttgtgtgctgaacattggggaacacacgccctcagccgtcgacatcatg

SEQ ID NO: 702481 - DNA, 789 bp, Homo sapiens
  misc_feature (15)..(15): n is a, c, g, or t
  misc_feature (69)..(69): n is a, c, g, or t
  misc_feature (75)..(75): n is a, c, g, or t
  misc_feature (78)..(78): n is a, c, g, or t
  misc_feature (90)..(90): n is a, c, g, or t
  misc_feature (137)..(137): n is a, c, g, or t
  misc_feature (143)..(143): n is a, c, g, or t
  misc_feature (172)..(172): n is a, c, g, or t
  misc_feature (175)..(175): n is a, c, g, or t
  misc_feature (180)..(180): n is a, c, g, or t
  misc_feature (189)..(189): n is a, c, g, or t
  misc_feature (191)..(191): n is a, c, g, or t
  misc_feature (199)..(199): n is a, c, g, or t
  misc_feature (214)..(214): n is a, c, g, or t
  misc_feature (221)..(221): n is a, c, g, or t
  misc_feature (246)..(246): n is a, c, g, or t
  misc_feature (262)..(262): n is a, c, g, or t
  misc_feature (271)..(271): n is a, c, g, or t
  misc_feature (286)..(286): n is a, c, g, or t
  misc_feature (288)..(290): n is a, c, g, or t
  misc_feature (317)..(317): n is a, c, g, or t
  misc_feature (330)..(330): n is a, c, g, or t
  misc_feature (367)..(367): n is a, c, g, or t
  misc_feature (376)..(376): n is a, c, g, or t
  misc_feature (384)..(384): n is a, c, g, or t
  misc_feature (389)..(389): n is a, c, g, or t
  misc_feature (393)..(393): n is a, c, g, or t
  misc_feature (395)..(396): n is a, c, g, or t
  misc_feature (412)..(412): n is a, c, g, or t
  misc_feature (425)..(425): n is a, c, g, or t
  misc_feature (429)..(429): n is a, c, g, or t
  misc_feature (434)..(434): n is a, c, g, or t
  misc_feature (530)..(530): n is a, c, g, or t
  misc_feature (612)..(612): n is a, c, g, or t
  misc_feature (748)..(748): n is a, c, g, or t
gcaccagccctactntgggggtccagggcagtatggcagcttccccggcccctcctccagccgccaggncacacngcngtgccaggggangcggccccaggccattcacatagcttgcgaaggtggcccaccagcgngcctgngccatgcccagacccagctccgttgaggnttnttttnggatagacntnaagggggngttttttgttggttngtgggtngagttggggttctgctgtggggggntgtgttcacaaacagngtggccatnggggcttggtgatgngnnnggggggtgcgagtgtgagggtaaaagnatgtagtggtttnaaaaattttaaaggagatgtaaaaaaaagaaaatgcnttgtaaagnacgtagtnaatgngganannaaagggaaatggcttnagctcctgctggntgangtagnagttcttgggtaccattgtgttgccttcctcagagcccttgaagtcccgagtttcaagataggcatcatgaagccctgtccactccttcagcaggnagcagcccaggtcttctgggtgcatgttgaggtctccacacaacagaaccacgtctgccttcttggatgtgtggtggatganctgggccaattcccaagcttgggccacacgatgtgctaggtagatgtccttctgtcgattgtattcggcatggagatgggtcacataggcgttgagcaccatgccacttagatggagcaccagcagccccaaagcnttcccactgaaccagtcaccatgatggatcatgtaggggta

SEQ ID NO: 702482 - DNA, 1111 bp, Homo sapiens
  misc_feature (18)..(18): n is a, c, g, or t
  misc_feature (71)..(71): n is a, c, g, or t
  misc_feature (81)..(81): n is a, c, g, or t
  misc_feature (123)..(123): n is a, c, g, or t
  misc_feature (135)..(135): n is a, c, g, or t
  misc_feature (147)..(147): n is a, c, g, or t
  misc_feature (157)..(157): n is a, c, g, or t
  misc_feature (163)..(165): n is a, c, g, or t
  misc_feature (184)..(186): n is a, c, g, or t
  misc_feature (198)..(198): n is a, c, g, or t
  misc_feature (200)..(200): n is a, c, g, or t
  misc_feature (306)..(306): n is a, c, g, or t
  misc_feature (371)..(371): n is a, c, g, or t
  misc_feature (485)..(485): n is a, c, g, or t
  misc_feature (499)..(499): n is a, c, g, or t
  misc_feature (509)..(509): n is a, c, g, or t
gcccggttagcattcggncgggagatgcggcagtggaatctggaagggcggtgaaaaacctacgtcctgcnctcgcccggnctctccattcgtcccccgggtagagaggtgcccggctcccancccttcccagtncccagccctggnagacagcagnccctannntactgagggacagcgacannnatgaaggctccngngtcggctcgtgctcatcatcctgtgctccgtggtcttctctgccgtctacatcctcctgtgctgctgggccggctgcccctctgcctggccacctgcctggaccancacttccccacaggctccaggcccactgtgccgggacccctgtcacttcagatggatatagcagntgtgccagatgggaagccgctggtccgcgagccctgccgcagctgtgccgtggtgtccacgctccggcaagatgctgggctcaggcctgggtgctgagatcgatcagtgccganagtgcgtgttccgntatgaaccanggcgcccaccgtgggctttgaggcggatgtgggccagcgcagcaccctgcgtgtcgtctcacaacacaatgcgtgccgcatgctgcatgcgcaaactattcacactacttccaggaaggcccgagacacgctctacatggtgtggggccagggcgaggcacatggaccgggatgctcggaggggcgaccgtaccggtacgcatgtctggggcatcaccaggatgtaccccgggccgtgcaggtgtacagccttcgacgtgagcgcatgatggcctactgcgagcagatcttccaggacgagacgggcaagaacccgactggtcatgaggctcagagaggttcacgaagcaaatgtgatgcccatagcagagccaggttcaagtggaagatccttggactctagatgaacccgaactgaattggaatacactggtgccgtgttgctcatgctgttccccagggctggtcccttagatgaggagaggtctttggcccgaggcccgaactcatcatcagggggttgtcgaccctggaagcgtgattggcgagcccgtggtgcgggattggctcggctggtgggtgcgtttctccaatttggcttg

SEQ ID NO: 702483 - DNA, 435 bp, Homo sapiens
ttatatgagaagagattgctgtgtaaaagagggcgtgctagtagaaaggtggtgtcgaccagcagctgccagtattatatagctgtgtgatctccagaggcctagggcccttgaatgtcacagatgctgtgttaaatgtcatctcaaatgtgactctcacgccgccgttaatctctggctatgggcagtgctctggctggcttcatggggggctcatcctggaaggctggtgaccccgaaatggtgggcagaatccccttggggggtgttttggtcacaggtgagttccgacactccatcaggaatttccggtcatagatgatcctggtacctcccgcggtggtgctgaagagcgtgccgccgggggtcgtgctgtagtccccgggcgggagcttgcacgccgtcgccgagcaccacccggcgagtggcgggaac

SEQ ID NO: 702484 - DNA, 947 bp, Homo sapiens
  misc_feature (500)..(500): n is a, c, g, or t
  misc_feature (515)..(515): n is a, c, g, or t
attctattctcactaaatccaactggttgactcttcctcattatctttgatgctaaacaattttctgtgaactattttgacaagtgcatgatttcactttaaacaatttgatatagctattaaatatatttaagggtttttttttttggacaaattcaacattcaacgagtagacaaaaggctaattatttccctgattaggaaagtttctttaaaaaacacgtaatttggcctagtggctttttctctaccgtgccctggggctcactaaatatcaccagtatttattaccaagaaaatattggagtttacctgattaaactttaaaagttaatggtagatttaaattggtggtgaaccctaatgattttggcagtggaaacctttactaattccaaagttggctatgttctatgacatctggtgactggcgttggcagagtggtacttgaaactggttataatggagtcattcagtaaaggagaacagtatctgggtnaatggctactggaanggttgagaacagggaatgggttggatatttaccacagcgctgtgcctttctacagtagaactggggtaaagggaaatgggttttatggcccatagtcatttaggctggaaaaaagttgaaaacttaacggaaatatgggcaagagatgtgttatgtgtgggttccagctaaaaatgatttgtagtgtgaaatcatagctacttacttagcttttccatatatcttcttagtggtgggcactcttaggtctaagtatggattcagggtgtcagggtgtgtgtagttaatcctctgctctcatctttatctaagagattggctggattacctcattcggttggtaaaaccagacaggtaaatttctggtgcaccctttattatgttgcatattttaagatcctgaagaaatgtgtgtgcttgggatccggataa

SEQ ID NO: 702485 - DNA, 670 bp, Homo sapiens
agcggaaaaggcagatcaaagtggtgggactcgctgtcgctggccgctggagacgtgaagctctcgaggctcctcccgcgtgcgggtcggcgctcgccctcgctctcctacgaccctccgacccggccccggccctggccaccggcgcccgaccataggcacaagactgagctgtatccacggaaggccaagctgtgccgagcacgtgcgtagcgctacgtagcgacatggccaccgtgtcactgacaggctagtgaccgaatgcagcgggcgaccggagcatgtccaccagagggaggcgcgcacctgcgtcgtcgcgggagtcccgtaagaaagaaacggttgcgtctagtggggtgccgggcagtgtccctgcccatagcgaaccgcgtcaatcatcttacggtcaattcacgaacgcacgaaacgatacccggaggaggcattccggagctcagagaaactgttagtggccgggcgttgcattgacgtggaccttacttccgcgacgcgaattggctgggaggtacccagtaaacgtgaggtactcccaattgttagcagtccaacgctatggcttgtgacatgtatggagggggacttacaggtagattgtagaacgtaccacaacagttgcaaactataagttcctatgtatgagtataaaggg

SEQ ID NO: 702486 - DNA, 402 bp, Homo sapiens
  misc_feature (44)..(45): n is a, c, g, or t
ttggggggcccggggttgtttaaaaaaggggggaaattttctannaaaaacccccaccagaacccctttaaggggtttttccggggggggtcttccccccaaataaaaacccaaaaaggtgggttttggaggggttttcccataaaaaaacaagttttttccaggggcccttttttcccgggggggtttcccccaaaatacctatttgggccaagggaaagccccccagttcctttaaggagttcggggaatacccgcccctggggatgccctttatcccctttttgttttgagggttcacccctgttgaggttaagcccctcaacccgggggctttttgggggaggagtggggccccaagtttttcagcacccggaataaagcccgcctgccccatttgga

SEQ ID NO: 702487 - DNA, 711 bp, Homo sapiens
gcctgctcctgccgcgcgcacccccggggcttcggctccgtgcacgggtcgcgcccagctttcctgcacctgaggccgccggccaccgccgccatgggtcctacctctccaccacacggtgaagtgccggggacggggtcggggccccgctgctgcctgtgccctacggcttctccgccatgcaatggctggctgcgtctccatggaggatgctcacaactgtattccttgagctggacagtgagacaagccatgttttcttgtctacgatggacatggaggggaggaagttgccttgtactgtgccaaatatcttcctgatatcattcaaggattcagaaggcctacaaggaatggcaagctacagaagggctttagcaagattgccttctatggctatttgacgccaaattgaccacttgaagaacgtcattaaagagcttggcacaggatatgcagcggcgacccacttgaggatgaaggattaaacagaaaaagtagctgatgaagatattgtggaccatgaggaaggctgcactgctgcatgaggatgctaccatgactatttgaaggaggctgctgacacgctacgggcagaactgtccaagtgccctcccacagcaatctggggttggcagcgagggacccggtcccgggctcaatggggggccggccttgggcccctgtgggtccttccagaaatgtcccggc

SEQ ID NO: 702488 - DNA, 696 bp, Homo sapiens
gtcgtcggggtatgacatgcgttcaacaggggctgggactggaagcccgtggcgctcgtatccccaccccaggccggcctgaccatagccagcccgtccgtccacctcttcacgcgcgaccctacggactggcgcccaaggacccgcgagcgacggagtcgagacagccgaagcgagacaacctgcacagacccgaccagcactgcaacatacattccttttaagattcaggcacgggccaggtgaggcgagcacggccgatacgcacacattcggacacgtggtagccagcgcgagaaacataacgcagcacgggggaaactcgaagaagggcgacggacacaagttcaaaccgccggcgcaagaagtaccagaggcgcggtggggaagctgtcttagaaacagggcgcgttccacgtttaaatgggagttagtgaacggcgatggatacgcgagctgtgtgttcggtttgtaaagcggttaaacgcgttagtatatgtacgagctatgaactgacaatagtgaagttgggattggggaacatagtattgtgtaagagggaagaagcgtgaaacgaaggacgcgcaacaagaaagtaaacgattgtgatgcgatagtatagagagaggaagaggataccgatacacattggaaggtgaaggaatggagaggaaagaatcttggaggttggagaaa

SEQ ID NO: 702489 - DNA, 436 bp, Homo sapiens
  misc_feature (252)..(252): n is a, c, g, or t
  misc_feature (288)..(288): n is a, c, g, or t
accattcccagagtgagcagggtcagttgagaggggaagtgggagcgggagtcaggggtagcacatgggaaaatgagagatgagaaatatcaatatttggtatcattagggaaagtttcgtgggtgcattagagttcaagtttgttggctcattgtaggactgtcatttattaacctaaggctctagtcctgtttgtgtaatatggtagccactagccgtatgtggctatggaatgcttgaaaagtgacaancctgaattgaaatgtgctgtaagtgtaaaacacacnccaaatttcaaagacattatataaaaaaagaatgtcaaatatcttgctagtaattttttatattgagtacttgcgaaataatattttaatgtggtgaattatataaaatatattattaaaattaatttcacctctttttgtcttttta

SEQ ID NO: 702490 - DNA, 1052 bp, Homo sapiens
gagttcagcacgcggccgtggaaccaaagtacgactgccaggagcatagtctcagcaacccgaggtagagcatcggacatctgaaagcaacgtcccctggcacaaacctaagattggccacgccagcaaccccagatctatctggtaaacaactcaccgatcagggtcagggggtcccacaggacacgtggagcctcagcacagtctgtcgccacaaggacgtatccaatcgctaaaagctcatgctctgcacagcaccacccacagtgtctacacacgtgcagcccatggagcaacaggcatctggtcaactgacatactatccgaagagcacctgtgaacgagctgtgcacagccacctcacagctatgcgaagcctgggaagccacaatgctggagagtacgcacggatggtggctatcacaagctgccactttcccctgtccgtggccctctcagcaaatcggtcctggcacaacagtctgaacggaatggctccacgtgtcttcatctacggtcagttctgctacacgaaaacattctgggcagcaagcaagtgtgatgtgagaccaggccaccagtgggaacctggcaaggctgccacccccgagccgtcgtcagcgcgcactgtccctcgtgcatacaccaaacgcccatctcatgggaaagcgcacagtatccgattgagtaccagccagcatacggctggcacatggtgctaccggaaaaactgaatatgcaccgagatacacacacacagctcacgcatgcagacaacaccccttacgtgcctttggataagaggctgtggatgttagttgttgtcacttactatgtacttacttcattcatatgtagctccacaccaggtcccttgtgtcttgtttggatagagaacaaaaaattaaggctgattatatttttctcgttgatttctacctcgctgttaaaattgaccaacttctagtatagggagtacttgttctctactaactgttttattgaggccctgtgttgatactatacaagccagtgtagaaataaagatatat

SEQ ID NO: 702491 - DNA, 192 bp, Homo sapiens
atcatcatctcgtatagcatgtttccgtattgcatcatccaacatttagctcttattgttacctttcacacttccattttacccctgtagtcatgttaaaagaagtctcagacactcctatcatgtcacttatacttcttctagtattatctcatgacagtttaagaacattattttataatataatctcca

SEQ ID NO: 702492 - DNA, 359 bp, Homo sapiens
ctccttatccgatcgggtggcataggagagaaaggattaagtctgccttctggctcaagggcccgcccagagctcacagacaaccaattacgtattaatcactggtacctgtcacagccactggaggtggaggtttaaaaaaaaaaaaaaaaaagacaaaaaagttacggtatcctacaagcacagatttaagttcaagactttaaaaaaaattctgtcccggcccaggggactgaacattcagaagccagcctgaccaggcacgttgtgccttggggcaggtccactgctgctttcttgcccagttagcaagcacaccacccacctcccgcattaattgcccaccccgtcggttggag

SEQ ID NO: 702493 - DNA, 168 bp, Homo sapiens
ctgccgggaggtcaccatattgatgccgaatttagtgtggacatgcgatcgtgatagcgcactacaggccagtaactcctgggctcaagcgatgctcccacctcagcctcccgagtagctgggactacaggcacgcgccaccgcgcccggcagagaggggcggagcag

SEQ ID NO: 702494 - DNA, 469 bp, Homo sapiens
  misc_feature (190)..(190): n is a, c, g, or t
gtgaaaccagtttatttaaaaaaaaaaaaatctccctgtgttaatcctcttttgtgggaggcactttagtttttttgcccagctcttggatgtttaaagtggcagagcggaggagcgtgtcacccagctgggcccaaacctcggtcaattgtgtaacatgcttgtgggaaaaagcagaggttaagtgttncagggaggcagctgatttcctgccacagctgctctatagctgcctccctgggcctcaccccctccagactagccaggcaccactaggccctgctccttttgtagagcctccagccttatttggtgagtttgctactggccagcctccctggagcctccccatgatgtcaccagaagggaatgtaaataagtgagctctgtgtcaggctagggagagtgctgcaggctcttttgggattctgaggtccctccttcaggaatttcctcgttagtggcagag

SEQ ID NO: 702495 - DNA, 658 bp, Homo sapiens
  misc_feature (81)..(81): n is a, c, g, or t
  misc_feature (212)..(213): n is a, c, g, or t
  misc_feature (230)..(230): n is a, c, g, or t
  misc_feature (269)..(269): n is a, c, g, or t
  misc_feature (285)..(285): n is a, c, g, or t
  misc_feature (301)..(301): n is a, c, g, or t
  misc_feature (489)..(489): n is a, c, g, or t
  misc_feature (553)..(553): n is a, c, g, or t
  misc_feature (567)..(567): n is a, c, g, or t
  misc_feature (570)..(570): n is a, c, g, or t
  misc_feature (587)..(587): n is a, c, g, or t
gggggaagaggttcccttcaaaggggaaacttttggggtccttcccaagttcctggcgggtggtggtcttcaggaaaaaanctgtccagggctacttccggtccatgtccctgcaaaagtcaggccaaggggtgtccagggcccaacgccagttcaagcggggggcgccgccccgcaggttgtccatccgcaacgcgcacagcatccaccannggttgggaagccctcanccaggacgctattgccgcaacagcgtccgttttttgcancaacgacccgccaggngcggccgggaccgcanagccccgggagcccgctcgaggaggagcggcaaacgcagcgcttttaaccgcagccggcggtgcccccgcggccgagcgccgacctcatcctgaaccgctgcagcgagagcccccagcggaagctggggtttgccgttttaggctggagcgcagtccccagctagcgtttcggccctttccgccccgngcctgtacatacgtgttttataaagcctggggtttggacgccgagggcagccccgacccctgtncagggcggctcccnccnccctcaataaatgttgnttggagtgggcccaggctttgcaggaatgcagggagggccggggtccgccccagggtttttttttagttta

SEQ ID NO: 702496 - DNA, 195 bp, Homo sapiens
  misc_feature (5)..(5): n is a, c, g, or t
ttacncgagatcgagccgctgcactccagctgtgttgtcagagcgcgatccgtctcaaagcaaacaaaaaacaaaaaaaaaaaaaaaaaacaatgaaattattattttgtggaaaaaatcgttaaaacgtgaaaattccccctggggtttccccccctgggccaagggggtagggaccccccacaaaaattttgc

SEQ ID NO: 702497 - DNA, 201 bp, Homo sapiens
aaccggactctgcggccgtgtcggtgcccggccgacggggtggcgtgaccggtggtctgctgaggaccgcgccggtgacccggccgctgtgctggtgtcacctgtggtctgctgagagaacgagagactagatgacactgacacgacgggagtgagtgcgaccaccgggataccgaagactcaaaacttcgatacactcac

SEQ ID NO: 702498 - DNA, 216 bp, Homo sapiens
ggagaagactagtactatctgcgggtcacacggtggctacccacacttctgactcaggacgttcctatcaggtgtcactgaggtggtcgtgaagctctttgactctgatcccatcactgtgacggtccctgtagatcgtctccagtgaagaaccctcaaatatatcggagaccgtggcgagacaaagcgctgcagtgaatacgcgcaacaaagcac

SEQ ID NO: 702499 - DNA, 607 bp, Homo sapiens
gtatatcttaatggaatacactcatttacaaaggacttgaggaaatgtggatgtgaataatacctttctctaataaaacttgatatgtataatagttaataatattgacattaatgatatttaatatggatagacatgcatagattcaaataaaattaaaatcaatgataaatgctaaatatttatctaaatagttttcaagaaacagttatggaaatgtgtatattaacatggctctaatgtggagctcgtggtatttcaactcagtattcattattagtacgtgtgtctggaagagatgtactttacttttacctctttacactacagttgctcttatggggctctaaactgtttaactgaagaaccttcgtctgtatttagatgagcataatttagtattttatgagtttccacagatgatgttcttatgtctatcaaggtctatgtaatcaaattatataaccatccatttacgaccaacaggaatttccacagattacttcagttgcaaattatgcgtttcaatgctcctgaaaatacatttgtggacttaggggtgggaaatatatgaagaatgtggatggaaagaaaaggatagcacaag

SEQ ID NO: 702500 - DNA, 265 bp, Homo sapiens
  misc_feature (228)..(228): n is a, c, g, or t
gaagtgggctggctggtgaaagggtgggctgggaagagggtgccacctgactcagtacaatgaaagaaccggtgaccacccgtcagtgtgcgtaccattgtggaagagtgtccaggatggcaaggtcatctcctcccgcgagcattgtccacctagaccaccctgctgagtgactcagctaccccgtgccggccacccagtgaggcagtgtaggcagccgccccatcntgccccacatgtctccgtgcctctccatgcctcagct

SEQ ID NO: 702501 - DNA, 364 bp, Homo sapiens
  misc_feature (286)..(286): n is a, c, g, or t
gtggcacctaggaaactcatcttgcttgactaatatgagtttcttggtagcagaaagtacttctcctgttctcttgaaattttttaagccaaacctctttctaaaattgtcaaaccatcatctgctggcattaaattcttcaccttcagatccttcatcttctctttgctttaagttgtcacataatgacttcactttttctcaaatcttattagagtctctagtattcctttcttatagcaatcctgcacccacataaaagctgcattttcaattacaaaattanaaaggtatttcacaaaaagtggaaaagtgtttgtgctagctgggcaaaactggaaggcaatggttttcacagatttcc

SEQ ID NO: 702502 - DNA, 167 bp, Homo sapiens
ggagagagagaactagtctcgagttttgtatttgtttcgaccggaaagggaatccccccgggcgcccaggggggggggcgggggcgccggggccggcacccgggaccgggtaggaaaaccaaggcggggaacggaggacaacggagaaaagccaatcagagaagagg

SEQ ID NO: 702503 - DNA, 393 bp, Homo sapiens
cttttggggtctttgctgagatcagcctggcagcatgacaaaaccctgactctaccaaaaatacaaaaaaattagctggacatgatggcatgtgcctgtggtcccagcaactcgggaggctgtggtgggagaatctctcgagcctggaaggtggaggctgcagtaaaccgagattgcaccactacactccaacctgggtgacagagtgagaccccgtttccaaaaaaaaaccttctctgaatggataaagaaaatgtatatacatacaatgaaatattattcaaactttaaaaaggaaattttgttgtgtgatacaaccgtagatgaaccttgaggaattacactaagtgaaagccagtcacaaaaaggcaaatactgcatgaccccacttac

SEQ ID NO: 702504 - DNA, 343 bp, Homo sapiens
gttagctgaagtgggaagctgagctgtgtcgctccctggtcactgtttctcctactaatgtatagtggtcacgcaaaatcaagaaacagaaatcgggaacatcatcatacggtttttcgggtcaccgtcggcgtgacgctcagttcctcattcccccttcccccttaagagtacttcctcgatgcaggagccctccaggttcgatgaaggatgtgaatttggcccatcattgttcgacgctacaagcgcaagcaattcagccttgtttcaaggccctgaattgcggtttcataaacccccaagctcaactccattccatcttcggaaagggaattccatcata

SEQ ID NO: 702505 - DNA, 654 bp, Homo sapiens
gtccaaactctttcatcatcagtagcatgcatcaccaggtctcaggagtactgtcctagagagtagttcatccgtcaggattcgcatgtctgtcctcagtgatccctcctcacaccctcgtctacttatgtgcactgtatcatgggatatgatgttaccaactcgtcattgtctcggtcatacgtgtcgaagatcatgccgttgtgaatggtgatcgtcatgatgtctcccgtcatatgatatgctccatccatgtggtcatcatcgactatgctctctatacttgatcactcagatctggtaatttctagcttcaagctgttcggtgattcctccatactgtgcatttactttgtctccattccagtcgtccatttctatcgtcagttctgtgggtcccatcctggtaaagtggctactgggatcatttgcaatgcaataattcacctgctagtcctgcagtaattcgtgccatctgtttggtcttcatcatttaatgctccagtgtctatatggattccatttccagccatagtcgcggctccgtgcttgctcgattctgtatcactgtcaatcctacgtcatgtgtaatcatgctccagtatgctcgatacggtttgtcctctctgtcaggttgaatgacctacatctcag

SEQ ID NO: 702506 - DNA, 631 bp, Homo sapiens
tggctctagaggaccccaccatgctccacctggcactttactctgccaagcagtggcagcccagtccaaaaggtgtctgcatggccaaggggttggggagtcacttcacattccaggctggaggagtgagaggacttgggggtactcctcccaccccattgccagcaagaggccatgactcaccttcaaccccaagtcctgcatcctggtgggaagtgacaatgcctcctcccagctctccatacctaatggggtcatgaccagacagggtaggacccaggcccccagctttcagttggtaacggtggcctccacggcttgcccctgtccaggtgacaaccccagcccccatgatggggcagcaaaggtctcttctcctccttggtcctcagcaacagacagagccctccacaccaggcaggacagaggccaagtcagaagcagcagcggtggcagggaaggagcagccagcacaggcccagggctctcctgaagtcatttaagctgtctgccatgcggctctgggactggccactaggtgggcgttggcggctgtgatacaggtacttggacacctttctggcctgatgccagctgatacttgtccttgggtgctactgctgtgtggggg

SEQ ID NO: 702507 - DNA, 155 bp, Homo sapiens
cgagctggtaccctcgcaaacaacaggactgaccaaactggcccttttttcatttcttcccacatttgtagattcttctcaatagggttttttctatgtttagattctatcctctgctcacgttctgctttcatctgttcaggttggaagacatt

SEQ ID NO: 702508 - DNA, 388 bp, Homo sapiens
  misc_feature (3)..(3): n is a, c, g, or t
  misc_feature (63)..(63): n is a, c, g, or t
  misc_feature (355)..(355): n is a, c, g, or t
  misc_feature (385)..(385): n is a, c, g, or t
canaaatctgagccagatcaatttaggaagtttattttcccaaagttaagaatgcacgcaagnaaaaatggcctcaggaagtcctgacatgtgcctaaggtggttgggacacagctcggttttatacattttagggagacatgagacatcaatcaacatatgtaagatgaacattggctcagtctgggaaaggtggggacaactcgaaggcaaggagggagcccccagggttattagggtaggatgaggagacaaatgggtcgcatttcttttcgagtttcttgatgagcctctcccaaagggggggattcagatattgcatttattcttcagtgagccaggggggtgatttttnagttaggattggggggccaggtttggcccntaa

SEQ ID NO: 702509 - DNA, 858 bp, Homo sapiens
cttttggaggggatccgcttcgcatactttcgttgcccacactttttccggatggttctctctgcccggttcctagacaatatctccccgggattctgtcgccccttatcctccgcgggcggcgccactccctgccccttctttggttgaaaagcgcttgggcctatatgcccgcgtctggtggacgaccacacggtgcctcgcacagcgaagcctttcgcctttcggtccaacactcgtggggaccacacctctcagagacaactcgcggggtttttcttgcatcctgcccgggcccataatattctctcgggcccccctttttcttttctcgtgcctaaccacgaagagggtctccacaaagatttggagagcgctgttcgctatattctcacgaaaaaaacttggtgaagagatgtccccctcgaaagcctcgcgggaggggacactcctgctggttcgctcttccttgtgcgcaggaaaacacacgtgtgttcgtccttccctgcccccgccaaagcagctcttttgggggcgccacacgtgtcctctcgcttcaacacacatgtgtcagcccctcgtaggcacaatttctctgggaaagcgatcccggccccgggaacactgcccttaaggggcaccgaaagggcccacaaagagaaaaacgctgggggtaaaaaaatccggggggtcacaaaggggaagaccactataacccacactgggcgcttaaaaaaaggccacaaaaagtgcccaggggttggctatccccctcgctgagggaatggggaaaatgaaacccccgctcccccttgccggaaaattaaattttaaaaaccaaggaaaagcccaaaaaaa

SEQ ID NO: 702510 - DNA, 947 bp, Homo sapiens
cataatattctgaattcattccaagtttaaaatcctgtcattctctggctcttcttttgttcacatcaagatatgatgctgttggacttagaggcttccgaactgtatttattgagggctactatctgcctccacaattttcattaagaccactccacctttagacaaaggtgacttttggtcgtgatttatacaatatcaagattttattcacagcgtttctaaatatctgtgaaggtagacccttagcaaaatgtgtctcagttctagtttctcaaagtagaatctgatgcttccaccaagtaagatccatcgggagctagagaaacaatcataatgttgacaaatcaggaacctaacagattattttgtctctcattattaatttgcagagagcctctaaactttcgagaaatcaatgtgtcttcttaagaagagttaagcaccctctcttaactttcccctctatttgctctccttgttctttcttcttaagagtatttatacttatttcgttaagcacaataatggctaagattgctctatgaatttgcacactcgaggagtggattgcaacatacttgcagggcattatcctctttaactttagtcagactttacacaaacaagataaccgcaaagttctaacgccactgcaccttgaaaacgttgccctttggaggaagccttgttaattcacttaattccaacagagtcatgtgccccattccctaatttcctaaagcattgttggcaagagattgttgtttcacccgcgtaatcataacagcctatgtgcgacatacggccaaaactgcggtgtcaaacctgcatgcgcatcgtacataacatttacacagccgtgtcacaactcagcaacacctcggttcacaggccaaccctgctgattacactttccctcatcctgacgtgtctcccgtcccttg

SEQ ID NO: 702511 - DNA, 222 bp, Homo sapiens
tccctaaaactcctgaatcagagaccatggggaagggcacttttgaaaagattctggacgggtctgggagagaaatcaggcatgggggcttggctgtgtgtcaaacactctcaatggccttcctcaccaagtgctacagacagatatgagcaaactgcactagagaccttacacacacaatcccacacatcgtattcccaggcccatccctcagtcctgggt

SEQ ID NO: 702512 - DNA, 105 bp, Homo sapiens
  misc_feature (91)..(91): n is a, c, g, or t
cctactccgaaacctggatggttaggagcccagggtccttgatttccagagctatatcctggttggacctttgccaacagacctgacactnaggggtaatggtat

SEQ ID NO: 702513 - DNA, 777 bp, Homo sapiens
  misc_feature (29)..(29): n is a, c, g, or t
  misc_feature (39)..(39): n is a, c, g, or t
  misc_feature (58)..(58): n is a, c, g, or t
  misc_feature (71)..(71): n is a, c, g, or t
  misc_feature (110)..(110): n is a, c, g, or t
  misc_feature (119)..(119): n is a, c, g, or t
  misc_feature (148)..(148): n is a, c, g, or t
  misc_feature (155)..(155): n is a, c, g, or t
  misc_feature (175)..(175): n is a, c, g, or t
aaaccaccccaacctttaaaccctggganatttaagccngtttccaaaatttggaaancccataaatagcncctaaagtgaataaccctgtagtgatatcctttaagcantcatgaccnaattatatattttaaacagtggtgtgtantcatcanttttattctaaaaagaggantaaatagtgctgtgttaaaatttaagactttgctgagaccacctttcagtctgatttttgaattgcttttatcctgactttttttcttgagacagagtctcactgtgccacccaggccggagtgcagtggtccaatcttggttcactgcaacctgaaaccataaaaactctagaagataacatcggtaaaactcttctagacattggcttaggcaaagctgttcatagccaagaacccaaaaacaaatgcaacaaaaacaaaaataaatagataagacctaattaaactgaaaagcttctgcacagcaaaggaaatgatcagagtaaacagtcaacccacagactgggagaaaatattcgcaacctaagcatccagcaaaggactaatatccagaatctacgaggaactgaaatcagcaggaaaaaaaatgaataacccatcaaaaagtgggcaaaggacacgaatagacagttctcaaaaggagatgtacaaatggccaacaaacatgtgaaaacatgctcaacatcactaatgatgagggaattgcaaatcaaaaccacaatgagatactgctttactcctgcaagaatgaccataatta

SEQ ID NO: 702514 - DNA, 412 bp, Homo sapiens
gccccatatttgatctgttcagaaactgttggtctcgaactcctggcctcaagtgatccgcccaccttagcctcccaaagtgctgggattacaggcgcgagcgaccgcgcctggccaaagatgcaaattcttgattggatttatgctctgcctattcccagcatttccttatctgtagccctgcttgcttgagagtatacttggatcagaagtattgctgctgagggagctataatggattcttcttccagaagtaaagaactcatctttagagtacctctaaatgaattctgttctgtcttttctattttgaggtggattggtcttctctctttttgggtttccagatcactgggactctcagaccttacctttccagctccaccattagtttttccttcattctcattag

SEQ ID NO: 702515 - DNA, 172 bp, Homo sapiens
catgtgctgtaggccagcccagatagctcgaagacagacaagaaattgcaaattcaagaaaaagcagcacaagaggtaaaattggccatcaagccattttaccaaaataaagatatctaccaggaggattataaagcattgtacggagcagtagataagtttgtcatagtag

SEQ ID NO: 702516 - DNA, 721 bp, Homo sapiens
  misc_feature (197)..(197): n is a, c, g, or t
ccctgacacgccaagtggcaagggtgctgtctgcatgagtcggggacaggcacgtgatgctcgagcgagggaaccgcacgactaacgattcggcatcttcgtgtatgaccatgaatatgcaagatgtacaggtacataccgtaactctatatgatacagtacctagctgcataactagagtattacttgacacgcantaggttgcattagccggtgtagacgcattttcagatcggctacacattattagagtacgcactgtatacgcaatcttcaacgaaagcaagagagtatgacatgcgactctaggaggatggtagccttaggtgagcgaagggaacaatgattacatacaggttattctactaatcgatgaccgagtaggctcgaaggattgtaacagctgcttacattggacgtaatacataagtgtaattattatagatggataagattggatggagagagagagatctatcagaaggccactcgaaacttaaataacgcaagatagaaaggggcatatgacttttaggattatgagatgaacggtgatcttaaaaggagggttaaaagtattcacgctttaataaagttggtacaggtcgattaaacaataagttctgaacgggcagatcttgtgaataaagacgatgattacaaggccgaagggtggatttagtgagaatccttggaacgtcccatgaacgcaggggatgaa

SEQ ID NO: 702517 - DNA, 492 bp, Homo sapiens
  misc_feature (13)..(13): n is a, c, g, or t
  misc_feature (404)..(404): n is a, c, g, or t
tactcactgaagncctacaatctctgggctcaaacgatcctccccactcaacctcccaagtagctgagaccacgggtgcatggcaccaagcctggccaatttttgtgtttttagtagagatggagtttcatcatgtcgcccaggctggtctcaaactttcagcctcaagcaatcctcccgcctgtggctctcaaagtgctgggattacaggtgtgagccactgcacccagctggatatcctactcttaagctcaggaaagggaactttcctggagtcaataaccttatcctctgtaaaacagttagaagtaactatcacttagggttccaaaatgcatgaagggagattgtaaagatgatgcacttaacacttcatgtcgtaatgcaaggatggttattagatngggggtagtgtaggagagagggaatcctgcttgcttcttggctaaagagactttcccaaaaaatctggaaatatcctacatttcaggt

SEQ ID NO: 702518 - DNA, 1549 bp, Homo sapiens
  misc_feature (951)..(951): n is a, c, g, or t
  misc_feature (1177)..(1177): n is a, c, g, or t
tggtagtgatgcagactagctagcgtggttgatgcgctgcgctttgtgttctggtgtctaccgcactcttgttgcgactcctcacaagggcggtgtccacccacgggcgatctcgcgttggggagcatctcttctgcatcgtttcgtgttgtgagaaccccactgttgtggtgtatgccgatgaataatggcgggtgttatgtagcctcgcccccccaagcctgtttttgttagccgcggcgcttttccccgatggtacgtctttccacagtagccgcgcgcactttcaaattgtgtgacagcagccgtgttctctattctatggcccacacagcgagatttgtttgtcggggggtttccacacggggggactacccccttcctctttatgaaggggcgcccccctgttgtttgtttgggatgtagtcctcccgcccctttgtcctccctcgtggtgatgtcccccccgcttgctctatttctctccagatcacgccactgtccctagaccccccaaaggggagaataattgtggtataatagttccacactgttttactctcccgcaaactgggttctcccatcgtgggtgaaaaagctcttgccgcatgagatgtctctttttcctctgaaagagtgagtctgtgggaaatgatgtgcccaccacctgtttttgtggggcgttccccaaaaagccattttttttttggggcggcgtcttgtcccccttgcgcgccccctcatccctctggggttgtctcagatggtcgccaccgttgatatttatctccacccccacagagttctgtgagactctcccacagagagaactctcactctgctggccccgctctcccacaggcaacaacccacagagaggggtggggacgacacacaatgtagtgtgagagggacgccaccctctggggcgccctctgtgtcttttcttgncctctcgtaatagagggtgtgtctctctcacaaagagagcgttgtatctccttgtccccaccacaggggccaacattcctgctctgtatatgattccgcttctctcgggggggcccccacgcggagaaactgtggggaaaagtaagttatagtgggtttctccggcgtgatactcttataggacactcttgagatacctcgcgtggttgtgggccacactgtgacncacagatcgtgttctgtgccacacacgctgtttatcccccgcttcccacgcggagactctatacacctctctcccacgcggagaccgagaccccctggtccccaagggttcccctcttgctggcacggggcgcctcggcgtgtgggcccctgcacacttgtctgaaggttctcccacatcactgggcaacatgagaagggagaattctccccacgccctccacgtgttagcttagagggtaactggcctaagccacatgttggaacattctcctatccccgagacctccttctccccaaccccggggaaagagctttctcattttttattttctaatttttgtttgaaataaaatccctttagttagcccca

SEQ ID NO: 702519 - DNA, 707 bp, Homo sapiens
atctcaatttgaattgtatctcccagaattcccacgtatgtgggagggcaccagagggaggtaattgaatcatgggggccggtctttcccatgctattctcgtggtggtgaataagtctcactagatctgacgggtttatcaggggtttccgctttgcttcttcctcatttttctcttgccccttgccacgcaagaagtgcctttgcctcccaccataattctgaggcctccccaaccatgtggaactgtaagtccaattaaacctctttttcttcccagtctcaggtatgtctttatcagcagtgtgaaaacggactaatacacatggtaattccatgtttaactttttgaggaacagccaaactgttctccacagtggctgcaccattttacattcctgccagccgctcatgaagcttccaatttttccatatctttgccaagatttattattgtctgtcttttgattgtagcctttctagtgggtgtggagtggtatttcattgtggtttgatttgcatttccctagtaattaacggtattgataatcactttcatgaacttatttgccacttgtatgttttctttggataaatgtcttttccggtccttgcctattttaaaatggtaccatttgtctttttattgaatttataataatatttatgtattctggatactagattccttattatatatattattg

SEQ ID NO: 702520 - DNA, 107 bp, Homo sapiens
gtggtcgtcaatacatcagtctttggggctgtcctgcaaccctacacctgggccgcctgaccttggactgacctcccgtatgcctcccgtcgctctgccaaagggta

SEQ ID NO: 702521 - DNA, 191 bp, Homo sapiens
tctgtggacttcttcttctagtctgcgactagtacaaggtggccatcaaggtgggcgggcgctacctgaagggcgacacgcaggcgtctgaaggcctcggcggaaaccgtggaccccgactcgctctggagagtactacgggccggcccgtccattccccagcacctgcccacatggctggctcctgccaa

SEQ ID NO: 702522 - DNA, 118 bp, Homo sapiens
tggcccatttctggattgtcgttctgggtctgcctgctctcgcccggcatctggcggcgttctggggcgtgtgctcggttcccggtgctgcggtgcgcgggattacctggcgatcgtg

SEQ ID NO: 702523 - DNA, 354 bp, Homo sapiens
cccccggggccagggggttaacccctcgtgctgaaatggttgtttggtatttaaattaaccctgcgggttggaccaactgtcctcaaaaaaacacagttggtttccctagtacaaaaaacagggcttgggcccctttgaaaaaacaaaatttatttttgggcaatttcacacccgtcctcctttttcaggggtggcagggggagcctggaattcccccctagtgatgaaaaaccagggtttggtggggattaaattccctggccctggggtaaaagtttggggtgttctttttttaaaaggggaaaaaaccccaatcaaattttttaaattaaagccagttttgggaaatttca

SEQ ID NO: 702524 - DNA, 825 bp, Homo sapiens
ggttctaaaaacagcagaaaagggctagagttcttagcaggagagagagctgaggagttggtcaggaaagctgcaggttacttttgagtacagttcgtcccaaagtgcattagaggaactgtaaaagatcggccactagcaaggaagaatgatccatagctccagaaaagttattgccgtcgttaaacaggaaaacccttctgtgtgcaaggatggtcgtagcccaccagttttgccataaagtgcagctatgggatttacatgcgcatgtgagtgtcaattagatgtacattcctgaggtctgtttatctgtggtacgcttggtctatgtgctcttttgacttgtgcatctacatcatggttatattggcctgtgaaagtggtggtaggtggtaccagggaataaagaaattccggaattttgaacttgttcaattatcgtgtagtgtcagtttcttctacattcttagtactagaaaacttgtagcaaaagatgcagttccgaagggtgtttgccttgtgagttaaccaagtaagagaagatcaatggttaatggaccctacttgtgtattgaactcctgtaaaagtgaacttgttaaagaatacaccgtggctgaccttgcagtttacagggcaatctatttcttcaccaattccaacacatgatatggattgcgcgctgacctgtgggcgcggcatacgatacttgggtgttgcaccggcgggttcaggatacatacggagggtattacacttacattgggattttctagcttacgattccttaactgtacaaccttaaatgaatgggcatgggacaccga

SEQ ID NO: 702525 - DNA, 139 bp, Homo sapiens
atgagcatggggccgagggtataaagaaggaatagagggtagggaccgacattcgcagaaccgttcctgagtcccaggtgcatgatataccaatgtgtgctgataacgtaagattttctgatgtgtgatgttatcatga

SEQ ID NO: 702526 - DNA, 609 bp, Homo sapiens
tgggccagctactgaatggccaagaagacagaactcaccagaaaaacttcgacggggagattcataaggggggtgaaccagtatatccaacagggcattgctgagctggtcccgggtgttccggttggtgatgaggtccaaatgctggacattgagtgtgttcaactaactggaacgggccctggacgtcttctatcgatcccatcgtcatctttggagttcaaaccgagggaactggtgtatcacagggactgaggacattaaattccctcacgggattcctcttgaccttctggaccgagtgaagattatccaggaccatgctgtatactccacaggaaatgaaacagatccattaaaatcctgtgccagacggcaaggaatcaacatccatgatgagggcgtgaaaccactgggggagattgggacgaagaacacactgaagtactcagtgcgactgctgacccgggccacttgcttgctaacatcaacgggacaggacagattgagaaagaaatgttgaacagaccgtgacttttctataaagccaagtctcggcatctgctgaccgcaggataatcttaaggagatggtggggtccaccgtccc

SEQ ID NO: 702527 - DNA, 214 bp, Homo sapiens
gcacctcataggtcgcaggtggaacgattttgtttgccctcagatcttcatatgtgccgtccttttcactattacatagtttgatttcacagtaccagtgctgtggtaaatgaaggcttctgtgattactattgctggtgcagaatactgctatttactattttctgtagcatttaataaggtctgcgatcttcagctgcctgcgaatctatga

SEQ ID NO: 702528 - DNA, 832 bp, Homo sapiens
  misc_feature (59)..(59): n is a, c, g, or t
  misc_feature (101)..(101): n is a, c, g, or t
  misc_feature (107)..(107): n is a, c, g, or t
  misc_feature (194)..(194): n is a, c, g, or t
  misc_feature (206)..(206): n is a, c, g, or t
  misc_feature (297)..(297): n is a, c, g, or t
  misc_feature (315)..(315): n is a, c, g, or t
  misc_feature (376)..(376): n is a, c, g, or t
  misc_feature (393)..(393): n is a, c, g, or t
  misc_feature (396)..(397): n is a, c, g, or t
  misc_feature (402)..(404): n is a, c, g, or t
  misc_feature (406)..(406): n is a, c, g, or t
  misc_feature (419)..(419): n is a, c, g, or t
  misc_feature (422)..(422): n is a, c, g, or t
  misc_feature (424)..(424): n is a, c, g, or t
  misc_feature (463)..(463): n is a, c, g, or t
  misc_feature (467)..(467): n is a, c, g, or t
  misc_feature (477)..(477): n is a, c, g, or t
  misc_feature (615)..(615): n is a, c, g, or t
  misc_feature (643)..(643): n is a, c, g, or t
  misc_feature (670)..(670): n is a, c, g, or t
  misc_feature (719)..(719): n is a, c, g, or t
  misc_feature (728)..(728): n is a, c, g, or t
  misc_feature (764)..(764): n is a, c, g, or t
ggctttgcgacgccttagcccgggaccgaaccaggctctcccctacccgaacaccggcncggctccaccgaggccgggtcccccagcccgtctcgccgcgncatggnggacctaaatacgccgaccttcccggcattgccaggaatgagccagatgtttatgaaactagcgacctacctgaggatgatcaagcnggagttcgatgnggaggagctgacaagcacaagtgtggaacacatcattgtcaatcctaatgctgcctatgacaagttcaaggacaacgagagtggggaccanagggacttgatttctcangatcgtattggaaaaaccaagaggacaggatatgaatctggagaatatgagatgcttggangagggtctgggagtganggnnacacnnnancaaaagtaccagngcntnctgcatgaggtccaagagctgacaactgaagttgaaaanatcnagacgacagngaaggagtcagccacagaggagaagctgacccctgtgttgctggctaaacagctggcagccctgaagcagcagctggttgcttcccacctggagaagctgctgggaccagatgctgcaatcaaccttaccgaccccgntggcgccctggctaatcgcctactactncagctggaagcaacaaagaacagcagngggggatcagggggaaaaaccactgggacccccccagatagcagccttntcacttatnaactacattctcggcctgagcaggacaagttctctnaagctgccaaagtcgcagaacttgaaaagcgcctgcacagagctggagacagctgtaacgttgtgatt

SEQ ID NO: 702529 - DNA, 155 bp, Homo sapiens
attccccccgcgtatgtcttacgcagttcatgcatcttcgcaacctattttggtgaccaatacaggtaagcttgagtttaatgaaagtactctaactatgggttctacgggtcgagaagattatgtactctttggcacgtttgacatatccgcgg

SEQ ID NO: 702530 - DNA, 195 bp, Homo sapiens
actacgtcgcatatttatagagtatactgtgatgtactgatagacgtatacattgtgtaatgataaatcaaaataattagcatatccatatctcaaacacttgtcatttctttgtggtgagaacagtcaaaattcctctctaaagtatattttattttaattaattaatttatttttttcagagggcgggatggt

SEQ ID NO: 702531 - DNA, 430 bp, Homo sapiens
  misc_feature (22)..(22): n is a, c, g, or t
  misc_feature (79)..(79): n is a, c, g, or t
  misc_feature (295)..(295): n is a, c, g, or t
  misc_feature (355)..(355): n is a, c, g, or t
tgagacaggttctcactctgtnacccaggctggagtgcaacggcatggtcttagctcactgcaatctctgcctcccagntaaagcaattagtgtgcctcagccttccaagtagcttgtaccacaggcatgtgccaccatgttcagctaatgtttctctgttttgttttggtttggtttggtttggttttggtagagacagggttttgccatgttgcctaggctggtctcgaactcccaaagtgctgggattacaggcgtgagacaatccgtgcccagcctaatgatattttctangtttatttcatcttgttttaaatgctgataattgcctaatttcataacccactagtgggnttatgacctgtagtttaaaaactactgtaggaaagaatatagacaaacccatgattagagcacagtttaataggg

SEQ ID NO: 702532 - DNA, 115 bp, Homo sapiens
gatcttttggaggcaggacactggaggctggggagtagctcaatgttgagcccagtcgagttcagtgtgggcgtaggcaggcctggagctctgggccagctgcacagccagagag

SEQ ID NO: 702533 - DNA, 154 bp, Homo sapiens
attacgcactcacatcacacacagtacactacgcacacagcacacacacaaagacactagcacacacagtgcacatcacagcacacacacgcgaacacaggatactacgaacacagcacacacatgcacacacacaatacacagctcacacgtt

SEQ ID NO: 702534 - DNA, 371 bp, Homo sapiens
gacatattcttttgactaattagaccacttatggctgggattacaggcatgagccaccacacccggcctatgctctgttttttcagaagagatgcaagagagggagggaggcagccttctgaccattgtctccaaggttgtagtgcagtggcatggtctcagctaactgaagactccggctactgggttcaagtgattgtcctgacttgaccgctgagtagctaggatgactggcacccggcacatggcccagctaaattatgtatttctagtagagacagggcttgattatactgtacaggcatggcacaaacgtcctgactacaggtgatccaaccgactaggtctccgtgatgggctatgacatggcc

SEQ ID NO: 702535 - DNA, 355 bp, Homo sapiens
atttcaaaatatggcaaagaaacatgctttggggtaaaatattttgattttcttccttgtgttgtatcttgtaattttatgccagactcaggttagaaagtaagtcacgatgtatagggttaaataaaatacttctgaagagaatttgtgatttgtagggcatgactccccaaaccccttagataggaatttgggcaagataaaaaaaaatcagagtttagttgtcataatattctatgtaacaaaattggaagtatgtataaaggttttgttttgttttgttttgtttgagacagtctcgctctgtcacccaggctgagatcgcaccactgcactctagcccgggcgacagagc

SEQ ID NO: 702536 - DNA, 140 bp, Homo sapiens
tattataggactgagagcttgtacggctgcagtgaatagcgctcctgggatatagatccctccctcagcttatcctttgagtacaataatccattacattagttattcaaaatatacattattcactgtagtcaccctgt

SEQ ID NO: 702537 - DNA, 874 bp, Homo sapiens
  misc_feature (83)..(83): n is a, c, g, or t
  misc_feature (96)..(97): n is a, c, g, or t
  misc_feature (122)..(122): n is a, c, g, or t
  misc_feature (134)..(134): n is a, c, g, or t
  misc_feature (168)..(168): n is a, c, g, or t
  misc_feature (181)..(181): n is a, c, g, or t
  misc_feature (197)..(197): n is a, c, g, or t
  misc_feature (200)..(200): n is a, c, g, or t
  misc_feature (209)..(209): n is a, c, g, or t
  misc_feature (238)..(238): n is a, c, g, or t
  misc_feature (257)..(257): n is a, c, g, or t
  misc_feature (268)..(268): n is a, c, g, or t
  misc_feature (271)..(271): n is a, c, g, or t
  misc_feature (320)..(320): n is a, c, g, or t
  misc_feature (325)..(325): n is a, c, g, or t
  misc_feature (332)..(332): n is a, c, g, or t
  misc_feature (339)..(340): n is a, c, g, or t
  misc_feature (359)..(359): n is a, c, g, or t
  misc_feature (361)..(361): n is a, c, g, or t
  misc_feature (373)..(373): n is a, c, g, or t
  misc_feature (376)..(376): n is a, c, g, or t
  misc_feature (400)..(402): n is a, c, g, or t
  misc_feature (405)..(405): n is a, c, g, or t
  misc_feature (408)..(408): n is a, c, g, or t
  misc_feature (410)..(411): n is a, c, g, or t
  misc_feature (436)..(436): n is a, c, g, or t
  misc_feature (471)..(471): n is a, c, g, or t
  misc_feature (486)..(486): n is a, c, g, or t
  misc_feature (491)..(491): n is a, c, g, or t
  misc_feature (516)..(516): n is a, c, g, or t
  misc_feature (522)..(522): n is a, c, g, or t
  misc_feature (528)..(529): n is a, c, g, or t
  misc_feature (536)..(536): n is a, c, g, or t
  misc_feature (657)..(657): n is a, c, g, or t
ggagaatgcacctgccatcatcttcatagacgagattgatgccatcgccaccaggagattcgatgctcagacaggggccgacngggaggttcaganngatcctgctggagctgctgaatcanatggatggattngatcagaatgtcaactgtcaaggtaatcatggcnacaaacagagcanacaccctggatccggnccntgctacggncaggacggctggaccggaaaattgaattntccacttcctgaccgccgncagaagagatngantttgctccactatcactagcaagatgaacctctctgaggaggttgactntgganagactantggtggnnccggccagagtaagatttncnggagctgatatnaanctccactctgtcaggagagtggannngtnggntnntccgtgaaaaccgctacattgtccntggccaaggacttcgagaaagcatacaagactgtngatcaagaaggacgnagcanggagcatgagttttacaagtgaccnttcccnttcccnnccagcgnaccactcaggggctggggcttctctcgcagccccagcacctctgtcccaaaacctcattccctttttgcctttacccagggattaggtttcttcaagttagatacggataaagatcgtagntccataccgggatgaggatgatagaaccttcgagagcattttatgctcggggtcccgaacagaacaggagttctcgtcttggtcaccgtggctcgtcctgttgttccctggaacccgggcttcctttttgtcgcaggcgggataatctgcccgggcttccctataaagagggtccttataatgtgggaaaccccggttcacctgtagaccccggcaa

SEQ ID NO: 702538 - DNA, 268 bp, Homo sapiens
ccttccagggcccaaggtgatcccgggtggtgggatccacgctggggccgaggatgggacgtttttctttttgggcccggtccacaggtccaaggacacccctccctccagggtccttttttccccagtggggggcccaatcagccccgagaccaccccaacctcaccctcctgacccccatgtaaatattgttttgctgtttgggactcctgtttaggtgcccctgatgatgggatgctctttaaataataaaaatggttttgatta

SEQ ID NO: 702539 - DNA, 279 bp, Homo sapiens
tgtctttgtttacatccaggaaaaactgataactcagattacaaaaactcttaaatttgaacgcattattgttctaattgacttataaaaataaataagtacttatattttaaatatgagacaattcttataaaaagaagaaattgaacttcttatctcaaatgacttaaatatcttggccctttaagaaaaaatcttggccctttaagaaaaaaaaagtctcattgaaaataccagtcaagaaaaagtaagctgtaatatctatggcagatgcacagg

SEQ ID NO: 702540 - DNA, 343 bp, Homo sapiens
aaaccatctataagttcatctgtgagtcgtctattgggcgtttataaagtctgagcatcttttcctgatgacagtaaagacttcacttgctcttagtcaccaaaggggtctatggttatacattctacttgctgaagtgtatcaactttgtgatgattttacaattctagaatcttatgccctaaacagtgctagggcaaaagaattccatatgaaaacactagagatacttcgagtccaaaaatacatgctgactttctagtattagttatatggttttttaattgtttatatgtagcatttgacaaaattatttaaagtctatataattgttattcgatgg

SEQ ID NO: 702541 - DNA, 130 bp, Homo sapiens
  misc_feature (5)..(5): n is a, c, g, or t
cctantgcaggtgaatgcattattactagaaagtgtgaatctatgctatatgttccgaaatcctaaatggtttggagtcgcgtggtgtttgaaatataggaagcatggtggcataaaatgcgctcatgta

SEQ ID NO: 702542 - DNA, 859 bp, Homo sapiens
  misc_feature (18)..(18): n is a, c, g, or t
  misc_feature (46)..(46): n is a, c, g, or t
  misc_feature (71)..(71): n is a, c, g, or t
  misc_feature (123)..(123): n is a, c, g, or t
  misc_feature (125)..(125): n is a, c, g, or t
  misc_feature (139)..(139): n is a, c, g, or t
  misc_feature (143)..(143): n is a, c, g, or t
  misc_feature (170)..(170): n is a, c, g, or t
  misc_feature (176)..(176): n is a, c, g, or t
  misc_feature (178)..(178): n is a, c, g, or t
  misc_feature (185)..(185): n is a, c, g, or t
  misc_feature (194)..(194): n is a, c, g, or t
  misc_feature (198)..(198): n is a, c, g, or t
  misc_feature (203)..(203): n is a, c, g, or t
  misc_feature (207)..(207): n is a, c, g, or t
  misc_feature (212)..(212): n is a, c, g, or t
  misc_feature (217)..(217): n is a, c, g, or t
  misc_feature (230)..(230): n is a, c, g, or t
  misc_feature (260)..(260): n is a, c, g, or t
  misc_feature (264)..(264): n is a, c, g, or t
  misc_feature (274)..(274): n is a, c, g, or t
  misc_feature (317)..(317): n is a, c, g, or t
  misc_feature (321)..(321): n is a, c, g, or t
  misc_feature (332)..(332): n is a, c, g, or t
  misc_feature (347)..(347): n is a, c, g, or t
  misc_feature (358)..(358): n is a, c, g, or t
  misc_feature (380)..(380): n is a, c, g, or t
  misc_feature (421)..(421): n is a, c, g, or t
  misc_feature (464)..(465): n is a, c, g, or t
  misc_feature (468)..(468): n is a, c, g, or t
  misc_feature (751)..(751): n is a, c, g, or t
  misc_feature (763)..(763): n is a, c, g, or t
  misc_feature (847)..(847): n is a, c, g, or t
cccggctcctccagctcnttactcctcttcctcctcctcctacaantcaggcttttgggggataaatgttntctctcggcagcagaatgagcaggcaggtggtcagttccagcaagttccgcnangtgtttggacagcnggcnaaggccgaccagtgatatgaagatgtncgcgtntnaaagaanaactggganagtngtttntgtnttgtnaaacntaagtttgtggcnctgatatgtgaggccagcgggggaggggcnttcntggtgctgcncctgggcaagaatggaagtgtggacaagaatgcgcccacggtntgtngccaaaaagcncctgtgctagaaatngaatggtgaangaacaatgaaaacgtcattgcnagtggctccgaggactgtacagttatggtgtgggagatttnggatgggggcatgatgttgtacctgtgggagcccgttgttaannttnagggtcacaccaagcgtgtgggtattgtggcatggcacaccacagcccagaacgtgctgctcagtgcaggttgtgacaacgtgatcatggtgtgggacgtgggcactggggcggccatgctgacactgggcccagaggtgcacccagacacgatctacagtgtggactggagccgagatggaggcctcattttgtacctcctgccgtgacaagcgcgtgcgcatcatcgagccccgcaaaggcactgtcgtagctgagaaggaccgtccccacgaggggaccnggcccgtgcgtncagtgttcgtgtcggaggggaagatcctgaccacgggcttcagcggcatgagtgagcggcaggtggcgctgtggggacacaaancacctcgggagg

SEQ ID NO: 702543 - DNA, 907 bp, Homo sapiens
gagagagagagagagagagagagagagagaggagagagagagagagagagagagagagagagagagagggcggctatatggctgtgcatatatccaaaaagaggatgtgtgtcgcagatggtctctcaaagctgaagtgagtgatctctcacgcgggagctggctgaatatggcactctggatgtaggagcgccgcagatgataacacaccacacagagacgagaatctccatcttcatctcttaccccacacaaaaaccacgatgatggtgcttccgtgggaagaagagagcggccgccggcgctactgccgagcacgtcgtcgcgcgtgtaactacacaagaagagtgtgtcgtctcccacaagagggggcgatgtgtaggcagctattagctgcgtgaaaagcggctgcgcatcatagagtcgtcgtcgtgtcgccaacgctgcacaggagggatgatctctcgtgctgattaacaacatctccccgtagaggaggcggcgctgcgtggcgcggcgagcgcgcgccgctgatagtgtgctgctgcgctgcagaggcacacatccagtaggatgatgttggcgcgccaacagggcgatggcgaggaggcttgtggtcggtcgtcgttgaagaacaacctcccgaaagcgaagacgagggggtctaaatactcctatggagacgcttggtggtgggtagttgcgcatgagaagtactacccaagaggaggagaagaccctctgtttaatacaatctaacggtaggaacaacgtgggttggcgccgccagtgttggtagcaacaagaagaaggtgtgctgtcgtggagctaatccagggtgaaacatatccagcgctgcccgtgacacccccacggcgggaagaggagccgggccaaaaaaaggcct

SEQ ID NO: 702544 - DNA, 284 bp, Homo sapiens
gggttctgatttctccacattctccagtgaagtggcatctcactataattgttgatttgcatttccctaatgactatgttgaatagttttgcatatgctttttggccatttgtacattttccttgaggagatgtctcttcagatcttttgcttattttaaaattgtgttgtctttgtactgattgtaggactctttatatattctggatgcaggtccttatcagatatatgatttgcaaatatatctccatcctgtagttggcttgtacttcctggtggtatct

SEQ ID NO: 702545 - DNA, 381 bp, Homo sapiens
gtgagcacaatgtatgctcaggcagaggatgtctatctcggcatgggggcgcatcactgtgctagaaggcatcctgataactctgacgggctgctgttgagacttgccaagacatatgaaaccactctacacaaatgctgtaccagtgtagatcctcatgaatgctatgacaacgtgtgcgatgaatccaaacctgtcggggaagagcctcagaatttaatcacacttacttgtgagctttatgagcatcttgtagagtacaaattacataatgcactattagatcgatgcaccccgaaagtaccccaagtgtcaacttcaactattgactaggtcatacgactcctatggtgggcatctgttaggaacatcctggcgtgt

SEQ ID NO: 702546 - DNA, 1172 bp, Homo sapiens
acaatgagagcacccgacagaaacgacgagataacgaactaacctactttaaaagattagatcacatactacatttgcgacagaattcatgagatgttaggcaacgagcagtcaacctcctgtctctgatttaacgtcggcacacatgcagtttcaactctcgcgcaaagctataggtatgcaaccgaatgtggggactcagcacgtttagcaacaagatatgtctatcccaggcttgatggagaaagacaataaatggcacagatatgggacacagcagggcacagagcgatatctgagctataacgatccagcatattcatcgggtggagcttgtcaggttgccgttcattggtcttcatgcaccattgtctaaaccatcctccacgataatgcaacacatgtcaccaagcggcactgggcctgcaacagcaacctgcaggcagcaatcccattgccttgcattcaggtcacaccatttggttccatcgcattgccttggatagggagcgacatcaaagcaagttcggattctaaaccggtcttatcttcccagggccagttaccttaaccagggcatttgcacaccgccaacacgacacgccgtttttctggccaagtaaacaacacagacaattggggtttttggttccaatttccattctgccagccagcttttccgtgggcgcccccttaagaaacattcttaagcgcaaacactttgtttacgaacaaggcctttggccatttttttttccacgggaaaccaaaaattcttatcttacaaaccaacggacggcactttttttcaacccccgggcaactttgggctatcttccttcccgaagacaaaggcccaacaacttggtttcgaagacaccacaggaaccgggccggacacaacactatttgaaccgacttctgtgtcctatctcgcccaaaaaagggcgaaaaccgacaattggtttggggggtattactcctttaaattttccgccattggttttttccccgaaacccaaagagaccgaacttgtgagaacatgagacggcaaagggcccacacacaagggggtgggccaagttggaccttaggtcgtccacgaaaaaaccgaattctttcaaaggggccaatttattactttccttttactttgccccccttaggaaac

SEQ ID NO: 702547 - DNA, 356 bp, Homo sapiens
tatccttatgagattccaccccgaatatcatcaggcacctttcccccttatccaactagccctagcctataccctctgctgcccaagaaaatgagcccaaccagtacaccaggagtggggctccatatcagcccctaaggtcaagcctgtgtccactgtggaaagtagttgatggaaatgagggaacactcaaagagtacatatgccactttccatgtctaattagaccttataaaaggaaagaattggccagttttcagataaaccagaaaagcttatacaagagtttgttacgttgactatgttcttcaaattgccacgatttacaaatattgtcatccgcttgctgtgctgtg

SEQ ID NO: 702548 - DNA, 1237 bp, Homo sapiens
gggctccgacttggaactccctgctccgctgctgcctgcttctggcccggcagtgcagcatgcctgcccgtgcctgccgccctggccagctcccgcctgtggcccttgcggcggtccctctcctggtcccctcccggttggtcctgggggtgcgcagggggcagggctgggcgcccagggggaagctcgaggggacgcgcgccgcagaaggctcctttgtggacttcacggccgccaaaaatctggggcgcagacgcggggccaaccgtgggcccgacttcgccagccggggtcggccttggggggaccccagaagggggggctcaccaagccccaaaagggccccggagggaactttccgaaatcgcgggcgaacccaaaggggatcagcgcacacggcgacgcggaagccgcctggacagttggagagacgaagggcggcgggccataacggcaacacaagaccaccgggggaaacgcataataaaccacgggagggttacccaccgattaccccagcagttatcgccggggagaattcaatatacccaggggggacaagggcgacgcggggctatagacccacaagggcggaacagggcgggcacacaaacccgccgggacatagtggaaaacggcccggggaaagaaatcaccccagggggctaccccaggggagaaaataaaagtccccggggcatgcggggcaccacgatacaggggaggcatactaccaccgcagtggtacccagcggtcgccagaataaagccgccctgagagagcccaacagcaggagtagacacaagccacaaacccgggggaacacaacagcatgagcacccgggaggacacacaaacctgggggcacttcggaccacgcgaagagcgccccaaagaggcgcgtttaacagagagacttgtaggaccaacaaccagaacaaacttggggagacacacaaccgcagcagtcgcagagcacacagacccaccccaagggacgaagaggaaaacacaggagtgaaaagacactgttacgctccactcacgcaccggtgtggacaccgcgagggaactaacaaagagcgagtaggagaggagagacccaggagaagagggaacacacgattacgcgtggacgccacagaaacaccattcccgatcggcgggacgagcgccactgctaaaaccgaaagggatcccaagagtgtcacacctaggcggagcacgcaagaaacc

SEQ ID NO: 702549 - DNA, 752 bp, Homo sapiens
taggtctagaaaacgcttctatcctcgtatcttattacagcttctcagcttgcttgaatattgcgatcttatgcatttgcccgtacttgttacaagtcctgtgtgcccgtttgccgaacgatcaggacgtagaatgaacgaatactgagcatttctcgaggaggctcatgaaaatcataagaacgtcccggatgatgctgacgggacaatcaatttatgtcctctgtcggcctctccagtatcggctaagtcattcctgaatgacttaagaaacgaaaggctcgacggatccccgtcccttaccgatgcgaattcaaaagggacattcattgggtgacgggaaacccacgaagttacacccggaactaagggggggaactaagtcgttcagctccgtacattacgttcccgccattattccttagatccagggcgaccttgagacattcgttggacggttgacaacgcgggttaggtactcccgactggaaggccccagtggggattaattagtggcttcacaacacacggtctttgccatcatctgacgcgtgtcccaagcttttgtgctttaacaacgagtgtgatgtgcccgggagggttaaacaaagaccaatttacaccggtaacgcgacgggggttattctagggacagcgctccatgaagttggagaaccaaatgtacagccacactgctaaaattatccccaaaaattgtagacatgagggcgttattccctaaagcccttcac

SEQ ID NO: 702550 - DNA, 369 bp, Homo sapiens
atgtttctgagcatttcttagcccagttccccagtacgtattattaacagcacctcattatttataaaattcttgggtgggcacagtggttcatgcctgtaatcccagcactttgggaggccgagcaggtgaatcacctgaggccaggagttcaagaccagcctgaccaacatggtgaaacctcgtctctactaaaaatacaaaaattagctgggcacagtggcgggcacctgtaatgccagctactcaggaggctgaggcatgacacttgctcgaacccaggaggtggaggttgcagtgaccagagattgcaccactgcactccagcctgggaacagagcgagaactttggccaaaaaaaaaaaacaa

SEQ ID NO: 702551 - DNA, 122 bp, Homo sapiens
cccttagtgttgtggtctatttctagtgtagtgttatcgtctttgtggttgctgatgccggtgtgtgtgtgctgtcggttggttattgtatcgccttttagtgttgtgtgtttgttctagta

SEQ ID NO: 702552 - DNA, 414 bp, Homo sapiens
  misc_feature (3)..(3): n is a, c, g, or t
  misc_feature (56)..(56): n is a, c, g, or t
  misc_feature (93)..(93): n is a, c, g, or t
  misc_feature (112)..(112): n is a, c, g, or t
  misc_feature (121)..(121): n is a, c, g, or t
  misc_feature (134)..(134): n is a, c, g, or t
  misc_feature (153)..(153): n is a, c, g, or t
  misc_feature (165)..(165): n is a, c, g, or t
  misc_feature (222)..(222): n is a, c, g, or t
agngccgtaactaatgtccctcaacaggtccagctgttactgtccggcctttttanaatagcctcatgagtaggggcttctttaaataatccngacatatctttggcttatncgactaagncagacgtatatgnatgttttcattcctgtttngtacgagtgccntcattttgtagtcatgaagtaactagtaccttaataaaaatgtaatgactaatctanggtctaggaataactattgtagaagctaagtagaacacttagtttggggtgtcaattttctatcaacgcaaacaccttagggtacccagaccaattttatgtatatatattctgaaatgctccctttttaatgtggtcatttgttgccttctaagttgagaggacaaaactgaataaagtgaatgttaattg

SEQ ID NO: 702553 - DNA, 365 bp, Homo sapiens
agacagtaaccagcagatttctcagcagaatccctgcaggcataaaagggtgggataatataatcaaagtgtagaagaaaaacaaaactggcaaccaagaatacttaactcagcaaagctattcctcagaaataagggataaataaaaactttcccaaacaaacaaaaactaagtaagtttatcaccactaggcctgcctaacaggaaatgctaaagggagctaagctgaaataaaaggctcctaattgatacataaaacttataaaagcaaaaagcactaaatggtgtaagtaagacatagtcatattcagaataatactgtaaggatgatgtgtaaaggaattttctctctccccggatacag

SEQ ID NO: 702554 - DNA, 255 bp, Homo sapiens
  misc_feature (43)..(43): n is a, c, g, or t
  misc_feature (219)..(219): n is a, c, g, or t
aggatccgtgaattgacagaaggacagcagtcttacaacaggntagcagtcatcagtgcttgaacctctcccccttggactcagccaggagcagctgctgtctgtttccagaaattaagggggggcgcgagcaacatcgctgaccttcagtgagtgcatgtaaaacatgttttccagaaccgggcaggggaccccgaggccagactcgctgaccttcangtgaagtgcaatgtaaaaggtgtggtttaggggttg

SEQ ID NO: 702555 - DNA, 738 bp, Homo sapiens
gttctatttgagatcaatgacggagaggtacgtaatatcctgacaggtaattcagatacagactatgtattatgtgacataatgtatgcaaaattataaaaagatttcagtttacctagttgggattatacttaagaacactttcggaactaatgctcccagacttgcccacgatttgtgtattgtatcttatagccactggccgtcgttttacatgctttctctaatagtcttatttgccacagtctctattttgaatatgctcctagtttgtacagggtgctgtcattatgaaggcttctttatagaggcctaataagaatgcctttttataaagcctgtgcatttaggtaggttgaagctaggaggattttctttagaatgctcttttgcatgtaaagcacaaagtatgtttcagtttaaatgcacttcttccggttaatttttatggggaagacaagtgagtcacaaacattctgttgaagggaaatctagtcagttgcttgaaagagcacagcccaaataaaacaaggactgactaggtgtaatgaaataacctgtgatttaacaagaagagctgcagctttgacagtgcttatttacaagaaaaatactgctggaaaatttcccaatttctactacgttcaccatctctagtaagatctgacatatgctgaagttatgtttgatttgggcacccagcatgttccatgatgggttacctcgcctagtcacaaa

SEQ ID NO: 702556 - DNA, 103 bp, Homo sapiens
aggtgtggatggagggtctgcagtggtatcactgtgggcagagcctgggtgaagaagtgagccttgtactttccactcgcgacagaaaaaccccatgggacct

SEQ ID NO: 702557 - DNA, 454 bp, Homo sapiens
  misc_feature (90)..(90): n is a, c, g, or t
cctcgacccgacgttggatctgcattgtctgcggcactctacatcacccatctggtcgagttcgactacccggaaaagttcgtctccacncaggtcggacacacctacgccgccacaaccgccatctacaccggagtctccgacgagtaccgcaaccgactcctccgccgtgccctcgatcggcaccccgacctgtgggagcagccgtgaacaagaagatgacctaccggtggaacctgcgccaactcatggccactcgtggcatgttcgcgaccaccgacctcgtcccgctgttggccgaacgcggcatccacctctctcgcgaacaagtcttccgcctcgtcaccaccaccccgcagcgcctgagcttggacaccctcgccgccctgtgcgacatcctcgacgtcggcgtcgaggatctgatcgacatcaccgccgccgaccatcaggtccc

SEQ ID NO: 702558 - DNA, 228 bp, Homo sapiens
  misc_feature (18)..(18): n is a, c, g, or t
  misc_feature (60)..(61): n is a, c, g, or t
  misc_feature (73)..(73): n is a, c, g, or t
  misc_feature (77)..(77): n is a, c, g, or t
  misc_feature (84)..(84): n is a, c, g, or t
  misc_feature (88)..(88): n is a, c, g, or t
  misc_feature (91)..(91): n is a, c, g, or t
  misc_feature (96)..(96): n is a, c, g, or t
  misc_feature (108)..(108): n is a, c, g, or t
  misc_feature (114)..(114): n is a, c, g, or t
  misc_feature (152)..(152): n is a, c, g, or t
  misc_feature (171)..(171): n is a, c, g, or t
  misc_feature (212)..(212): n is a, c, g, or t
gatgaagtttaatgaaanttttttttgaataatgtagttgttatgatgctttgggatgcnntggtttgggggnattnaggtgcnttcnttnattcntgtgggaacccngggttnagggccagggcctccttggaataaatggttattgttantaggtccccaccttccctnttttttggaagccaaagtcaccctccccaataaagtcctcnctgccaaaaaaaaaaa

SEQ ID NO: 702559 - DNA, 518 bp, Homo sapiens
  misc_feature (423)..(423): n is a, c, g, or t
gccgacctactactactaaattcacggccgctcgacccgggagcagcttcgttgcgtgtcaggccatcgcaattcggaaacactcggatggtcaaacaccacgccgggatgaacgtccagctgcaattgcttgcgcaacgccgacaccagtttgatcaccagtaacgagtgcccgccgagggagaagaaattctgctcgatgctgagccgctcgacccccaacaactgcgccatgccttccgccaacaaggtctgcaacgcggtacttggcgccacatagacctgcgccgccagcagcgactcgggtgccggcagcatagacggtccagcttgccattggccaaacggggcagatgctccagggcaaagaaatgcgccggtaccatggcgcccggaaggctcgcattgagctgctcacgcacnacgtcgagccaaccttcggcaggcgtcccttgcgcctggacatacgccaccagttgcacattggcctcatcaccttcgcacgcacgccaggcagt

SEQ ID NO: 702560 - DNA, 139 bp, Homo sapiens
  misc_feature (83)..(84): n is a, c, g, or t
agcggattgcgcaggcgcctcaggaagagctcggcatcgcccctcttcctccaggtcccccttccacacaacatacgagcaannagtgaagctgccccaatcagtcacaatcaatgacaaaaaagagcaaaaaaactta

SEQ ID NO: 702561 - DNA, 253 bp, Homo sapiens
tctagagttcccgggctcggctatctgtccagaacatcttcctttttttgttttagtttcttttttggagatgaggtctcgctatgttgcccaggctggtgtgcagttattcacaggtgcacccacgggtcactgcagctttaaactcctgggctcaagcgatcctcctgcctcagcctcccaaatagttgggactagactgcacgcaccaacacgccatgactcaggacattattcttaacacgataggccg

SEQ ID NO: 702562 - DNA, 149 bp, Homo sapiens
ggtatatcggcacaaccagttacagatttctttgttcttctccactcccaaagtcgctggaactgcaggtgtgagccactatgcctgggctctggacgcaattttgaaaagcaacctgcagcctctgtagggtgcctgatgaatagcga

SEQ ID NO: 702563 - DNA, 1056 bp, Homo sapiens
gggtccttcaagtacaacttgcaagatcttcccccttactatttgtatgggtattccgcgagcattcctagtagctatccttgtgaggcaagacggcaagacttttggacgcgtctaacttctaggtgcccgctattagcacgtagtgccatggaacctctggcatgtaacttaacagggcggtctggtgatcacatcggtggctccattcgctctctagtgaatttcccacactggtatagatggcctcaaacgccgcaaaggtccacaggatcctgggtatgattcgaacacaagtgccaccgccaaagagggcattgtcttatccttatcggtggaccaaagccacaggggccaccaagtagggccatatctgccccgggaatggtgttccgatgcttatacctgcgagcactcgagccctgggcgacttaccgttgcagagacctcagttgtgtccgcctatcctccctggctagctgtctagccatggttgatgagacggtcagatgagagaattttgctggggccactttgaggagttaccttgagggtgaatgcctagaccctttatgtctctcaaggagaccctggatcactggggcactgcgccaaattccaagacaggcattctctggagagtgaactggggactagcatgagtatataaagagttcgaagggagacgtacaggaatagggtttggcctgcgctgaatagaaggcctggccagggcgtcaccccgtcactctggatcctcaccctaggaatgctgattcagtttcgggcattactgtagaaacctcactcaggcaagaacgtacagaagataatcctgctgcgaggtgactcgtggaagagcagagccaccctgcccaggcttgtatactatggctgccacagctcatgcatgaggtatctggctgcaagacaggcatgagcgtaccatgagcaggatcgagcggcttgataatgaccccaacatcatcatctgatggaacgtgaggctggtagtgactaggatggacacattgctgtgggtagtccattacatcc

SEQ ID NO: 702564 - DNA, 549 bp, Homo sapiens
actcatgtaaagctcattgtaatagatgtagtttttctaatctacatttttattgactgtcatctatcaaaatattgacttaaatcctgtaactatttgatttcaagctttaaattgatctggtattccttgcggggctccagttgcatctaaatagatgtgagagttgaaagacctataaggagcttctctcgctttatgatggcttattttttttttttcctctggttgatgaaatgccagggtaaaagggatagccaaatggactaaagcacaagtgccactctagttattcagcagagtgcccagtaaaggtccaccacaataccaccatacatccactcggggatgaacagaggctgactgattgataagctcttgaaaattcttaagctcactgcatcccttcaggtctccaaggaatgctaaatctcctccctgccatgagagacaagaagtgaacttagtgttgggagacataaattggatggccctccggggctgaccccccagggccttaggatttttcaaaaagagcttggcatgact

SEQ ID NO: 702565 - DNA, 185 bp, Homo sapiens
tcactctcctgcacattgaatgtccactctctcaatgcaacctgggcacttttctggcatactcatcctcacctcatgttttcccacagttgctttttctccccccctctcttcccagggcataccatttgtcttcactgtcgggctcgtcgggggggtcacgcgctcgcattcgtactcctggt

SEQ ID NO: 702566 - DNA, 1376 bp, Homo sapiens
  misc_feature (11)..(11): n is a, c, g, or t
cagccaccctnccttctttctcgctagactacatcatctatagcagagtagatagactgagcaagacacatagatccatagatcgatctcggtcgtgttatcacatcgctgttcgttgttttgtcagttaatttatcactgcggtccgcttgtcactgagtgtattcaccctcttcccccgatggtggcgctggctgagactccacctctctagtatgtactaccatgtgggggttttaccccaacttttttctggggggcaacacaacatggaggagccacagcgacagtaacacaaatgtcccacttgttcctttccgcggagtgacctggttcctaaatgtggcccagagaacccccctgattgtccccagtcccatttccgacggcaccctgggagaaaccaacgcccacgactttttggggaaaatctgctgcccgtctatattccgggggaaattttgggccttttgtgttcacccacaagggggcccttctccgtgagatttccaggggaccaattgtcgtgccccacattgaagggtgccacaacttactttgccaccgatggctgtggggccccatgtgccacccaatagtaggaagtccaccttgtggcccaaagcgccagaagacaactggttctctcggggccctgaagaaagaccccccccttttttcccaagaccttttaggtatcgaccccccgtgaaatcctccccaggggccaccccattggaatctctgagtgatgtgcagcctgatccagacctggagaaccaagatggggagacccaactgatagaccaccccttgctgaacactgcgtcaacatctgtccccccttttcctttgggctggtcaatccaaccaaggtgttcgacacaatggcaacactttacacaccctgaaagtgccttgaatatcacccgagagggaaactttgcacattttcgcttcctggaagggtgtcccccaatgttgccacagtgtctgtctgcacgaattggctaacccacaactgttgcacatcacgtatcccccattttattcactcacaacggggaacacacaacgagagtcctggccctgtctgtggagacggagttacacccttcccaccttgctgaaaaggtcaggcctttttggctgagtccactctgcctttgtggctgctgcccccgtggctgctgcccccaccagctgctcctgctgctgctgcagcccccagctaaggttgaagcccaggaagagtcggaggagtcggacgaggatatgggatttggtcttcttttgactaatccacccacaaaagccaacccaacttagcccagttttatttgccaaacacaggaaattaaggcttacttttttta

SEQ ID NO: 702567 - DNA, 508 bp, Homo sapiens
ccttgagcacagagacttgccctgccgcccacattggatttttttgttttaagggcgggacactgaaaactgcatcttttttttacccagaggcagagtgaccaaagcgccctcgtaactgttataaccctttcccacccagcttcttggccttcccctaaaggacacgggccaaaggggtaggggctatgcccccgggaggaaaaatgtcccccattggtcaaaaagcctccctctaagaaggtggttttgcccctggcttggggggtcgcaccttggccccaggggactgtggggaccagggggcctgccctaatatccccttctcgccaagaccggaaaggggaaaaacctgggggccttttcattagggagacacttcccccggggtgaccactgacagctagcgtaattttttttttccagggggcccaataaacttcaagggtggacattaagatttgggccagttttttgggcaaccaaatttccggcaacttttgaataa

SEQ ID NO: 702568 - DNA, 330 bp, Homo sapiens
tatgaattactgcttcataccatgtttctcttcgtccttcgattacttgttaacacctatgagtatctatgaaccattacacttctatgcctcctcctcctcgcatggccattggccgcctgtacacaagaaatgcacctcctccacgaattgcacttggatgagtaggagaagcagctggatgttgcccgggacgaataggtatagcaatctgtgcagaatgccctcttctggccatattctatgacctgaactgcttcctttatgcgatctacttcttgctgatagcgtaagcgatcacaagatgcattttctttagctactttctgt

SEQ ID NO: 702569 - DNA, 625 bp, Homo sapiens
cccaagcgcttgttcagctgtacctggcgtccatggaggcttaggcgtgttttatgttagcgccaccgccgttcctcttcacatcgcttcatgagtaagtaccgaggcctcaccaatgccggcgggaggttctactgcacccgcgagcaccctgagacatccagaccgaaatgcgctccagcgttggggcgaagattggatagccagacagaatgaaacagcaggcgactctcgcagtgctgaaagaaaactacgctggacggcccggggcaaagctacccatgcccaagaatcactgagctgtgatgctggaaccatacctggggatgaaggtcacaagagaggcgagctgacgaaccttccccttcgtgtgattagcagggcggacttgagaacagacgcccgcaggcgaaccaagccaggccgactggggtcctatctgccaagctttctaagttgaaaacaagcccacattgtggtggaaacaaaatcaaaacgtgcggccccttttatccaccgggagaagggtgccccacattatgattcactctcgcatgaggtcaacggcgagcggctatgttgccaatgaatcgcatccctccccggcagggtttggtcgccctct

SEQ ID NO: 702570 - DNA, 439 bp, Homo sapiens
caattttttaaatgaacaacagatttgagcagatacttcatcaaagaaaatgaaaatgtatagcacttgaaaagatgtttaacatcattagtcattagtgaaatgcaaattaagatcaccatgagacattactacatgtctgttagaatggagaaattacaggtggctcacacttgtaatcccaacacttgggaaggctgagactgcgagatcaattgccctcaggtgttcgagaccagcctgggcaacatggcgaaacccctaggaaatctctacaaaaaatactaaacattagccaggtgtggtggtgtgtacctgtagtcccagctactccagaggctttggtgggaggttggcttgaacccaggagagggaggttgcagtgagccaagattgtgctaccataccccagcctgggtgacagagccagatcctttct

SEQ ID NO: 702571 - DNA, 135 bp, Homo sapiens
ttggcccccccccggggtttttttccccccggttttaaaggttttggggaggggcccggcccccccctttcccaaaattttaaaaaatttttttaaaaaagggtaaaaagggggcccgcccttttggggttttta

SEQ ID NO: 702572 - DNA, 256 bp, Homo sapiens
ctatgttattaccttcccctacattggaagtactgagaaccattaactcttgacccaaaggttaagggatttgctactggtcccttacaggaccattaaaaatgagactatattcacttcactaaaatttaattgctaaagctaacttatgcacatctattaaactaaaagaaacgactttaaccctcttccgttgtttttaagacaagcactcctttacagggagaccagcctttaggtagggtaccgagctcca

SEQ ID NO: 702573 - DNA, 246 bp, Homo sapiens
aagatcatgcagtttgaaagcttccatcttctgatgagagatgttctacagaacttgtcacgtctttgaaatttagaatatattgctttcataatacgaattttactgccccactgaagtgtctaatttttcaagtttgtaagtttattaagtggtttcaacattttttgtttgttcgttttgactatgaaaaagacagtttaaagaaaagccaaattctattaaaacatttgcggcatgtttgta

SEQ ID NO: 702574 - DNA, 279 bp, Homo sapiens
ctttgccctgcctgtcctctgtctgaaatggtctcctctagatttttcaaggttggcttttttcttgtaaatttgtttgagttcattgtagattctggatattagccctttgtcagatgagtagattgcaaaaatttcctcccattgtgtaggttgcctgttcactctgatggtagtttcttctgctgtgcagaagctctttagtttaattagatcccatttgtcaattttggcttttgttgccattgcttttggtggtttagacatgaagtccttgcc

SEQ ID NO: 702575 - DNA, 1178 bp, Homo sapiens
  misc_feature (1)..(1): n is a, c, g, or t
  misc_feature (11)..(11): n is a, c, g, or t
  misc_feature (284)..(284): n is a, c, g, or t
  misc_feature (389)..(389): n is a, c, g, or t
  misc_feature (443)..(443): n is a, c, g, or t
  misc_feature (544)..(544): n is a, c, g, or t
  misc_feature (686)..(686): n is a, c, g, or t
  misc_feature (691)..(691): n is a, c, g, or t
  misc_feature (755)..(755): n is a, c, g, or t
  misc_feature (762)..(762): n is a, c, g, or t
  misc_feature (786)..(786): n is a, c, g, or t
  misc_feature (792)..(792): n is a, c, g, or t
  misc_feature (863)..(863): n is a, c, g, or t
  misc_feature (879)..(879): n is a, c, g, or t
  misc_feature (1086)..(1086): n is a, c, g, or t
  misc_feature (1090)..(1090): n is a, c, g, or t
  misc_feature (1156)..(1156): n is a, c, g, or t
  misc_feature (1165)..(1165): n is a, c, g, or t
  misc_feature (1178)..(1178): n is a, c, g, or t
ncccccacagnctcaatagtacaccttaccaatatactaacactacaatttccaacacgctcaagatctcctcacactctatccactctgtcctcggaagataatattatagatctaataaatctttacccactcaccgacaaaccgcgcccgatcccccgtccacccccacacagcccctcacacgcccccgaccgtacaccccacgcttgaagggtgagtaagatcgtctaacatgaagaagaaatctaccagcacatgtacagcgataagagacgaaccanaagaatcaatacatatatcccgccacaccctcgcacacctatctcacctcgccactaccataccaccccaccacgcccaactagttcgtataattataaatatantggttgggataacgacggtggacagtaagataattggatatttgtctatatgcntatgtaataacacactcctactaattgcaagcatatacttataactggatactactctactaatagagagtgctgttgcgaggggtgtgttcacgcccccntccatttggcgctcactgacgtactcactcaccgatcggtccgtcacctgacttctgtcacatctcgcctcgttccccatctacttacgcccgcctcccactcccacagctatctcacgctcacgcgctaggtgctctctcnaattntgtattcacctttgatacgtctctcctcagattgtctcttcttactcacgtcacacaacttacntccttcntcatacacctccacacatctatancatacnctccacatatacctacacacgctcctctcacatgtgctcgtcagctaccttcgctctcgcgtcgtaccatntcgtctcttacttcanatctctcaccatagtaccacgtctcacgccgcactgtgataggaggagtactaagctcaacacacactccgatatactgtccatacacgccatcactgtatcacctactccactcatcaacattcactagtaagacatatacacaagactacatactctgactgtacctatcatagactgtaagtaagtaacatgatatcgcacgtnatanacgtgtaacacgtcgacatacaacgcagacgtagtatgcgacgcgaacacatccgctacgatcgcncgacctcangagcgatacatan

SEQ ID NO: 702576 - DNA, 441 bp, Homo sapiens
gtatccgctgggacacctgcttctggtttcgacgaggaccacgctccttgaccacctggcatgctggacattttgatttgcttgcagctgggggggctcctgaatcccagggctggtagcgtgtggtcgaaggcacctgaccttgcataacagttcggattggcctgtcctgctgagaagccaggtgggaggcgtttaggcattcctcctaggcctggatgtaaactctgtggcccctggtaaggagatagctgctgcatcaccatgaagttaggtcgcacatttccctgttgaaccataggattccgacccggagagctgacaggctgctgaaatccctggggaagtgggttattttgaggtggccttggtcccatctgctgctgagtttggttaaccgtaggggaggatgcaggggatccctacggtgcgttggcccaa

SEQ ID NO: 702577 - DNA, 210 bp, Homo sapiens
gaagacaaaagagatcgaaaaacctatttcatggaataatagctgaaaacttcccaaagtctagcaagagaattaaacaacatccagaatacaggaaagcttagagattccaatacagaattaaaattcaaaaaaggcattcttcatgccacattattgtcaaatctgtcagtaagtcaaaatgtcaaagagagatttctataaacagca

SEQ ID NO: 702578 - DNA, 190 bp, Homo sapiens
ccctgtctctactaaaaatacacacacacacacacacacacacacacacacacaaaaaaaaaaaaaaaaaaactttcccctgttttgggtgtccccctttgttcccccagctcctcggggggcggggggggcaaattcgcttgcccctggcaagcagagcttgctgtgttctgaaatcgcaccattgacc

SEQ ID NO: 702579 - DNA, 1433 bp, Homo sapiens
  misc_feature (657)..(657): n is a, c, g, or t
  misc_feature (1111)..(1111): n is a, c, g, or t
ttgtggggcgtcccacacacccaggggcgcgcccgacgcggaatgagtagacccccctgagcacccgggggggggccccccaaggcggaccccccgcgaagaaagggagcgcccgcgctcttgtgagcaacacaaacttctgccggggggaacccccccgggggctaaaaactcacccatggagcccgtccccctgtttgcgcgaccaaaagcctattccctcgggcgcagactccttctcgcgggggggggggaccggcccatggtgaaaaaggttgggtcgtgcccgcgccccacaagcaaaccaaccggtgttagagcgcccgtgtagccacgtctaaagacaacacacccggggtggtaaccacgcacctgtcctctccccgggggccctcgttgttgtcccggggccacttggagggagagaaggagttccggcgtccagtatatgggaggaattaattgacggcggttggtgacaccaacgccgcacggggggggggctccgccccgggtggcaagacccagtgttttgaccttgtcggttgtgcgcggaaactcttcaatacagagggccgtcacgcaacaggtattgtatcccttctctttccgcgcaacagggtggcgcaaccccgtctccgcaccgaagattgtagngagctatttccctctttttcgcaaaacacccccccccggcgcacagatgtatggcttggtgcgttcggttgttctctcccccctttcgcgggtacgggtcacgcccacctggggggatatttcctctggttcggggtggggcgtcttccacagctgggggtgtctttacacagtgtctctgtgttctgtggcgaccccgcgagttggagagactctttctccctctatgtttggtctctggttgaaaagggcgacagaccacaaagggcactcggcgtgagatgtctaaactctctcgtggtacaccacaatggggcgtgtttaactaatagtggagacaaacggttttcccccgcggttctatagggagttctgagagaatggttgaaacacaccggggagagcctctttcacaggcgcacctttagtcccacggcggagaggctttttttgngggggaaaacaatatactataaccggagcacgaagcttccctacgagacgtttccacccgccctgggggcgtgacacccatgcggccccccaccgtgagaactcggttgtaaacggggctgggagaaaaaagcacgagagagaattgtcacgacgaatcagacttcctctttccacgggcctcagctgccctcccacgtggtgggcccccctcgtaactgccccgaacgagttccacccgtgaaactacccattttttacttggttaaaaccgcttttgtatcattttggtataaaattattgggttaaaactgtgttaaga

SEQ ID NO: 702580 - DNA, 718 bp, Homo sapiens
  misc_feature (425)..(425): n is a, c, g, or t
  misc_feature (476)..(476): n is a, c, g, or t
  misc_feature (491)..(491): n is a, c, g, or t
  misc_feature (512)..(512): n is a, c, g, or t
  misc_feature (545)..(545): n is a, c, g, or t
  misc_feature (562)..(562): n is a, c, g, or t
  misc_feature (593)..(593): n is a, c, g, or t
  misc_feature (608)..(608): n is a, c, g, or t
tcagtggctcacacctgtagtcccagcactttggaaggttgaggcaggcagatcgcctggggttgggagttcgagaccagtctgaccaacatggaggaatcccgtctctgctgaaagtacaaaattagccaggcatggtggcacatgcctgtagtcccagctgctcgggaggctgaggcaggaggatcgcttgagcccaggaggcagaggttgtggtgagccgagatcgtgccattgctctccagcctgggcaacaagagtgaaactccatctcaaaaaaaaaaaaaaaaaaatagccctatgtttaaatggctcaaagaaaagactataaatggaattgaacatgtttgttagctgtttgagcattttatattggtaaattttttattttcttattttttgtcttacagtcgaccaggctggantgcagtggcaaatcatggctcactgcagcctcagcctcctgggctcaagcnatcctcctgcctcgncctccccagtagctgggactncaggtgcacaccaacatacctggctgatttttntgttttttgtagagacngagttttgccatgttgctcaggctgatctcnaactcttgagctcangccatctgtctgcctcagcctctcgaagtgctgggattacaggcctgagccaccacaccttgccaggaatttttaaatctaaccccctgttctattgcctagccctacat

SEQ ID NO: 702581 - DNA, 650 bp, Homo sapiens
  misc_feature (444)..(444): n is a, c, g, or t
tcagtggctcacacctgtagtcccagcactttggaaggttgaggcaggcagatcgcctggggttgggagttcgagaccagtctgaccaacatggaggaatcccgtctctgctgaaagtacaaaattagccaggcatggtggcacatgcctgtagtcccagctgctcgggaggctgaggcaggaggatcgcttgagcccaggaggcagaggttgtggtgagccgagatcgtgccattgctctccagcctgggcaacaagagtgaaactccatctcaaaaaaaaaaaaaaaaaaatagccctatgtttaaatggctcaaagaaaagactataaatggaattgaacatgtttgttagctgtttgagcattttatattggtaaattttttattttcttattttttgtcttacagtcgaccaggaggatcgcttgagcccaggaggcanaggttgtggtgagccgaaatcgtgccattgctctccaacctgggcaacaagagtgaaactccatctcaaaaaaaaaacgcagccaatctcagtggctcacacctgtagtctcagcctctcgaagtgctgggattacaggcctgagccaccacaccttgccaggaatttttaaatctaaccccctgttctattgcctagccctacat

SEQ ID NO: 702582 - DNA, 797 bp, Homo sapiens
gaacagaaagatccggaaactgagtttccaacagtgaaatacccgaatcccgaataggtgaaaggtgtcttgactatgtattatgcttttggctgacaagaaccaaggccagaattgttttagctacacgacccggatgctgatagacttgctgtgggagataaagcatagacagtggtgaatggagggtgttttcaggcacagtgagttcgggggccctcctgggtctggtggctttttacatcttggaaagagaagaaccaggatcgcagtgctctcaaagacacgtacatgttgtccagcaccgtcgtcctccaaaatcttgcgggccattgccattagaggaaggttttcatttcgaggaaacattaactggctttaagtggagtgggaaacagagccaaacagctaatagaccaggggaacaactgttcttattctgcattgtgaagaagctattggatacatgtgctgcccttttgttctggacaaagcatggagtcagtgccgctgtcataagtgcagagttggctagcttctagcaaccaagaatggtcttggtcgtcagcaagctaaagggcatttcatgtgggagtatggtaccatattactaaaagcttcctatttaatctgcatgatcaagaaaccattgcgacactttttgaaaaccttcagaacttacatggaaaacaataatattcccaaacttgttgcaaattgaaattcttggcattagggacttacaatggcaagaaaaattgcacctggtaaaaagggtctccgcaggaaaccgcaat

SEQ ID NO: 702583 - DNA, 426 bp, Homo sapiens
catcaaacaacaagtatatatcaacaataatcctgtattacttatgactgaatcactattttcacagaaactttcctccctaatgaataagaatgcaaactccaagtgtatatcgggtgctgtgagtaacagaagcttgagttagccccatcagcttctgcaaaggttatttttacatcgtctcatgcttctgtgtctagggaagttctttttcctgggaaaagatttaactaagcacaaaactaaacatccagagcagggatcagggaagaatgcaggcgtacttaagtgaacacatatcagcatcagggacatctttctcttaacacactggaactggtagagttgaagacacttctttcactcaatacttccatcattctttgtatccatacagctagagggtccacacacacaattaacttg

SEQ ID NO: 702584 - DNA, 182 bp, Homo sapiens
  misc_feature (143)..(144): n is a, c, g, or t
  misc_feature (157)..(157): n is a, c, g, or t
gatctagaggactcgggagtagtcaagtcacagcatctcagctacattaacagctgctgtaagatcaaaagatctctgcagatcaggaaacgagtactgcgatttatgcaccctctgcacacaatatacctgctgtgttactnnaccatagagctgngtaagattcattcgaaatatttcaa

SEQ ID NO: 702585 - DNA, 373 bp, Homo sapiens
gtttgtattgtggtatttattattatgttccttattacgcagtccttgtgtgtttgttgtggcagtgtatgttggttgaacatgtgcgtttagtgttggtgtgtttagaattcttggtgtgggtttgtttgttatggtgaggcgtgtgtgactaatgattccccgcgtccctgtgttttagcccacaatcttttgggtgaggggtgaaaacgctctagtacctctcctaaggattcaagttggtgaatgactcaacatcctaccccttgagattctcaaataattattttgtcgatttttccatgttttgatggttaaaaagtttgtccctaaaagtggggaggggtgtttttttaaaaacgcccatataaaa

SEQ ID NO: 702586 - DNA, 139 bp, Homo sapiens
ctggacacctgctctgctatataaactgaatcttgggcatattttctaagaattcttttcttttagagacagtgtctcgctctgtcacccaggttggagttcagtggtgccatcatagctcactgcagccccgaatttc

SEQ ID NO: 702587 - DNA, 357 bp, Homo sapiens
agccagaagacaagttacaatggtcttaagaaacataagaggatggggggagaggttgagtcctcgttgactatactttgagcgatgtggacaaaaatatgctacagatgatgcaagtggatgaacacctggattgccatggggacgaactgatgccgattcttcaggagatgatgaaccagattgactatgatggcattggctctgcctctcaagctgaatgtgtccgatctggggccagcaccgggccactgctagtgctgctgggtctggaaatgactctgaaggacgacggacagcacatggggaggcccaaggggttccccagaccagtctactgcaatctgtgcgagtcaa

SEQ ID NO: 702588 - DNA, 1181 bp, Homo sapiens
tagatctctataccctgcaaagatagctgtttacaatgcaatgtgaaataaagatatttccagacaaacaaacaactgaagaaactatttactagaaggtctaaagaaacaaaaaatcataacatgcaaattctccaagtgcaacaggcacaacattcatatggcaacatgtacacatgccagtcacggcaatgcaaacaaccaatggcaacagtgttcaatcatgtcactatacccatttggctaaagtacggtgcgtgtaccagaacagaggtacattctcatgaacccaggtaacttccagttgcttacaggtatacatggacccctcaagtaatgcacttcctaagtgcttgcaccaagagagctcaccgatataacacaacttctacaagaggtaacacgaatcaagagacagggcagcaatacttgacaaaaagtcagaagtgctcgtactcgaacaggaaaggaaacaacgatacagatacagtgtggtcaacaagtagttcactactaactgggacagtagctaattcaggcaacatgcacgaaaagcgcatcacggcaaagctccttaaccgcagcagagttacctcatggactacaacatcgcttttagaacactacttcgcacagacacgttaacaattaacttcgtaattggtcttcacaattggtggtgattacacattcatcccgcaacgagacccgttgcttgacgacagctcacagtcagatggggtcgtttcaccagtaagccagagacacacacgtagggtgatctgacaccacatttaaattccaagggttcaaacgggtgaggcataaaacgacacgtggtggtgaatcttacccagacgtggccactgacagagacaattccacaggacattgactcaatggagaagcgttggaaaatcaagtagggagttacgaggcgcccacttcaattgggccagcgatctttgtagttgagaccaaaaacggtggccagatcccacgcggcaccacagttagcacactttgtagagaaaacaacgcggttggtcccagcaactttctgataatcagtgggtcaaaatgaagatgtacaaggacaaagagacagaccgtactaagtatgctgtggaacacaagggtgaccgaacgaggcgaataaacgtggtgcgcgcacaatataa

SEQ ID NO: 702589 - DNA, 158 bp, Homo sapiens
cccggcacgcggctgcggccggcgatggcatgatcttggctcaccacaacctccacctcctgggttcgagcaagttctcctgcctcagcctccaaagtgctgggattataggcgtgagccaccatgcccggccagttccagttttttgtattatttta

SEQ ID NO: 702590 - DNA, 482 bp, Homo sapiens
tatatatacacatatttaactctgattgtatatatcaaaatctccatttaatggagtcttgaaaattgacttttaaaaacatttacaaacatccttggtgattctgatgcccacgaaaatttgagagctgctgatttcaggccaagctcttcatttcacaaataaggatactgaaacagataaggccatgctttcccagctagctcacaacagaggctggactaggacatacttcaacatagtgctggtctcattctgaagtttaccacttcctattaaagtatgaggaagtcatgtccttaatgaggttaatcagtgccgtttcacttctacgaaatactcttcttcttcctcaatgctcctttcagtggaaacatacttttattatataatttgctagaaattatttcctcatccctttctgaaatttttgacatgattgatcctccatctcattcactaccttctttttgattaatgga

SEQ ID NO: 702591 - DNA, 161 bp, Homo sapiens
ctcgcagctcggtcctgttgctaggtggagtgaagagctgtctttacacaagtctctcattaagccactgccctgcagttgactcaagccatcatcatgtatgtgcgtgtataagaaaggacactggccgggcatggtggctcgcgcctgtaatcccagca

SEQ ID NO: 702592 - DNA, 352 bp, Homo sapiens
cctagacgacctctataggacagcctacgcagaggagagcgcatcggtgagtctagcctggcagtatatcggaacatggctctgcaacacactacagaagtaacactaactcagtactgtatgcacaacccgaggacctgactgagaggcctgacagtgctacagagagtgtagtactaagctcatgcgctggaggctcgtagtagcggtgcgtcatggcctggacaggagcaagaagcaggaatcagcactacggaggcataggtcacgctcacggaatgcagtatggtctgagcagtatagtggtacacttgcgtaactggtacatagcagttgattgctcacggacggt

SEQ ID NO: 702593 - DNA, 226 bp, Homo sapiens
  misc_feature (33)..(33): n is a, c, g, or t
  misc_feature (95)..(95): n is a, c, g, or t
  misc_feature (101)..(101): n is a, c, g, or t
  misc_feature (109)..(109): n is a, c, g, or t
  misc_feature (174)..(174): n is a, c, g, or t
  misc_feature (186)..(186): n is a, c, g, or t
  misc_feature (208)..(208): n is a, c, g, or t
ggtggtacatgcctgtaatcccagctacttggnaggctgaggcaggagaatcgcttgaccccaggaggcagaggttgcagtgagccgagatcgtnccactncactccancttgggcaacaagagcgaaactccatatcaaaaaaaaaaacctgagaggacgttgcaccaatggngatgcatcaagngaaacatgtttggttttttgtnagctctcaccaacttttt

SEQ ID NO: 702594 - DNA, 355 bp, Homo sapiens
atgccccggtttaagcccaaaaaaaaaaaaatgaggcaggggtccaagtaaacccctagcttgttgccccgtgggggccccaggagcaaaaacatggaatccccacccctggggattttggtacaaattgtggggctgcatgctcctgtttaaagcttgtttcaatgggtttaaaaatttttcgccctttggtcgccggtcccctttgagaccccccttgtttataaacaaaaagcccatgttggtcctttgcccggggcctgggacattttgggctatttttgggtttttttggggccggggggaacacccaaaaaataaatcccctcttcccctgttttgggggaagaattta

SEQ ID NO: 702595 - DNA, 191 bp, Homo sapiens
cacggtatgaagtacagggctgtgcatgctctggcccagttgtagggacagtttgccacaagaagccagcagccaggtatggtggctcacagctgtaatcccagcactttgggaggccgagaaaggtggatggctagagcccaggagttccagacccatctggacaacatagcaaaaccctgtctctacgg

SEQ ID NO: 702596 - DNA, 759 bp, Homo sapiens
gaatcagacggacgtggacgcccccggagtggaagccgaagcaggagtgtgttgctgaggggctgccggagccgccgcgagcctccggacagacgccagagcgaggagggcgctacgcgacttggcatgatgacccagttccttgccggagccagactcgttcttggccccttctttgccgccccgtgacccgtattccatacgcatgcgcaccgcctgtgtagaaactgccgactatgaaaaacagccagcaatcaacccttattgtgcgcatttgcgccggtacattcgcagagtttgtgaggacccctcgagatgccccctcctccaacctcgtgcttgagaacccgagagggcagcgcatggagcaggaaacgacgggaaacagattgcagcggcgacagcaagaagtggagacagagcttaaaaactgtgggaccctcacaatgatcccaatgctcaggggggatgccttcagagactctcttcgtggcgagagtgaattatgaccacaacagaatccaagctccggagagagtttgaggtgtacggacctatcaaaagaatacacatggtctacagtaagcggtgcaggaaagcccccgtggttatgcccttcatcgagtacgaacacgaggcgagcacatgcactccgcttacaaacacgcatgatggcaggaagcattgctggccggaggggtccgttggtgggacgtgggaagtgggcgaaccgtgagggctggaggccccgggcggcta

SEQ ID NO: 702597 - DNA, 856 bp, Homo sapiens
gctaggttctcctgaatccctgcggtcccagcgtcgctccggacgctgccaacctgttctccaccgtcgctcgacttccacctctaagactcccacgaaactcaggttgaataattcatcaaattacacaactgaactcaagacatggctgcccagtgtgtcacaaaggtggcgctgaatgtttcctgtgccaatcttttggataaagatatagggtcaaagtcagaccctttatgtgtgttgtttttgaatacaagtggtcaacagtggtatgaggttgagcgcacagaaaggattaagaattgcttgaatccccaattttccaagacatttattattgattactactttgaagtggttcagaaattgaaatttggggtttatgacatcgacaacaaaactattgagctgagtgatgatgacttcttaggggaatgtgaatgtacccttggacaaattgtttccagcaagaagctaactcgaccactggtgatgaaaactggcagacctgcaggaaaagggagcattacgatttcagctgaagaaataaacacgataatagagtggtcttgttgaaatggaagccagaaaactggatataaggatctatttggcaaagtcaagaccccatacctgggaaattccaccaagcagacatcttgatggaaactggcttaatggttccatcggcacagaggttgttacaaaacaacttgaatcctgtttggaggccttttccagatctctcttaactcactggtgtcaccggagatatggacccaacacatttaaggtggccgtggtactgacttatgaccatgcatgctcacatgatctccttggaccttttccgacc

SEQ ID NO: 702598 - DNA, 233 bp, Homo sapiens
tagggctcacttgcctcctgcaaagacccgatagcagcgctctggaagcgcacatctgtatgaaagccctgagcaatttctcgcaccagactgctggacggaacgtttgcgaatcagacgtaccgtggacttctgataccgtctaatttcacggagcgccacagtcccaggcctgtaacgatgaggtttctacacccctccagaagagggcgcactctagcgaagcggattag

SEQ ID NO: 702599 - DNA, 340 bp, Homo sapiens
aactttcaatcttttatttaaaggccatgacccaggaggggttttaaatcttggggaaagcagccccatccatggactggacataggcctcaaaagcagggatctggtcctccagcatatttgttccaactttatcattttcaactacacactggttttgaaggttcttaattccgtatcccactggaactagtttagatgagccccaaactaagccgcctggttgaatgcttttgacccacccctttaatttcgccatatctggctcatcatcccaaggtttcacatttagtaagagggaagacttggcaacaagggcaggtttttgggctttctttga

SEQ ID NO: 702600 - DNA, 531 bp, Homo sapiens
acaccatctgagtcctcacgttggactgggccacggtatggggaggggctgcagcggtccagtgcacctggagaggctgctcagagctgggagaggcctgtcgccactgctgtcggctacagagcctgatcttgagcttcctgtcgcagatcgaaggtcaatcagaaaaatcgggtggtgctctaggattagctgggcatatggggtaagggagggactgcagatcctgattggtacagaaaactaaaatagcagtatgtagcaataaaatgaaaatatgtcttactcaacaggagtgtgatagcaaaaacatcccccaatacgtgggtcacatttggtatactgatgccggggatggctctccccacataagtaggagcgtaccttgaatacacttgtctggtatcacatgagtagaagaggagaaaaattatatagacacacatacacatgtgtgtacgtgcataactgatctctggaaggatacccaagggacaaaccaatagtaggtatacatggagtgaggagcgg

SEQ ID NO: 702601 - DNA, 965 bp, Homo sapiens
gctaggttctcctgaatccctgcggtcccagcgtcgctccggacgctgccaacctgttctccaccgtcgctcgacttccacctctaagactcccacgaaactcaggttgaataattcatcaaattacacaactgctaattaactattaattagaggctttagtgctctgaagggatttggcataaaggggaaaatacctgggtttatgctgtggtggtgacacttactagcttgtgatcccataactcaagacatggctgcccagtgtgtcacaaaggtggcgctgaatgtttcctgtgccaatcttttggataaagatatagggtcaaagtcagaccctttatgtgtgttgtttttgaatacaagtggtcaacagtggtatgaggttgagcgcacagaaaggattaagaattgcttgaatccccaattttccaagacatttattattgattactactttgaagtggttcagaaattgaaatttggggtttatgacatcgacaacaaaactattgagctgagtgatgatgacttcttaggggaatgtgaatgtacccttggacaaattgtttccagcaagaagctaactcgaccactggtgatgaaaactggcagacctgcaggaaaagggagcattacgatttcagctgaagaaataaacacgataatagagtggtcttgttgaaatggaagccagaaaactggatataaggatctatttggcaaagtcaagaccccatacctgggaaattccaccaagcagacatcttgatggaaactggcttaatggttccatcggcacagaggttgttacaaaacaacttgaatcctgtttggaggccttttccagatctctcttaactcactggtgtcaccggagatatggacccaacacatttaaggtggccgtggtactgacttatgaccatgcatgctcacatgatctccttggaccttttccgacc

SEQ ID NO: 702602 - DNA, 291 bp, Homo sapiens
cccatgcctccgttgccagcagttccgcatgactatgaggtccgtgtgaccccctacacttactctcactggggtctgcgcccatctcgattcatgcccgtcactcccttcacttaggaaggctgtgattagctgatcacctcctctcaagatctacctgaccagcttgacccatcttggttgaccgccgtctgtcctgcgtcatgcactagttagcccgcgtatcatggtgcatgcctgtaatcccagctacttgggaggctgaggcaagagaatcacttgaacctcgga

SEQ ID NO: 702603 - DNA, 321 bp, Homo sapiens
  misc_feature (38)..(38): n is a, c, g, or t
cggatacagatgcactttgctatatgatatagcatcanatatctcatcaacctcagattgattgccacactgacttccataggattgcttgtaatcaaaggcgtcagctcctgggcacgggtgtaatcagcagaaacaaacttgagtccaatatcatactctgggaagcagtggtctaacacacagatattcaatccagggatgcaaacctttatttaaccaaaggatggttccccattccatagtaacaagatttccaaaaccattgattgggcagttcattgtcccacaaacaaagcaacccactgggcgaggctagga

SEQ ID NO: 702604 - DNA, 196 bp, Homo sapiens
  misc_feature (168)..(168): n is a, c, g, or t
acgggagtataccggtatcgctgatggtacaggagaagaatgctcagaggagtctgatcataaaaggacgatatactggtcttcaggaggctctgtcattcttcacacttgagcgtcacctcagagaagatcttctctttcatccagcttagcgggtattcgtgccgncagctggcgctgttgcagtgtgcttccg

SEQ ID NO: 702605 - DNA, 246 bp, Homo sapiens
  misc_feature (153)..(153): n is a, c, g, or t
  misc_feature (227)..(227): n is a, c, g, or t
gaagattatgatgctctactgaaggaaaatgacagtcctgatgttcggcgagacaagacctgtatacaggagaacaaatagaggtatttgccaacaagtctgggtgaacaatgggaagattctggctccctacttgggaaatgaaagactcangaaattaggcagacttgacgtgtgacatgtgaagaacatagaagatgagaaagctaagcagctcctgggttgcnctgtgcaagatacaagacg

SEQ ID NO: 702606 - DNA, 296 bp, Homo sapiens
ttggggaaggaaggaaggaaggaataaaagggggcccctagttaggccagtattaaaaagctgatagattccaatttttatagtcaggtttttaaatagtctcaggtcttttctttaaaacgcccccttattggaaatttaagaacaaatttttctccccccggggggaatgggatatcctcttattcgggttttcccaaatccttttgtttgcccttattcaggcttgaaaaagctttttatatccaattggctggtttcccataattcccgaaataaagaattttagcttccca

SEQ ID NO: 702607 - DNA, 789 bp, Homo sapiens
  misc_feature (11)..(11): n is a, c, g, or t
  misc_feature (78)..(78): n is a, c, g, or t
  misc_feature (100)..(100): n is a, c, g, or t
  misc_feature (103)..(103): n is a, c, g, or t
  misc_feature (165)..(165): n is a, c, g, or t
  misc_feature (187)..(187): n is a, c, g, or t
  misc_feature (190)..(190): n is a, c, g, or t
  misc_feature (194)..(195): n is a, c, g, or t
  misc_feature (209)..(209): n is a, c, g, or t
  misc_feature (212)..(212): n is a, c, g, or t
  misc_feature (223)..(223): n is a, c, g, or t
  misc_feature (233)..(233): n is a, c, g, or t
  misc_feature (248)..(248): n is a, c, g, or t
  misc_feature (254)..(254): n is a, c, g, or t
  misc_feature (276)..(276): n is a, c, g, or t
  misc_feature (279)..(279): n is a, c, g, or t
  misc_feature (374)..(380): n is a, c, g, or t
  misc_feature (382)..(386): n is a, c, g, or t
  misc_feature (398)..(398): n is a, c, g, or t
  misc_feature (401)..(401): n is a, c, g, or t
  misc_feature (423)..(423): n is a, c, g, or t
  misc_feature (425)..(425): n is a, c, g, or t
  misc_feature (442)..(442): n is a, c, g, or t
  misc_feature (447)..(448): n is a, c, g, or t
  misc_feature (451)..(451): n is a, c, g, or t
  misc_feature (454)..(454): n is a, c, g, or t
  misc_feature (457)..(457): n is a, c, g, or t
  misc_feature (469)..(469): n is a, c, g, or t
  misc_feature (474)..(474): n is a, c, g, or t
  misc_feature (480)..(480): n is a, c, g, or t
  misc_feature (485)..(485): n is a, c, g, or t
  misc_feature (490)..(490): n is a, c, g, or t
  misc_feature (494)..(494): n is a, c, g, or t
  misc_feature (496)..(498): n is a, c, g, or t
  misc_feature (502)..(502): n is a, c, g, or t
  misc_feature (506)..(506): n is a, c, g, or t
  misc_feature (510)..(510): n is a, c, g, or t
  misc_feature (512)..(512): n is a, c, g, or t
  misc_feature (532)..(532): n is a, c, g, or t
  misc_feature (674)..(674): n is a, c, g, or t
  misc_feature (701)..(701): n is a, c, g, or t
  misc_feature (775)..(775): n is a, c, g, or t
aactattcaanttagtccagtaattccaaatggtcttaggacttctatacataagagatgatcttacaacattaatgnagctaaatacttaacttcccangcnttttgaggattcccaaaagacttgagggggttcccaagagtttcagggtttttttttttttncacaataaaagaaaggaacagngtnaatnngtaaagtcagaccngcngggtaataagntcctcttcanagctcagttctcagngcatanagagattcaatatagccccatngcnctcagggattagaatctgagagggataaaagcaataactattggggaaaagcctaagagtgaaaacagatgtccaaaaaaaaaaagaaaaaaaannnnnnnannnnntcatcccaggangtntgaaaaggagagactctatggngnggggaggtagaaaaggngtgannccnacnggnaaaaaatgaacnggggncacagngactnaagancagngnnngaancacnaggngngagtggcttgcaatttcacngtgaccaggggggcacacaccagaaagcctgggacaaagcccgggctagagccctcaggattcattctcaggcttcctggtgctgtggttcaacagcctttgtggggatggggagaaccagagactatcaccatcacatgtnaaaaatattaccacagcaacagctgtnaaaaaccagctggagctgaagttacacaccatttgaaatccacactgtacttgctttcttgtgatgggcttganacatgtgcagagac

SEQ ID NO: 702608 - DNA, 142 bp, Homo sapiens
  misc_feature (67)..(67): n is a, c, g, or t
  misc_feature (72)..(72): n is a, c, g, or t
accggggccctgggcgggccccccaagaagcctttgtattttggttggggaggggtgggagaccctncaggncattcccaccctcccccatgctgccaagttgtagcatagctacaaataaaaaaaacccttgttttccaga

SEQ ID NO: 702609 - DNA, 119 bp, Homo sapiens
tcctgggcacgagtgagacctgtctcaaaaacaaaaaacaaaacaaagcaaaacaaaaaaacaacttgggagagagtcaggaatcctggagaatccacttcccaggcgtcagagtccta

SEQ ID NO: 702610 - DNA, 239 bp, Homo sapiens
ttcagtaggtacccgattttcaatagtgaatgtgctgctagaaacatgcatctgcaagtacgtatttcaaataatcatttctttactctgggtagatactcagtagtgggattgctggatcaaatgctagttctacttttagtactatacagactctccacactgttttccaatatgcatttatatgttctccatggtggctctatcagtatacattctcaccagcagtatagatgtgt

SEQ ID NO: 702611 - DNA, 440 bp, Homo sapiens
atatagatagcccttggattgtctttgtattatgctaaaatagtggtgctttataggattaacattattgtatctcttccaatacaaagtatggggcatgttatagaatacagtacaccattttcatacatgtacaacattggtggaatgtagaatgtctcttagcagtaatactggctgtagccttcagattttaccagctgcaaactctaggactattatataagtaaaaatctctcttgtgatactggaaaggtgattagaatgtgcaaactgatatagtagctttcatccgcctcttaaagggtaccaccacaggaaagtccatttaagatgttggtaggtttaacaaagttggaatgctggcactgttgaattgggcaacagttcttcagacctggctcagagctacaatgcatttagtatattaaagcagctga

SEQ ID NO: 702612 - DNA, 128 bp, Homo sapiens
ttgtctaaggtttttagagctgtacaggtaaagcgttctggcttaaaatgtggtaagaatgaactccaggccatgtgtcctcctttggtgttccaagaaccagaaatattcgttcaagttgatcctga

SEQ ID NO: 702613 - DNA, 408 bp, Homo sapiens
taccaaagctgattattcttttttgcaggcggctttaattcatgtcgttctgcagttgcggtgtattgaaacggggtaaaaagcgcatagcccatggtgaagaatgtgatacgaaactctttgacctatgaggtaacttacaggcatggggtttgctaaacaggctgtcagtgaaagcccgtatgtgtctcgaggtgagtgtaatttacttccgagtactttacgcagaggatgtatggcccaggtgggcagagtacaggtgatctctagcacaggcggagatgggggcgtgtgcatattgcgaggtgtctgggtgtacctcccattgagtagagaagcttaagataattggggagagaagaacactgctgattgtgggagcagttgaggagtccatggaaaaaaaaa

SEQ ID NO: 702614 - DNA, 874 bp, Homo sapiens
gcaatgctgtccccatcaagctaccatcagctttcttcacagaattagaaaaaactactttaaatttcatatggaaccagaaaagagcctatataacgaagacagtcctaagcaaaaacaacaaagctggaggcatcatgctgacttcaaactatactacaaggctacggtaaccaaaacagcatgattctggtaccaaaacagatacatagaccaatggaacagatcagaggcctcaaaaataacaccacacatctccaaccatcttatctttgacaaacctgacaaaaacaagcaatggggaaaggattccctatttaataaatggtttgggaaaactggctagccatatgcagaatactgaaactggaccccttccttacaccttatacaaaaactaactcaagatggattaaagacttaaacataagacctaaaaccataaaaaccctagaagaaaatctaggcagtaccattcaggacatagaattgggcaaagacttcatgactaaaacaacaaaagcaatggcaacaaaagccaaaattgacaaataggatgtaattaaactaaagagcttctgcacagcaaaagaaactaccatcagagtgaacaggcagtctgcagaatgggagaaaaattttgcaatctatcatctgacaagggctaatatcagaatctacaaataaacaaatttacaagaaacaaaaacacatcaaagtggtgaaggagttgattgagacttctcaaaagaaaactttatgcggcacaacttaaagcagtcatcatcatggtcatagagaatgcaattcaaaaccatgagattctctaaccattaaatggtgtctttaaagtcggaacactgggggaagattg

SEQ ID NO: 702615 - DNA, 309 bp, Homo sapiens
agtctggagactacagaaacatgccaccacgcccggtctaatagatgtatttttatgtagagatagaggtgtagtacgtgttgcccacgtaggtctcaaactcctgagctcaagcaacctgcccaccgtagtctcccaaagtgctgggattacaggcttgagctgccatacctcaccagatcatgagagttcaagaactactgcaggtaatcaaagaattcaaagaattgacaattagatcgccaataatatcttatcaacattggatgccagaaaacaacagaagaatgtcttagagaagctccttgt

SEQ ID NO: 702616 - DNA, 852 bp, Homo sapiens
cgtttcttcattgcgtcctttcattggcgcgtcgccgctaaccacagtaccacttgtccgctgttcctacggaagtgttcttccaggggtcctccctcgcgccctgtgcctaagagccgctctatcgtcggggtattctctggttggttgcctctcagagcgtcttttctcacgcccgagattgtctgcgggcgcgttttaccacacgtctgcgcgtttgttccttctccccccccttttgtggaggtgtcactgtggcgcccacaacacagggtgaacttccgccctgctataacgccccctggggttagtggccctccttctcctttatcaccagatccgttatgacggcccccactcccgggttttccaaccacctgggggggtccccccactaggtgtgttataagggccctccgctccttggaactccctaatatgtgcgtcagcgcccgtggttactttcccgcaagtttatactcgggtgtgcttgatgttttatcccctcggacttaatcccccgcgaatgcgaacgtcgcaggtttttcccccataaccacattttggcggcctattttaggtcgcacactctgtgttacaccccgcggcgtatccaccgggatactcgcgtcacgtttttgtgggcctcaagctaggtcccctcagctaatgaatgggagctgatacactcgcgcccagcaaaagtgttcatctccttttaaaacctccgccccagatagcttctggatgtgtggaactcgacgccggggctgaatctggcgcggttcatgggactggggttgacaaatatcgatatgacagtccaattttgtaagggcgccccacaaaaca

SEQ ID NO: 702617 - DNA, 1233 bp, Homo sapiens
  misc_feature (455)..(455): n is a, c, g, or t
  misc_feature (599)..(599): n is a, c, g, or t
  misc_feature (714)..(714): n is a, c, g, or t
  misc_feature (729)..(729): n is a, c, g, or t
  misc_feature (778)..(778): n is a, c, g, or t
  misc_feature (831)..(831): n is a, c, g, or t
  misc_feature (840)..(840): n is a, c, g, or t
  misc_feature (851)..(851): n is a, c, g, or t
  misc_feature (872)..(872): n is a, c, g, or t
gaaaagaaaaagtagctgatgaagatgatgtggacaatgaggaggctgcactgctgcatgaagaggctaccatgactattgaagagctgctgacacgctacgggcagaactgtcacaagggccctccccacagcaaatctggaggtgggacaggcgaggaaccagggtcccagggcctcaatggggaggcaggacctgaggactcaatctagggaaactccttcacaagaaaatggccccacagccaaggcctacacaggcttttcctccaactcggaacgtgggactgaggcaggccaagttggtgagcctggcattcccactggtgaggctgggccttcctgctcttcagcctctgacaagctgcctcgagttgctaagtccaagttctttgagagacagtgcaggatgagtcagatgaggcggaggaacgaagaggaagcaccacgtgaggnaatgcagcgaggaagcaggatggctacagcagtgaggaggcagagaatgaggaagatgaggatgacaccgaggaggctgaagaggacgatgaagcaagcaagcaagaagcagcatgatggtgccagggatggcaaggcaacagnaggagcctggctctgacagtggtacaacagcggtggtgggccctgatacgagggaagcagttgagattgtagccacacgcaaggagactctcgactgtgtggtactctgaggctnggcaaacgcgtttangaccatgtcctatgatcacaaaccagaggatgaagtagaaactagcacngccatcaaagaaatgctggtggcaaggtcaccatggatgggcgagtcaacggnggcctcaanctctccagagnccattgtggaccacttctatnagagaagaccaagaatcgtgccaacctgaggacacagagtgatttacagccgcgtatcctgacgatcaaggtgcattgactctcactgacgaccatgaattcactggtcaattgcctgtgatggcatctggcaatgtgatgagcagccaggaagttgtcgatttcatccacatcaaagatcagccagcgtgatgaggaatgggcggagcttcgggctattgtcatccattgtggaagagctgctggatcagtgctggacaccaaacactcctggggatgggtaccagggtgtgacaacattgacctgcatccatcatttgcttcagcccgaaaacacagaagaggctccagccaagaagtg

SEQ ID NO: 702618 - DNA, 241 bp, Homo sapiens
ttcctacttcagcctaccaagtagctgggactacaggcatgcagcaccccgcctggctaatttttaatttattttttgtagagattgggtctcactatgtttcccaggctggtttcgaactcctgggctcaagcaatacttctgcctcagcctcccacagtgctgggattacaggtgcagtcactgtgcttggccaaaagaagctttttgatgtagatgaaatcaggtgagaaagccaggc

SEQ ID NO: 702619 - DNA, 387 bp, Homo sapiens
  misc_feature (4)..(4): n is a, c, g, or t
  misc_feature (77)..(77): n is a, c, g, or t
  misc_feature (83)..(83): n is a, c, g, or t
  misc_feature (116)..(116): n is a, c, g, or t
  misc_feature (125)..(125): n is a, c, g, or t
  misc_feature (163)..(163): n is a, c, g, or t
  misc_feature (228)..(228): n is a, c, g, or t
  misc_feature (376)..(378): n is a, c, g, or t
tttnccaacccgttaaaccccccaggatgctgttgcttgtaggacgcttgctgcccctggagcccttccccaggatntgagcnagtcccctcgctggtacggaatgccgctgggtnccggaaggnggccatggtgtctcgatggacggcagccaggatggagnacccatgggtctcacggccatgcttcagggtcttcaggtcctgccccggccagtctccaagaggnacccccttccccagcctctcgcctgcactgatgcagacaaaatctcacctgcaggcccaaccccccccacccctcccccgccgtgtgtgctcctcgccgcatcggttggggttttgttatgtgaaaatatcctggaaataaatacatnnntctgcactt

SEQ ID NO: 702620 - DNA, 685 bp, Homo sapiens
  misc_feature (557)..(557): n is a, c, g, or t
gaaaagaaaaagtagctgatgaagatgatgtggacaatgaggaggctgcactgctgcatgaagaggctaccatgactattgaagagctgctgacacgctacgggcagaactgtcacaagggccctccccacagcaaatctggaggtgggacaggcgaggaaccagggtcccagggcctcaatggggaggcaggacctgaggactcaatctagggaaactccttcacaagaaaatggccccacagccaaggcctacacaggcttttcctccaactcggaacgtgggactgaggcaggccaagttggtgagcctggcattcccactggtgaggctgggccttcctgctcttcagcctctgacaagctgcctcgagttgctaagtccaagttctttgagagacagtgcagcgcatgtagctcatgagtgatgggcggtatggatatgaagtaggataggcatcaggtgtaggcaattgtcgagtccgaggcatagtgactgcgcttacagtcacgtcgaggaaggcatgatgaattgcacgtgacagcactgtacgtgcnatgaccgaaccgaagcgaggtcgtgaatgagcgacgattggacaggacatgacatcacacgaatgtacgattgtagtgtgatgtctcagggagaacttgtggaagtgacgaactagctatgggaagac

SEQ ID NO: 702621 - DNA, 237 bp, Homo sapiens
tttgttttttcccccccgggggggttttggtcccgcccccccccaaattaggtgccccccccccaaaaaggttttgggggttccccagttacccgggcccccccttcggggcccccaattcggcccgcctttcccccgtttgggttctgcccttttacccccggttttgggggttttggggagaaccaaattgttcccgccggccccttttttcattaaactttttttttgggtgga

SEQ ID NO: 702622 - DNA, 768 bp, Homo sapiens
  misc_feature (7)..(7): n is a, c, g, or t
  misc_feature (24)..(24): n is a, c, g, or t
  misc_feature (60)..(60): n is a, c, g, or t
  misc_feature (121)..(121): n is a, c, g, or t
  misc_feature (167)..(167): n is a, c, g, or t
  misc_feature (188)..(188): n is a, c, g, or t
  misc_feature (241)..(241): n is a, c, g, or t
  misc_feature (243)..(243): n is a, c, g, or t
  misc_feature (270)..(270): n is a, c, g, or t
  misc_feature (413)..(413): n is a, c, g, or t
  misc_feature (419)..(419): n is a, c, g, or t
  misc_feature (421)..(421): n is a, c, g, or t
  misc_feature (426)..(426): n is a, c, g, or t
  misc_feature (454)..(454): n is a, c, g, or t
  misc_feature (459)..(459): n is a, c, g, or t
  misc_feature (466)..(466): n is a, c, g, or t
  misc_feature (474)..(474): n is a, c, g, or t
  misc_feature (483)..(483): n is a, c, g, or t
  misc_feature (488)..(488): n is a, c, g, or t
  misc_feature (494)..(494): n is a, c, g, or t
  misc_feature (498)..(498): n is a, c, g, or t
  misc_feature (501)..(501): n is a, c, g, or t
  misc_feature (511)..(511): n is a, c, g, or t
  misc_feature (519)..(519): n is a, c, g, or t
  misc_feature (533)..(533): n is a, c, g, or t
  misc_feature (554)..(554): n is a, c, g, or t
  misc_feature (576)..(576): n is a, c, g, or t
  misc_feature (581)..(581): n is a, c, g, or t
  misc_feature (593)..(593): n is a, c, g, or t
  misc_feature (596)..(596): n is a, c, g, or t
  misc_feature (605)..(605): n is a, c, g, or t
  misc_feature (614)..(614): n is a, c, g, or t
  misc_feature (616)..(616): n is a, c, g, or t
  misc_feature (621)..(621): n is a, c, g, or t
  misc_feature (625)..(625): n is a, c, g, or t
  misc_feature (631)..(631): n is a, c, g, or t
  misc_feature (643)..(643): n is a, c, g, or t
  misc_feature (645)..(645): n is a, c, g, or t
  misc_feature (662)..(662): n is a, c, g, or t
  misc_feature (668)..(668): n is a, c, g, or t
  misc_feature (674)..(674): n is a, c, g, or t
  misc_feature (685)..(685): n is a, c, g, or t
  misc_feature (697)..(697): n is a, c, g, or t
  misc_feature (702)..(702): n is a, c, g, or t
  misc_feature (759)..(759): n is a, c, g, or t
taccccnccttagctttatgcgcncagaaaccaaattaaacccccccccatgtaacaggngggcagtgacaaaagcaagaacgcacgaagccagcctggagaccaccacgtcctgcccccngccatttatcgccctgattggattttgtttttcatctgtccctgtngcttgggttgagttgaggggngagcctcctggggggcactggccactgagcccccttggagaagtcagaggggngnggagaaggccactgtccggcctggctnctggggacagtggctggtccccaaaagtcctgagggcggaggggggggttgggcagggtctccacaggtgtcaggagggagcacggaggccacaggagggggctcctggctggcctgaggctggccggaggggaaggggctancaggtntntaaanaaagggttccatcaggctggggcagggnggccnccttccncacacttnaggaacccnccccnctcccncggnganatcttgcccncccctcancaccctgccttttntccaggaggtccgaagctctntgggacctcttgggggcaaggnggggngaggccggggantanggaggtcangcgggtctnancccanaaancagganagctgccaggtntncccatcgaccaggttgnttgggncccggngcccacgggtntggtgatgccanaacanccaccaccgcggcgcctagggctgcggcagggactcggcctctgggaggtttactcncccccactt

SEQ ID NO: 702623 - DNA, 269 bp, Homo sapiens
  misc_feature (78)..(78): n is a, c, g, or t
  misc_feature (115)..(115): n is a, c, g, or t
  misc_feature (135)..(135): n is a, c, g, or t
  misc_feature (153)..(153): n is a, c, g, or t
  misc_feature (172)..(172): n is a, c, g, or t
  misc_feature (192)..(192): n is a, c, g, or t
  misc_feature (238)..(238): n is a, c, g, or t
  misc_feature (263)..(263): n is a, c, g, or t
ataggtgagaagaaacccagagaaggtttttaggtccagaaacctttaaccgataccaaggatatggtatgttgtccnagctggaaccaagtttgccatttttgagggcttgagncgaagggaagactcttaccngatagtaagacagctganctttcctcagttttctcgncttaacactagtggacaatnctagcattttgtttggaggatttcagagttaacctcatgggaattnaggattttttcagcaagttttggcntttggg

SEQ ID NO: 702624 - DNA, 119 bp, Homo sapiens
tgcactcgaggtcgggagtacaggagcaccagcaggacatcagcaccagggactttctcgccagcagggacaggggaccaggtggacaacttcaccaggacgtccatctgacccatctt

SEQ ID NO: 702625 - DNA, 992 bp, Homo sapiens
  misc_feature (992)..(992): n is a, c, g, or t
ggtggctcccttgatggtcggggcggccctggaagctgggccttgagtgcctgcttgtgctgcttcgtggccttcgtcgtcgtcctgcctctctcgtcaatatctccctctctttgtccctccccagttccggacctgggatcccggggtagccttgagcaggcctcgtgtctcctcagggtgtcccaggagcagccgtggcgacagagtggggctccgattagagtatgtgggatgtcggttacgccaggtgagtgaatgagaggatgcgaacaccgcagtatgaggccactagcatgggccatgcgaggagtactagagtgcgataggctggagggtggagtgcatttagagaggtgtgtgagcagcttccgaacccgtggtccatgggaacgggggccttgcgtgggtcgcgtcgtgtgaattcatcccgacgcgggcatcccgtgcatccaaggagattgagtcctaactgaggcacgcccacgggcctggtctgggctgggcacgggccaccgaaggccatcaacttgatgggcgtctggtgtccccaggagggcagggcggaggggttgccgaggggcgtgggaggccgggactgtggtccatagaggtaggcggagggtgtgccggcagatttgagctatcccaggggtctgcacgggggagagcagggcctgctccgctatcggtgctcggcacgatcctgaatgcaaaatggacggaccctggaccggcgtctgttcggacagagtggcgcggaccgctgtgtgtgttccccgggtatggccaacggtacatcagagagaggtgggagtaccctctggcagaaagcatcaccgcgcgtggcaggctaacccattggggggcccctcgggggacgggaccacgaacgggctggcgccggggactcgagtatacgcgcacaggcggggtcggaggaaccctaacgaatccaccgtgcacgtgttctcgttcgggacgccgtggan

SEQ ID NO: 702626 - DNA, 401 bp, Homo sapiens
ctcgtacaggctagtcttgaacttgtgagcttatgagccacccacatgaggtggctaaagggcttagaggacagtcttgcgtcactgcatccagcctttaacacacattaagctggccagcgtatagatatctggggagagtcaagacatgtaaatgacgactacagatcttacagacaatatatggtagctataagcagaactatttaacagggtacaggattctagctagaaggaacgaaatcaggaaaggcaggcagacgtgacttcatagcacacactgaaactgactgcggtgaacagcactgctaactgctacatgaaaggatgactgaaggaggttgatctgtgacagacgaatgactctgagattcgcttttagagtgtgcaggtactggctc

SEQ ID NO: 702627 - DNA, 959 bp, Homo sapiens
tccatattggttaaaaaaaaaaaaaaaagtttctcttaaaaatttaagtgaggggacctgccaagggggtggaagggttgggcccaacccccttctcggccaagtggggggccctaggtccaccccaggcttgtgctgtgtgggccccggggcgctttggccgcggggctctgcagggcgggggcggggcggtccgcgcctactattccgcagactgtgctgggttgggggccacgtgtgaaggctgtcgtaggccttgagccaggctccctccaggggggtagcctggttcccagcacgcaccagggcccctggaggcctcgcgactgtggcgccggggaacagccctgcgcatgtggtcccagggtactgttgtcgcgggggtcgccatctccttcacttggtgttcacggacacgcgggtgtgtttaagaccacctcttccagatgtccggcccctcgttcggccagtagctagggctgggcctcgtcctttttgaaccacgggccacgtggattgacgcagatgtttctattccctgtggccccgaacaccgaggcctcttcggcgttggcccctggggcaggccgcttctcccgggcactgtgccgcagggccaaactccttgactcgttcttcgaaaccaatcttcgggggccagcgagatttcggaccggctgcggagccacggttccgtgaccgcttgagatcattgcgcgccagagcggtttgcgacggttcttcaccctatttccactccgtttcgttcccagggcccacttggtccttgatagggggcgtagaggggcccccctgttccgggcaatgtcgtgttcaccaccccggtggctggccccagtggcaagcccggtttaacccaaagaggttcccggggtcgccccaacgcggcccggcaatgggtgttacagctcccggttggcccaggaccgtcattcacg

SEQ ID NO: 702628 - DNA, 678 bp, Homo sapiens
gaaaattaaaagaaagaaaggaaagaaagaaagaaaaagaaagaaagaaagaaagaaagaaagaaagaaagaaagaaagaaagaaagaaagaaagaaagaaaggaaaggaagaaggaagaaggaagaaggaaggaaggtctctaagtgtaagatgtttcatgtcaccaatggtattagcgcagttacaaagatcaattctgcttgtcaacgatttaacaaattcctacaaaccctatggagtctggagggaccaatggtttcttcaaacctttaagctttaaaaatatatagatttctaggtcccaatgtagatttactgaatcataatcatctaggataaggctagaatttgcgtttttaacaactcctacatgattctcacttgtcaggtggccacatatgagaataccagaccagatgatattgaaagagcttttcatacttccttgattctacttctagtccatgtcataggaggcaatattcacagggggaggagtatagactctacagcccagatgtgtggtttaaaacccaactttgtctcccactacctagatgtttctgagtaagcctgcatacctacgttccttctttggtaaatgggattaccattatttttaccccacaagtgtcccaaagactaccttgttttgcagggctcgtcccccttcttt

SEQ ID NO: 702629 - DNA, 596 bp, Homo sapiens
  misc_feature (13)..(13): n is a, c, g, or t
  misc_feature (45)..(45): n is a, c, g, or t
  misc_feature (55)..(55): n is a, c, g, or t
  misc_feature (77)..(77): n is a, c, g, or t
  misc_feature (99)..(99): n is a, c, g, or t
  misc_feature (136)..(136): n is a, c, g, or t
  misc_feature (185)..(185): n is a, c, g, or t
  misc_feature (212)..(212): n is a, c, g, or t
  misc_feature (229)..(229): n is a, c, g, or t
  misc_feature (285)..(285): n is a, c, g, or t
  misc_feature (302)..(302): n is a, c, g, or t
  misc_feature (334)..(334): n is a, c, g, or t
  misc_feature (347)..(347): n is a, c, g, or t
  misc_feature (457)..(457): n is a, c, g, or t
  misc_feature (487)..(487): n is a, c, g, or t
  misc_feature (517)..(517): n is a, c, g, or t
  misc_feature (537)..(537): n is a, c, g, or t
  misc_feature (589)..(589): n is a, c, g, or t
aagggaaaaaaantgaagtccaccggtggggccgctcaaaaaacnagggaacccncgggttaaagccctcgtgtttnacccaaaatttgtcccgtggtngggaaccaagtctcccggtcggtaatggtatccaacntgttgggctttagccattaccccccagaaaattgctcctcccttagganaaggctctgtctctgatgctgctggcntccctcaagtgctgccntcctccgtttggggcttggtggatacaagtgctgacacacaaagcaggcaggcaanctcggcccagggtgtcntccagcccctctgatggcagggaccagcgagncctggggaaactnacagtctgtgcctgtctgtgctctcaggagactgaggaattagtgggtgggagagattttatgttggattaaaaactgacctccaggccggcatggtgtctcatgcctgnatcccagcactttggaggccaaggtggagntcacttgagccctggagtttgagcttcagnagctatgattacaccacttnctcttccagcctgggcaaacagagtggcaccctgtctctaaaaacaaacaanaaaacaa

SEQ ID NO: 702630 - DNA, 407 bp, Homo sapiens
  misc_feature (112)..(112): n is a, c, g, or t
  misc_feature (114)..(115): n is a, c, g, or t
  misc_feature (180)..(180): n is a, c, g, or t
taggtttagggttttattaaaattaagtggcccccaagggaccccattttgcggttccttatgggatccccccccccgggggggatggggaagggtttcccctggaaaaaancnntttgggttggggttcaaagttggaaaacttgggcccctggaaagggtcccccaggggtccccctncaaccctgggggcccccgtcccccccgggcccccccgggggggtttaggggttttttcccccccccggcccctggggttaaggcggaaaaataaggggggccagcccccctcccccttttctttttccccccgggttggggggtggggtttgggggttttttttttttttcccctttggtttgaaaataaaggatgccaaaaaaaaaaaatccccgttttttcccca

SEQ ID NO: 702631 - DNA, 246 bp, Homo sapiens
tcccccccctttccccccccggttcccgggggttttccttggggtttttgacccccccccttccctttcaaccccaaggggggaattttggttccccccccctttttccaaaccaggtttggggtggccccaaattttttggcccaaatttaaaagtttttttttttaaaatttaaaaaagcccccaaccccgggggtttttaaaaatttttttttttaggtaaaaaaaagccggtttttgtccca

SEQ ID NO: 702632 - DNA, 658 bp, Homo sapiens
  misc_feature (627)..(627): n is a, c, g, or t
ggaatactagtgtatcgctgacacctcatatcctcgctactatgcctagaaggaataatactatcgctgctcattatagctactctgatcaccctgaacaaccactccttcttagccaatatcgagcctattgccatactagtctatgacgtctgcgaagcatcgacgtgcctagccctacgtagttgagtgtccaacacatatgggctagactacgtgcatagcctagacctagtccagtgctgaaactaagcgcaccaacacttgtattactaccactgacatgactttccaaataacacattgctgggatcagcacagccacccacagcctaatgattagcatcatccctatactataggctaaccgcaacatcatcctatctagctgttacccaagctttagctaggagcccctaacagcctcactgctagtactaactacctgactgctacccctgacaatgatggcaagccaacggcacttatccagtgaaccactatcagcgagaatgctctacctcactatactaagctcccatacacatctccttaattataacgatcacagccacagtactaatcataggataggtcttctatcgaacccacattgatcccactttngtactatcaccgatgaggcaccgtcggcgcc

SEQ ID NO: 702633 - DNA, 345 bp, Homo sapiens
ggtgcctttacaagtatgagctagatacaaaggttctccgtagtccccatcagattaattagatacggagtatggacacaaaggttctccaagggcccaacagaacagctagatacagagtgtcgattggtgcattcacaaatcctgagctagacacagggtgctgattggtgtgtttacaaaccttgagctagatacagagtgctgattggtgtatttacaatccctgagctagacataaaggttctccaaggccccaccagagcagctagatacagagtgtccattgatgcactcacaaaccttgagctaaacacaaggtgctgattggtgtgtttacaatcc

SEQ ID NO: 702634 - DNA, 1006 bp, Homo sapiens
gggcgattatagtggaacttcaccttcacctgctcatgcgccccgcagcgcgccctgctcccacgcccgcgtagttgaggacccagactcgccaggaaaggctagtgagtgctggtgtgccctgggctgggccctggactgggccgggtcacggggaggggcctggcggcagggtgcggggcctcagcgtaaaggcgcggagcacactcggcagccagagagcgctgagtaagagcggcgcccgtctcgagagacaagtggtggccagaagatcgattgcacgatcacaagaacccaagccacgaccaggacagtcttgcagcgtagcatcacggggcggccccattaacccattactagtgccctttagacaaaagggcgccggaccgagcaggacatagaaaggacaccagtgggcttagaagtgccactgcccccactgggcaaaaagccaggagagatgatcccccaggatggtagacagcgaacatgtgggcacattgggacggaaaacagtttccccgagataaagggtgccgcactaccacgaaaggaagggccgcaaaagcagaagagatatgacggagcaacccgaaaggtgatctgcgcggcacaccaccgaagacatcacggataccacccacaattgggaagggacaccgttggctgcactgcgggtagccgaggaagcgacaattgccggggaatcccagagggaaagggcacaacgcgaaagcaactacaaggaaaccccatggcataggacccaaagacgaccaaccctgcccacagcaatggagcggcagaagacaaggcagcagcaggcggccagcacaggtccgatcataacaagcagacgctatgacagggacaggaagaacacacgaaagcaaacaaacccaggatccacagagagaggccggagcagaactacactacaaacacagaccagcacgctggcagccgggagcagctacagagccaaaaggagacaagccagagaggg

SEQ ID NO: 702635 - DNA, 136 bp, Homo sapiens
aggatcccctctctaatgtttcatatttacacttctttttttcaggaggaagacctgaacatcttttcccggtccttaatttcccacacatcaggtgggcagctgcggtgcttaattttggcccggtggaaaagta

SEQ ID NO: 702636 - DNA, 360 bp, Homo sapiens
  misc_feature (16)..(16): n is a, c, g, or t
cggctgcggcacgggnatgcctacactgtaactagcagcatagtgcttaactagttacaagaaatgctgcttccctttgacattgtttccgggggtgtatgaaagttgcacttatttctattaaccccatggagggatgcccacagctgagcctccaggccaggcatggcacgtcagtgcctggccgctgagcatccacgggccacagggcgggatcctccctgcccccagggactgccgcctctgcggccactggtgctgcgatgcaccggaaccccccgggggaacctgagccacgtctgaggtgccctgaagtggctcctggccagaccggagccacacagtcccgtgccgctcccg

SEQ ID NO: 702637 - DNA, 163 bp, Homo sapiens
cttgaggatccccgcgtatgagcatgggagtggattagtttgacatttagggattgagacagaatacagtcttagggacctgccctcttgtctggtttatgttattcctgggaagtatattctaaatcatcccagtgattggcttgatccacaaatacttatg

SEQ ID NO: 702638 - DNA, 475 bp, Homo sapiens
actcggtacactcgaagaatactacacagcgtgtacacactgacaaaaagcacaaatataaataatatcttaataattccactttcactgaaagtataattaaggtaaacttacagactggcagagctaacacttgtatggaggtacaaagattcaaatattctgtttgcatgcgtcagactggaatgttatattaaatccaaaattaagtttatgtacatccaaattctcattagatcaatttagtactctaagcatgctccatttaccagcatcatcctcacaaataaagccttcattaacaatgccaatcagccattgtttttaatcaattactccccaaaagtacatggtttccaaatcccttcctctcagttaactgaaacggatatacaggtaataaagatttatagcttaggattgatggaagtttgaacggctttataaatattactactatcatcaattcatgtca

SEQ ID NO: 702639 - DNA, 239 bp, Homo sapiens
  misc_feature (166)..(166): n is a, c, g, or t
tcatattgctagacaacatacatggtgcttcaatgtttaaaatgtagaaggtgaaaggtacccaagagtagtttggaatgctccctatcttccttttgtacctttgaccatattcacagagagaccatcataaatcttgttcccctcacacctaccattcattctngtcccgtctactcccttctctccagtacacaccattgttctttgcctttttgtgtttcacaaagtaaagatgg

SEQ ID NO: 702640 - DNA, 615 bp, Homo sapiens
acatttgtgttcatggtgaagggtggtagtccatgtggcccagagtttgtgctgtccatcagtccatctccaaagccctggtggcctattaccagaaatatatggatgaggcttccaagaaggatatctaagacaccctcatccagaatgaccagtacattgctggtagactggcctcgttcgaccgtgtgagtccaaaaagtttggaagctactggtgcctgtgctcgctactagaaatcctaccaataggccaggcatcactggttgcacacctgtaatcccagcactttgggaggatgaggtgggcggatcactgaggttcaggagttcgagaccagctggccaacatgcgtgaaagcactgtatttacaaaagtacaaaaattagctgagctgatggcgggtgccccgtaatcctggctacttgggaggctgagatggtagaatcacatgaatctgggaggtgcaggttgtcagcgagctcaagcttgtgctagtgcattccagctctgggcaagagtgtgagacctccatttcgttagatagcaagtaagagagagagagacgagagttgcagtataaagagagaagaatcattacccgagcattcacaa

SEQ ID NO: 702641 - DNA, 201 bp, Homo sapiens
agatcccggggggcacaggtgccagcattatatacattcctcagggtctgatcaaagttcagctggtacaccagggaccgataccgcagagtcaggatgaccacctagggatgggggaccgccgggaacagggaagccaccgacacgttggagaccatgcggatgcccacagcaacagaggggtggtccccaccgcggccg

SEQ ID NO: 702642 - DNA, 927 bp, Homo sapiens
  misc_feature (927)..(927): n is a, c, g, or t
ggcgacgcatgagggcgcactatcgatgggaggtggacgttccgtgataatcacacggacctggctagaggttcaggaggctccgaggatgcccaagatccacgatatatatctgaggctgtcggtcacagttatactagggtatctggtcagaagaacctcaatgcactatacaactcgagtgctttgtgtagaagcaggttgtttactgacatcgcactcaaccgtgtccgtgtaactgtccgctcgttaacccctcggatggactccggatcaatggaatctgtcgcgtggtcggaagagaataagactgggcgtgagtttagaaggcttacctataactagatgatcgtagccgtggttcaggaggaatcgcaaagttgaaggtatgtcgcattagacgtgtagcaaccttggcccggtggccggcattctcaaggtcacgccaggtcgacaaggattcctcacttccgcaccacgttagggtccttggtagctccccctgaaaggagtgtgtggtgacctggtacgtgggttcgtccggatccatcgacagaagtccgagaagatgtcaccgaagaattgtcgggaaaaggccccaggaaccccgaacagtcaaccaaaccctacgtccgctccaaggggccggaaggttcgaaacgtgccagaggtgcgacggggccagttcgagggctacaaaaactaagcctggatctactctcttattaaaaagattttggctgaccgtggaacacacaaacacgatgtgttgtcaccaaaaaaatgatgccggaattctttcggggggggacaaacggtaaaaaagcggcagagggctagggggttttctcacccccgtttttttcccaagggggaacccggcgggcccccaaggggaggtataatgaaacgcggtaagataacagn

SEQ ID NO: 702643 - DNA, 452 bp, Homo sapiens
  misc_feature (161)..(161): n is a, c, g, or t
  misc_feature (165)..(165): n is a, c, g, or t
  misc_feature (167)..(167): n is a, c, g, or t
  misc_feature (170)..(171): n is a, c, g, or t
  misc_feature (315)..(315): n is a, c, g, or t
  misc_feature (358)..(358): n is a, c, g, or t
  misc_feature (386)..(386): n is a, c, g, or t
  misc_feature (393)..(393): n is a, c, g, or t
  misc_feature (400)..(400): n is a, c, g, or t
  misc_feature (417)..(417): n is a, c, g, or t
tgactgtgtatggtactttgtgcacgtgtgtatgtgtgtgttcacatgtgtgtagtgtgcgtgcattgcatggctgtgggtggtgtgtgcacacctgttttgtgcacacatgtataagtgcttacatatggttgtgtgcacatgtgcatgcatgagtgtgntcanangtnngtgtgtggtgtgtggatgtgtggtatgtgcacacgtctgtgaatgtgagtgcatgcatggtgtttatttgtgtatgtgcatgggtgcccacgtagggtgtgtgcacgtgtgtgcatgtgtgtgttcacatgtatgtctgtgtgntgtgcatgtgtgcacatgagtgtatgaatggtgtttatgtgcntctgcatgtgcgtgcccatgtatggtgnttgtgtncacatgngcatgcatatgtgaggntgtgttcacataatggggtatccgggtaccgagct

SEQ ID NO: 702644 - DNA, 169 bp, Homo sapiens
cgaggatccgtgcaccgtcctttctcgacggactacggtcacccgcggggtatcttgacgacgcgtgacttcttctggcctttggttctcttctttgtcagccctttttccttggagccagtgtccacgaagccgagtttttcatttcgggggagcacgtacggttgca

SEQ ID NO: 702645 - DNA, 153 bp, Homo sapiens
atgaggtatacgggagctgtggtcctgcagagctgaatagtagctgttcggcagacattcttaaagaaaggatgagaagtctcgataaaaggaagagcaacagaaacttttggaacagcgggcccatcttcccgggaagacgggcccgatctt

SEQ ID NO: 702646 - DNA, 410 bp, Homo sapiens
agctagggaatgttgtataatgggagaaacctggtactttatctttgaatggagggtggaaggagggaacttggaactttttaatagatgtgtgagggtgctataccctgatttgttgtagagttgcccccatgaattcagctcgcccaaaacagtacatagtcttccctcctacacttctgcattctctctgttaatggcatcattatcccacctgccaatcaggctcaaaaaatgtcctgtttcattgttcctttaaccacatgtttccacacataggaatacttgtcctgtcccccctgtctctgcctctttccattttcatgatcactgccttacttaagagccctttagtctctcccttagactcaccccgtctgcccagtaaaagcctttctgcagcagctgaa

SEQ ID NO: 702647 - DNA, 1007 bp, Homo sapiens
ttgtttttttgttgtgtgtggcgttcttggtgggtctcggtttctggagtgcttgaatcgtgtgccgtgtttgctattgggtttgtgagacctggtacccgcgtggatactcctgtttatttcttctccactgcatgggcctgtgattgtcccacgtgatgttcagttataagggctatcaagaatgtatgattaggcccgttttctagtctgtcatctgaaatatctgtaccgagctctttctaaagtggtcactttcgccactcttcgttctgcagtaatggcttagaggatgcaggccaaccgttctactgtcagctctgcaccggcggggacctctaggacattgttgacgcttggttctgcaaggctgttactgaatgggagcccgcctatctggggattagtacctctttggttaaacaaatacggtaccccatgctaggtacgacgtctgcggtaattactacttcgagcagtatcgtcgaggccgctaatagtgagaaccacctctcgttcttcgattgcgcatgcctgaggatcacgccacagaccaccaagctgaagggcaaaatgcagagcaggtcttgacatggctgagaatgtggtaattgtggcatctcagaagcgacctttatgggtggtcgggagctccagctgccttctatgttcatgttgacatctcaagacatctacccagaagttcttactatgagggtactacaggtcatcatccagctccgggacgacacgcgccgggctaacaagaaaagccaagcagacaggcaggcataggttcctccggtttaggctcagcaggagcatccacgcgcagctgttcaggcagctggaggctgaggacgtgatgccacttatacaaatctcggagtgtagccagtcagaggcgtcagtccggagggaggaatcacccatggatgtcgaccagccatcgcccaggctcaaatactcaatccattgccccgatggaaccaaagggggagttagaa

SEQ ID NO: 702648 - DNA, 503 bp, Homo sapiens
  misc_feature (95)..(95): n is a, c, g, or t
ttggcaacatgatttcggtaagggcacctttgcagaatttcagcttcccatcaatttttcagcctacagaggttcaaaagccagagtccatgcanatgttgcagtgagtcctgtgtcacttggtagaattttacatgcattgtatatagcaagctactgatggcttccattggatgtttggctacactccatcccaccttactgttaggatataaagtaacatgcttacagactacctagcttcttccggccagtttcttcatcaggcatggtaggccgtagctgcctttccacagataagtatggttctattaaaaatgctaattagcctggtttgatcagtatacattgtatacatgtgttgaaataccactctgtattccataaatttgtacaattattacatgtcaactaaaaataaaagggaaaaaatttgttaatgttttacctgtagagcagattataaggataataaagacattctcactcagaaaaaaaaaaaa

SEQ ID NO: 702649 - DNA, 225 bp, Homo sapiens
gacatggccccactcccatcacatcgcaccataatcctcttctgcagaatggcgttaatctcatcccgcaggattactacagaccttctataaagaaagtgaaagtttgacttcaaagaatgaaaggtgaaaaagatgtgtgcgggaggagctttagagcaatatatactaatctaccaataaaggagtaaatggcgtttataaaagatgcacacataacgggac

SEQ ID NO: 702650 - DNA, 477 bp, Homo sapiens
agacagtcattaaaggaggtcatggtttttcaaagtggaaagatacaataacagatgaatcgaatgaaatagcagataaatgtccaacttaggaaatatatgtcacatcacatataatgacccaaatcaccacttgatccaaagtcaaggaccttgaaccaaatgcatttaaaatgtattggtttattcggacatagatttcctttataagagaaaagcattcgaattcacccatttaaaaaaaatcatctttcattctttctaaattggacattaaatttgccaatgactgcattgtgttaaaggtgtggtccttttgctttctgatccaaattggcttggaattgatccaggatttcaagctgggattcttctgcacatttaaatgtatgtgacttgatcggaagttgtcaaagacaactcattaaactggaaatctcactatgtcattgtttaattggtctttttttgttgttg

SEQ ID NO: 702651 - DNA, 169 bp, Homo sapiens
gtatcgcatccagtacgatgtagcagatgtacacagataggatgtagcatcgcttgcgaaactactccagaaaaattgaggaagtggattctcctaaatcatccatgaggaccgggatccatgaggaccccggatccatgatgaccccggaatccatgaggaccccgga

SEQ ID NO: 702652 - DNA, 175 bp, Homo sapiens
gtctgatgagcgtggatgggcgcttaaccgggtcgttatcccgcagcgcagtctgctacaaaagtggccactagcactcgcatacacgcctggtccacgcagcgagccgggttcttaccccattaaacgttgagaataggttgagatcgtctctggcccaaagaccttctaatca

SEQ ID NO: 702653 - DNA, 755 bp, Homo sapiens
accgggagaaaggccgatgtccccagatgctgagtgcggtggtgggcagggctcctgataacgccggggtcagggcagtggtgtcttctgtaggctcatatgaggaacatgctgatggtccatggggacgcaggaagggatggaggtgaactccggtgatggggccggacagggagcctcacgcttacatgagcctggtgttggcactctcctggcttcctccgtcaatacctagccatcgtggtcgagggagcccgggcctagcagacggtgccccagcgcttgacatgaatccccatgggtcgtgcgtggcggtgggtggcgatcttcacatgccgagatccgggcctaatcgctgctgtctcgcagtcacccctgcgaggccgctcagggcagggctctggtcctgacgggggttcctggacactgcctctgagccggcatggccctagccgtagcccgtgcatccttccatcgcgccgtctcctgtcagcccgcgtgctccggatgcctgcatctcgcctgcaccgtgccatcgccttgtctccagagcaggccctgccgttggacctgcatcgcgtgtaggatagcgtatgtcagtctactgataggcaccttagctaacgaacccgtgtacctggtaagattttagcccagggacccgagaagctttgcaaccgtgtgtaagtccgaggctcgtgacaagtcccattgactcagcagacggaacccatcctggcagcaactctcgattg

SEQ ID NO: 702654 - DNA, 1273 bp, Homo sapiens
  misc_feature (814)..(814): n is a, c, g, or t
  misc_feature (1273)..(1273): n is a, c, g, or t
gctcatctgcatgacctagcaacgggtacctctgcattgcagctaggcagcgaggggccggtacagcgactacttcctcttcagctcggatagcaaggcatgtgcgctacgtggatactcacaagaagcacttgctcacttgtagcattcaaaccttcctactggacgtggccgttacctcgagattgcaggctgggaatgattgctcagaaagatgttgaatgaccgtgatatccctggatccaatgtcaatcccgttcttgcctccgtcgttctgttgacagcagtgatccaacgagcacctaggaacacttaccatcgagcgacagcgaacaacgagcgatcggcccgtgttcctcttgaacgaggaccgttgttgaaccctactacaaggtcctcatggagacctaaggttggtgaagttagaccgtcgccacaataggttgttgtgtgtccctacgttagagtcaaagggtccatggagggtaacttaaccacgcaactcccttccagtgcataattagaggaggagggcaatagggaccgaatccctcgtagatggcaaggtaacatgtgtgctttctttctcccctctatcggtactcaatagtcaacttctttgtaaagggagggcctgagcactggtgtctagcttgtgttgtctctgctggtgtgagttgcaatattacctactgctatttagttacgttccttgtcttgtggcggaccttccggaaatgagaaccagttggggaagtactacattgcaataggcctatgctccgccattcgttgtggtgtcggccacgaggtngtgtacttgtgaaaaaccgataagcaagttacgcactgagcaacgagctaacacagcgttgcgcagaggcgatggtggtgttatagtaccctgtgccccacctgcgcggggtgcattgccaggttgcgacaagtgccggaaaacaagggtgggtggtatacaaaccaatgttgacatgcgcgccaagagacggcaatgtacgggagggtagagaaccaaaggcgttggcaccgttatgtacaaaagctctccttgtggagagctagggctataccccttgaatagaccccacccagagagtaaaaaccttccgaggcagatcttatagagctacctttacccacaaagtaattaaagcgagggtccctagtggagagggaggctctagagaaaggactttaatgggtgggagccctcgaaggttccggctctgttgggattgagacctcccacccggan

SEQ ID NO: 702655 - DNA, 151 bp, Homo sapiens
tgaatccccgacccccctaccccatgctgtacttgtggttttctttttgtattttgcatttgaccccggggggttgggacagattggcgatgggccgtcccctttccccttggttttgcactgttgccaataaaaagtttttaaaaacgca

SEQ ID NO: 702656 - DNA, 454 bp, Homo sapiens
  misc_feature (1)..(1): n is a, c, g, or t
  misc_feature (27)..(27): n is a, c, g, or t
  misc_feature (31)..(31): n is a, c, g, or t
  misc_feature (126)..(126): n is a, c, g, or t
  misc_feature (130)..(130): n is a, c, g, or t
  misc_feature (193)..(193): n is a, c, g, or t
  misc_feature (250)..(250): n is a, c, g, or t
  misc_feature (342)..(342): n is a, c, g, or t
  misc_feature (405)..(405): n is a, c, g, or t
  misc_feature (438)..(438): n is a, c, g, or t
nctgcaggaattcggcacgagcagcgnccantgctgccctcaccacccgcacccctcgacgcctgaacccagctctggggacccgctgaccgcagatgagtggacccttggctggtcctgaatgantttntcctgagctccccggccctgctctgtctgccgtctgattcctgtgcactttctggtggttganagagcccaggcccagaagacccaacccaaggctcagatcctggggtcaccacccgcnagctctgtgcgtggtttccctccctagaaaacgggggaaattaaggcctgctgtgtatggctgtttggatgcaatgaatcagatacaacggncacacaaagcttgagcccgggtcttgaggtttctatgtcttgaggaacatattatgttctccngtgaagtgctttccttcttgcttaaggggtttngggccatagagttggg

SEQ ID NO: 702657 - DNA, 131 bp, Homo sapiens
tcggggtggtggtggggggcaggagtcaacggatagagcatatcttgcttggtttggtgtggagacaagttcttactctgttgcccaggctggaatgcagcggcacaatcatagctcactacagcctcaac

SEQ ID NO: 702658 - DNA, 659 bp, Homo sapiens
aacatggtgaaaccctgtctctactaaaaatacaaaaattagccaggcatggtagcaggtgcctgtaatcccagctaccggggaaagctgaggcaggagaatgcttcaatctggaaggcagaggttgcagtgagatgcaccattgcattccagcctgggcaacaagagggaaactccgtctcaaaaaaaaaaaataaaagtgccttttaggccggatgtggtggctcatgcctgtaatcccagcacttggggaggccaaggcaggcagatcacttgaggtcaggagtttgagaccagcctggccaacacggaaaaccccgtttctactaaaaatacaaaaattagctgggtgtggtggcgtgcgcctgtaatcccagctactcaggaggctgaggcaggagcatggttgaacccgggaggcagaggttgcagtgagctgagatggcaccactgcactccagcctgggagacacagcgagactctgtctccaaaaaaaaaggtgttttggaaaatgttgaggttgaaatgtatgggaaccaaattcttggattagtggggagcataatagcaaaacccccttgtgttcgacatgtacgggaatggcacccagttggggcacagcatgggattccccgcctgaatgtgtggtgcaagtggg

SEQ ID NO: 702659 - DNA, 992 bp, Homo sapiens
  misc_feature (674)..(674): n is a, c, g, or t
gaggcgctgccgtgcctgtcgcgcaagggacatcgtgtcctcccaggtttgatggcggtcaggcggggtctatgccaggcatcggggcgcgtctgcgttgcgcccgacgtctccgtcggcttaccttgtgcctatgaggtgatttgaagggctaggggccgatgagattcgtaggccctgctgctggagcctgtccctggagtttccccgtgcccatgaccaagacccgcggtggctgccctcatcagcccgtccgtcttgcactcggcagagcggtcctggtcaggaaggccggctcagatgttgcaactcggattcagtgggcccccttgacgcccaggtgcctgagattagaatgtgccatgcccgctagatatagacggacgctctacgtagtggacaaccaatcgagcggtacccagaggaacctaagctttatattcgcatgggtaacttcttacaacattttcccaatctccattgttgtgcacgcctaatttcacaaccagatgatatatcacctgttcactcccacttcttgacatacgcttacataatttcgtgggattcgaccccccttgatccctacaaggaccatttcctaaacacacaagtattgatactccgctcaaagtgaatatacacggtcaatcgttaccgtgcacaccttgcgntgtactcttctaggggcaccatgcttagaaatgatcgtcactgggagatagtgatatttcctagctcctatggcgtaaacaattgtagtgcgcccaggaaaaggctataccacagtgtataacctgaatagaacaccttattacaccaagcaaatgtcttggtgtaaaaccagaagttggtactcataacacacttccccaatggcacgccgcgaaacagtgtgaatttgcaccagtatttacacacccttgagacatttcttaggcggggatgcacactgccccaaaagaatgatcttgcaaaaattagtacttccc

SEQ ID NO: 702660 - DNA, 414 bp, Homo sapiens
catgagatttggtgggaattacaaagatccagacccatatcattccacccctgtctccacatctcgtgtccttttcacgttgcaaaatacaaccatgccttcccaacagtcctgaaaagtctttactcattccggcatcaactcagtcaaaagtctcaagtctcatctggacatgaattccttccacctatgagcccgtaaaatcaaaacaagttatttactgccaacataccatgggagtacagcttattgggtcgctctccaaaagggagaagttgaccaaaagaaaaggggctacaggccccaatgcaagtttgaaacccagcagggcagtcattaaaacttaaagctcctgcagtgagccgagattgcgccactgcactccagcctgggcaacagagtgagactccagct

SEQ ID NO: 702661 - DNA, 882 bp, Homo sapiens
aaatacaataaaaaaaaacaatagcatagttctcgatcttttgtgccccaaactagacccatacatggtttagactcattgacgtcacttctcgtaataaatcgcttccaatagcccacgggcacagaactcctttccagcactataagtctcccccttaagttcttcctttgtacacctcccatgtccctccttttgcaaatttgatccggtgtcccaattctgaaacttgaaattttaaaaacccctgtaaatgtaaattctctctgttccttcgggacaggtcccgcccaaaagtccaaaggtttaatcggaacagtatagctcctcccaagggatcctccttctcccaagttttccgtgaaatagttctagcctttgtttccgaagaagacgtcgaaagacaccagccctattttgttgtacaaccaccctctttctgctgaactaaaaccaaacccttctcctccccctccttgtgaaagacaggaaatttcctctttttcacaggaactcgagtctcccccaggtaagccgttgaacatgatatggatccatgttccaatcagggggataacccatacccatctggcacaaagtcataaccccaagcctacttttttattatagtttacatgctcggtatataaataacgaccgcggcatctaatcatcatgttaactagagggtaaaacacggctttttaatgcgaccaattcgttaaacatcattacagagccctcctttttatttcacaccggctaggtacagccccacttcacctccatccaccaatttgttgctagtacccatttgcaggggaaccgtgggttccctcaatttggagaaataaaaagacaagccttcctcccaaacaagac

SEQ ID NO: 702662 - DNA, 211 bp, Homo sapiens
tacccactagtcaaatattcactccactatgcatataccatgataaggtagagtgtattatcagtattcaatgacttcgaataacttcactatatgggatgatttacaaatcttcattattcttacttactctgaagagcttttgtagacttgtaaggcttcaaccagagttttgtcaattgatttttattcgcacacctctactgcctgt

SEQ ID NO: 702663 - DNA, 1045 bp, Homo sapiens
  misc_feature (222)..(222): n is a, c, g, or t
gggaccttgtggggtgagtctggctttttggctggcaactccctggccaagtgtgagcacctggaagcaaaaggatggggcaggactccagcgctcgcgggtgctctctgtgtggccacggggagaagaggctttgggcggcggcgggtgccaatggtcatgggcagatgtgtgtgggctgtgaccccgcacgtgggctttggactggcacagatctgaagntggagcctggctaggccttgctgtgggctggactttggcggaggaggcctctagtgggggccagggtgtggtgggggagtacgggtggcctgctgtcttgtgttaccagtgtgaccttcgagctccgaagaactgcctggtccctgccttaagctcggtcgcatttggcggcccagatgctataaccctgtgctcttgagcgctcaatccttgtccacgataacaggacgtggagcaccggtccaccctccagtgagggcgaaagaactcgctgtccatgggatccacgccatgcgcagatcgtggcgctcttcggggtcagcaggagccgccttatcgggggcaatagggctcagctggtgacaccttctgcccacaggtgccaagtcctgccctgccaaacttcttggcagctgccgacgacaaactcagtgggttccagggggacttcctgttggccatactggtggttgagttcctggtggccgtggccagcaatggcctggcctgtaacgcttcagcatccggaagcaggccatggaccccgccgtggtcttctctgtccagctgggcatgtcagcgactgtctgggccttgacgttgccctggtggcgctatctctatcccccaagcactggcgctattgggaagccgcgtccggctggagcgttcttcttcacttgaacttgttggcaggggatcttcatcacttggtcagccttaacggatctgggattgggcccttttttgccgagaccccttgggccagccgcttgggcgtagcctccggtggctgcgccttggcgtgcaatcagtttcactt

SEQ ID NO: 702664 - DNA, 203 bp, Homo sapiens
aatctttcctgcgacagattcacgtcaccgtaactcgggctgcgcgatttacgcaccgagaaactttcgcctcccaagttcaagcaacttgctctgcttttgtctcccgaatagtgggactactgtcgcccgccaccatgcccagctgctctttttcttttcagtaaaagacgggtttacaccatgctgggggagtcccgagc

SEQ ID NO: 702665 - DNA, 107 bp, Homo sapiens
tcagttagggagcatacggagcatcagtagcagcagcggagtgtccaaccaatgctcgttactgacaacacaacatacccccagcagacgtgaccgctccgcttact

SEQ ID NO: 702666 - DNA, 626 bp, Homo sapiens
  misc_feature (235)..(235): n is a, c, g, or t
  misc_feature (342)..(342): n is a, c, g, or t
tactttcagggcaagcagtaattttggagttttcagaacttttaccaatattcagcttgaacttgtttgtaatgaattttaaagaaagtcatgaatatatagattgattccctttatcactgttcttacccagttctggttcttgagactttttttggtggggggcaggtgcaaaatggaaaacaaatttgcttgttttgtttctcagatgtcttttctgtcagagtgcatgttntaaaattagctttaatcaagtataaacaaagaaatattagaaaataattaaaatttaactgtgaaacttaatctatgtgttgctactcttaaattatgggattgtanctaaaaagtgaaaaataatttgccttggcttaacataggacagaaacatgaaccagcaagctgaactctcagtgtctgtttggactaaacttaatgcatttgtgtaaaatctaccagaaatgaattcaaagatgataggtagtattataaaagcttcctctcttacaaagactttacctcagcataccagaaagagtgagcccctacagtgcatgtttatttctgaagatgaactagagcactaggcaaacactaaattattaagagctaaactgaaccggtta

SEQ ID NO: 702667 - DNA, 601 bp, Homo sapiens
  misc_feature (9)..(9): n is a, c, g, or t
  misc_feature (27)..(27): n is a, c, g, or t
  misc_feature (35)..(35): n is a, c, g, or t
  misc_feature (69)..(69): n is a, c, g, or t
  misc_feature (114)..(114): n is a, c, g, or t
  misc_feature (137)..(137): n is a, c, g, or t
  misc_feature (154)..(154): n is a, c, g, or t
aatattgtntcctatcactcatccccncgaggtgncaattaggcatctgttgcttctcccttgtgagtnccacacccaactatcaccaggcttttggagaaaacttcttaccangaaaaagatcaaaagaagcaaanggacctcaacagaagcngaaaattcaaccattgacaaaactatgattaatattcttggtgagatgagaggagattttgcacctgtgaaacagtgctattaaaaagacattttagccaagaaaaacctcatggatattaaaaaaatgttggaagaaatgaaaaattcagtaaagagttaagaggttcattctaccagaaaatagaatgaaaagataaaaagatagaatgtaggtaagaatagataaaattagtgggtcattctagaaggaccaatataaactatagataaatagaacagagtaaaaggaagaattagcaaagcataattagagaaaatttctcaaacctcaaagggcatgagttttgagattgagaagacctactgccttgcctctatagtgaatgtttaaagatccacgcaaaggcatatcatcatgacgttttagatcctacaaacgaaaata

SEQ ID NO: 702668 - DNA, 116 bp, Homo sapiens
tgagggcccgggcgctcatcccgaccccgtcgggaccgtcggcggtcagggtccggatggcagtaagcaccgaacggtaattggccatcggctcacccatacccataaagacaatg

SEQ ID NO: 702669 - DNA, 838 bp, Homo sapiens
ggatagtgctgacactacaaggctcggagctccgggcactcagacatcatgagctggtccattgcacccccggaaatttgaattcatctacattctatgctcttcttatttcttctcttcaactatgtgtagcatatgtagctaccagagacaactgctgcatcttagatgaagagattcggatagtttatttgtccaatctacctgtggtcgatcgcagattttacctgtctacttatcaaaccaaatgtagactagaggatctacagtctttggcaagacattcttacagtctaacgttgaaaacggaaatcatacagaatgtcaacacataactgatacaaaggcaatcgcaactcacttataagtcctgtatgaatctagtcagaaacaaattatgatagtacgcgtggtacttggatagtcccaggcaacaatgttaagaagaaattcatgcaagtatgaagcattgattttaacatatggactcaagtattcggatatattgctggaaatatactaagttcaacaataagtcaaacagattgttaaacctgaaaagtagacaggtatgccctagctctgaagctacagtgccaggaaccttgcaaagacacggtgccaatccatgatatcactgggaaagattgtcgacgacattgcccaataagggagctaagcaagtagcgggcttaactttaattacaaccttctgaaaagctaaccatagaattctcaagtctagtgtgaaatcgatgggtctggaaatgggttggactgtgtttcagaagagacttgatgggagggtagatatgcagacatagtggattcggcataa

SEQ ID NO: 702670 - DNA, 994 bp, Homo sapiens
tctatattgtggtcaggatggtagcccggtattccattaagcaagcgagaggtcattttcgaccgtggtcaacgggttgatactttacgccctgggcaaggtgtagggctggcggtagcccgcgaaatcaccgagcaatatgagggtaaaatcgtcgccggagagagcatgctgggcggtgcgcggatggaggtgatttttggtcgccagcattctgcgccgaaagatgaataaatatgcccatacttcacgcattacgttaagcatccgttataatcggttgcagataccagcctgtggatgcttaacatggaatacaactcaattctttactggggcccgattttcttgaacgtctactggcgagaaacagcgcccgtggtgtgtataaacagcgcggttcttatataattatatagacccgatctctccagacgagttggcggcgtctggcgatggaaagcgaagttgacagtcgactggtcagtcaccaggatggcaaatggcaggtcagccacggccgttcgaaagctacgatcatctcggtgaaaccaactggtcattactggtacaggcagtgaaccactggatgagccgaccgcgcgcttgattgcgaccgttccgtgaactaccggacttggcgtcttgatgatctgattgatttccttttctgtgacccggcgggcggcgttcggcccgacatcttcgactcagtaccgacgtgtttatcattccaggattccccggacgttcgtcactggcgagtgggcgaaaaagcttgcatatgaaacaggagtgccaaacatccggagtcttgtacaaggtcgacccgtcgaagccatctatcgtgaagagggtgagcctggggatatcttaaatttccgccagaatccgattaaaggttccggctgatactcgatacattccgggggtacgggccaatacgggaacgatatggatgcacatttgtcgatgaaggggcattacagccgtc

SEQ ID NO: 702671 - DNA, 100 bp, Homo sapiens
gttgcagaaggcggattggaaggacatggaaggaccagagagtgaaaagttggaatgagaggatgttaaggggtggcacggaagcaaagttgaggaaaga

SEQ ID NO: 702672 - DNA, 199 bp, Homo sapiens
gctcaggagtgtatcctattagatagacgatgactacgcctctgcgacaggatcgagagcagatgaggatagtatagagtccagaggcagacaaatctcgaccacatcccaagatactgtagactaatgctgactccaaaagtggaaaccaatacgctgaatatacagaacaagatacctgttgacccaggtgcctggg

SEQ ID NO: 702673 - DNA, 329 bp, Homo sapiens
aaccagatgagtgacgcgagaaaaaataatagaagagataataagtacgaagaagaaacaaagaggggggctggggcacaaatgaactaaaacaagttgaataagaagtaagcgcaaaaagtatggaaaaagcaaagaaaagagggggaggacaaaaaattataattaaattggagaaacacgtataataagaataacgtagcatggggacctagcagtaattgcggtggactagggaggaccaccagctacctgataaactttaaagcacgtcatagcagaaaaggtgtaggcagataatggccagagcatgacacttgtagggacga

SEQ ID NO: 702674 - DNA, 1257 bp, Homo sapiens
gttgggtgtttcctgcttcaacagtgcttgtgactggaacccgtgctgctcgttccccaccccgtgcctggctgcccatagccagccctccgtcacctcttcacctgcaccctctgtgactgccccaatggcccccgcctgcctgcatccagcgcctgctgcagccacctgccgcctgcctgcctgcctctccttagtctgcctgccatgacgacctgctgtccacctcgcaggtgctgccagaactaccaccatgtgactcatgagtgcctgccatcaacctgccatgatcaacctgtgagctctactgcctcctactgtttacctgtccatgtcttactacttttgaccgcgatgatgtggcttttgaagcaactttgcccacatactttcttcacccaatctcatgaggagcagggacacatgctgcagcaacactgcatgcaagctgccgcaaccacatgcaggttggccgcacatcttccttcaggcatctccagacaacctagacttgtgctgacttgggaccagcgtggctgcactgcccctgcgcttgtgcattagcatcttggcaccacacatgtgacttcacgtccactactggacactggcacacaactggcccactgccccacgccatgcaccctccactgtggtgctgacttcactatgccgacacagttcaccttgacattcatccagggtgaacggccatcacgaccaccttggcgctcaactatgtggcaccagcttgccgcctcgtcatctcgcgccccccgaattctggcgttgccggcatattcgccttgcgcaaatgtcacccccatgcgacccacactggacttacttcccaccctcagtccattcgggctaatttccgccataacccgatgcgttggccattccgtatcccccaggtgggctatgtcatattgggggacttcttgtacctttcccatctagagcgtatcctacacatcccatctagcacctcgacgcgttcaccactctctcaaacaaacaatatcagtccccccccaccacaccccatcctcactcacatcactcacccccccccccccccacgtccccaccccacgacacgacaaacaacactctctcctcacaccctctctcactactccatcccttatcctcctcaactcagcccacatcctcaccccgccatcacacatcctcatacttcttattagcatatccaccaacccacacctctttactagtcgtcctttcgcg

SEQ ID NO: 702675 - DNA, 1440 bp, Homo sapiens
gctttagaaagcattgttttagtccaggcacagtggctcacgcctgtaaggtgagaggtgtgggagggaagagcttcggttcaaaagaggctaggggatgtgcgtgtgcttgattctccagccatggtcacgacagggtctcccaggagccatcgatggaaagccctggagggaatcagcatgtgtactggtagctatgaagctttctggcaaagctgcagtctgcgaaacagcgtaggtcaaactcgaagcataactgtccaggagctcgacgtgcataggtggccacaggttatttggggacagcataaccagactcagcatgaccgtgaactgacctatctcagaacgctcccaaagactgggccaaagacgtgctggacgaaacacgcagcaaggaaagggaagacctagaggcaactccgagcgcagctacgcacgaacagcctcaaccagaaaccacaacgcaacacggcgccgcccccgacgaccccacgcaacccccaccaggcccacgctaccgccggggcacacaaagcagaccagtcaagaaaaagccatccgccacccaagccaggaaaggcaccagtaaaaaaaaaaacaaaccaaaaacacgcaaaaaaaacaacataaggaagacaacccgacacaggaaaaaaaaggacagaaaaaacacacagacgcaaaacccgagaaaaacaacacaggaccagcacaaccaaggggagcaacccaatgaaacgcacggacacacagacaacgcacacaccagagagcaaaacaacgagaaagagccacgcagcacaaaccgagacaaggaagaaacaaacacaaagaaaaaaaacgaagacaaaacaaacaaagaacaacaacaaccaaacagcggagacagacaggagcacgcgaccaagaagacgagaaaaacagcagaagagagacagacagcaaccagcagccaagaccgaaccagaaacagaaaacgacagacaacccacacaaaaagaaccacaagagcaaacgagggcaacagacagcaacagagaaagacggcgcagcgacacagaacaaagccaaagcagcaaacagaaaacagagacagaaggacaaggagagcaggcagagaaagacacagacaagaacaaagaacgcagaaaagcaagacacagcgaaaagaaaacgacacaccgaacaacgaaacgaagaataacgagaaaacaacagacaaacaagaagagaaagacagaaacaacagactagacgacaacgaaagatgaaacacgacacaaggacaaacaaaaccacaagacaacagcaagaagcacagaaagacagaagacagacagacacaacgcaacagcacgcaacagcacgacgacggagagaaaagacagacggctcaggggacgatactcttatcactgatgcgcgctcgcgcacacc

SEQ ID NO: 702676 - DNA, 414 bp, Homo sapiens
  misc_feature (150)..(150): n is a, c, g, or t
  misc_feature (187)..(187): n is a, c, g, or t
  misc_feature (191)..(191): n is a, c, g, or t
  misc_feature (211)..(211): n is a, c, g, or t
cacgcgtccgcggcttcccttccacagcacggcgaccggggcttcccctcagcagctgccggcgcctcagtctccgcggccagcccagctccgccgcgtccgcggcccgccgccgccatgcagtttatgttgctttttagtcgccagggnaaagcttcgactgcagaaatggtatgtcccactgtcngacnaagaaaagaagaagatcacnagagaacttgttcaaaccgttttagcacggaaacccaagatgtgcagcttccttgagtggagagatctgaagattgtttataaaagatatgccagtctatatttttgctgtgctattgaggatcaggacaatgaactgattaccctggaaataatccatcgttacgtggaattacttgacaagtattttggcagtgtatgtga

SEQ ID NO: 702677 - DNA, 1064 bp, Homo sapiens
  misc_feature (16)..(16): n is a, c, g, or t
  misc_feature (65)..(65): n is a, c, g, or t
  misc_feature (67)..(70): n is a, c, g, or t
  misc_feature (72)..(73): n is a, c, g, or t
  misc_feature (76)..(76): n is a, c, g, or t
  misc_feature (110)..(110): n is a, c, g, or t
  misc_feature (167)..(167): n is a, c, g, or t
  misc_feature (176)..(176): n is a, c, g, or t
  misc_feature (192)..(192): n is a, c, g, or t
  misc_feature (197)..(197): n is a, c, g, or t
  misc_feature (212)..(212): n is a, c, g, or t
  misc_feature (224)..(224): n is a, c, g, or t
  misc_feature (237)..(237): n is a, c, g, or t
  misc_feature (272)..(273): n is a, c, g, or t
  misc_feature (289)..(289): n is a, c, g, or t
  misc_feature (293)..(293): n is a, c, g, or t
  misc_feature (298)..(298): n is a, c, g, or t
  misc_feature (308)..(308): n is a, c, g, or t
  misc_feature (327)..(327): n is a, c, g, or t
  misc_feature (345)..(345): n is a, c, g, or t
  misc_feature (390)..(390): n is a, c, g, or t
  misc_feature (596)..(596): n is a, c, g, or t
  misc_feature (636)..(636): n is a, c, g, or t
  misc_feature (646)..(646): n is a, c, g, or t
  misc_feature (745)..(745): n is a, c, g, or t
  misc_feature (783)..(783): n is a, c, g, or t
  misc_feature (828)..(828): n is a, c, g, or t
  misc_feature (873)..(873): n is a, c, g, or t
  misc_feature (901)..(901): n is a, c, g, or t
  misc_feature (926)..(926): n is a, c, g, or t
  misc_feature (934)..(934): n is a, c, g, or t
  misc_feature (942)..(942): n is a, c, g, or t
  misc_feature (963)..(963): n is a, c, g, or t
  misc_feature (965)..(965): n is a, c, g, or t
  misc_feature (984)..(984): n is a, c, g, or t
  misc_feature (992)..(992): n is a, c, g, or t
  misc_feature (1004)..(1004): n is a, c, g, or t
  misc_feature (1057)..(1057): n is a, c, g, or t
tcttctacaccccccnattatatcaaaaaacaaaaaacaacatacacccaccaaacacaaattcncnnnncnnccnaacccccacttcacttacatccctaacccaactnacaaccctcacctctatcccccctctcccttacccctcctcttccccctcctcaccnaaattctcntcctcttcttccctcncatcntcctattcctcatantcacactactanctccttcatcttnctctcatctcttcctcaactccatctcctctattnncttcccttttttccanttcnccaancccttccccnccaacatcccacttaactnctcccacattccctttanttcctcctccatccgctcttctattcccaattaaccgtcactccnattttcaccgccaccaccgtccgcatctcacacacccctcttttcacatttttccccatccattccacaaactacctcctcttcttcttctccacctttataccatcttctcatccacctccttcatccacatcccaccacccaacacaccccccaccctcacctatcccccctccccccccttacacccacccatcatcttcttnccatccaacacctcctccctcatttcccccactctcacanctccatactnctcccttccacccctcctcacacccccaaaccacccataaacaaatccacacctcccaaccccaccatcttcactcccaacttccccacctcaccattnacctccccacccaaacccacccacctcctcacacactnatcctccctcacacaacctccttcacatccccctacttctctctnctcaccttcacacttccccacacatatcatacacccctccttctnaatccatacctctatcactttctctacnactcatccacccacaccttccattntaccctcnacaccctntaaaactttcctcaaccacanantcaactattatcatccatncctatctntccatctcctanaacaaatccattcaaactttcccccaataatactactcaacctcacactaacntttctct

SEQ ID NO: 702678 - DNA, 227 bp, Homo sapiens
caatgatgtgaacggcccagtttcttgaagtccagtgtttccacggctggatacctgtgtgtctccataaaagtcctgtcaccacggccgttccaggccttttattccagcgtcttctaaagagcttagtgtctcacagcatgcagggtggtccgctgctgcttaccttcggaatccagtgcttcccacagagcattcagccttgtagcttatcattttgcagcatt

SEQ ID NO: 702679 - DNA, 880 bp, Homo sapiens
  misc_feature (188)..(189): n is a, c, g, or t
  misc_feature (352)..(352): n is a, c, g, or t
atgcaaagcaagaaaagaaggtaaagcggcgtgtggcctctgtatttttaatatgatttaaggggaataaggggagaggagagatcaagagtgctacttgcagctgtagaacttgaagtcgtgggaaactatagagtcaacacttgcaaactcaagcactggataccgtccgggagaggcacttgacnnctgccttagaagaatttgaaaacaattttgtaggccaactttcagttatgaatcaaaagcattaggttttaaaaaggaaaggaatttccttcttgaccatttaaaatttgcattttttccacagaaacccagcagacattcaacccattcccaggacttgtanatttaatggaaaattcgacaagggttgccaaccttgcggtattcttctcttctaatgaggagggaacaggggaagtaatttttgaggggaaactggggaacctttaatggggagattgggcgaatcttgccttggcaagaaatggtggtggcgcaaactccccggggaaataactgtaagcagttgattatataaaatgtggggttttcttttggtaagggttaggtaggattgggcagtcctttctcatagaggcggacagaaatttgtgggtattagcaatgattcaatcgtgcatatccactctttgttgaaacatgttgactgtcttggtacataatagtggtgctattatcgtctgtatctctatagggtagttatcaagacattcattctttgcaccctcgccttttgaaacacaaacaggttcggatttgtacgtgatgtaactcgtgctagacgctccggctattatgctgtcatctagcacctaccttgaggcctacctagatacgcatgtttacggag

SEQ ID NO: 702680 - DNA, 951 bp, Homo sapiens
gccgagctggaggaggctgggtgtgggagtgcgttgtggctgtgtggaggcaggcctagatttgggtgcaacgtaggtctgattgagcttgtgttgtgctgaagggacagccctgggttctaggggatagagctccgctgatgtgtgagagccgccttcccctggtcccaggccctcccagttcccccatggaacgggccgacttcctgtgtcgcccgacgtcgagatgcatgtgctgtagagaacaagcggcagggtcgaagtcgtgcggtgtagagggctgggcatgtgatgtgggccaagaattgggcaacgtgcccgattctcccagagcactgtctcgatggtactgtggctcgagggcagtccccttcaatgtctagcatcggtagacgaccagggaggcggaccgatgaccagtgcatacaagctgtgcccatgggagggcaagcgtccactattccttgcggtatggcactgaagtgctcgacgagacgatccgaacgaagattgacggaatttctggatggcagtagctgatgccctcccaggtacccccaagctggccaagcttctgaatccctgagtctcaacacagctgggctggacagtattggccaaattttctgcctacatcgaagaattcaaacccagcactcgaatgacaatctggagaagggactcctgactgccctgaaggttctagacaagttacttagcatcccccgtcccagaagaagtggatgaaaccagtgcttgaagcatgacggtgtctctcagaggaagtttatgggattggcaacgagctcaccctgggtgactggaacctgttgccaaagttacacagtagtacaggtggtgtgtaacgaagtaccgggggaattcaccatccccgagggccttccgggggagtgcatcggtacttgaggcacatgcttacgccgggaagat

SEQ ID NO: 702681 - DNA, 294 bp, Homo sapiens
gcagaagttgcagtgagccaagttttcaccactgcactccatgtgcgatagggagactctgtctcaaaaaaaagagacgaaggcgaattagatacagaaaccattcttcatgtatcaaattattaacaatgaggccagtcacggtggctcacgcccgcaatcctagcactttgggaggccaagttggtaggatcacttgaggtaaggagttcgagaccagccatgccaacagtgcaaaaccccatctgtactaaaaatacaaaaattagccaggtgtgcctgtaatcccagcta

SEQ ID NO: 702682 - DNA, 200 bp, Homo sapiens
aggatagagtgatctaatagagccattgtaacgatggagctgtgcctgtggatgagctgttgtggggcatgtaggctcatctgcggagactgacgtgactgtagggtatgggcctaatataggccattgtgagtcatgatcttggtctgtagaggcttgattggagaaagttcttgggcctctagcaggcaccctgtgga

SEQ ID NO: 702683 - DNA, 392 bp, Homo sapiens
tgctcccttccccctccccggtgttatcccggagaatgggttttttgttgaaatcccaaattttttggggggaaaatacctccgccggggttgggtgaggcccgggggtggttggtccggatttccaggcccgaaagatggatttatccctgaagggaaaggccttggggttggtttcaattcagcgggtttggttcagccagccccccccggttaaaaccagggtatccgggaatttttgggtggggtttttgtttttgaaaaagggactggtccgccgggtggtggattaggttttaggggttcctgggttccgaaagaagatggccggtggccctttaggcccccttggggttttttaatgatgccattaaaggccttttggtttggga

SEQ ID NO: 702684 - DNA, 131 bp, Homo sapiens
tcatattctcctcctgcctcagcgttcccgagctagctgggactacaggcgcccgccaccttcatccagctaatgttggtgtatgcctgtttagtaccagacgcgggtttcaccgctgttagccagagatg

SEQ ID NO: 702685 - DNA, 127 bp, Homo sapiens
cactgttgttcatacatgcactgttgttcatacctgcactgttgttcatacttgcactgttgttcatacctggtcgctgtatctgtgtgttggcgcctgagtatgcaaggtggtatttaacaacagt

SEQ ID NO: 702686 - DNA, 513 bp, Homo sapiens
cgatggtgcaggaggttaaggtgtagatctgaagagtccctgtgggattattagaaaatagatgctcccagagcaaaaacactgtcagccaatgttcagccagctcagcacttagattatctttggtgtgcaagataacagacttgaaattgcttttgaaatctctccaagactgtccatcccactcagtcttttatgtcaccgtctagtgagttaagttgtgaaaaactccaattttccttaaatatagttatacaaggctaaaatgcaaggcattttccatgatcacacttcaccttgccacttatgatacatgttgggcagtaaccctttcctgatgcgatctaccaaacagaaccaaaactttatggggaaaatacccatcttagaagacttaaaaaggaaagaccttaagaattaacacattgccttatgggggaaacaagttgaactttacaaagaaaaaaatgttaaccgggcacctctgttgcacaatgaatagagttaatgttt

SEQ ID NO: 702687 - DNA, 212 bp, Homo sapiens
ggctggcgcagctagtgtgaacactaacgctgcatgtccatggcatcttgggctaaacaaacaggtgaggcctggctctgtctacacagcagccacaaacgtgactgatcagcaggaaatctgtagtgcacaaataatggtagagggtgtgcttgtcagcattagacaatgactcccaaatgtagtgtaaacccacaaggatgggtcaactc

SEQ ID NO: 702688 - DNA, 389 bp, Homo sapiens
  misc_feature (52)..(52): n is a, c, g, or t
  misc_feature (383)..(383): n is a, c, g, or t
ccagggaaggaacccaatcatttgctctttacaaaaagcaacacatttctanaaaacccaacagcatgggaaattcttcaaataagctcttcccaaactggcacagtggcccatgcctattataatcccagcactctggaaggccaaggtgagaggatcgcttgggccccaggagtttgagaccagcctgggcaacacagcgagacctgtctctacaaaaaaaaaaattaaaacattagccgagcatggtggcatgtgcctgtagtcccagctactccaacaggctgaagtgggaggactgcttggcccaggggattgatggagcagtgagctgcaatcgtgtcactgcaatccagcctgggcaacaaagcaagatcagaccncaccgc

SEQ ID NO: 702689 - DNA, 273 bp, Homo sapiens
gctatttttagggaaaaaatatgcattcaagtttacatagttttttttgagcggggaaggaaatatactcacaataaggtccattatacaaattcctacttaagttatggccttcttggggttttaaaagaatagccccacgaaaagaggggagaggcctaaatttgggtaatctaggaaccccaggggaaagttggcttaccttggcattgaatatccggggactatctaaagtttgcgggttttgttcaagaagggcgggacctgctgaat

SEQ ID NO: 702690 - DNA, 957 bp, Homo sapiens
ttgccctgcccccccgtggatagcagagctggtggttggaggagcacccatcgcgattgtgtgtgtggaagagccctctgggagccgtgtttttagcccaccaccaaggagaggtgttgtctccacccgtgtgtgggcaggacgaggagcggcagcagctttgtctttgtggcggacgcacactcggttttggttgggtggcaccgctgtgtccgccgaaaaccctctcgtgtgaacagatcctccgtacctatgggggttgttaaaaccttttgaggggcctttctccctcataaacacgggttcgttgaggagcaccaggcacgttggtttgcgccgctggtacgtctataatactggtcgtccgagcgaagcgttgtcttacgccccgggtgggtttccacgcaggtgtcaccacaggcagcggtccacctctcggcacgctctttctgtaaggggcacacgcgcgtggggttggataggagagggcggggtgggtacaacaaacaggtcctcactcgggcggcggtctcaacaacttggcacagagcgccggctcgctccgctcgccaccccgcccgctcgcgttttgtttctggggtctatgccccgcccccccgctcggcggggcgcaagaattgttgtctgtccccggcgaggtgtccccccctctcctcccgcttttgggtgagagggaccccgatgtgtgtgtggggggccaaaaaaccacgcgcgggaggaatggtggtactccgcctgtcgggtctcaaattactatcgcgcagacctcgtctgggtgggggaaacaacccctcttccccctggggttcctcctccttttcgcgtcgctgccttcttcgtcgggacaacgtgggtgcttgggaaggggggcccccaccccggggggggccgacttgggggggcccgcggggccccccaaaggcttttgccgttgga

SEQ ID NO: 702691 - DNA, 315 bp, Homo sapiens
gtgtaacaatgtggctgaggatatggatttgtagagcagatggccttgagatttggtcctgtatggccagatctggtgggcatacatggcattcagtagatctatctttcaggttgtgtatttctatgagaagtcttgtaggaaatatgactattactggaagtgaggtgctgctcaagcagatcacatattcgtatatatgagcacatgcggagctggtactgtaggaggtatatgtggtgggtctaagtaacatgcggggagactcgatacgtcatgaaggaattgaaagcatggtatagatgcgaacagatc

SEQ ID NO: 702692 - DNA, 889 bp, Homo sapiens
  misc_feature (761)..(761): n is a, c, g, or t
  misc_feature (768)..(768): n is a, c, g, or t
  misc_feature (785)..(785): n is a, c, g, or t
  misc_feature (829)..(832): n is a, c, g, or t
gctgtggccatctttccttacacgtggggaggaatcagcctgagaatgaaaccatcacaggaaagggctgaaagacggtgagtgtgtgctttctaagggcagcatttgggccttggccccagccggccctgaagccagcacaacccccggaacgtctcaatttgtgagccaataaatgcccttgatggtttaggcaagttttcactgggtcttacccgacgtgagcccccactcctccatatggacctgttttggaccaatgaggcatcctcttctgtagtcctcaacacgcggagctccaccactcctgagcagtgtgacctcaggtggggttggggagaggcctcgggatggcaaggaccagggtctgcggccaagcctgtgggtcctgtctccctctaggatgcccctgggacactggtacccatggatgcactgggtgacttgaggtcaatggctttctctctccagacctaggcagaaaaagcaatctgctttgcatcagagaacctcaagaggctcttaatcctgctcttttctccctctgggctccctccgtgatgagctcatctgacctcctggcaaccccgaagggtggtttagagcagggaatcagcctcccgatttacagaaaggataactcaggccagggaagcgacttggacagggtcctgcagggactcagtgaaggaggcttcggaacccagcctgtcttccagcaggccaggaatcagcaaatctggctacctgtttttcatttnatttatntatttattttgagacanagtctcgctcttgtcatccaggctgagtgcaatggcatgatctnnnntcgctgaaactccgcctctggggctcaagcgattctcctgcctcaggctcctgagta

SEQ ID NO: 702693 - DNA, 307 bp, Homo sapiens
gcccatctcagcctcctgagtagttgggaccacagtcatgcaccagcatgcctggctaattttttaaattttgttcttaatagagacagagtcttgctgtgttgttcaggctggtctcaaactcctgggctcaagcgatcctccacctcagcctcctaaagtgctgagattacggatgtgaatcattacacccagcctattaatggttttgtatagcagtcttttgtgggtggtggaagatgaagtcctgtgaaatattgtggggcagaacctgaaatgtgcaaaccccatgggaaatttttgtctc

SEQ ID NO: 702694 - DNA, 238 bp, Homo sapiens
agagaagaccagagttgtcgattctgccctatttatgtttctactcgggcacaacggtgggtggtgtgtgtgtgtgtagcctcggtgtgggttttttcacaagcaatggggaggaagaacaaaaatattctcgggccctttacctcgatctcgctcccccctttcggttcttacggacgggtccccccctccctattgaggtcctggtctcggtactggtattggcctctagagcccc

SEQ ID NO: 702695 - DNA, 337 bp, Homo sapiens
cgggtgaggtacagtcataccacttcctcatactgtaaacctgatacccccatggttgtcagcaactctctacaggtaatctatcctgtatggtgacagttgcttctatcatcaaagcaagcaaagtgcatttctgatgacatcttcagtgatctgtgccatttaacttctcaccacacatggtgaggaacatggtgaaatcgatggggcctggagcctcattcatcatggcatactagatactcatcagttggatacttccaccaatgaagcaagcatatcatgcaaatcttacctatgtcgaatgaaaccatctctgtatctgatcaatcatgtt

SEQ ID NO: 702696 - DNA, 966 bp, Homo sapiens
gctgtggccatctttccttacacgtggggaggaatcagcctgagaatgaaaccatcacaggaaagggctgaaagacggtgagtgtgtgctttctaagggcagcatttgggccttggccccagccggccctgaagccagcacaacccccggaacgtctcaatttgtgagccaataaatgcccttgatggtttaggcaagttttcactgggtcttacccgacgtgagcccccactcctccatatggacctgttttggaccaatgaggcatcctcttctgtagtcctcaacacgcggagctccaccactcctgagcagtgtgacctcaggtgcttgctgcagaggcatcgggggtctctggccagaggtgacatctgaagcaatcgggatcctgtttggttttgccacatccgacctgccgcccagctggggcaagacagccacgcgcggcggatgcaccggccctgaactctttctcgagtagtccccagagatttcaggaagagagagaagaggtaaagagaccagaaacaaagtcttctgcaagcaaagaactgcaacaggccccagctgttaggtttgaggggcgtatggggcaggcgactgaactgcagagttggagccagaggtaccattgctgacccctgagcccaggagccttgagaatactgacagtgttaataataactgcaatcatccaacatatgatgctagaataactggacatctgtgtgcaaaaatattaaacctataccttgcaccttatcacaaaattcactcaaaatagatcatagaccaaaatgtgaaacataaaactaagacttccaggggaaaacaggagaaaatctttgtgactttggggttaggcaaagctttttgctaaagacattgataagagattgaaaaaacaagcagattgccagatgatctttgcaaaacatgtatctgataaaagacttgtagccaaaa

SEQ ID NO: 702697 - DNA, 191 bp, Homo sapiens
catggctacttgactgcgtgtacatgtactgtgaccgcagaagcaacgccagaactgagcagcagttgacaggacatcaagcgtgtgggttggtccgtcactgagctcatcaggctgctgagccatgagggaacagaatgcgtagacccagagggacccacagtcattgctgagaatgagctcctgtgagc

SEQ ID NO: 702698 - DNA, 974 bp, Homo sapiens
ggcaatggctctatcacttcttccctctcaagtcccgccctttcagctacctccaatgctgaggaaacggttgcctaaaaaggagccggcaaaaagcgctacgtggagtccagaggagcggaagtagtcagattgactgagagccgttaaagcgcggtggctctcgttttcggataacgactacagctccgatgtcagtgccggccttcctcgtgtggaggggatctgccggacccgtgcaaatttcaatttctttcccattcgggcccttccctatcgtcgccccctttcacccttggatcatgtccaagaaattttgatggcacaacagaaatgtgtccacctgcctccagtgggacaaccttccaggttatatacggggtattacacgacttcaatgtgactaggacgccatctcccagggtatggaacccatgggtgtatcaaaatcatggcctaagaaaagattcctgtcaaaaattaggtccgatggccatgaccatataggaaatccttacaagtacaactggggaataactctcttttgaggacaaaagagacgggcctttttatccaacccctaagatcacttcacaaaatactccttatcctgcacaaccagcagttggataaaggagccatcaagttgtgtactcaggtggaggccaactatcattgtgtcccagggtttacttctcgtgagctaagtgaacttggtgcagtagatacaattggggtatcatcggccacggaaaccagctgcctaagttgggcgcatgaaatgtcgccgacacttggacgtcacaggattggttgagattcctattaagaggcgtgcgatgagaattatggccaagagaggggaattggttggcgtctgtgtctggccctaaccggtggacacgcgaaaaaaaagtggggcatatcgggggaagatctcgctgcaaacctcgttcctctgcgcgggtggggga

SEQ ID NO: 702699 - DNA, 1063 bp, Homo sapiens
gctgtggccatctttccttacacgtggggaggaatcagcctgagaatgaaaccatcacaggaaagggctgaaagacggtgagtgtgtgctttctaagggcagcatttgggccttggccccagccggccctgaagccagcacaacccccggaacgtctcaatttgtgagccaataaatgcccttgatggtttaggcaagttttcactgggtcttacccgacgtgagcccccactcctccatatggacctgttttggaccaatgaggcatcctcttctgtagtcctcaacacgcggagctccaccactcctgagcagtgtgacctcaggtgcttgctgcagaggcatcgggggtctctggccagaggtgacatctgaagcaatcgggatcctgtttggttttgccacatccgacctgccgcccagctggggcaagacagccacgcgcggcggatgcaccggccctgaactctttctcgagtagtccccagaggtagctgctgcctttcagtttctgcacttgtttattttcaaagggacgttgccagaccacgaggccaccctgccctttcatggtttgttttatgcagatttcaggaagagagagaagaggtaaagagaccagaaacaaagtcttctgcaagcaaagaactgcaacaggccccagctgttaggtttgaggggcgtatggggcaggcgactgaactgcagagttggagccagaggtaccattgctgacccctgagcccaggagccttgagaatactgacagtgttaataataactgcaatcatccaacatatgatgctagaataactggacatctgtgtgcaaaaatattaaacctataccttgcaccttatcacaaaattcactcaaaatagatcatagaccaaaatgtgaaacataaaactaagacttccaggggaaaacaggagaaaatctttgtgactttggggttaggcaaagctttttgctaaagacattgataagagattgaaaaaacaagcagattgccagatgatctttgcaaaacatgtatctgataaaagacttgtagccaaaa

SEQ ID NO: 702700 - DNA, 828 bp, Homo sapiens
gaccagtagatctgaccttgaggaagctgtacaaactgttgagccttttcagccatgaactcttctgcccgtaccccataaatacaattaggtgcttgctgcagaggcatcgggggtctctggccagaggtgacatctgaagcaatcgggatcctgtttggttttgccacatccgacctgccgcccagctggggcaagacagccacgcgcggcggatgcaccggccctgaactctttctcgagtagtccccagaggtagctgctgcctttcagtttctgcacttgtttattttcaaagggacgttgccagaccacgaggccaccctgccctttcatggtttgttttatgcagatttcaggaagagagagaagaggtaaagagaccagaaacaaagtcttctgcaagcaaagaactgcaacaggccccagctgttaggtttgaggggcgtatggggcaggcgactgaactgcagagttggagccagaggtaccattgctgacccctgagcccaggagccttgagaatactgacagtgttaataataactgcaatcatccaacatatgatgctagaataactggacatctgtgtgcaaaaatattaaacctataccttgcaccttatcacaaaattcactcaaaatagatcatagaccaaaatgtgaaacataaaactaagacttccaggggaaaacaggagaaaatctttgtgactttggggttaggcaaagctttttgctaaagacattgataagagattgaaaaaacaagcagattgccagatgatctttgcaaaacatgtatctgataaaagacttgtagccaaaa

SEQ ID NO: 702701 - DNA, 267 bp, Homo sapiens
tatccacacgaggctcttcttcttcctcttcctcagctggatgtactggctccttcccacgtggccggaccctgtgaagcgagtggcctgccacggctgtgaattaaggcgtgctggcgacgcgatcaggctgtgatggagaatgacgtcagctgaacacaaggtgtaagcacttgcacactgaagcttgcactctgagactgtggtccatgcagctgccaactgcgaacctctcaatgtcatcacacagcttccaagcatctcagt

SEQ ID NO: 702702 - DNA, 294 bp, Homo sapiens
gagcatggcggctgtgaccctgtacaggtagcctgaaaactggagggccttcaaggactctcatcagctgctcagtacagcggggctcaggtccgcgtgctctccgaacagcccacttccattttggccaaagcaaccgcagcccatgaactttcttctcgcaaagtttcctgccgtgcaaggtccacagacgatatgaggggtgatgactggattctgctggtgtttgcagagcaagcagccattgcctagcgtatcgtgagcagatgagtgatgcgtgcggggacagtactc

SEQ ID NO: 702703 - DNA, 509 bp, Homo sapiens
ttcctgattgaaatgcagtggaatggaatagggtggaatagaattgaatggagtggagtgagtggaatggaatggaatgtattggaagaaatggaattgaatggagtggagtggagtggaacggattgcaaaggaatgggaaggactggacttgactggactggggtgtaatggagtgaagtggactgcaactggactggagtggagtgcagtggaatgcaatggacatggcactggcatggacttcgactggactggactttgacaggacatggactggaatggactgcacctcaaatggaatttacctacaacggaatgaattcgcatggaatggaatggaatggactggaatggaattgactctcatggaatggatcacaatgcaatggactagaaaggaatgaactcgaatggaacggactcacatggaatggaatcgaatggaatggacttgcaacgaatggactcgaaaggaatagaatcgaatggcatgcaatcacatggaa

SEQ ID NO: 702704 - DNA, 176 bp, Homo sapiens
ggaggtcacagcactcacccagagcagtccagcaggtgacaagcagagcatggacgggtgaagccctaagatgcagatggtgaagaatgttccccagcagcgggcagcagggtccagcatcccggcttgtccagcatcccggctcgtcctgagcccttgctgttccctagccaggg

SEQ ID NO: 702705 - DNA, 386 bp, Homo sapiens
taggcatgtctagcacgaggctgaaatgaaatggttgtagcatgactcctgaagcctcaagctcccgggcacaactgatcctagcatctcagtctcccaagtggctgggactagaggtgcacaccatcacacctggctaattttgaaattttttatagaggcaggtttttgccatattgcccagacgggtcttgaactcctgaggctcaagcaatctgcctggctgggcctatccaaagtgctgggattacaggtgtcagcaaccgcacccagtcaaaggtaaatttttgatagtccttgacattcctttggcttttattttattttttgggaaaggggcaaccagcttggggaatcctaagaagttcaactggcgggcatgcaag

SEQ ID NO: 702706 - DNA, 149 bp, Homo sapiens
ctcccctgtcggtggaggtgtctgtgggaaaggccaccgacatctacgttgtcaatggcacggagatcctcgtgcctgcaccttctccagctgctttggcttcgaggactcactcgaggactacacacagtgacgcattcaagattacc

SEQ ID NO: 702707 - DNA, 821 bp, Homo sapiens
  misc_feature (517)..(517): n is a, c, g, or t
  misc_feature (821)..(821): n is a, c, g, or t
agcggacttcctgccggcgccccctcccccgtggcgccgtctcctcactcccgcctgactgacgagtctaggcgtcatcacgcactacagctctccgagcgagctggctgcagcttcagggcagcgcgggctagcaggcggcggggaggttagggctgtgtagggcgaggtcctcccccttcctcctcgcctaatcctgcatcctccctcctcgtcgtccttcccgccgttgcgtcctcctacgcccttcctctcgtcctccgtcgaggtctcgacgctcagcttgatgagccgagcagacgaatcgcgcgtgacgccgcaaggccgagccgccgtgctcaagggactgatccgagggcgctcatagtgcttgccgagcctgacccattaccaaaagacctggagcgctcatgcgagcggcgcatcagacgtgcgctcgtatcaacgagatgctaagcggtgaaaccagacgagaaattagcgcgagccgccaaggacgtaatcatatcgcaaagangaaagtctcgtcgcgattagtcgcataaaagcaatagtctttgctcgatagctttggatcgaagcatttgcgcctagcaaagacgaaatcccagatacccaaaggttggaaagaaccgcgttgtgcccttatcccaaaggtccctggctacgatctccagaaagaccaggggaaaataggcctttccgagggcgataggtacaattcagaccaatgtggctttttccatttagaaagtaggtggacgtggttggaaaacctaacgaacattcccagctcaagtgaaacacttgagcagtaccan

SEQ ID NO: 702708 - DNA, 116 bp, Homo sapiens
gttacataagaccacatgttgtattattccatttatatgaaatgtccagaataggcaacatacagcacaaattaggttatttgttacaggaggctgggagcagggaaaccgggatg

SEQ ID NO: 702709 - DNA, 170 bp, Homo sapiens
gtggaagtgacatcgtctttaaaccctgcgtggcaatcctgacgcaccgccgtgatgcccagggaagacagggcgacctcgaggtccaactatttccttaagatcatcgtaagtccaggcacttattgatgattatccgaatgtttatttgtggagcagacatttgggtt

SEQ ID NO: 702710 - DNA, 254 bp, Homo sapiens
aggtggacatggtcctgagctctggacggagcaggcaccctgatttcattttgaggtccacatggccccttttgggccagcagctgtggccggtgtatcaagggggcccttaaagctggaacattccagcaagcttcttgggcttttttgcacccggcaggccccctttcctggcaccctcgactttatataaaagttgccctgggtttcaaaaacccccccctgaatgaataaaaggagccctggctgggcca

SEQ ID NO: 702711 - DNA, 492 bp, Homo sapiens
gtgagctttctgaaacagctggtgtagctacatgagcaaccagcttccttcagagagcagtgcttatggacggggagcgaggaaatccctctcataacgttgaaacggttttctaattgcgtaatctaattgataattctaggggtatggcgtaagtacatgagaagccatcacctcagaatggcagctttttatagattttttgtttttttctctcaacaccatgattccttaacgaacatgtttccagcattcccaggtaggccaaggatgtcactacagaaacaccttgggttagacctacagggggtactggctggtgttaacagaagggagggcagagactggtgcggctggccatggagaaagctgacttggcctggtgtggtacagagaagccagctcgattaacatgcttattccagtgactgcttgccctaagcagaaagtgcctctcaggatctatttttgaaattactaccgatgtctagt

SEQ ID NO: 702712 - DNA, 313 bp, Homo sapiens
  misc_feature (1)..(1): n is a, c, g, or t
nttcggcacagctttaaaaaactttcctcagaggtagattaacttttattgaatatagctgttaataagaaattttaaattgattgcatactgtattagttggcttgggctgccataacaaaataccatagacaaggtgttttaaacaacagaaatagaaatttattttttcacaggtttggatgctgacaggttcaagatcaaggtattggccagttagttcctagtgagggctccttcctgccttgtagatgtgtgctcatgcggcagggagagagagtaagctcgctgggtgtctcctcttataaggaca

SEQ ID NO: 702713 - DNA, 295 bp, Homo sapiens
  misc_feature (33)..(33): n is a, c, g, or t
ccccggccccccctttttggggggatggggaanaggtggggggccccccccttccccccccccgcaaaaaataaatatggcccggggaccccccctttttttttaaaagtttttttaaattgtctttttaaaacccttaacccccccccctttttgggggaaaaatggcccctttcctgggggggggcccgggaaaaccccccccctaaaaaaccaggttcttgcccggttggggcacccccccccccccccccccccccccgggttttttttccaattaaaacatttttttgta

SEQ ID NO: 702714 - DNA, 947 bp, Homo sapiens
tttgataatcaaactcccaaagatcaaaggtaaagaaagtatccaaaaactggcaggaggaaaaaaaacaacatacaatggagagctaatacattggtggcacatttttgttggaaaccttataggccaggagagagtggcatgatatatttaaagtgctgaaagaaagaaaatttaccctagaataatatatgaagcaaaattatccttcaggattaaggagagatagagactttccaagaacgaaacaaaaaagttggaggaaattttcattccaaattaaaccgtgtcctacaagaaaatgcctgaagggagtacttcaataaagaaaataaaaggatgttaatgagaatgaataatcacctgaggctacaaaactcactggtaatagtaactacatggcaaaccacagaatattacatcatttaaactgtggtgtgtaaactacttttaacctaggaagaaagactaaatgatgaactaagaaaaataaaaaaatcctacaacagcttttcaagacatgaacagtacaataaaatatgaatagagacgacaaaatgttaaaaggcagggaaacaatgttagggtgcagagtttctatcggttttctgtttgctcgtctgtcagttagtttttgcagtcagtgttaagtttgtcatcagcctttcaagtactgagtcactaggacaaccattggcagcctagtgggaatctaaaatcaaaaaacgtgcaaggatgcacaaaaaaaattgaaagcagaaattgagacatactccgagaaatctcttccaaagagagacggaaaacaaaaaagggggcgttaaagttcccgagggccagtagctaccagtttttcaaagggccaaggggcgttacgcgcaggcgcgctcaccgtccgggacgcttggcttgggaaccttcgggcactcgcccccacatgccgatac

SEQ ID NO: 702715 - DNA, 136 bp, Homo sapiens
  misc_feature (106)..(106): n is a, c, g, or t
gctgtcctcgcttgttggcccagctgactctgcggacgcatggctggtctccatggtccgatgtggacctccttgttctacgatgctgtggcacatggaattcagncagcggggccgtttcggtggcggtcgccat

SEQ ID NO: 702716 - DNA, 569 bp, Homo sapiens
  misc_feature (16)..(16): n is a, c, g, or t
  misc_feature (128)..(128): n is a, c, g, or t
  misc_feature (130)..(130): n is a, c, g, or t
  misc_feature (155)..(155): n is a, c, g, or t
  misc_feature (233)..(233): n is a, c, g, or t
  misc_feature (262)..(262): n is a, c, g, or t
  misc_feature (264)..(264): n is a, c, g, or t
  misc_feature (282)..(282): n is a, c, g, or t
  misc_feature (286)..(286): n is a, c, g, or t
  misc_feature (329)..(329): n is a, c, g, or t
  misc_feature (365)..(365): n is a, c, g, or t
  misc_feature (368)..(370): n is a, c, g, or t
  misc_feature (392)..(392): n is a, c, g, or t
  misc_feature (489)..(489): n is a, c, g, or t
  misc_feature (500)..(500): n is a, c, g, or t
  misc_feature (516)..(516): n is a, c, g, or t
ctgctgtccgcaaagngcgcacaatgaagttcatgagcgccgatgaggtccaggccagcgccacgtagtagccatcgctgccgaacagcagccccgtgagcccactgaggatcattcccacgtatttntngccactgtaggccagctggtgatangtgctcaggtcactgcgcacggtggccaggtagaggcccaggagctgggccagcacctccatcaccacccacaccagntctgttcttgctcacaggcccagcacctncngggagaaccttttctganttcncagttccatcccagctaggagcacgttagttatgaaggccatngtggggatatagaggttaggggcgttgaggttttgnttnnngggcagaggagcatcaagactnttctgcacttcccagttctggtgttttttggggaagatcagcagctctagcttcttggccacgtaggctgttttcacagcaaaaaaatacttgagtntgctcacaganacaaaacggtgcagcnccttgtgcaccatgtgcttcccatgggatgcgatggagctgccataggccaaa

SEQ ID NO: 702717 - DNA, 874 bp, Homo sapiens
  misc_feature (521)..(521): n is a, c, g, or t
ggttcttagtaagattacacatgcaagcatccccattccagtgagttcatcctctaaatcagcacagatcaagagggacaagacatcaagcactgcagcaatgcagctcataaagcgcttgagcctagtcggcatatccccacgggaaacagtagtgattatgccttcagcaataacacgaaagttataactaagactatactaaccccagggattggtcaatttccgtgccgaatgccaccgcaggtacacagagactgtaagccacatgtgcaatatgaatgccggcagtaaacgagtgtgttaagatcaaccccctctccaataaatgctaaaactcacctgagttgtagaaaagctccagttgacacaaagatagactacgaaagtggcttgtaagcatatctgaagcactagcaatagctaaagacccagatctggggattagataccccgactatgcgttgagccctagataccgtcaattcgagttaaactcgaaccaaacatgtgctcgccangaacactacgaggccacaggttaaaactcaaaggacctggcggtgcttcatatccctctagaggagcctgttctgtaatcgataaaccccgatcaactcaccactcttgctcagctatataccgcatcttcaggaaaacccctgtatgaaggctaccaagtaagcgcaaggtacccacggtaaagacgtttaggttcagggtgttagcccatgaggtggcaagaaaatgggtacaattctatccccggaaaaaatatgaatatgcctttgaaattatagggtcgaagtggatttacccgtaacctggaattgatgccttctttaacaggggcctgaagctatacaccgccgtc

SEQ ID NO: 702718 - DNA, 437 bp, Homo sapiens
caaagatacatatacaatctagctcggtaccaggccatgcgtgggaggatcatttgagcccaggagctcatggctgcagtgagctgggattgcacgtgctgcaccccagtcctgggctacagagcatagaccctggtctcttattataaaacaaaaaatacttaaaaaatttttatagacttaaaaggccttggtttttcttttcttttcttttctttttttttgggcatcctaatttctctcattatacacacagaaaagaggaaaacataagtaaaataagtctctgtggtatctttttttttacctttttttggaaacaaaaagtctcgctctgtggcccaggctggagtgcagtggcgcactctcggcttcactgcaacctttgtgcctcccaggctcaagcaattctctaacgcgtgccatcagcacatgcg

SEQ ID NO: 702719 - DNA, 900 bp, Homo sapiens
  misc_feature (264)..(264): n is a, c, g, or t
ggaatcagagcgcggtgagcggcccgagccaaccccgagagcggcggtgcgtccgccgcgcccaggagttggggatgtcctacaaacccatcgccctgttcccagagcacccctggctccagcacccctgggcggggccaccggtcccctacaggaagcgtcctgtcggccgtcggggctcagtgccaggagcggcgctcctttcagaccggtgtttaacgacttgtgaccgcttccatggctacgtgcaggcgatgaagccancggggggcccagggttcccagagcaaacttaagggaccttgctgtcagtcatagaggaagatggggcaaagaggaatcggcgcctacctttattgcttgcaaggaaaggagcggcatatgagcgccttgaagaggaggaggttatcattcccatgcccggggcccctagtcaggagagttgccttggcaagaaggacagaggcggaaggcccggacgtaaacaggaaaggcgctcgggctcaagcgtttggaccttattcgggcaattggagaagaccccggtttctccttgccttcatctcggattggcttaacccattccggggtctccgtgtccgtgtgtccccttgtgtgtgggtccctccaaggacccaaggggaggtggcctcccaggtggcagcactagggaaccccccaaaaacaggagttagcagcgaggtcccaatgattccacccatgaacttgcgaagttgttgcccacggacatttgggggccctaccgttcaagccttccagattctccattggtccgagcttttccccagaggcagggctggacctctggctgtgctggccaaagcctcatctggggctgcaaatgcgtaataaaagttgggtgttccacaaaacacaatg

SEQ ID NO: 702720 - DNA, 178 bp, Homo sapiens
tcaagatcccgggtcccatgcacagttgatgatgtatgtgttaactgggtctaatagtttcccacatttctcagtgttgccaatggcaattctgtagtatttctcttgcccttgtatatcctggtagatagggttgtaaaacataggatgcttgactgggactcagggttgagatatt

SEQ ID NO: 702721 - DNA, 132 bp, Homo sapiens
tgtgtgaggcccgctggtgcttgtgcacacgcccttctcatgccgctcgcacaggtccttataggactgcagcagatccaagaagaagttcagcttctccaccacgtcgttctcttcctgcttaccctgttg

SEQ ID NO: 702722 - DNA, 820 bp, Homo sapiens
  misc_feature (192)..(192): n is a, c, g, or t
  misc_feature (243)..(243): n is a, c, g, or t
  misc_feature (303)..(303): n is a, c, g, or t
  misc_feature (309)..(310): n is a, c, g, or t
  misc_feature (424)..(424): n is a, c, g, or t
  misc_feature (454)..(455): n is a, c, g, or t
aggggctccgaacaagccatcatcacgctccgcggtggcgcaggcaactggccggcctctgggcccttcctggggcatcgtgggctgaaggtggtgggtggctggtcaacaatcatcttcaatctaacgaagaaagcggccgggaaagcccgaagggacggtccctggaatgaatgaacgaacggccgcggntactgtgcaaccccctggaaagaaggcaaggcggggcaggcaaccacgaanatgagacaaaggggcaaagaaacggtctcggccacgaagggaaactcccttccctggagnggcagnnggtgggcccggaagggaacggcgtctccctgtgctctcgggcggtcttggcgagccggacgggcccgggaggtctcaactctccaaggtgggcttgggcacaagaattccacanaggttcatcaacccatccttataaggagannaaacgccaacccccggtatggaattcccaaatctaatatcaacgttccgtttcacttattgttaacacggttgggggttattcgtctcaattcacgggacattcctggttcccttaaggacattttttaccgttcctggaaggtggtttcaacgaagaaggcccgggaagctgtgtgtgcctgtgcgggcccggtctggtgtgctttcaaggcctctggggtctgaagtcatggcctgggtgggcgggacaaggcttcttcactggggcggagtcagtggcaaggtcttggccctttgggggaaggcccgggtccacgggggcccgggtctggctggtctgagccatggtgcctggttggccttc

SEQ ID NO: 702723 - DNA, 300 bp, Homo sapiens
acgctgttcttttatttttcagactttgttctttttgctttttagttctggggggttcaatcgatatatccacaagctcagagattctttcctcagtcatgtccagtccactaatacactgataaaaggcattcatttttacacagtgctttcgatttctaacttttttttgttctttcttagaatttccatctttttgcttacattgcccatctgttcttgcataatgtccatttatccattagagcccacaacatattaatcatggctgtttaaaattctcagtctggtaattctaag

SEQ ID NO: 702724 - DNA, 867 bp, Homo sapiens
cactaagcctggctgagacaactagtttcccttaactcattggaattctctaggattaggagaattccacagagcctatatgatattatagcgtcaaccatttatgtataccaacatggcatacccgtgtacaatctagcgagttatttccagagatttgttttaacggagctagtcttattattcacgggtagaacagttcatgattggactctgctagttaatggagaacaaatggagcttctaataggtttgggaggtttactggtagtaactattctaggaaatatttatgtctcaaggtgatgttcacatgggttctttagaaggaacattagtcaatgtgtgatggattgaactctatatagtctttctcctcttgtgcgtgtacggaaatctgacctgcaatgtcagttgatgtgacaagagatacacgaaagcacagtcattgttaaatatctaatagcagattccttgtctttagaagaacatttaggcataacgaccttctacgatggactgtctttgctggaatctaacaattagctcatattccatgaggaaagagtggcctagcgaattatttcatgttacctagccttctgaacgcgtactcacttgatgtgtcctaacactttgaaactaacctttgtctttctttgttgcactgacagctctaacttccaaactatttacgtatttttctctttgtaaactggtcagaacccgtgcctttttgaccattagagttctgtgcctacatatcactcttatgtacggtcgagaccagtcgctcgaagtgtatgagccagtgccattcatgatgcgcttatactggaccgatgctccagggtccacgtcttagac

SEQ ID NO: 702725 - DNA, 171 bp, Homo sapiens
ttaggcaacctggtggtccccgctccgggagctcaccatattgatgccgaactcagtgcggacacccgatcggcatagcgcactacagcccagaactcctggactcaagcgatcctccagcctcagcctcccgagtagctgggactacaggcacgcgccaccgcgcccggc

SEQ ID NO: 702726 - DNA, 161 bp, Homo sapiens
tagcacagtgttggacaggagcacccatgtcctgtggagtgtggagtccccctcatccaggtcggtttggaacactgatctggaagctcaggacctcaaatcagccgtgcaatggagaacattttacgccgatgttgtaatttttatttacattacattac

SEQ ID NO: 702727 - DNA, 889 bp, Homo sapiens
tcagatggcgatcacactggaagcagcagcccgagacaccagagaccagttcttggaatactttacaacgcccattggaccaatgagtgatcaacatccatttgatgcaggagccagtggttttgcagctctatcacccgaattgtccagcagaaggatctccccctgacacgtttccaggcagtggtggcttctagctgtgggacgtctggcagacaagtcagtgctagtatgtaacaatgccatccagctgctggccagatttatacatagaccaataatcctttctcctgcaagctatagatgatgctgaccttgccaggaccacatgcatcacaggcagcacccagaaattaccagcgcatgagggcccagaaggcgaactgcagcagcttctgcagtgctggacccagaggaggagtgggaagccatgcatgccagacgtagaagtctaccctgcagcagattctacagacttccccagggagcggcggagatccctgagcaaaatagccaatacagagacaactgaagatgtgaacaggacgcatcatatcacatgcttggccaaaagctagttacaaaaaaggccaatcattctcactcgagaaagcaaaggccacttccaggagtcagaaccattcaggcatatagacccagaggagtcagaggagcacccaggactagcaatatcaaaggactcatactacaaaggaccaggaaaattccagcaccagaaaagaatcccgaaagtctcaggacacatggaccacggcaacacggatgacaatcaaacaaaatgatagaacgagaaacacggaaagaaaacaagcagcgacaatggaaaaataaaaagcacagaacccgaaaaaaagacagaaaaacgcat

SEQ ID NO: 702728 - DNA, 122 bp, Homo sapiens
agagggtgggtcgttttagtttggcaatcttctcttttccttttttggctttagaagaagcaatgtccacagaattaagaggatgtcaaacagggctgactttgggttaaagggttttctat

SEQ ID NO: 702729 - DNA, 214 bp, Homo sapiens
ggggggggggaaagggggtttcccccccttttttcccccccgggagccgcgcccttttttttaaccccccccccctggggggtttttttttggggttgggggggaggggggccccttccccggggggggggggaaatccccccccccgggggggggggttttttaaggggggggggggggggccccccccggtttttccccagggttttttttt

SEQ ID NO: 702730 - DNA, 330 bp, Homo sapiens
gagtctgagacaagcctaggcaacaaaacaagactctgtctctacaaaaagtttaagaaatgagccagacatggtggtgtatgcctgtagtcccagccactcagaaggctgaggcaggaggatcgcttgagaccaagagtttgagcctgcggtgagctgtgaatgcaccacggcactcaagccctgggcaatgtagcaagatcctgtctctacaagaaattttttaaaaatgagccaagtgtggtggtgcatgcctgtagttccaagctactcaggacactgaccgtaggagggttgcttgagacttgagagttgggaggctgcgatgaa

SEQ ID NO: 702731 - DNA, 159 bp, Homo sapiens
cgatacgttgctgtgaacggggaagtgacgatacgggaatggacatgcagtcgttcaaaatgataacaccaaggttgtctttgtacggtgcgatgaccccggcgttgctatttaccatgctgtgcaatataacgaattaacggtatcgcgtgataatgg

SEQ ID NO: 702732 - DNA, 467 bp, Homo sapiens
aatactagggctagagttgctgcattgctggtcgcaggaatctcgagaggcaagagacgtgtcctaacttgctattaggacaaatgtgacagtcaaggaaaggattattgggagggagaaaaaagaattaggcagtgccaaagctgaagtagatgctggtgtcgggactagttggtctctgtctgctgtcgcgttccagggattggagccaaagtggtgaggtgagggatcatgtaacttgcagtgcgagcccaggatggtaggatgcagggttgagggttatgatagagaatgattccagacagaagtgatgaatgtcctgtgttaaaaggaatgcaagctatacccagactggaaacatagcatgcaaagcactatctacagtgattagagatcctttcattgcattcatggtgtggagtgtgaacatcggcacccatagtgtaatgtatttatacacactagtt

SEQ ID NO: 702733 - DNA, 133 bp, Homo sapiens
  misc_feature (132)..(132): n is a, c, g, or t
agtctgccctccccgcaaaaactggctgagctttgcccctttgctggctgggccctagaagagatggaatgactcactggattaatacatttgggaagaactttgtaatgaaaaataaattttttaattctna

SEQ ID NO: 702734 - DNA, 472 bp, Homo sapiens
gcttcaataccctgtctcactgtgggagggagcagaggatggagctgcccggatccttcagggcctgggcttccggcagggctgagctccagaatggggtgggatcaccctctggagataagacctggacctggctttacccaaaccccaccagtgccctactcccgcaatcccccagccccagcacccactcccagcttccagcacagctgtaattggggctgagggtaacgaccagcgccaaccccagctgcggagggcctggcatgtgtgggaaaaagccggaaaaatacattttcccctaaagacttgtaagaaaattctcactgatttttttccttttaccccaagctttcacagcactaaatatgccacacttagtaattttacgagcaaaccaaactatacatcacacggttttatgttcctaaattaacaaaaggactttaaatctatatggcgctcttaaaag

SEQ ID NO: 702735 - DNA, 398 bp, Homo sapiens
  misc_feature (268)..(268): n is a, c, g, or t
  misc_feature (303)..(303): n is a, c, g, or t
  misc_feature (343)..(343): n is a, c, g, or t
agattacaagttccaaactcagccaggaatgtggctcacacctgtaatcccagcactttgggacacctaggtgggagcatcgcttgaagccaggagttcaagaccagcttgggcaacgtagtgacgacccctatctctacaaaaaataaaaaaattagctgggtgtgatggcacacacctgttgtcccagctactcaagaagctgagatgggaggatcctgagctcaggaggtcaaggctgcagtgagccgagattgttgccactgcnttgcagctgggggtgacagttgcaagaccctgttnttcaaacccaaacccaaacccacacacacacaaacacacntttcacacacacacacacgggggttcccattggttggccggggtttccccagggg

SEQ ID NO: 702736 - DNA, 649 bp, Homo sapiens
aaatcatgacaaaataaagaaaaagagcagtatatggctaacgtgttaagtagaatgttgaaagaccctaaatagatatgcttgaagccacatcacaaagaatcttgtaagacatgttaagaacttcaagtatttctctgaagacaagagacagggtttactttaaggatcacaaggaccgtcggtgagaagtgactcaggagcagagaagagatagaaaggcttttcttagatcaagtaaatatcatggtgacctactagcctaagaaaatagtggtaaagatgaggaatgaggatattcaacacctatttaggagacagaatgatgagggcttgatgatttattgcatgtgaacactgaaaaagaaggaaaattttctctcaatttaataatttggttagttcagcagaggggaagaaataatttcaaatattttaatgtttgaaatatttgtttccagatgttttgagacagtgatatgaaggttctgaatagaaaagtggatatgcaactccagatctcaagaaaaagtgatgaactaaattttaaatttggaaataacatatagattataattgaaaccaaagtactgggtagggtaacattcaggataattgcctgtttgcaaacaatgaaagctaatttgag

SEQ ID NO: 702737 - DNA, 373 bp, Homo sapiens
  misc_feature (127)..(127): n is a, c, g, or t
  misc_feature (180)..(180): n is a, c, g, or t
  misc_feature (183)..(183): n is a, c, g, or t
  misc_feature (265)..(265): n is a, c, g, or t
  misc_feature (315)..(315): n is a, c, g, or t
  misc_feature (337)..(337): n is a, c, g, or t
  misc_feature (348)..(348): n is a, c, g, or t
gctctcttggccacagtgcacagcagtgaggatgggccactcccagtgttaccagtggagggtgtcaaggtttttagcatcttgaaaaatgaattggacaaaatgtacaaacaaagcaaggaaaganggaagcagtaaaagcagacatttattgaaaatgaaagtacactctacagggtnggngcgggcttgagcataggggctcaagagccccattacagaaatttctagggtttaaataccctctagaggtttctattggctncctggggtatgccctatgaaaagtggaaatggttgatgtaacattacagngttatatactcggatttattgncctgtgtaaantagatagtgttatttaccttggaca

SEQ ID NO: 702738 - DNA, 1321 bp, Homo sapiens
  misc_feature (161)..(161): n is a, c, g, or t
  misc_feature (684)..(684): n is a, c, g, or t
cgatacttcttatttgaccttggggttctctgtgtatatgtggtactctctgtgttggcctttcgtgtcacgcgtgggcacaatggtgggtgcccgtgtctctcacaatcgttggtggttttctacggcccaacttgagttttgtgggcgcatatactggncgtggccacgcaagcacaggtctcccagtggggatacggccagtgttgtccccccttgtcaccgggcaacactcggaccccctgggcgcccacgtgaccccctccggccccccgaaagttggagggaccttcccccccgcaaggagaaaaaagtgacccaggcttggaccccttaggaccccccaccagtgaaccttctcaggcttaggaagatctctgcaaggcccccccgggagacctggacacaggcctgctctctgttttctcccagggtcacgaaacacggacccggcgtggaaagggaattggggtcccaccttgtgaaatgccagtcatgtcacacaggctctgtccaattggagaggtgtaacacagccaaagcccacgaagggctcccacctaatggacttcacaaattggggcgtttggaaatttgtagagaaccttcttaaacgttgtcctctttcccacgcccccccgaaaagttgtctgtctccactgttctataggacactcccctcgngcaccacaggtgagagttccctaagagggcttaacacgcgggtttctctggggagaacccactctccacaggagagccttccctcgtgcctctcgccacggctgctctgcacactgtcacaccctctccacagtattacacaccccccacactcgggagacttgaggcctctggtgtcccacacacagggccacacctcggcgcacacccctctgggcctctggctacagtctctcacagactttcgccgcacacacacaccccacaggaggcaaccacctcccacgcgcccgcacccactcgctcggtggcgctcccacatcacagctataacacacccacacgtgcacactttcacatgcacagggtgaaaacacccacagtcacctcgtggagaggctctcccacaggtggcacagccacagagaggcacacctcccagaagaagaaggggcactaaaactttcctctttcctgcctagaaggccccaccctcttggtgcttttccacgaaatcccgtataacaccctgagttaaactgaggcactccacctttctttcacgcacgactgatcacggacctccacagcccctgagccatgtataacccccaagaaataatttttagaatctcca

SEQ ID NO: 702739 - DNA, 152 bp, Homo sapiens
tctagaggatcccgaggagagagttcagaatgttccaagagtctagccgcagccccagacaccatgagctgagggtcgggatggggcatgcctccctggtgcaatcggcactggccccccggcccttgtagtgctgtcgtgaggtctgtctg

SEQ ID NO: 702740 - DNA, 1088 bp, Homo sapiens
  misc_feature (1088)..(1088): n is a, c, g, or t
ggccgggatgcggtgcgcctgtgctgtgatcctccttggcctgggcagaaagcttgtgtgagaccaatgcaatgtcaggagtgtgtgccatgttttcttgagcaggctgcccagagggcccacactctactgtccccatccatcagccaacaatgccacctttgccctgggtgccagtggcaagctacaccaactcctcacaacccttcctggctaggagagctgcagctttagcgcggcagtatgcccagcatttagtgccacccgcctcatccaaatgatgacccttcctggagaaccgtggcccagcagcaactgggggcagtggagtgggagtgaaggaagctgtgtgaactcgcagacctgaggagaacgtgcttgtgtgcgtgggcactctgttcaatggccatgccgttgatgacctaccatcctgcgggaggtcagcgaggagcacaaactggtcccccaggctcctcggagtcacatacatacacccagatgacggagctggtcttgtgaagatgaaccttgcaagcgtatcaaagctaaaagtgcaccattgaccgtgtcaaagctggttacggggacttgtcctggctgtgtcagagctccgtgagacgacgatcgggaacgtaactggtggaggactatatgctttgctgagcttgactgcaccagaaagccccgaccaccactttgacaccagataggtaagtgcaacctggtgtccgagctgggccttggatggccagtgaatggccagagccttgctggcacccaagggtagctagatggaaaagagctcagcccggcgcagcataggaggaccaacaggcgacacacgcaggagaagccaagctcaacgagtacccagagagtagaaccatcagtggcaaccatcccttaagagcagacggaaccccacacaccaaaggagaagccaacacagcgaagggccacacactacaacacaaaaaaacacagagagcacaggagagcgcagataacacatccggacagaagcaccactagagagaagaccacagccagcagcagcacacaaacaaggagcacacacaagcagcccn

SEQ ID NO: 702741 - DNA, 394 bp, Homo sapiens
ctgcaacgctgtgcctcactgctgtctcccatcacacatctgactcttatgaactctcggcttcagacgctccccaggatgttactgtgactgaacggggagtgaacaaggacggaagaagagacgcgaaggggggctccaaacccatcccaagttgattccttcatgatgtttccaagaatttaaagaataagtggtgaggctgggcgcagtgactcacgcctgtaatcccagcactttgggaggccaaagcaggcagatcacttgaggtcaggagttcgagaccagcctggtcaccgtggtgaaaccccatccttactaaaaatacaaaaattagccgggtgtggtggtgcatgccggtggtctcagctacttgggaggcacagattgcagt

SEQ ID NO: 702742 - DNA, 345 bp, Homo sapiens
gtgtgtgatggcacgatctcagctcactgcaacctcccccccacaggttcaacgctaacttctcccgcctcatcctcctgatctgctcagactacaggcgcgtgccaccatgaccggccaatcctttgtactttcagtagagactgggtttctgcatgctggtcaggctcgcctcgtactcctgacctcactgatccacctgcctcggcctctcgcatgtgctgtgacgtatcaggcgttagcgcccctgtcccggtctgaatgtcctcgtttctcaaaccgcaattgggatccactagcttccttccttgccagcactcccctggctccccaggctctggtcgg

SEQ ID NO: 702743 - DNA, 366 bp, Homo sapiens
ccagttacaacagctcctcaatgaaactcatgttcaaacttaatctccaatgtggcagtactgagaggtggggcctctaagcgtggttgggattaacctgtcaatggattcatggattaaagggttatcaccggagtgggactggtgacttcattagaagaggaaggatgacctgagctggcctgtgaatatgctcggccccctggccatgtgacacccgcgccaccctcagggctctgcagagtccccagcagcaagaaggccctcaccaggtgcagcccctcaaccttggacttctcagcccccagggcttgaacaaataaattcttttttaaagtaaattacccagtttcaggtattctgtta

SEQ ID NO: 702744 - DNA, 254 bp, Homo sapiens
tccctgagattgggtttgctattacccagtgcttgagtcagtggtgtgatctccgctcactgcaacccccgtctcccaggttcaagcaattctcctgcctcagcctcccaagtagctaggattacaggcatgtgccaccacgcccagctaattttgtattttttgggagagacagtgtttcacctgtgttggccagtgctggacgtggaactccgtgacctcagtgtgatccgtcccaccctggaccgttcaat

SEQ ID NO: 702745 - DNA, 364 bp, Homo sapiens
  misc_feature (231)..(231): n is a, c, g, or t
  misc_feature (303)..(303): n is a, c, g, or t
aaatgtgtgttcaagggactatcaatgttgggttctcctacaaggctctggatggagagcagaatggtcctgacatcatacagggctgaccacttttgcttcacgatgtccaggcctatgttaccctgggtgtgcactttagggtgatagcaaggcgtgaggaacttcactgtgggcgcattgccagggtagccactggggaactctatcgagagcttataccctgaggtntttattatcttgttccagcctgcttcatggatggggccctaacccgttttttcaaaagggggtttggggganaaacctttttttgggggaaatttttttttttttaaaaaaagggggggggggggggaaaaag

SEQ ID NO: 702746 - DNA, 109 bp, Homo sapiens
ggcagtgcacgcttgatgctgttggcgtctctgtaggttcccctcccactactagctttttgctgacttctagcagctcgctaacctcgccttaacccgagcgctacca

SEQ ID NO: 702747 - DNA, 559 bp, Homo sapiens
gctcctgaatgggacggctgtgagggcggagggtctctctcagacggggcggctgggcagagacgctcctcacctcccagacggggtcgcagccgggtagaggcgctcctcacatcccagacagggcggctggggcagaggcgctccccacatctcagacgatgggcggccgggcagagacgctcctcacttcctagatgggatggcggcggggaagaggcgctcctcgcttcctagatgggatggcggccgggcagagacactcctcaccctccagactgggcagccaggcagaggggctcctcatatcccagacgatgggcggccaagcagagacgctcctcacttcccagacggggtggcggccgggcagaggctgcaatctcggctcttcgggaggccaaggcaggcggctgggaggtggttgtagcgagccgagatcacgccactgcactccagcctgggcaccattgagcaccgagtgaacgagactccatctgcaatcccggcacctcgggaggccgaggccggcggatcactcgccgtctaggagcgtaat

SEQ ID NO: 702748 - DNA, 1704 bp, Homo sapiens
cttagttctagatcgcgacggccgcccttattttttttatttatattttattattatttttttattatatatttatattattattattaagagccaccttctcctcctaacaataagggggcatccctagagaaagaagcgcgctccccacctatatatcatggtgtgtaaccctcatattattgtattcttattatattatatttcttctctattctctacaacagggtgcgtttaatgtggagaaagagagatgtaaaagagagaggagagagtgcgtgcgggccacgcgcgcgcgcgccgtggtggagaacacaccagtgagctcacgcgcgccacacctcacacaacaacgcgcagaagcacgacgacgcgacccgcgggcgtgacacacgagagagagagggggggcgagggacgtcgagagtcgctacaacaacgcagagtgtgatttatgtatatatactacaacagaagacgagagtatcatataacaacataaagaagcgtgtctttctcttgttgtttatttttttctcaaaacacagaaaacaaaatacacagataacacatagctgcggctagaacacacaccaaaccacacgatgaagaagaaaatcacattatacagctgacgcgagaggcgagaagccacagataaaaacatccaaagggactcgacacacgacacaaaacaaaaaacacggagagaagcaaaaacaaaaaaagaagaaggaggcagtatacatcataagtgacgtgagcagggagaacacataaacaaaatagaaaaataaaaagcagaaacagaaggacagaacacacagtaagacggacgcgctatagcagtcaatgactataataatcaaacaacaaggaaaaagaaaaagaagatgtaatagcggtgacgaaaaacaacaacaacgcagaaagaaaaaagacagaagatgaggcggaagaaaacatcacaccatgaagaggatgacgagaaaagaaaacacactcaaaaacaaaaaaaacccaaaggcagcacggagacgcagacaagacacagcagacaaaatcaacaaaaaatcaagtaggagagcagagaacaaaaaacaataaacaacatcttacactcacaccgcaccacacaaggactattaatcgatgcacgtgagcaaagacgatacttcaaacagagagcctggaacggattacgcccacatagaaacgaagaaatatagatataatgtcgcacaaagaacagacgagtcgagccataaaacataacacaacagacgacgagcgtacatacataacaaactcaaaccccaaacaccaccatctcacacacacaaacatatacaaataactaatatacttagcagcatactcaacatcatataataatccacaaacttataattagatataatgagaactataactacacaataaactaatctaatcctataacttaaataataataataatactatactaacacaatactacaatctctctaatttatttaactatacagcacacaagcaagaaaacaaattacaaaaaatatataataaaatacatacaaataatatacatacacacacaaacacaaactccactacccactcacaatagctaacccaaattatcaaaaatcacaatctataacaaccaacatacatacacaacccgaaatcatcattcccacc

SEQ ID NO: 702749 - DNA, 1198 bp, Homo sapiens
  misc_feature (288)..(288): n is a, c, g, or t
  misc_feature (401)..(401): n is a, c, g, or t
gatgatctatgaagtgaacactgcctatcagtatggtgaaaactcgcagcaccgattgtaccctcgcataaacatgggggcgcgtcttccagagcgcttcctaattggactgtctcgaggccatcaggccgagtggtgtactattgctcctgtcgcatgtctctttagacgcctaccctccaatatctacgagtctcttagcgtacacacaaacaaacacgtaaacccacttataactcaactgcactgggcgactatctgctgaccagcgaagaaggatgccaccantaactcaaaggagggcgatgcaatgaacatgcgcaatcccttggttgcatgattaaagggggcacgtcccgacgtacacggtgggattacatattcctatatgtttgtaattntcaaccctgtacagggaaaaacctgtccggtagaggaattatctgaccatgcggaagttatgtgttccatgggcaagccccctatgtgtgatcgcgatggctcacgaagagccgatgagacgctctcttttgacctggccacttctcacggcacatgagtcaagggtgccgcacgctggtagacccccaagaaataacccaggtgggggagttggatttccccccgggacttccattatgtcgcggcccattcagaatatgggcgatccccaaaaaatacccataaaacaaaagggccacataaccctagataaagttacaaattccgtcccgagaccacggtgcaacggggggacaaggttggtaccgagacttgcacaactccttcgtaagggggaggtggccatccgccattggcggagattccgtccatatttaacacggcaatagggaaaaacggaaacgccgcagggagtgaacaccctcctataatactcttagagagtttgtgcgaggtcacgggcaaaaacccttgtacgttcttggaaatctaagttctagagttctgttggttaagcgattgagcaagactacggttgcagttgagcattcttggtcaaacacgcacccttcgggctttaaggcatggaaggcgcctctccttcaacgttaaaacggtcacaacggtggttctggtcagtcatgtccattcacgcccatttttccttatttgctcaacctggtttcccacgaggaccgcgtgtttattctcccctataacggttagtccctcacga

SEQ ID NO: 702750 - DNA, 513 bp, Homo sapiens
  misc_feature (437)..(437): n is a, c, g, or t
cagcggagtgaggatcaactgtgtcgctcctgggaccatttactcccagactgctgttgacaactatggcgaaatgggacaaaccttatttgagatggcctttgacagtatcccagctaagcgccttggagtccccgaggagatctcccctcgtggtatgtttcctgctgtcccctgcggcttcctatatcactggacagttgatcaatgtggatggaggccaggctctgtacactcacgccttcagcataccggatcatgacaactggcctgtaggaagctggggacctttctattgtcaagaggataaaggaatcttttaagaagaaagccaagctctaactaagccaaggaaacagccacccatcttgttcctgcgtgccttagcgccttgagaatgtttcctacttcacaagagcttatgatttctgtgtgtngggggtgggggatcactttaatgttaatagctttatctttgcaaagactgctcccaaaataaatgtctcttcctgt

SEQ ID NO: 702751 - DNA, 557 bp, Homo sapiens
ctgtggatacgtgacagccatgcctgagcagtgtgccagctcagaagctcagtgcccagtgtggatggatgcagatgcattcgagcacattaaacaaggcagtgacgcatacgatgcacagacctatgatgtggccagcaaagaagagcaacagtctgcaaacagactctggcaaagatcaggaagaggaggagatagaggacaccctttatggacacagcaggagcaggaggagttcaaaggcagcagactgtggagcagctgaagccagaggcactcgatgtcgggcagcagagcacccttgggctttgatgagatggcagtggagatccaaactgtcaaaacagaggaagaccaagatcccagaacagacaaagccctataaggagactgctaatgaggaaaccagaaagaagcggggagtctaccattcatacagttcatcaattcctcatggacacgatcttccagccctttttacacgatgtcagtgagctaagacaggaagctggagagagaggtggaaatgtggcagccacgtgaatctggaaacccag

SEQ ID NO: 702752 - DNA, 193 bp, Homo sapiens
gatcgagctcggtaccgtagcgctgcatggtaactgcctctccatcctgattttccacatggttgcaccaatttacattcccaccaacagtgtacgaggattcctttttctccacaccccccctagcacttattgtttttagactttgggatgatggccattctggctggtgtaaggtggcgatgacctggca

SEQ ID NO: 702753 - DNA, 814 bp, Homo sapiens
  misc_feature (533)..(533): n is a, c, g, or t
tcccgtggaggggctggctgttcccagagcagtccactcccccacttgcatgccttgcctggactcttttcttggagggaggtccctttcctctacccatctgaattttttttcttccaccagtgtccagcttgcctttcaccatgggcctaatgatggaaattacagttattctgtatcttcaaacagaaccaagcaaatcctctgagcttcattcatatgggaaattttctttctttcttttttttttttggagagggagttccgctcttgtggcccaggttggagtgcaagggtcaatctcggctcgcttgaaacctccacctcccgggtccaaagagattctccggcctcagcaggaggattactggtaatcccaagtatgcttggagattacaggcctgcgccaccaagatagctaatttggtactttgggtaagagatgcgatttccacccggtgtgggctaggcgggtctcgaactcttgacctcaggtggttccgccctcctgcgggctcccaagggtcgctggnagatatacaaggcatgagcaacaggtgccgggacattatgcgaaaaacttcttgcggcggcgactaaacctattcttccacaaatagcattgcttttccggaacttttcttcaggggacaaccacgactcttagctccctcaggcctgtcgaaaattcacgattcggggttaagcatggaatgtgcggcatagttcgcttctcgcacctggctacgcgttctgtcccctgtgaacctgttgcattcgacttcgttgctgtgggcgtgcactgtcccctttg

SEQ ID NO: 702754 - DNA, 206 bp, Homo sapiens
tcagattatgtccattccattccactcctttcctttccattgcattccattccattcgactgtattccattcgagtcaattccattcaagtccattcctttctagtcatttaaattcgcagtacattccaatctctttccattccatttattgttccattccatgtggagtccattccatgcatagtctaacatgcaatcatgggt

SEQ ID NO: 702755 - DNA, 690 bp, Homo sapiens
gtgagccactgctcccggccgtaaagttaacttctgaggcatttacatagcatttttttctcttgttctcattaacttgtttaatagcactttttattttggatattaatgtaatgtgtaatgttttatagcgtcttaataagaaccataggatttgctgtatctctttaataggtggaatctggaattgaacagtgttgttcagtttccttttcgttggtgtttgacttaacatgcactatcctggtctttctaacacctgaggccagtaattatccacacagtacctttataaggtagggggtggtatcaacatttatagataaattccaacttattgaagcctcactttccttaagcaacattcagggtcactaaattgggagaactgtcatttagccagaagtctgactccaaagttcagactttggagtataaagttcctccattataccccaggttcttgacatattgttagtgtaagaaactttgaatgataaattgagcttttgtgggtttttgtttgtttgttagttttgagtttgacaaattctcactttgtcacccaggctggggtgcattggtgaaatctcgactcacttcactctcaatctctctgactcaagcaatttttctaccttaactactttctaaataacttggactattaacactttccaccacacccca

SEQ ID NO: 702756 - DNA, 103 bp, Homo sapiens
ccctgctaactttgctgtaatttttttaaacgtcttgtttttaatatagccaactatctccatactggctggattaggttaaataaagaatttttttgttcca

SEQ ID NO: 702757 - DNA, 855 bp, Homo sapiens
acagtatcctgaaaactaggagggcctacaaggctctacatacagctgctcagtacagaggggctacagagtccagcgtgctctccgcaccaccccacttaccatttaggccaaaacaaccgcacccctgaatttctccgcaaatttcctgccggcaaggtcccagccatttgagggtgatgatggattctgtgctgtatgcagagcaacgccattgcctcactatgtgagcaatgcagcgcagctgccggggcaagtactccccagaggccagccacccccagccgctgcgctcagcaccgggctgcaccccttgcctcgcatctcccgatctcactgcccccagaccaccccacctgggctgctacccccacccttgggcactcactgcccacccacacacccacaaccaggcccactgacgcaactgccacaaacggacgcgcaacctgacggcctcctcctcgcgccctgcccgcccccccccctcgcccccccccccgccctccccctgcctgcgcgccccccccctcacctccgcctgccactcaccgccgctctggcacacctgcccgccggctcctctaccacacagtcctcaaaaccccccctcccccgcccacgcccacccaccaataccacacccacctcgctccatccccctcccatcaacccccgcccccagaacccaagacaatcccacgcccccacagcgcccaccgcagcgccaccaacgacccacctccccctctccccacctcgccacccccccccccccacccgccacacacccccacaccgcacaccgctcccccccacaccaccctacccccacccccacccccccccaccccc

SEQ ID NO: 702758 - DNA, 233 bp, Homo sapiens
gcgaaaagccacagtgtgcacaactggcatgctggaggcaccccttggttctgtgccttggtgcctcatattctcatctgtcacatggggatattcatagccccacttaaaaccccttgggtcctcatcattctcatcatttcacatggaggatattagatagccagcaagtagcatcatgcctcatggtggtttgcttgttatgggttaagattgctccaacagtgcacaat

SEQ ID NO: 702759 - DNA, 117 bp, Homo sapiens
agctggtcctgctgatggatgtgccaccgcgcgatactcgccggggaacagcttcgctttggtgacaccgtgcatgaccctgaaggcgactccatgcgtcactcttgaattctgccg

SEQ ID NO: 702760 - DNA, 671 bp, Homo sapiens
tctatgatggcaccccgataacctcccttggttactcccattactccagttactcagttgacactaatgcaggtgctgctgtgaaggggttttgcagatatattttaggtcccccatcagttgactttaagatggggattatcctgcttggactgtcctaatcaggtaagctctgaaaaggacggggttcttcctgaggaagactcatagtgcagagggattcagtgtgaggggcttcctccactgtaggctttaaaaatggagggtcatggggaaagaacactggtggccaacaggaattagaagcccttcccactgtctactctgatagcctgaaggaaacagggaccttagtcctataaaaattgccagaaaccggattctgccaacgagctctatataagcttgggggagaacccgaatcttaagatgaggatacagctttgagaaatcctgaacaaagaatctatcaactaggcctggatttctgatgaaggaactgtagacaaataaatgggtgctgttttaagccacttagtttgtggtaattggttatgtactaatagaaaattagtaaacagattcaatagctaaacatacgacatgttctccactgcaatgaatttatgaactgatatgcaaagtagttgcataaaaccgaatgtttccta

SEQ ID NO: 702761 - DNA, 1127 bp, Homo sapiens
  misc_feature (946)..(946): n is a, c, g, or t
gcgccagaccctgcgccccgcgctctccggcccgtcgcctgccttgggactcgcgagccctgcactcccgccctgcctgttctgctgccctgatgtatggatgctgcttgtgtttgcgaagtgcaccctggcacgctgccccgggcctgggcctgtgaccctgcggctgctgggtggaccagcgtgtcctgcatgagcctgctcctgcctgtgatggatgctgctactgtacccctgcgcctcctacttccatgttgctgtgcatgcgtggatgatcaagcctgcacatgctgtgaatgatgcttggcttacttggagtgcttggatggtaatgtagagtgaagcatgctgcttgtgagtgacggaacgtcttccccctgtgccatgaactacctggatcgctacctgtcttgctgtccccacccgaaaggcgcagttgcagctcctgggtgcggtctgcatgctgctggcctccaagctgcgcgagaccacgcccctgaccatcgaaaaactgtgcatctacaccgaccacgctgtctctccccgccagttgcgggactgtggaggtgctggtcctagggaagctcaagtgggacctggctgctgtgattgcacatgatttcctggccttcattctgcaccggctctctctgcccgtgacgacaggccttggtcaaaacgcatgccagacctttttggcctctgtgctacagattatacctttggcatgtacccggcattcatgatccgcacgtgctgcatcggagctgagtgccggcctgggtgctggtcctggtcgggatgagctcccggagctgttggcacgggtcctcggcctggattggctcgcttgggggccttaggaagcaaaatgaaagctgcccccaggggaaaccccagggaatacgctcgaaaaagatcaagtccgtggtccatagccccgggnggtcctcacagctagggtcaatgaaagaaaccctaaaagtgatagctaaccagtgccgagcaagcccgttggtgacacaacaaggggggcgacgccccatcattgagcaacactacaggtggcgcacacacaagcgtcacaaccgaccggcagcaatagacgcctcactacaagtaggctc

SEQ ID NO: 702762 - DNA, 843 bp, Homo sapiens
  misc_feature (236)..(236): n is a, c, g, or t
  misc_feature (252)..(252): n is a, c, g, or t
  misc_feature (385)..(385): n is a, c, g, or t
  misc_feature (441)..(441): n is a, c, g, or t
  misc_feature (453)..(453): n is a, c, g, or t
  misc_feature (607)..(607): n is a, c, g, or t
  misc_feature (615)..(615): n is a, c, g, or t
aaacttaagactaaatgtcaggtacaactttcccataaatcctttatgatgattcctcctacttctactatcacctttacctctatcataatattctgtcctctactgatcttcacaatagcctataccttcccaacacatgggactatgtctttgtatccttagcattcagcacaaagtatatagggctcaatatacacacaaacactgagatactgaagctcctgtccatacanccaccctttctttttntcctttcatgtatttatccatctatcctcgtacatgtatttagggcccattatagatgataaatcatacaagaaccaggaatacaaagatacatggtctccaattgagaatttcagtagagtatatgtggtangacatcatctctagaaagtccaagataaaatgcaaatatacaatcaataaattttngagcatttcttntaagctaagtactatgcatggttctagaaatacaaagattaataaaatccatcttctgatcccatagagctcttagtctattggggaaatatatatatatacatatacacacacacacacacacatacacaaataactacatatgaaacataantatatatntgagtaactataatttttgtgttttttttttcctcttcacaaatcacaaataactacaatataatgaagacttgttaatacccaacaatgctagggaccagtccacgcaaagaattttcgcaccaaaaataacaatagttccctattaggaagcactatctgatagtcaagagaatcctaggatttttttttacctaggctcatgactgcttacaacagaccataatc

SEQ ID NO: 702763 - DNA, 570 bp, Homo sapiens
agttgggtgaggtgaggcaagattgtattccgttttggttacaagctgggaacgggccctaattttttgcagtttggggaagctgccattgttaattgggttcttggcaagcccatgtgtgttgagggcttttcacactatccccctttgggtcgttttgcggttcgtgatataaaacaaacagttgcggtgggtgtcatcaaaccagtggacaaaaaggttgttggggctggcaaggtcccccagtttgcccagaaaggtcagaggggtaaatgaattttttccctaatccccgcccccccccttttaatcagggggggaagaacggtttcagaactgtttgtttccattggccctttaagtttagggggaaaaggctgggtaatgataccaatgccttgttaccccttccggaggaagggaggaaggttttggggccccctttggtttttttttttggggggggcggttttaaggttttagtttttaaaatcgggcctttttaaggggaaccacttggcccaaaatttgtcccagaattttggggccccttaaaaaagtttaatggga

SEQ ID NO: 702764 - DNA, 304 bp, Homo sapiens
gcgtcaaaagagaatagccttgaggccaggtgcagtggtcacaccctgtatcccagcactttgggaggctgaggtgggtggattgcttgagcctaggagttttaagactaacctgggcaacatggcaaaaccctgtctctaccaaaaatacaaaaaattagttgggcatggcattgtgcgcctgtagtctcagctactcgggagactaatgtgggaaacacctaagccccggaagttgagactgcagtgaaccatgatcgtgccactgcactctagcctgagagttggactgtgaccttgtctc

SEQ ID NO: 702765 - DNA, 861 bp, Homo sapiens
gcctggtgatagctggttgtccaagatagaatcttagttcaactttaaatttgccaactcaacctactgccaaccaagacctgactggcacgaggaaaggtgcaataatgaagagttttcttctagttgtcaatgccctggcattaaccctgccttttttggctgtggaggttcaaaaccagaaacaaccagcatgccatgagaatgatgaaagaccattctatcagaaaacagctccatatgtcccaatgtattatgtgccaaatagctatccttattatggaaccaatttgtaccaacgtagaccagctatagcaattaataatccatatgtgcctcgcacatattatgcaaacccagctgtagttaggccacatgcccaaattcctcagcggcaatacctgccaaatagccacccacccactgtggtacgtcgcccaaacctgcatccatcatttattgccatccccccaaagaaaattcaggataaaataatcatccctaccatcaataccattgctactgttgaacctacaccagctcctgccactgaaccaacggtggacagtgtagtcactccagaagctttttcagagtccatcatcacgagcacccctgagacaaccacagttgcagttactccacctacggcataaaaacaccaaggaaatatcaaagaacacaacgcaggacttgctgaaaccaaattactacttcacactctccttcagccatttgtctgccttcagtcaacagaaaatgtgattttcacagattcagctcttctctccttacattttacattcatgccacattcaatattttgattcttgcacaataaagccaactgattgcaacctg

SEQ ID NO: 702766 - DNA, 843 bp, Homo sapiens
gggatttttcttgggtcttctctacagctgacaggccaactcaacctactgccaaccaagacctgactggcacgaggaaaggtgcaataatgaagagttttcttctagttgtcaatgccctggcattaaccctgccttttttggctgtggaggttcaaaaccagaaacaaccagcatgccatgagaatgatgaaagaccattctatcagaaaacagctccatatgtcccaatgtattatgtgccaaatagctatccttattatggaaccaatttgtaccaacgtagaccagctatagcaattaataatccatatgtgcctcgcacatattatgcaaacccagctgtagttaggccacatgcccaaattcctcagcggcaatacctgccaaatagccacccacccactgtggtacgtcgcccaaacctgcatccatcatttattgccatccccccaaagaaaattcaggataaaataatcatccctaccatcaataccattgctactgttgaacctacaccagctcctgccactgaaccaacggtggacagtgtagtcactccagaagctttttcagagtccatcatcacgagcacccctgagacaaccacagttgcagttactccacctacggcataaaaacaccaaggaaatatcaaagaacacaacgcaggacttgctgaaaccaaattactacttcacactctccttcagccatttgtctgccttcagtcaacagaaaatgtgattttcacagattcagctcttctctccttacattttacattcatgccacattcaatattttgattcttgcacaataaagccaactgattgcaacctg

SEQ ID NO: 702767 - DNA, 952 bp, Homo sapiens
  misc_feature (318)..(318): n is a, c, g, or t
  misc_feature (735)..(735): n is a, c, g, or t
  misc_feature (738)..(738): n is a, c, g, or t
  misc_feature (740)..(740): n is a, c, g, or t
  misc_feature (744)..(744): n is a, c, g, or t
  misc_feature (747)..(748): n is a, c, g, or t
  misc_feature (756)..(756): n is a, c, g, or t
  misc_feature (760)..(761): n is a, c, g, or t
  misc_feature (793)..(793): n is a, c, g, or t
ggacgccctaggcttccgcgagatcttcggtgggggtacgggtgttttacgccaggacgctgatgcgtttgggttctcgtctgcagaccctctggacctggtcacgattccataatgtaccacaacagtagtcagaagcggcactggaccttctccagcgaggagcagctggcaagactgcgggctgacgccaaccgcaaattcagatgcaaagccggtggccaacggggaaggttcttccgaatgatccagtctttcttgagcctcatgaagaaatgacactctgcaaatactatgagacaaaggttattggcaatnctgtccggtgtttaaagccagcaatgccaagatctgtgtgtgggtacggctgtgtatgtatttcaaacgtttttatcttaataacctcagtaaatggaatatcacccccaaggataataatggctcacttgtgtggcatttttgtggccttgcaaaggtagatgaacttcacttgtatctagtcctcagttgtgttggaaaaccctccgggagaagtccctctgtggaccagggagaaggcactttgaaacagatactgggaatatgaactactttcttatacagcaacttaattttccaccttattgtcacaatcttacagaccattttgaggggttcctcatcgattaaagaccgtatccatattggggatccagagatttgaggaaacaggtgatgacttcttataagaattgngtngncggntgnntacctttntaanncttccaatggctggtggcattattagtgcccngggggaaatatgcaggtttactagagttgtggtaaagaaaatgtggcaggtatattatggaggggagagttaaaattaacacctgtatagtgtgtgaaaaggggggtctggtgtgtcaacaaagggaggtatgttcaccaagagggggggccacggtat

SEQ ID NO: 702768 - DNA, 370 bp, Homo sapiens
  misc_feature (141)..(141): n is a, c, g, or t
tctgagacaccataacagtgtgagatgaaatattctgaggatcaatgtagctgtggtgagtcacagaggtaacagaatgtgtcaggcagaaattgtgggcatagagaatatttcaggatgaactatcatgggagtctagangcttctttgagtgcaaaaaatagaaggtctaggatactggcattgaataaatagttgaagagttagaggatgttgtcaaggatggtccatttataggacatatattgttgagatgggctgatggaaatatttaagaatgtgccacagacagaacgttcaggtggtgatctgggctcatagaagccacactgatgaagttgagagacctgggccattgtctgggttggga

SEQ ID NO: 702769 - DNA, 198 bp, Homo sapiens
  misc_feature (7)..(7): n is a, c, g, or t
  misc_feature (11)..(11): n is a, c, g, or t
  misc_feature (18)..(18): n is a, c, g, or t
ctggggnggcnttcctgnaagctagacacccttacggtgcccgcgcatgtcctacgacttccgtcggacccttagtcatgtgcttcgcgtcttcttcttttattttctggctctggttggtctctttcctgtcgcttccttcctaatgtgtgttcagtgtctctccctcccacaataacaaaaacacaaacaaaaaat

SEQ ID NO: 702770 - DNA, 198 bp, Homo sapiens
  misc_feature (198)..(198): n is a, c, g, or t
atagcagcagcgctgatacgcctagatatgaagacggtctattgtgttcgactaggcatattaaaggacggcgggggcatcgtatgcgcgctgagtggaatcttggacggcgcagaagacagagcgaaagctttgccagaatgttttcttcatccagaacgaaagttggaggttcgagtggagtggggtgggcaagcn

SEQ ID NO: 702771 - DNA, 293 bp, Homo sapiens
  misc_feature (2)..(2): n is a, c, g, or t
  misc_feature (6)..(6): n is a, c, g, or t
  misc_feature (113)..(113): n is a, c, g, or t
  misc_feature (128)..(128): n is a, c, g, or t
  misc_feature (182)..(182): n is a, c, g, or t
  misc_feature (198)..(198): n is a, c, g, or t
  misc_feature (219)..(222): n is a, c, g, or t
  misc_feature (244)..(244): n is a, c, g, or t
  misc_feature (247)..(248): n is a, c, g, or t
  misc_feature (250)..(250): n is a, c, g, or t
  misc_feature (257)..(257): n is a, c, g, or t
gngggncacttttagagtaaactgtatcactggtttggaaaagcagctgccttcttggacacttaaaacactaaatcacctgaggagttctatttccctgacagttcgtggcntgatatttattaagnggttttttgtgtttttaacatactttgactttaaaattagtttcccttcagttnacttacctcactatanagtaaggaacagagaatccannnnatttattagagtattcataggnccnnanatttatntcttacatctctaaaagaaatgcaaaacccctgtcc

SEQ ID NO: 702772 - DNA, 142 bp, Homo sapiens
cattcaggtggcagactgtccccatcacttgtcaatgataaacatcgttgcagacagacatctgggtgggtgggtgagggggccggtctggtcggaacagatgacatgaggtgcagcccagggttctctagtggagggcaag

SEQ ID NO: 702773 - DNA, 169 bp, Homo sapiens
ttaccggtcctgggtcccccactcctgtcggtgacatggagaaacaaatccaagtcatatcccagaagagacagtatcgtgcgcttcaggagatcgctcagacgtgcattaccgtcaggtgatctgccttgccttggctatccccacgtgctgggattataggcgtaag

SEQ ID NO: 702774 - DNA, 876 bp, Homo sapiens
  misc_feature (260)..(260): n is a, c, g, or t
atgaccccaatagcgcaaaattaaccccactactaaaattaattactacacagtcactcatcgactctccccactcccataccggaacatcttcgcgtatgatgaaactttcggtctcactcctgtggtcgcctgtatgattcctccaaacatcatcatcaggactattcctagaccatgccactaatcgggcagtacgctctacaaccgccttttcatcaattcgcccacatcattcgagcagagtaaattatgcgtcnggagttcatccgctaacttcaccgactcacatggtcgctatcaactatctctcttcagtctgcctcttccgtagcaacatcggtcgagggcctatattacggatcatttctctactcagaaagcctgaaacatcggcataatcctcctgcttgcaatataacaacagccttcataggctatgtcctcccgtgagggccaaatatcattctgaggggccagcagtaattacaaaggttactatccgccatcccataacattgggacagacctagtacaatgaatctgaggaggctactcagtagacagtcccaccctcagacgattcattgaacctttcaccttcatcttggcccttcatatatggcggcccataaagaagaaatccaacttcctaactcttgcaccgaaaaacggggaatcaaaacaaaccccctagggaatccaacttcccattccggataaaatcaaccttccagccctttatacaacaattcaaagacgccttcggatatatcttcttacattctctcctaaatgacattaacactattttcaacaaacctcctaagggaaccagaaaaatttatcctagacaacccttaaaaaccttccaat

SEQ ID NO: 702775 - DNA, 1121 bp, Homo sapiens
cggagactgaagccggagccgggttggacgtctgtgacgggggcctgtgccgtgagcttggcgtccggcagacatggggatcgaccgagcgtccacagctgagacttccgcgaaggcggtgagtccagctcaccaccaagacgcagcccgtgcatagccaccgatgattgccttatgggaccagcttcttgggcatgcacagcagccacctcggttggcaggatgttgctttgcacttgggtgccaggcaggcagtagattccaggagctcgtgcgcgtgaagagtcagacctcctacaacttgggccaccctgtgactacaaaggccagtgtgatgaaaggctgtgctggcagtgggagcttgatgagtggcgttgccactacgggagaaagggagaagctagatcggtcgctgtaacgtgcgagccccggcttgcatcacccggccgttgcctgcccgtagatctttgcaggacccgcgacttggtaggtggccttcttcattgggtccagagttgccctgggggcaggggctcgagggtacgggcccaggggagaccgcatgcgcatgattggaggccattgcccagtgggccgcttggcgcgagatccccttgctccttggaccattttgctgagccttgctacttacttgtcccgggacttcaccggctttccacggagcccgagccaggcatgggtaagcgaccgtggttgtgaaacttccgcgctaagaaagagagcagttccggacgtcccccttgggaactaggacgtggttcaaacttaacgagtcctcgtgggaagggcctaggggtgctagggggcttcggcgtcgacctccaccaccgagatccttaaacttactgttcccacaggcctaatttgaacctcggtggagtgggatcgctttgcgtttgaacaaacttgggttgctttgacgagttgcgttgcatcacggaaggggccagatggtaaccctgggcccccactagcttcccgggaaaaacggtgtgcaagggagctcagggcccattggggttcacaagcgtacgtattatggtcccacaggggaggaactagaaacgattgcccctttggaccccttcttcatgcttcct

SEQ ID NO: 702776 - DNA, 894 bp, Homo sapiens
ggtttgggtgcaaggtaggtctgattgagcttgtgttgtgcgtgaagggacagcaccgtgggtctagcgggagagagtccctgagtgtgagacccgtcttccccggtcccagcccctcccagttcgccctcagggacgtgtcgacttccttgggtccccgtacggcgacagccgagtgggctgagagaagcgaaccagcgagtgatcgaagttggttagcgtcgaaatggctcggctagatagatggtggtccaacgattggtgaacatgctccgattctgcctagtagacatgatgtcatgagtatctagatcgagcttcaagggtgcagttcaacgcgtcttcacacttgttctaccacgagcacgctactgagcatcgcgaaaagatgcggacgtgcatccggacgtagctaggcttgccacgagagccctggtgtcctcgcaggggagcgccaggacatccgcagtgtcacgtgccttcgttagtggggcacctagacaatgttgtcacaagcagaactaccaagagcagaagatttgacggacattctccttgggaagcgcaaagtcgcattgtgcgccgtccccaagggtacccccaaagctgagctaggctcattgaagccctcgaggtccaaccagcacgcttggtgcgtgggagcatatttgtggccgagatactttactagcgctaacatgcaaaggagtttacagaaagcgccagacacgtcaaatgaacagagtctgggagaaaggggaactccctgaaacaggccgctggaaggggtttttaggacaaatgtacttaagcagtcacccaccgtcccaggaaggacagatggattgaacgcgcaggttgctgaaacgattgaaaggttgtcttctcagaagg

SEQ ID NO: 702777 - DNA, 166 bp, Homo sapiens
atcaggcgaagatgtggcccaccctcgggttggccctgctcgggtctcagatgcctcttccttctttggtgagcgtattttgcaaagccgtgtatgtggcgatggcattccccaagttagagcctttccaccactcccagagtcttcgcctgatgggtaccgagct

SEQ ID NO: 702778 - DNA, 965 bp, Homo sapiens
gcgccgcttgtgccagagccaggatactctttcgttgtctgctggtgtagctacacgtgccccggcccttttttgtgtcccgcgacattagaaacagtggttggaggaagtctcccgtcggggcaagaccaccgcccttcttgttgcatacatgaaccttcttgtggggggacacccccccgtctctctgcctcccctcgttctctgtggggggcgagcacagcgcaggtctcttatctactaagtgtgtgtggagagggggggacccactctctcttcctgcgcgcacaatggtgtgttttctcgctcgtggcaccccctcctgtggttgtgctggctgttcctccatacccccgcacgcacgacaggaggggtgtggtttcttgcccgccctcgctgctgaccacttcgcggtgccactccgtgtgtttatacatagcgctggcggggggaaattgctccgctcttctctcctctgtctgttctctctcctaagtggggctgcaccccccccgtgggcatgagttagttttttcttccccccagattgttgtgtgttgctctccccctcgcgcgcgcccacgggggtgccccgtatatctctcccctcgtgctgcgcagcaagattgtttgtcttgttaaaaaaaaagacggtgttataccccccgcgcgcccccctcgtggggtgaggttccccctccccgcaggggagcgccgcccgcgggggcacccccacgggggttttacactccgggcggcgttttttttcttcccccctgctggcgcacagggaggtcacatctggctgcctcacttctacacagccgttttttttctaccgtctccttattttttttttttttttcccccccccacctggcgcacacattttttttgagctttttttttgcccaaaactcttttttccttttttagggagaaacctttttaatgggggtccccca

SEQ ID NO: 702779 - DNA, 162 bp, Homo sapiens
ccgcgtgtaatgtgctgcccctacaatggagatctcttggagccccccaggccatacagactgctggctgcaaagccagtcctccacatgcaccacccaggccaccactgcccctggagctggtcacactggagatgctgctgaagccagagtggatgaccc

SEQ ID NO: 702780 - DNA, 851 bp, Homo sapiens
tgccccagttgtggttgtagtgtgtcataatctctgatcattaatcctagtgactgagtgcactattcagtattaaaaaatatgattaatagagagagctgtcattgagtcccaaaatgaattgcaagttttaaaataattattataaaatgtttgctaacccgaaaatattactaggcatgagtgtgacctctctgatttggtcaccttgtagaacttgagggtgtcaggggcgatctcttaagagttatcagtcatgatatccagaagtatagatgtatccaatgatggaagtgacaagtgaaagtgtgggattacaggcgtgagtcaccggcccggtcaagcccttgggataatatctggaatagcatctgtaaagctgagtgttcgacctctgttattcttcttctcctctttacatctggttgctgatgcgtggtgtaaagctgcacctgtggggggacctctcatgcagacttgccatattgcgggagtattggcactgatgatctttggtggacctttcttctctttaaaagatactttcaaaagggagcatgtgtgatgcaggtgttctcgtctaccgattgagaagttcagcttcaaaagttactggcagttttagtcgaggaactggtaagagataagggcatgttctggaaagacgtaaggattggacggtaaccctaggttgtgcgaccagtggaattttatttgcagaatgggggtgaaataggtaaaaaaaaggtttttctgaagagggagggaactttcaacgggtggggccagttaatttaggagaggtcatataagtgggaaaggggggggatttaacaggggggtatatgagg

SEQ ID NO: 702781 - DNA, 155 bp, Homo sapiens
aagatctcacttcacgaccaagatgctgagtgtgtcagagcccaaacctcttcatccactagctggtacatgctggtccacaagcacaccatgctggggccatgtgaaccaccaaggccacgggggcatctgcctttccttggtacctctgaaag

SEQ ID NO: 702782 - DNA, 261 bp, Homo sapiens
agcctgctgttctcctcctcgtgactatgaccaagtcttactccttcctggaccttcatttccctacctctcacatacacagtgggctggatgctggatgcaaagctccctcgtcacagccccaaagacaggacttgaccatctcagtgcaatgaccctgtggtgccttctcccgaggacctaagagccccctgagcgcttgcaaacactgcagacaaagcgagccctggcaccagctccctgcctgcctgttctgtgaag

SEQ ID NO: 702783 - DNA, 180 bp, Homo sapiens
gaaaacagaatgggtacttgagtctgaagctttagtgtgcaggccacatgggcggggcagggggtgtcaggccctgtgaccatgcccatggacgagaaacagcagggagcagaacactatcccaatgaaagaaccttacggtaggacctactggaagggcgcaaggggttggcaagcaag

SEQ ID NO: 702784 - DNA, 2351 bp, Homo sapiens
ggcgctatctcgcagcccccgaccagctcggcctgctgtcgggcatctctgctgtcctccggctgtagggctacctgcctccctcccggggggtgcactgcgagtccgactctagtgggggcagcgcctagcggactcccaaacccgctcaggtcctgccggcctcaccggcaccgcccaccctccagccggccgcggctctgcgcttgcgcgccggcagcacacagtgttaggggcgcgccctctgctctggacatgcgcgccgtcgcgagcgtctctgggaccggaagtgcgggcgagcgcgggtccccgggtctgacaggagcagcctgtgggcaccgcggcggtagttggaggcgggagagggtccgtagccgcgccgccctgccccgccatgggcctcctgtcggacccggttcgccggcgcgcgctcgcccgcctagtgctgcgcctcaacgcgccgttgtgcgtgctgagctacgtggcgggcatcgcctggttcttggcgctggttttcccgccgctgacccagcgcacttacatgtcggagaacgccatgggctccaccatggtggaggagcagtttgcgggcggagaccgtgcccgggcttttgcccgggacttcgccgcccaccgcaagaagtcgggggctctgccagtggcctggcttgaacggacgatgcggtcagtagggctggaggtctacacgcagagtttctcccggaaactgcccttcccagatgagacccacgagcgctatatggtgtcgggcaccaacgtgtacggcatcctgcgggccccgcgtgctgccagcaccgagtcgcttgtgctcaccgtgccctgtggctctgactctaccaacagccaggctgtggggctgctgctggcactggctgcccacttccgggggcagatttattgggccaaagatatcgtcttcctggtaacagaacatgaccttctgggcactgaggcttggcttgaagcctaccacgatgtcaatgtcactggcatgcagtcgtctcccctgcagggccgagctggggccattcaggcagccgtggccctggagctgagcagtgatgtggtcaccagcctcgatgtggccgtggaggggcttaacgggcagctgcccaaccttgacctgctcaatctcttccagaccttctgccagaaagggggcctgttgtgcacgcttcagggcaagctgcagcccgaggactggacatcattggatggaccgctgcagggcctgcagacactgctgctcatggttctgcggcaggcctccggccgcccccacggctcccatggcctcttcctgcgctaccgtgtggaggccctaaccctgcgtggcatcaatagcttccgccagtacaagtatgacctggtggcagtgggcaaggctttggagggcatgttccgcaagctcaaccacctcctggagcgcctgcaccagtccttcttcctctacttgctccccggcctctcccgcttcgtctccatcggcctctacatgcccgctgtcggcttcttgctcctggtccttggtctcaaggctctggaactgtggatgcagctgcatgaggctggaatgggccttgaggagcccgggggtgcccctggccccagtgtaccccttcccccatcacagggtgtggggctggcctcgctcgtggcacctctgctgatctcacaggccatgggactggccctctatgtcctgccagtgctgggccaacacgttgccacccagcacttcccagtggcagaggctgaggctgtggtgctgacactgctggcgatttatgcagctggcctggccctgccccacaatacccaccgggtggtaagcacacaggccccagacaggggctggatggcactgaagctggtagccctgatctacctagcactgcagctgggctgcatcgccctcaccaacttctcactgggcttcctgctggccaccaccatggtgcccactgctgcgcttgccaagcctcatgggccccggaccctctatgctgccctgctggtgctgaccagcccggcagccacgctccttggcagcctgttcctgtggcgggagctgcaggaggcgccactgtcactggccgagggctggcagctcttcctggcagcgctagcccagggtgtgctggagcaccacacctacggcgccctgctcttcccactgctgtccctgggcctctacccctgctggctgcttttctggaatgtgctcttctggaagtgagatctgcctgtccgggctgggacagagactccccaaggaccccattctgcctccttctggggaaataaatgagtgtctgtttcagcagcta

SEQ ID NO: 702785 - DNA, 2564 bp, Homo sapiens
ggcgctatctcgcagcccccgaccagctcggcctgctgtcgggcatctctgctgtcctccggctgtagggctacctgcctccctcccggggggtgcactgcgagtccgactctagtgggggcagcgcctagcggactcccaaacccgctcaggtcctgccggcctcaccggcaccgcccaccctccagccggccgcggctctgcgcttgcgcgccggcagcacacagtgttaggggcgcgccctctgctctggacatgcgcgccgtcgcgagcgtctctgggaccggaagtgcgggcgagcgcgggtccccgggtctgacaggagcagcctgtgggcaccgcggcggtagttggaggcgggagagggtccgtagccgcgccgccctgccccgccatgggcctcctgtcggacccggttcgccggcgcgcgctcgcccgcctagtgctgcgcctcaacgcgccgttgtgcgtgctgagctacgtggcgggcatcgcctggttcttggcgctggttttcccgccgctgacccagcgcacttacatgtcggagaacgccatgggctccaccatggtggaggagcagtttgcgggcggagaccgtgcccgggcttttgcccgggacttcgccgcccaccgcaagaagtcgggggctctgccagtggcctggcttgaacggacgatgcggtcagtagggctggaggtctacacgcagagtttctcccggaaactgcccttcccagatgagacccacgagcgctatgtactgggggagtggggtgtgcctgggcccagaaagcaccttggagggaggggtctgggctgggtatcaccttgcgggggtgtcatggggccaggaagctcagtgggagggaaatccctggtgggcactggagggctaggaaagttgtggggggcccttcagccccctaccacaaagttacactgaggctccccccaccgatgctgcatacagatggtgtcgggcaccaacgtgtacggcatcctgcgggccccgcgtgctgccagcaccgagtcgcttgtgctcaccgtgccctgtggctctgactctaccaacagccaggctgtggggctgctgctggcactggctgcccacttccgggggcagatttattgggccaaagatatcgtcttcctggtaacagaacatgaccttctgggcactgaggcttggcttgaagcctaccacgatgtcaatgtcactggcatgcagtcgtctcccctgcagggccgagctggggccattcaggcagccgtggccctggagctgagcagtgatgtggtcaccagcctcgatgtggccgtggaggggcttaacgggcagctgcccaaccttgacctgctcaatctcttccagaccttctgccagaaagggggcctgttgtgcacgcttcagggcaagctgcagcccgaggactggacatcattggatggaccgctgcagggcctgcagacactgctgctcatggttctgcggcaggcctccggccgcccccacggctcccatggcctcttcctgcgctaccgtgtggaggccctaaccctgcgtggcatcaatagcttccgccagtacaagtatgacctggtggcagtgggcaaggctttggagggcatgttccgcaagctcaaccacctcctggagcgcctgcaccagtccttcttcctctacttgctccccggcctctcccgcttcgtctccatcggcctctacatgcccgctgtcggcttcttgctcctggtccttggtctcaaggctctggaactgtggatgcagctgcatgaggctggaatgggccttgaggagcccgggggtgcccctggccccagtgtaccccttcccccatcacagggtgtggggctggcctcgctcgtggcacctctgctgatctcacaggccatgggactggccctctatgtcctgccagtgctgggccaacacgttgccacccagcacttcccagtggcagaggctgaggctgtggtgctgacactgctggcgatttatgcagctggcctggccctgccccacaatacccaccgggtggtaagcacacaggccccagacaggggctggatggcactgaagctggtagccctgatctacctagcactgcagctgggctgcatcgccctcaccaacttctcactgggcttcctgctggccaccaccatggtgcccactgctgcgcttgccaagcctcatgggccccggaccctctatgctgccctgctggtgctgaccagcccggcagccacgctccttggcagcctgttcctgtggcgggagctgcaggaggcgccactgtcactggccgagggctggcagctcttcctggcagcgctagcccagggtgtgctggagcaccacacctacggcgccctgctcttcccactgctgtccctgggcctctacccctgctggctgcttttctggaatgtgctcttctggaagtgagatctgcctgtccgggctgggacagagactccccaaggaccccattctgcctccttctggggaaataaatgagtgtctgtttcagcagcta

SEQ ID NO: 702786 - DNA, 310 bp, Homo sapiens
attcagagaaaagggaaatcttgtacatagttgctagagatgtttaaattaatacagccattatggaaaacggtatggaggttcctcaaaaaactaaaaataagattaccatatggctcagtaatcccacttctgggtatataaccaaaggaactgaaataaatatgtcaaagggatatctgcactgccatgttcactgcagcactattcacaatagacaagatatggtatcagcctaactggctatcaacggataaactgatttttttaatgcagtatatatacacaatagactactattcagccttaa

SEQ ID NO: 702787 - DNA, 325 bp, Homo sapiens
  misc_feature (15)..(15): n is a, c, g, or t
cttttccagcttaanttattttaaggaacaaatgaaaactctgggctgggtggagtggctcatacctgtaatcccagcactttgggaggctacggtgggcagatcatctgaggccaggagttcgagacctgcctggccaacatggcaacaccccgtctctaataaaaatataaaaattagcctggcatggtagcatgcgcctatagtcccagctgctcaggaggctgaggcatgagaatcgcttgaacctaggaggtggaggttgcattcaactgagatcataccacttcattccagcctgggtgacagagcaagactctgtctc

SEQ ID NO: 702788 - DNA, 2690 bp, Homo sapiens
ggcgctatctcgcagcccccgaccagctcggcctgctgtcgggcatctctgctgtcctccggctgtagggctacctgcctccctcccggggggtgcactgcgagtccgactctagtgggggcagcgcctagcggactcccaaacccgctcaggtcctgccggcctcaccggcaccgcccaccctccagccggccgcggctctgcgcttgcgcgccggcagcacacagtgttaggggcgcgccctctgctctggacatgcgcgccgtcgcgagcgtctctgggaccggaagtgcgggcgagcgcgggtccccgggtctgacaggagcagcctgtgggcaccgcggcggtagttggaggcgggagagggtccgtagccgcgccgccctgccccgccatgggcctcctgtcggacccggttcgccggcgcgcgctcgcccgcctagtgctgcgcctcaacgcgccgttgtgcgtgctgagctacgtggcgggcatcgcctggttcttggcgctggttttcccgccgctgacccagcgcacttacatgtcggagaacgccatgggctccaccatggtggaggagcagtttgcgggcggagaccgtgcccgggcttttgcccgggacttcgccgcccaccgcaagaagtcgggggctctgccagtggcctggcttgaacggacgatgcggtcagtagggctggaggtctacacgcagagtttctcccggaaactgcccttcccagatgagacccacgagcgctatatggtgtcgggcaccaacgtgtacggcatcctgcgggccccgcgtgctgccagcaccgagtcgcttgtgctcaccgtgccctgtggctctgactctaccaacagccaggctgtggggctgctgctggcactggctgcccacttccgggggcagatttattgggccaaagatatcgtcttcctggtaacagaacatgaccttctgggcactgaggcttggcttgaagcctaccacgatgtcaatgtcactggcatgcagtcgtctcccctgcagggccgagctggggccattcaggcagccgtggccctggagctgagcagtgatgtggtcaccagcctcgatgtggccgtggaggggcttaacgggcagctgcccaaccttgacctgctcaatctcttccagaccttctgccagaaagggggcctgttgtgcacgcttcagggcaagctgcagcccgaggactggacatcattggatggaccgctgcagggcctgcagacactgctgctcatggttctgcggcaggcctccggccgcccccacggctcccatggcctcttcctgcgctaccgtgtggaggccctaaccctgcgtggcatcaatagcttccgccagtacaagtatgacctggtggcagtgggcaaggctttggagggcatgttccgcaagctcaaccacctcctggagcgcctgcaccagtccttcttcctctacttgctccccggcctctcccgcttcgtctccatcggcctctacatgcccgctgtcggcttcttgctcctggtccttggtctcaaggctctggaactgtggatgcagctgcatgaggctggaatgggccttgaggagcccgggggtgcccctggccccagtgtaccccttcccccatcacagggtgtggggctggcctcgctcgtggcacctctgctgatctcacaggccatgggactggccctctatgtcctgccagtgctgggccaacacgttgccacccagcacttcccagtggcagaggctgaggctgtggtgctgacactgctggcgatttatgcagctggcctggccctgccccacaatacccaccgggtggtaagcacacaggccccagacaggggctggatggcactgaagctggtagccctgatctacctagcactgcagctgggctgcatcgccctcaccaacttctcactgggcttcctgctggccaccaccatggtgcccactgctgcgcttgccaagcctcatgggccccggaccctctatgctgccctgctggtgctgaccagcccggcagccacgctccttggcagcctgttcctgtggcgggagctgcaggaggcgccactgtcactggccgagggctggcagctcttcctggcagcgctagcccagggtgtgctggagcaccacacctacggcgccctgctcttcccactgctgtccctgggcctctacccctgctggctgcttttctggaatgtgctcttctggaagtgagatctgcctgtccgggctgggacagagactccccaaggaccccattctgcctccttctggggaaataaatgagtgtctgtttcagcagctaaaaaaaaaaaaaaaaaaaaaaagaaaaaaaaaaaaaaaaaaaaaaaaggggggggggcaaaaaaattcccccggggggcccaatatttgcggcttcaccccgcctttctgtgtcagcaggtgggcccccctaagggggacccctatattaaaaccaagagggcacggcgccgcacttgtacaacccgctcggcgtggtggaaacacggtgctgccgtgggaactcctgcgggagggccccctctctgggtgcggtgtgccacatacgtgggcacacatctccatgaggagtttacggccgagggcaaccataacgttggggctcatgcgtttacacgcg

SEQ ID NO: 702789 - DNA, 2868 bp, Homo sapiens
ggcgctatctcgcagcccccgaccagctcggcctgctgtcgggcatctctgctgtcctccggctgtagggctacctgcctccctcccggggggtgcactgcgagtccgactctagtgggggcagcgcctagcggactcccaaacccgctcaggtcctgccggcctcaccggcaccgcccaccctccagccggccgcggctctgcgcttgcgcgccggcagcacacagtgttaggggcgcgccctctgctctggacatgcgcgccgtcgcgagcgtctctgggaccggaagtgcgggcgagcgcgggtccccgggtctgacaggagcagcctgtgggcaccgcggcggtagttggaggcgggagagggtccgtagccgcgccgccctgccccgccatgggcctcctgtcggacccggttcgccggcgcgcgctcgcccgcctagtgctgcgcctcaacgcgccgttgtgcgtgctgagctacgtggcgggcatcgcctggttcttggcgctggttttcccgccgctgacccagcgcacttacatgtcggagaacgccatgggctccaccatggtggaggagcagtttgcgggcggagaccgtgcccgggcttttgcccgggacttcgccgcccaccgcaagaagtcgggggctctgccagtggcctggcttgaacggacgatgcggtcagtagggctggaggtctacacgcagagtttctcccggaaactgcccttcccagatgagacccacgagcgctatatggtgtcgggcaccaacgtgtacggcatcctgcgggccccgcgtgctgccagcaccgagtcgcttgtgctcaccgtgccctgtggctctgactctaccaacagccaggctgtggggctgctgctggcactggctgcccacttccgggggcagatttattgggccaaagatatcgtcttcctggtaacagaacatgaccttctgggcactgaggcttggcttgaagcctaccacgatgtcaatgtcactggcatgcagtcgtctcccctgcagggccgagctggggccattcaggcagccgtggccctggagctgagcagtgatgtggtcaccagcctcgatgtggccgtggaggggcttaacgggcagctgcccaaccttgacctgctcaatctcttccagaccttctgccagaaagggggcctgttgtgcacgcttcagggcaagctgcagcccgaggactggacatcattggatggaccgctgcagggcctgcagacactgctgctcatggttctgcggcaggcctccggccgcccccacggctcccatggcctcttcctgcgctaccgtgtggaggccctaaccctgcgtggcatcaatagcttccgccagtacaagtatgacctggtggcagtgggcaaggctttggagggcatgttccgcaagctcaaccacctcctggagcgcctgcaccagtccttcttcctctacttgctccccggcctctcccgcttcgtctccatcggcctctacatgcccgctgtcggcttcttgctcctggtccttggtctcaaggctctggaactgtggatgcagctgcatgaggctggaatgggccttgaggagcccgggggtgcccctggccccagtgtaccccttcccccatcacagggtgtggggctggcctcgctcgtggcacctctgctgatctcacaggccatgggactggccctctatgtcctgccagtgctgggccaacacgttgccacccagcacttcccagtggcagaggctgaggctgtggtgctgacactgctggcgatttatgcagctggcctggccctgccccacaatacccaccgggtggtaagcacacaggccccagacaggggctggatggcactgaagctggtagccctgatctacctagcactgcagctgggctgcatcgccctcaccaacttctcactgggcttcctgctggccaccaccatggtgcccactgctgcgcttgccaagcctcatgggccccggaccctctatgctgccctgctggtgctgaccagcccggcagccacgctccttggcagcctgttcctgtggcgggagctgcaggaggcgccactgtcactggccgagggctggcagctcttcctggcagcgctagcccagggtgtgctggagcaccacacctacggcgccctgctcttcccactgctgtccctgggcctctacccctgctggctgcttttctggaatgtgctcttctggaagtgagatctgcctgtccgggctgggacagagactccccaaggaccccattctgcctccttctggggaaataaatgagtgtctgtttcagcagctaaaaaaaaaaaaaaaaaaaaaaagaaaaaaaaaaaaaaaaaaaaaaaaaaaaagagggggggacacacaagaaacccacaagggggccccaaataagaaaaccacaatatatggaaaaggggcccaaaaggagccaaaaacaggagccaggaccacgaattaacaaaaatgtgaatggaaaaaaccgagtagcaatcgcaacacttgaaaagagcaccaataacctcgcagggggacaaatattgcgacaaaaccactaagagatataaaacacctagggacaacattacaattaacaggtgctaacgggtgagaaacacaacaggaatctatagagcgggcgagagaaaatattcagcaagagggtatagtttgagaatttcagggggggatagtaatatagagaagaagaacaacataggagaaaagaagaatgagacaaacagagaacacaagataaatcaagaaaataaaagaagagagaagagaagaaaaagaggagtaaataaaaaaaaagc

SEQ ID NO: 702790 - DNA, 314 bp, Homo sapiens
cagcacccccaaacgccagcctctcctttcttcccatccaccagtatactgcgggcgcatttctggtctttgtccaacagtgaacaccatatctggtgggatatgcctatccagtgccacagcggccacctcaccccatgcatctctgttttgcccgtcagtgctgggacggaccagctaagggcacgtcccagctgtctggcagataggtgggtgggaacagagagggcgagaatgccgtactaagcttctgcctggggatcccccacacgacctgggtactgccttgggaaaacctgtcttaagtaccacta

SEQ ID NO: 702791 - DNA, 2670 bp, Homo sapiens
ggcgctatctcgcagcccccgaccagctcggcctgctgtcgggcatctctgctgtcctccggctgtagggctacctgcctccctcccggggggtgcactgcgagtccgactctagtgggggcagcgcctagcggactcccaaacccgctcaggtcctgccggcctcaccggcaccgcccaccctccagccggccgcggctctgcgcttgcgcgccggcagcacacagtgttaggggcgcgccctctgctctggacatgcgcgccgtcgcgagcgtctctgggaccggaagtgcgggcgagcgcgggtccccgggtctgacaggagcagcctgtgggcaccgcggcggtagttggaggcgggagagggtccgtagccgcgccgccctgccccgccatgggcctcctgtcggacccggttcgccggcgcgcgctcgcccgcctagtgctgcgcctcaacgcgccgttgtgcgtgctgagctacgtggcgggcatcgcctggttcttggcgctggttttcccgccgctgacccagcgcacttacatgtcggagaacgccatgggctccaccatggtggaggagcagtttgcgggcggagaccgtgcccgggcttttgcccgggacttcgccgcccaccgcaagaagtcgggggctctgccagtggcctggcttgaacggacgatgcggtcagtagggctggaggtctacacgcagagtttctcccggaaactgcccttcccagatgagacccacgagcgctatatggtgtcgggcaccaacgtgtacggcatcctgcgggccccgcgtgctgccagcaccgagtcgcttgtgctcaccgtgccctgtggctctgactctaccaacagccaggctgtggggctgctgctggcactggctgcccacttccgggggcagatttattgggccaaagatatcgtcttcctggtaacagaacatgaccttctgggcactgaggcttggcttgaagcctaccacgatgtcaatgtcactggcatgcagtcgtctcccctgcagggccgagctggggccattcaggcagccgtggccctggagctgagcagtgatgtggtcaccagcctcgatgtggccgtggaggggcttaacgggcagctgcccaaccttgacctgctcaatctcttccagaccttctgccagaaagggggcctgttgtgcacgcttcagggcaagctgcagcccgaggactggacatcattggatggaccgctgcagggcctgcagacactgctgctcatggttctgcggcaggcctccggccgcccccacggctcccatggcctcttcctgcgctaccgtgtggaggccctaaccctgcgtggcatcaatagcttccgccagtacaagtatgacctggtggcagtgggcaaggctttggagggcatgttccgcaagctcaaccacctcctggagcgcctgcaccagtccttcttcctctacttgctccccggcctctcccgcttcgtctccatcggcctctacatgcccgctgtcggcttcttgctcctggtccttggtctcaagatatcctctgccccttgccatctacctgtgaccagcctccagtctcctcaactctaggctggggagagtcttccatcctgatggggggtggggtacgggggtgagccctgggtccccctctgggcagatcccgttacacctcttgttggggtccttgattgggctacgctctggaactgtggatgcagctgcatgaggctggaatgggccttgaggagcccgggggtgcccctggccccagtgtaccccttcccccatcacaggtgatggacccccttctgttgttggaatgggcttctggggtctgactggtgtttagtgttgcaacttagcctcagctggtgggatggtggtggtctttggggatcccctggccccagggtccatctccaagagcctgtgtgccctgcagggtggtgtggggctggcctcgctcgtggcacctctgctgatctcacaggccatgggactggccctctatgtcctgccagtgctgggccaacacgttgccacccagcacttcccagtggcagaggctgaggctgtggtgctgacactgctggcgatttatgcagctggcctggccctgccccacaatacccaccgggtggtaagcacacaggccccagacaggggctggatggcactgaagctggtagccctgatctacctagcactgcagctgggctgcatcgccctcaccaacttctcactgggcttcctgctggccaccaccatggtgcccactgctgcgcttgccaagcctcatgggccccggaccctctatgctgccctgctggtgctgaccagcccggcagccacgctccttggcagcctgttcctgtggcgggagctgcaggaggcgccactgtcactggccgagggctggcagctcttcctggcagcgctagcccagggtgtgctggagcaccacacctacggcgccctgctcttcccactgctgtccctgggcctctacccctgctggctgcttttctggaatgtgctcttctggaagtgagatctgcctgtccgggctgggacagagactccccaaggaccccattctgcctccttctggggaaataaatgagtgtctgtttcagcagcta

SEQ ID NO: 702792 - DNA, 2313 bp, Homo sapiens
ggcgctatctcgcagcccccgaccagctcggcctgctgtcgggcatctctgctgtcctccggctgtagggctacctgcctccctcccggggggtgcactgcgagtccgactctagtgggggcagcgcctagcggactcccaaacccgctcaggtcctgccggcctcaccggcaccgcccaccctccagccggccgcggctctgcgcttgcgcgccggcagcacacagtgttaggggcgcgccctctgctctggacatgcgcgccgtcgcgagcgtctctgggaccggaagtgcgggcgagcgcgggtccccgggtctgacaggagcagcctgtgggcaccgcggcggtagttggaggcgggagagggtccgtagccgcgccgccctgccccgccatgggcctcctgtcggacccggttcgccggcgcgcgctcgcccgcctagtgctgcgcctcaacgcgccgttgtgcgtgctgagctacgtggcgggcatcgcctggttcttggcgctggttttcccgccgctgacccagcgcacttacatgtcggagaacgccatgggctccaccatggtggaggagcagtttgcgggcggagaccgtgcccgggcttttgcccgggacttcgccgcccaccgcaagaagtcgggggctctgccagtggcctggcttgaacggacgatgcggtcagtagggctggaggtctacacgcagagtttctcccggaaactgcccttcccagatgagacccacgagcgctatatggtgtcgggcaccaacgtgtacggcatcctgcgggccccgcgtgctgccagcaccgagtcgcttgtgctcaccgtgccctgtggctctgactctaccaacagccaggctgtggggctgctgctggcactggctgcccacttccgggggcagatttattgggccaaagatatcgtcttcctggtaacagaacatgaccttctgggcactgaggcttggcttgaagcctaccacgatgtcaatgtcactggcatgcagtcgtctcccctgcagggccgagctggggccattcaggcagccgtggccctggagctgagcagtgatgtggtcaccagcctcgatgtggccgtggaggggcttaacgggcagctgcccaaccttgacctgctcaatctcttccagaccttctgccagaaagggggcctgttgtgcacgcttcagggcaagctgcagcccgaggactggacatcattggatggaccgctgcagggcctgcagacactgctgctcatggttctgcggcaggcctccggccgcccccacggctcccatggcctcttcctgcgctaccgtgtggaggccctaaccctgcgtggcatcaatagcttccgccagtacaagtatgacctggtggcagtgggcaaggctttggagggcatgttccgcaagctcaaccacctcctggagcgcctgcaccagtccttcttcctctacttgctccccggcctctcccgcttcgtctccatcggcctctacatgcccgctgtcggcttcttgctcctggtccttggtctcaaggctctggaactgtggatgcagctgcatgaggctggaatgggccttgaggagcccgggggtgcccctggccccagtgtaccccttcccccatcacaggtcacaggccatgggactggccctctatgtcctgccagtgctgggccaacacgttgccacccagcacttcccagtggcagaggctgaggctgtggtgctgacactgctggcgatttatgcagctggcctggccctgccccacaatacccaccgggtggtaagcacacaggccccagacaggggctggatggcactgaagctggtagccctgatctacctagcactgcagctgggctgcatcgccctcaccaacttctcactgggcttcctgctggccaccaccatggtgcccactgctgcgcttgccaagcctcatgggccccggaccctctatgctgccctgctggtgctgaccagcccggcagccacgctccttggcagcctgttcctgtggcgggagctgcaggaggcgccactgtcactggccgagggctggcagctcttcctggcagcgctagcccagggtgtgctggagcaccacacctacggcgccctgctcttcccactgctgtccctgggcctctacccctgctggctgcttttctggaatgtgctcttctggaagtgagatctgcctgtccgggctgggacagagactccccaaggaccccattctgcctccttctggggaaataaatgagtgtctgtttcagcagcta

SEQ ID NO: 702793 - DNA, 279 bp, Homo sapiens
gagattagttcagatggtctaaccattgttctatatgtgcattttagttaatattgtgtattaaaggataagtcttaatgctcaaagtatgttaaaaatagatgtagtaaatcagtccctctgtgaatgtcctcctgttagtctttaggaagcctgtcctctcggagtgacctctattagtcaccctggagctagacatactgtactagtcacggggatagtggagaggagagagaggtaggaggctctgtgctagtatctcatatctagacgatggct

SEQ ID NO: 702794 - DNA, 2449 bp, Homo sapiens
ggcgctatctcgcagcccccgaccagctcggcctgctgtcgggcatctctgctgtcctccggctgtagggctacctgcctccctcccggggggtgcactgcgagtccgactctagtgggggcagcgcctagcggactcccaaacccgctcaggtcctgccggcctcaccggcaccgcccaccctccagccggccgcggctctgcgcttgcgcgccggcagcacacagtgttaggggcgcgccctctgctctggacatgcgcgccgtcgcgagcgtctctgggaccggaagtgcgggcgagcgcgggtccccgggtctgacaggagcagcctgtgggcaccgcggcggtagttggaggcgggagagggtccgtagccgcgccgccctgccccgccatgggcctcctgtcggacccggttcgccggcgcgcgctcgcccgcctagtgctgcgcctcaacgcgccgttgtgcgtgctgagctacgtggcgggcatcgcctggttcttggcgctggttttcccgccgctgacccagcgcacttacatgtcggagaacgccatgggctccaccatggtggaggagcagtttgcgggcggagaccgtgcccgggcttttgcccgggacttcgccgcccaccgcaagaagtcgggggctctgccagtggcctggcttgaacggacgatgcggtcagtagggctggaggtctacacgcagagtttctcccggaaactgcccttcccagatgagacccacgagcgctatatggtgtcgggcaccaacgtgtacggcatcctgcgggccccgcgtgctgccagcaccgagtcgcttgtgctcaccgtgccctgtggctctgactctaccaacagccaggctgtggggctgctgctggcactggctgcccacttccgggggcagatttattgggccaaagatatcgtcttcctggtaacagaacatgaccttctgggcactgaggcttggcttgaagcctaccacgatgtcaatgtcactggcatgcagtcgtctcccctgcagggccgagctggggccattcaggcagccgtggccctggagctgagcagtgatgtggtcaccagcctcgatgtggccgtggaggggcttaacgggcagctgcccaaccttgacctgctcaatctcttccagaccttctgccagaaagggggcctgttgtgcacgcttcagggcaagctgcagcccgaggactggacatcattggatggaccgctgcagggcctgcagacactgctgctcatggttctgcggcaggcctccggccgcccccacggctcccatggcctcttcctgcgctaccgtgtggaggccctaaccctgcgtggcatcaatagcttccgccagtacaagtatgacctggtggcagtgggcaaggctttggagggcatgttccgcaagctcaaccacctcctggagcgcctgcaccagtccttcttcctctacttgctccccggcctctcccgcttcgtctccatcggcctctacatgcccgctgtcggcttcttgctcctggtccttggtctcaaggctctggaactgtggatgcagctgcatgaggctggaatgggccttgaggagcccgggggtgcccctggccccagtgtaccccttcccccatcacagggtgtggggctggcctcgctcgtggcacctctgctgatctcacaggccatgggactggccctctatgtcctgccagtgctgggccaacacgttgccacccagcacttcccagtggcagaggctgaggctgtggtgctgacactgctggcgatttatgcagctggcctggccctgccccacaatacccaccgggtggtaagcacacagggctggttgttgggggcaggggtagaggtcccctggacatgcagacagcttgtgggttgcctctgagtcctttgtcttacagggtggtaagcacacaggccccagacaggggctggatggcactgaagctggtagccctgatctacctagcactgcagctgggctgcatcgccctcaccaacttctcactgggcttcctgctggccaccaccatggtgcccactgctgcgcttgccaagcctcatgggccccggaccctctatgctgccctgctggtgctgaccagcccggcagccacgctccttggcagcctgttcctgtggcgggagctgcaggaggcgccactgtcactggccgagggctggcagctcttcctggcagcgctagcccagggtgtgctggagcaccacacctacggcgccctgctcttcccactgctgtccctgggcctctacccctgctggctgcttttctggaatgtgctcttctggaagtgagatctgcctgtccgggctgggacagagactccccaaggaccccattctgcctccttctggggaaataaatgagtgtctgtttcagcagcta

SEQ ID NO: 702795 - DNA, 2632 bp, Homo sapiens
ggcgctatctcgcagcccccgaccagctcggcctgctgtcgggcatctctgctgtcctccggctgtagggctacctgcctccctcccggggggtgcactgcgagtccgactctagtgggggcagcgcctagcggactcccaaacccgctcaggtcctgccggcctcaccggcaccgcccaccctccagccggccgcggctctgcgcttgcgcgccggcagcacacagtgttaggggcgcgccctctgctctggacatgcgcgccgtcgcgagcgtctctgggaccggaagtgcgggcgagcgcgggtccccgggtctgacaggagcagcctgtgggcaccgcggcggtagttggaggcgggagagggtccgtagccgcgccgccctgccccgccatgggcctcctgtcggacccggttcgccggcgcgcgctcgcccgcctagtgctgcgcctcaacgcgccgttgtgcgtgctgagctacgtggcgggcatcgcctggttcttggcgctggttttcccgccgctgacccagcgcacttacatgtcggagaacgccatgggctccaccatggtggaggagcagtttgcgggcggagaccgtgcccgggcttttgcccgggacttcgccgcccaccgcaagaagtcgggggctctgccagtggcctggcttgaacggacgatgcggtcagtagggctggaggtctacacgcagagtttctcccggaaactgcccttcccagatgagacccacgagcgctatatggtgtcgggcaccaacgtgtacggcatcctgcgggccccgcgtgctgccagcaccgagtcgcttgtgctcaccgtgccctgtggctctgactctaccaacagccaggctgtggggctgctgctggcactggctgcccacttccgggggcagatttattgggccaaagatatcgtcttcctggtaacagaacatgaccttctgggcactgaggcttggcttgaagcctaccacgatgtcaatgtcactggcatgcagtcgtctcccctgcagggccgagctggggccattcaggcagccgtggccctggagctgagcagtgatgtggtcaccagcctcgatgtggccgtggaggggcttaacgggcagctgcccaaccttgacctgctcaatctcttccagaccttctgccagaaagggggcctgttgtgcacgcttcagggcaagctgcagcccgaggactggacatcattggatggaccgctgcagggcctgcagacactgctgctcatggttctgcggcaggcctccggccgcccccacggctcccatggcctcttcctgcgctaccgtgtggaggccctaaccctgcgtggcatcaatagcttccgccagtacaagtatgacctggtggcagtgggcaaggctttggagggcatgttccgccctttccatgcccaggatggggtctagctggagcggagtgggggatggcctggtggctctggccagccgtgaacctgccccacacctgacagggctttggagggcatgttccgcaagctcaaccacctcctggagcgcctgcaccagtccttcttcctctacttgctccccggcctctcccgcttcgtctccatcggcctctacatgcccgctgtcggcttcttgctcctggtccttggtctcaagatatcctctgccccttgccatctacctgtgaccagcctccagtctcctcaactctaggctggggagagtcttccatcctgatggggggtggggtacgggggtgagccctgggtccccctctgggcagatcccgttacacctcttgttggggtccttgattgggctacgctctggaactgtggatgcagctgcatgaggctggaatgggccttgaggagcccgggggtgcccctggccccagtgtaccccttcccccatcacagggtgtggggctggcctcgctcgtggcacctctgctgatctcacaggccatgggactggccctctatgtcctgccagtgctgggccaacacgttgccacccagcacttcccagtggcagaggctgaggctgtggtgctgacactgctggcgatttatgcagctggcctggccctgccccacaatacccaccgggtggtaagcacacaggccccagacaggggctggatggcactgaagctggtagccctgatctacctagcactgcagctgggctgcatcgccctcaccaacttctcactgggcttcctgctggccaccaccatggtgcccactgctgcgcttgccaagcctcatgggccccggaccctctatgctgccctgctggtgctgaccagcccggcagccacgctccttggcagcctgttcctgtggcgggagctgcaggaggcgccactgtcactggccgagggctggcagctcttcctggcagcgctagcccagggtgtgctggagcaccacacctacggcgccctgctcttcccactgctgtccctgggcctctacccctgctggctgcttttctggaatgtgctcttctggaagtgagatctgcctgtccgggctgggacagagactccccaaggaccccattctgcctccttctggggaaataaatgagtgtctgtttcagcagcta

SEQ ID NO: 702796 - DNA, 2489 bp, Homo sapiens
  misc_feature (2026)..(2026): n is a, c, g, or t
ggcgctatctcgcagcccccgaccagctcggcctgctgtcgggcatctctgctgtcctccggctgtagggctacctgcctccctcccggggggtgcactgcgagtccgactctagtgggggcagcgcctagcggactcccaaacccgctcaggtcctgccggcctcaccggcaccgcccaccctccagccggccgcggctctgcgcttgcgcgccggcagcacacagtgttaggggcgcgccctctgctctggacatgcgcgccgtcgcgagcgtctctgggaccggaagtgcgggcgagcgcgggtccccgggtctgacaggagcagcctgtgggcaccgcggcggtagttggaggcgggagagggtccgtagccgcgccgccctgccccgccatgggcctcctgtcggacccggttcgccggcgcgcgctcgcccgcctagtgctgcgcctcaacgcgccgttgtgcgtgctgagctacgtggcgggcatcgcctggttcttggcgctggttttcccgccgctgacccagcgcacttacatgtcggagaacgccatgggctccaccatggtggaggagcagtttgcgggcggagaccgtgcccgggcttttgcccgggacttcgccgcccaccgcaagaagtcgggggctctgccagtggcctggcttgaacggacgatgcggtcagtagggctggaggtctacacgcagagtttctcccggaaactgcccttcccagatgagacccacgagcgctatatggtgtcgggcaccaacgtgtacggcatcctgcgggccccgcgtgctgccagcaccgagtcgcttgtgctcaccgtgccctgtggctctgactctaccaacagccaggctgtggggctgctgctggcactggctgcccacttccgggggcagatttattgggccaaagatatcgtcttcctggtaacagaacatgaccttctgggcactgaggcttggcttgaagcctaccacgatgtcaatgtcactggcatgcagtcgtctcccctgcagggccgagctggggccattcaggcagccgtggccctggagctgagcagtgatgtggtcaccagcctcgatgtggccgtggaggggcttaacgggcagctgcccaaccttgacctgctcaatctcttccagaccttctgccagaaagggggcctgttgtgcacgcttcagggcaagctgcagcccgaggactggacatcattggatggaccgctgcagggcctgcagacactgctgctcatggttctgcggcaggcctccggccgcccccacggctcccatggcctcttcctgcgctaccgtgtggaggccctaaccctgcgtggcatcaatagcttccgccagtacaagtatgacctggtggcagtgggcaaggctttggagggcatgttccgcaagctcaaccacctcctggagcgcctgcaccagtccttcttcctctacttgctccccggcctctcccgcttcgtctccatcggcctctacatgcccgctgtcggcttcttgctcctggtccttggtctcaaggctctggaactgtggatgcagctgcatgaggctggaatgggccttgaggagcccgggggtgcccctggccccagtgtaccccttcccccatcacagggtgtggggctggcctcgctcgtggcacctctgctgatctcacaggccatgggactggccctctatgtcctgccagtgctgggccaacacgttgccacccagcacttcccagtggcagaggctgaggctgtggtgctgacactgctggcgatttatgcagctggcctggccctgccccacaatacccaccgggtggtaagcacacaggccccagacaggggctggatggcactgaagctggtagccctgatctacctagcactgcagctgggctgcatcgccctcaccaacttctcactgggcttcctgctggccaccaccatggtgcccactgctgcgcttgccaagcctcatgggccccggtatgtatgnatcagccccacttcccccaatgcctgtgccctcatcacagaccgcaccctcattcagtagccctttcccccaacctggtgcccatgcccccaccatggagcctaccttgatgttgcttctccacccaggaccctctatgctgccctgctggtgctgaccagcccggcagccacgctccttggcagcctgttcctgtggcgggagctgcaggaggcgccactgtcactggccgagggctggcagctcttcctggcagcgctagcccagggtgtgctggagcaccacacctacggcgccctgctcttcccactgctgtccctgggcctctacccctgctggctgcttttctggaatgtgctcttctggaagtgagatctgcctgtccgggctgggacagagactccccaaggaccccattctgcctccttctggggaaataaatgagtgtctgtttcagcagcta

SEQ ID NO: 702797 - DNA, 273 bp, Homo sapiens
ctccgtgctcaggctctctctgtggttccccagatgagatgcgcctcctgggtttctgagtgggctccttctgtctgtctctatccctatctcttgctttctctgtatttctccacacattttcatcgtgtctctgctccagtctctgcactctcgggacatccctgcaggctgcagcactcagctcttccccgtaatgcatagctacccactatgctccttccatgtctccactcggggcatccatctacgagtcgaccatgcaggatatgc

SEQ ID NO: 702798 - DNA, 468 bp, Homo sapiens
cgtttcctttccttttttaactttttaagagacaaagtctaggccaggcgcggagtctcaggcctgaaatcccagcactttgggaggccgaggcgggcggatcacttaggccaggagttcgagaccagcctgatcgacacggtgaaaccctgtctctactaaaaaaacaaaaaacaaaaaaacaaaaaacaaaaatcagccgggcatggtagcaggcgcccgtaatgccagctattaggaaggctgaggcaggaggatcacttgtatctgggaggtggaggttgcagtgaaactccgtctcaaaaaaaaaaaatttcactttttaagagcgaaactccgtctcaaaaaacaaatctgccaggcgtggtggcgcaggcctataatcccagctacttgggaggtggaggttgcagtgagcccagatcacgccactgccctccaacctcggtgacagaatgagactgtctc

SEQ ID NO: 702799 - DNA, 2600 bp, Homo sapiens
ggcgctatctcgcagcccccgaccagctcggcctgctgtcgggcatctctgctgtcctccggctgtagggctacctgcctccctcccggggggtgcactgcgagtccgactctagtgggggcagcgcctagcggactcccaaacccgctcaggtcctgccggcctcaccggcaccgcccaccctccagccggccgcggctctgcgcttgcgcgccggcagcacacagtgttaggggcgcgccctctgctctggacatgcgcgccgtcgcgagcgtctctgggaccggaagtgcgggcgagcgcgggtccccgggtctgacaggagcagcctgtgggcaccgcggcggtagttggaggcgggagagggtccgtagccgcgccgccctgccccgccatgggcctcctgtcggacccggttcgccggcgcgcgctcgcccgcctagtgctgcgcctcaacgcgccgttgtgcgtgctgagctacgtggcgggcatcgcctggttcttggcgctggttttcccgccgctgacccagcgcacttacatgtcggagaacgccatgggctccaccatggtggaggagcagtttgcgggcggagaccgtgcccgggcttttgcccgggacttcgccgcccaccgcaagaagtcgggggctctgccagtggcctggcttgaacggacgatgcggtcagtagggctggaggtctacacgcagagtttctcccggaaactgcccttcccagatgagacccacgagcgctatatggtgtcgggcaccaacgtgtacggcatcctgcgggccccgcgtgctgccagcaccgagtcgcttgtgctcaccgtgccctgtggctctgactctaccaacagccaggctgtggggctgctgctggcactggctgcccacttccgggggcagatttattgggccaaagatatcgtcttcctggtaacagaacatgaccttctgggcactgaggcttggcttgaagcctaccacgatgtcaatgtcactggcatgcagtcgtctcccctgcagggccgagctggggccattcaggcagccgtggccctggagctgagcagtgatgtggtcaccagcctcgatgtggccgtggaggggcttaacgggcagctgcccaaccttgacctgctcaatctcttccagaccttctgccagaaagggggcctgttgtgcacgcttcagggcaaggtggggctgcctgcctgcctgagggctgaagggcacagggtctgtgggaggggctgtctcatcctgtcctgcacctctaaagctgcagcccgaggactggacatcattggatggaccgctgcagggcctgcagacactgctgctcatggttctgcggcaggcctccggccgcccccacggctcccatggcctcttcctgcgctaccgtgtggaggccctaaccctgcgtggcatcaatagcttccgccagtacaagtatgacctggtggcagtgggcaaggctttggagggcatgttccgcaagctcaaccacctcctggagcgcctgcaccagtccttcttcctctacttgctccccggcctctcccgcttcgtctccatcggcctctacatgcccgctgtcggcttcttgctcctggtccttggtctcaagatatcctctgccccttgccatctacctgtgaccagcctccagtctcctcaactctaggctggggagagtcttccatcctgatggggggtggggtacgggggtgagccctgggtccccctctgggcagatcccgttacacctcttgttggggtccttgattgggctacgctctggaactgtggatgcagctgcatgaggctggaatgggccttgaggagcccgggggtgcccctggccccagtgtaccccttcccccatcacagggtgtggggctggcctcgctcgtggcacctctgctgatctcacaggccatgggactggccctctatgtcctgccagtgctgggccaacacgttgccacccagcacttcccagtggcagaggctgaggctgtggtgctgacactgctggcgatttatgcagctggcctggccctgccccacaatacccaccgggtggtaagcacacaggccccagacaggggctggatggcactgaagctggtagccctgatctacctagcactgcagctgggctgcatcgccctcaccaacttctcactgggcttcctgctggccaccaccatggtgcccactgctgcgcttgccaagcctcatgggccccggaccctctatgctgccctgctggtgctgaccagcccggcagccacgctccttggcagcctgttcctgtggcgggagctgcaggaggcgccactgtcactggccgagggctggcagctcttcctggcagcgctagcccagggtgtgctggagcaccacacctacggcgccctgctcttcccactgctgtccctgggcctctacccctgctggctgcttttctggaatgtgctcttctggaagtgagatctgcctgtccgggctgggacagagactccccaaggaccccattctgcctccttctggggaaataaatgagtgtctgtttcagcagcta

SEQ ID NO: 702800 - DNA, 395 bp, Homo sapiens
atgaaacatatcgggtgcatctttaactgaaaaatccagatggaaatattaaaataaatgaccagtaacagcagttatacatgtgtactggttccagtatagacatctgtttcctctatagttgaattggatgtgaatgataggaaaaaggcttggtgcctttgtaacctgcccccttttctccattgcttttgagctcagctgccactggtccttatgcgtttgcagttcccacaggcagaaagccttgtacgatgcggacacctgtagtcccagctactcgggagtctgaggcaggggaatcgcttgaaactgggaggcggaggttgcagtgagccaagatcgtgccactgcactccagcctggccaacaacaagagggaaactccatctcaa

SEQ ID NO: 702801 - DNA, 639 bp, Homo sapiens
gggcaacccgctccggtgtccttccatgctgtggaggctctgttgtttcgctctttctactgcttactcttcgggtccacactgcttttatgagctgtaacactcaccctgaaggttttgcaactttgactcctgaagccagcaagaccacgagccccagggaggaacgaacaactccagacgcgctgccttaagagctgtaacactcaccgagaaggtctgcagcttcactcctgagccagcgaggccagaacccaccagaagggaagaaactctgaacacatccgaacatcagaaggaacaaaatccagacgtgccaccttaagagctgttaacactcaccgcgagggtccgcgggcttcatttttgaagtcagtgagaccaagaaccaaccaattcgggacacaataccaactctttcatgccaggagaagcctccttaaaaaattccggtgattaacagcagcacatggtcaaaaatctcctgaaggttggagcagggggagcttgtagaagactttcctccttttctcgcagatgaaatcttatgatatagcaggcgttaccttggccagagggaccaccagaggagaccaagacaaattcaggactaaattccttctccactaaccacagatt

SEQ ID NO: 702802 - DNA, 125 bp, Homo sapiens
cacggcgcaggtgttggtctcagccgtgcttggccaggctggcagccggatcctggggcacccatctggtctcttgaataaaggtcaaagctggattcttaaaaaatgccgcagccgcggccgct

SEQ ID NO: 702803 - DNA, 334 bp, Homo sapiens
gtgggctaccgacgagtagtatcattctatttccctctattgatccccacctccaaatatctcatcaacaaccgactaatcaacacccaacaatgactaatcatttattattagccacaacataacctccatcggaactcctgccatcactctatttacacacaaccacccacactatctcataaacctagaccatggaacatcccacttatgacgcgggcgcagatgattataaggctttcgcatctaacgcttaaaacatgccctacgcccacttattaccacaaggcacacctacaccccttatccccatactagttattatcgaaaccat

SEQ ID NO: 702804 - DNA, 106 bp, Homo sapiens
ctataatgtgtgcccagaagctgctgctgtaggctgtattcaattaacacttttaatgttacaggtgtggaccatcacgagattgtctctccctggctgccgaatt

SEQ ID NO: 702805 - DNA, 605 bp, Homo sapiens
  misc_feature (142)..(142): n is a, c, g, or t
  misc_feature (485)..(485): n is a, c, g, or t
  misc_feature (538)..(538): n is a, c, g, or t
  misc_feature (541)..(541): n is a, c, g, or t
  misc_feature (546)..(546): n is a, c, g, or t
ttgcatcacggcgcaggaccaccagcttacaccagatagctgcatcatcagcatggtgtggcccagctcaaggctgatgaagatcccatcagggtttccaccagatgtttctattaaggaacatcaacgatgcttggggttngcaccaatgacatgttcaggcttgccctgcacaacttcggctgacctcctcctggccacagtcacgctgtttcctcctccctcttcccaatcctagctcactcctccagatgctccaaatatcatacacaaacgagcagggccgaggcgggagcgggtgcagggcgcttctgtcaccacggtgttgtgcatgatgtttggatgctagactagtcgcatctgacaggaagtttgtgttgtaccagcgcatgccttggaaagacttaagtaatgcaaacgattgtcgggttttgtttttgttttattttttgttttgttttgtttttttaatctactgacaagtngctctagtaacccaaagaagtgaaggagaaagcagctgcctcaccgcccaganatngattngttcagatgtttcaatgcctcatgatacaataaaaccacaaaaattttcttaacagtta

SEQ ID NO: 702806 - DNA, 97 bp, Homo sapiens
ggatttgctggtgcagtacaactaggcttaatagggacatgaggtcaggagatggagaccatcctggctagcacagtgaaaccccgtctctaccaaa

SEQ ID NO: 702807 - DNA, 219 bp, Homo sapiens
tcgacgtgaacgctaccttgagaacggcgaaccgttccgcattgaaggtttccatgacggtgtgcgtgtccctgggaaagcaacggcacactgaccatcagtgaaaaaggcggccaccgcatctacaccggcagcatgcacgacgaggtggtctaccatcagcgtcgcaatgcctttcgggcagcgttgaagctggcccaactggtcgacgcggccgcg

SEQ ID NO: 702808 - DNA, 316 bp, Homo sapiens
aggtaaagggaaaagagaagagaaaaaagcacctttgaaattccaaacaaattatattgtacttgtatctttttacctatttttatactttttataatgtttacgtttgtcctgaatatatatatatatatatatatatatatatatatatatatatatatatatatggtataggagataagctatttctttccaaaatctataaatctttgaatatagtcccacagaatacttatgttcactttctatttttaaaagactactctgaaaaacactcttggataataaatgtattatgtgcatacttaaaaaaaaa

SEQ ID NO: 702809 - DNA, 968 bp, Homo sapiens
ggatgcctttgcctcaagggctggttaactgcctgtattgagacaggaactggagagggtgttaaatgagcttgggatacagcccttgatgcctttgcgtcagacattgagcctttatcaagacccattctatcctgggtttccttgtaatgaaacacgggagatcgatgccattagtatcaccttattcactgtgtccacgactggggatggacctacctaagagataaggaatattcttcgattcttcttcaatcttggtgtgaaggcatcacagttgtcctatgtagggcccctacattcattaccgtgtacccgtctgcacgcaggcgctacctggcatgctgcaaggatgtacccaaaggtccctgtaacctgtttatcctcataatccctggttccaagaggctcctgctgctctagaatgaacatgtgattgtacctgtactgatgcccacgtttcctatgcagacatgaggccagatgttcaatggtcaaatgccacagccagagattggacccgacgacatgttcttcacctctggttatccctccatctcaggatgtctgaaagtcatggacaattgtcttaccaggctgatcttgaatctgagacccctgggacagcttctgcgatgctgattatcgaagagtcacgtaagtggcaagaatatgttcccccagtcatcttttgggacccaatccattcttagggccagttcctatttgcatcctcctttctttccctcatagttggtattgggtacccctttagcaggcattcatcagaaaacattccagtaactggagagcagaaatattgtcttgcccttcttgtcgcaccaaagagaattggcttctgcctcttggaaaatcttggatcttgtcacggactggggtgcagtttcaagagtcaatgagtctccagaatgcctgggtgaccttgtaatccttcctgagcacagttg

SEQ ID NO: 702810 - DNA, 875 bp, Homo sapiens
  misc_feature (161)..(161): n is a, c, g, or t
  misc_feature (459)..(459): n is a, c, g, or t
agcgggtgctagtgaccggaggcggtggcggtgagcggctccttgatgggctagaagaatcctgctagaaatgtctctctgatccatctctcgaagacttgaatggtagacaaaggtagattcgatggtctcaacaccgtagcattgtgtatctgcaaganccctggcagaatcgcgagacacattgagtacagaagcttctgctccgtatccctcacgagtggaaatctctatcccaaactgtatccaaagactctctctatatactggaggcatgaagatttagagtgagatgagagatagattactgtgctaaatgtgaggcgtggtatctgtttgcaccgactttcgagggtgcaggatatggatatcgaagagcttatactagctagtgaaactaatatgagtgcgcgtccgtagttagatcttaggtaaatgagatgtaaggaacacttcggnatagagccaagaagaattgaatgcacacggtgattcagatgaatgctcaagttcttgctcgataaggcatcaagggatgcagaaataagtgtggcagctcaggctgtatattcgaagtgggcataaagtaggttatagtgttggtttcgaggcttgagttccaacggcggtaagttctccaggcactgcattgagttggatctgtagattgggtggtgagccgaagatagcgttcaggagtcaattcggctgaaagatcctgtgcgaggagtgtgagctcgtgataagagcgtcacaagggtgttcaaaatctaagggcttttggaagagacagattgaccatggactcaatatctgtgaacaggtccttctgaacgggacgaattacccatgccatagaggactaggcacttgga

SEQ ID NO: 702811 - DNA, 244 bp, Homo sapiens
aaactgtgatacactaaattcgtggagtgcaccaggaacccgaagtggggagacctgttggcttccggctggggcagcatcgaaccagagaatttctcatttccagatgatctccagtgtgtggacctcaatatcctgcctaatgatgagtgcgaaaaagcccacgtccagaaggtgacagacttcatgctgtttgtcggacacctggaaggtggcgaagacccctgggtggggataccagggg

SEQ ID NO: 702812 - DNA, 448 bp, Homo sapiens
tgtcacaaaaaatacaaaaaaatcagctatgtgtggtagcaggcggtcccagctactcgggaggccgaggcacaagaatcacccgaacccaggaggcggaggttgcagtgagccgagatcacgctgctgtactccagcctaggcaacaaagtgagactgcatctcaaaaaaaaaaaaaggggggggggctcctgttttccctctttaagagcttgagaccaaattgtggcatctcgtggggggctcagaagaagggggcagaagtgagtttcgtgtgatagtgtcattgaggcccttgtctcccggtgaaaaagttgcacccagagaaccttgcccatgtgggccccagggctccaaccatgtcaagcccccacaattttgccagcacccaagtttctctgataaggtattgggtaaaacacaccgtgtggtgtgatagctggctttt

SEQ ID NO: 702813 - DNA, 311 bp, Homo sapiens
gtagacaactagggtcagtttgcaggtgtaagccatttaccaagatagttgtaggtaaagaagggcagatttattagagaaattgtgaaaatatgttgcagtgggcagctcagcagagaaggggctacctgcaaagaggcaagggctggaggaaagttttatagggtcctgctgaagggtgctacgtgtggaatgaggtcattgtgcccgcaggttgtttgtgattagctgtttctaacaattgttcatacaataattgttcattattgttctcaacttggggctctccccaacctggggacccttcctta

SEQ ID NO: 702814 - DNA, 491 bp, Homo sapiens
aggaatgtaatagtaaaatctcatgggattcaaaaattcattaatttcctcaaccaatgggggcagggtccctatttataagtgcggctcgggataactgcctagtcatatgcagaagaatgaaactggccgtcgattctacaggcagatataaaaattaactcagaatggatcaaagacgtaactctaagactacaaaccataaagttctaggagaaaacctaggaaataccattctggaaattagccttggcacggaatttatggctaagacatcaaaagacatcacaacagaaacaaaaatagacaaattgggacctaattaaactaaagagcttctgcacagcgcgcacacacacacacacacacacacacaaaacctatcaacagagtacacagataaccttcagaatgggagaaaatatacacaaactatacatccaacaaaggtctaatatccagaatctatagtgaaatcaaacaaatcaaca

SEQ ID NO: 702815 - DNA, 258 bp, Homo sapiens
ggagctcggtacccagtctttcccctcaaactccatgattagtgcttctgttcacttattaaaaacactgggccaggcgcagtggcccacgcctgtaatcccagtcactttgggagcccgaggcgggcagatcacttgaggtcaggagttcaagaccagcctggccaacatggagaaaccctgtctctactaaaaatacaaaaaattaaccaggtgtggtggtgcatgcctgtaatcccagctgcgtttcacttccga

SEQ ID NO: 702816 - DNA, 278 bp, Homo sapiens
tcggtaccgtactgtggtgtaccgccacagctcattggcaacaccggatattaacccactgagcgagggcaggacctgaacccacaaccatcatggattcccatggacatatggaggttcccaggctaagggtcgaatcagattgactatagccactggcccacaccaaagccacagcaacgtgggatctgagccgcgtctgcgacctacaccacagctcacggcaacaccggatcattaacccactgagcgagggcagggaccgaacccacaacctc

SEQ ID NO: 702817 - DNA, 460 bp, Homo sapiens
  misc_feature (22)..(22): n is a, c, g, or t
  misc_feature (30)..(30): n is a, c, g, or t
  misc_feature (33)..(33): n is a, c, g, or t
  misc_feature (43)..(43): n is a, c, g, or t
  misc_feature (190)..(190): n is a, c, g, or t
  misc_feature (208)..(208): n is a, c, g, or t
  misc_feature (223)..(223): n is a, c, g, or t
  misc_feature (371)..(371): n is a, c, g, or t
  misc_feature (400)..(400): n is a, c, g, or t
ggcacgagggtagatatactanaattgacntanaatagacaanatattctaacataaatattcttcccttgtttctagaaagaagtcacacatacagtaaaaataattagagaggacctagttcatatttagcaatcttccccaaaccctgaaacaggtcttctttctaacaccagaggtatcttgagtnagtccaacccctgcagtnccctctggtctggantagatggaggaagtttgctccagccttagaacagcatgggctggcaaacgttctcaagagaggtctcgacttcaactctaaaagggcctgaggaatatgtgcaactgggtcgggttaaggccaagcttgaatcacattgaccaagggntctcaccagcgccaaagtccagttggaanggatatcaatccccaaaagctcttgtcacaaggccatggatgctccatgggaggggtggt

SEQ ID NO: 702818 - DNA, 307 bp, Homo sapiens
ggcccgtctccgtgagactggtcatagatgtggcttggatctggcgatgccatggctgtggctccaatttgactcctagcccgggaacttccatatgctgcaaatgtggccctaaaaatatatatttatatatttagaaggcgagcacaggaagacctgcactgacatacatttccccagacctttcaagggctttcagcactcatggcagttttggaccagagtttgaattcaggagtgctatttctgaggcatggcattgtgaaccatgtgtccataccaaaagcgtttttcccagatggttagg

SEQ ID NO: 702819 - DNA, 686 bp, Homo sapiens
gcccgggtatgttggcgtgtgcgcgcgcctttcttagaccccggtcttggtgtcgggaaccccatatgttccttatttccccccctcttaggtgggcaccaaaacactcttcttggtgtggtgggcaagactctaacgggtgggtgtgtcccccctgggcgtggcaatgagccccccctctggagacccacttggtgtcatctatcagaggagaagaagggggtgcactcgctcgaaggattcgtgggggctgtctcctgcacaaactgattaaagacagcgttctcactctgctgcccacacagaagggtacactccccctccctctcgcaccaccgtgcgcaccacgcgcgacagaaggggccgaagatgaccacaccaccacagcgcgaggctacgcacacagctggtgatataaaggacttggcctcccacagcaaggggcaagcgtgcgaagcagtccagctgccccgtacgtgagagataggccttgtaggagtatgtggtgagcgtaggagatacagcgagagaggtcctcgccagtccccgcgcgcactgttgtgtcttttgggcaagaacgggagcatcctccactgccaccgtcttcttacggccactaagcatggtccccaccttttatctcgcctgtgattagctcccacgaaacggcccaccatagaccaaga

SEQ ID NO: 702820 - DNA, 118 bp, Homo sapiens
tccgatctcttgactcgtgatctgccacctcggcctcccaaaggtgctgggattacgggtgtgagccactgcgcctggcagcctagtggcttttaactgctctgccgagacgcctggg

SEQ ID NO: 702821 - DNA, 153 bp, Homo sapiens
tgatctccccctgcatgaacatcatgtccagtaaggaaaatggaagacatctagtgctcctaaccttcattttcctttcactcattctcagtttgggtatgggagtgctacgaagagtaagtagaaaggaggaagtgatcatacttaactctt

SEQ ID NO: 702822 - DNA, 107 bp, Homo sapiens
ctcgctaccttctaagagaagagacgagatgtacaagagaagagacgagatgtacaagagaagagacgagatgtacaagagaagagacgagatgacagcacctacag

SEQ ID NO: 702823 - DNA, 931 bp, Homo sapiens
cgcgcgggccatgccttggccccagcccacaccttcaccagtgcccatgagccaccatgtggcggatgtccactggtggctactgctgttgctgcctgctggctggccacttggctctgggtgcccagcagtggtcgtggtgctgcctgtggagctagcacctgtgtgtctgcacctgcgtggtgcatccgggacgcgggagtgcctggtactgccagtgagcaggacctgtgctgccgctggactgtgcctgacgactgtgccctgccctacctgggcgccatctgttactgtgacctcttctgcaaccgcacggtctccgactgctgccctgacttctgggacttctgcctcggcgtgccaccccttttcccccgatccaaggatgtatgcatggatggtcgtatctatccagtcttgggaacgtactgggacaactgtaacctgtatgcaccttgccagtgagaagcaggcagttggcgagttgtgaccaaggaaaccagtgccttggtggatcacagacgattgatcaagagccatcaaccagggcaactatggcttggcaggctggtgaaccacagcgccttctggggcatgaccctggatgagggcatacgataccgtctgggcaccatccgaccagtctatccctcggtcatgaaccatgcatgaaatttatacagttgctgaagccagggtgaggtgctttcccacgggcgtcgaggcctctgggaagtgggccaagcgtgattcatgaggcctcttgaggcgaaggcaacgtgttgcaagggtacctttgggccctttcgtatgcgcgagggaggcgtgtgggagtccggatacaggggtctcaaggtcgagtactcttggagacacgttagcgccaggatcctgacagcccgagagaccttggtggctatgatacaacgca

SEQ ID NO: 702824 - DNA, 234 bp, Homo sapiens
ctcgttttgaggttgcaggctcgctcctgccggccgagcactgactgaccgatgcagttctcaagccatacacacagtacacgagactagcacgcatgctactggatcctggcgggtaggagcatgacaagcccctacgccttgggcctcaaggatgcagaccgctgttgcacccacacctcctcttgcagaagcaccttttccaagtggatctgctggaccagaacagccact

SEQ ID NO: 702825 - DNA, 186 bp, Homo sapiens
ttccggcgcagatatctatacgaaatacccacaaagttcccaacccaaagagatttctgtaattcatttaactgcaaaagtctaacctgagcggagaggagctaattacggattgcttccctcgtgctgtgaatgttcacacgctcattgcagcagaatcaatatgctcgactccagggtgttgcc

SEQ ID NO: 702826 - DNA, 113 bp, Homo sapiens
ccccccactgcgatgtcctgcacctacactcctgctcacacttcctctctcctactcgatgccctgcctctccctcgttgtcacctcctcaccctctgacctctttccgatcg

SEQ ID NO: 702827 - DNA, 181 bp, Homo sapiens
taccccagcttatggagaccaggctgagcagacaggctagtatcaagactacagagtgacatgcaactcagtctgaaagcaacacagcacacgctttaaactctcaacacagtataccttgcggaaaggctgatcttacagcatacactgtccactctgtcaactagagcatagcttcttc

SEQ ID NO: 702828 - DNA, 673 bp, Homo sapiens
  misc_feature (625)..(625): n is a, c, g, or t
  misc_feature (661)..(661): n is a, c, g, or t
gctgtccagaaagttcaacagagagaccagaagcagcactgaagtcgagcgaggactcggcagctcccttagttggtcgtgtgtggtcatgatgttccaaagctgggccaaagctttgttcttgtctctagatttgatgcaatttcacagagtcgaattgctaaccagccttccaagagaaattgtgtttgcatgttgtatttatttgcgacaagtaacattcctctcagtggagcaggatgttctcgttgggtggtgacccttctttgtactcaggagagttgcataataaaccagtttcataactggaagattgcgtttggaccagagtgtggaactggggtaagagaaatgaactgggtggccttcgtagctggtggtgtggacgaagcctggcctgtctgtactgatggggttggagttcttggctctgttgtgtgttgtgctaggtcgtcttactgcctgctgaccactctccttttgtcaacaggaattgtaaacaaacagttgactggctggaatttgggatgttttgagtctcctcaggcacccactttagggtttgctggtcagggtgcttttctcatagtttaggggatagcttgctgggtgagcctgggttccnaaggatacggttatacccaaaaacaaactggtaggntcagccagactt

SEQ ID NO: 702829 - DNA, 210 bp, Homo sapiens
cagtgtgagcattgacgacctagaacaccacccacacgcccaggtgagcatcgacagcctggaaaagcacccacacccccaggtgagcatacgacaccctgtgagcagcacccacacccccaggtgagcatctgatatcctggaacagcaaccacacgcccgggtgagcatctgacagcctggagcagcacgcacacccccagtgagcat

SEQ ID NO: 702830 - DNA, 263 bp, Homo sapiens
cccttccccctttttaaaggggaggtggtttttttccccaagcccccttccatgcctttcactcccaatggcaagctcttagggggagccttgggacgggtttgggtccccaggaggaaagccttgggtataatttatttttttaggagcctcttgccctgtcccttgcagctttcgccctctgctttgatgggtgaggggaactcatgttttttgggaaaaaggaaggggggctgtggaaataaaatgtttttttgcttcca

SEQ ID NO: 702831 - DNA, 150 bp, Homo sapiens
tggtcgtcatctaacaatcgtcgtaactggtaaaatcctgcccggtcagttaaaggataagttgttgtgtttggtctctcccacaaccaaaaaacaggcacaactgcctaatgagcatattaggatcgaggaagcataatgttagagata

SEQ ID NO: 702832 - DNA, 116 bp, Homo sapiens
ccctagatttcccccttatgtgcgtgtgcgtgatgttatggctttcgtctatgattaaaaatgcctagcccacttcttaccacaaggcacacctacaccccttatcccgtacgagg

SEQ ID NO: 702833 - DNA, 611 bp, Homo sapiens
  misc_feature (176)..(176): n is a, c, g, or t
ctgctattattactctctcaaagcaaatggaaggtttccctcctctctcccagctggaagcacctatcaaggtaactaagcggtttgttttttttttccttaaagccacaaggcccttcttttcggcatcgtgccccagttttagtggcgcccttctccaaagcccgttttggccntggcttttcccgggcccgccccacaagacttgcaccggcacagccctcgctaagcggggcagaaagctcatggtgtagtttcgtgggatcgtgcaaaagcccacgtgtttgggggacacgtcaatgtccttaggtgactgggagactttgaggcgaaagttctgcatgacggtggtaaagaagagaaagagctccattctggccaggccttctccgaaacagttccgcttcccgatggaaaagggcacaaaagcatcactcttcttaacttgccctttctcatcaaggaaatgttggggattgaagtcttgggggttggaaaagaacctgggtcctctcagcacaaagcccagcatagggtcccttccgttgccttggtaggaagaagaaagttgtgtgtttaagaaggttcgggggattgcctcgtcccgaatt

SEQ ID NO: 702834 - DNA, 115 bp, Homo sapiens
ctttctccgtccctcttgttcttcagtgtgcaggttctcatacacatctccttgtgtttggacgaggtggccatgcctcgaggcctgaccctgtggaagcatttcgcgatggaca

SEQ ID NO: 702835 - DNA, 222 bp, Homo sapiens
tcttgactagcaaggtagaagcctacctagtacattctaccaaaatgaatatacaaatagtaaggctacccctgagagcataactacactagtaccctactacaaaccacagataaactactatacgctatacaagtatacactaagcctatagtacaacacctaacacaagacaagtatagaaatctatatcccagctaggcctaccctcagaaacagatc

SEQ ID NO: 702836 - DNA, 1098 bp, Homo sapiens
atggccccttatgcattttccacctgcctgcctgcctggtgcctatgttaccatcacacccctgtgggatggatgcctgcatgtctgcctgcatgcctggccccagtcaccatcacctgcaaccatgatgcatgctgatgtgcctgatgacccaatgcatgcctggccctgcctgccccccctggtgcccccgccctctgcgcctcccccttcctggtttttgtcgtgtgctgcatatggatgccttgtgttggccctggtgctggtctatctacatctgtgcagtgcagccattgctcagcgctgacgtgtgacacacgacacgcgtcaatcagtcaacctgaatgtgatttatgatgcgacacaagtaaacacatttggttccacattgttatagtgaactcgagactcttgcgatttcattcaacaaagtgaattgaacacacaattgaaagatatgtatttaacggtaacaactctaatataatatttgagcaaatataacagaaactgaaaataacacccaccagagaaaagattacacaattccagcaaaggatagatacagagaagaatttctgtacgaatgagacattgttacgagaacaagtatttagaacttagtaattaagataatagagaacggcatacaatcaaaggagcttagtctgagcatgaacacagtcataaaaatagtataaacaaatgattcattagatgaaaggcatcgtttacgaaaactataaaagacgacgacagaagcttataatgttatgacagatctaagaacaccgctaaacatacatttagatagtaacgatctaataccaacggatcagtaatagaaggattccattcaagagaacacaacttaagacagacataaaatataatcagtacaaattagatgaatcagttgatgataaatatgtagatgataaggtgaatttgaattatatgttgcattcaaagtaaatgagatctgaggaccacaagagaagaaggacgaggaccgattacacatcaaatgtgcaagaatatataccatcaaatattagatacatattcgaggtatgatccttatatggtgcgcctaac

SEQ ID NO: 702837 - DNA, 376 bp, Homo sapiens
  misc_feature (18)..(18): n is a, c, g, or t
  misc_feature (22)..(22): n is a, c, g, or t
  misc_feature (27)..(27): n is a, c, g, or t
  misc_feature (38)..(38): n is a, c, g, or t
  misc_feature (40)..(40): n is a, c, g, or t
  misc_feature (43)..(43): n is a, c, g, or t
  misc_feature (50)..(50): n is a, c, g, or t
  misc_feature (65)..(66): n is a, c, g, or t
  misc_feature (71)..(71): n is a, c, g, or t
  misc_feature (102)..(102): n is a, c, g, or t
  misc_feature (120)..(120): n is a, c, g, or t
  misc_feature (139)..(139): n is a, c, g, or t
gccgtcacacgcacgganaggnatcanagagcagaganantgntagtgcnccaattgtgtcacanngctgncgaggtcggtacatcccgatactgataaatngtgtggaggaatgggtcngggtctgtgttagcgggtncggttcaactcagagatttgtgaatattagtcttaaatggaaggacttcaaaatccagagagcaaaatagatgcataagccttctccggtggcgtggtgcgcacggcgccggagaagggaaaaagggctacctaagtatgagtcgccaatcaagagacaaaccgatagacagctgtccctgattgaggccataaccgggccaaaaacacaagaactacagaaacatagacaagaaaa

SEQ ID NO: 702838 - DNA, 200 bp, Homo sapiens
ccatcctcatgccttccagtctgcagacccctcagacccaggagcagaatgggattctagactggcttaggaaactgcgtttgcacaagtattaccccgtctttaagcagctctccatggagaagtttttgagccttactgaagaagatctgaataaatttgagtctcttaccatgggggcaaagaagaagctcaagacc

SEQ ID NO: 702839 - DNA, 104 bp, Homo sapiens
cctaccacaagtgctgccattttctcagtgtgcaggcacagcttcttcacgctagaaattgggaataaagccaggcacagtggcccaagcctataatcccagca

SEQ ID NO: 702840 - DNA, 873 bp, Homo sapiens
atgcggggcttttagctatgccgctgggacctttaatctcgcctggcgcgctgcgtattcctgatttgaagctgcggtgatcgctagtggacaggcgcctatcagagtggacggtggccattggaggtcctgcacttagcgagctccccgagcgtatcgagtttcggagatggtagtcgctaagaacaggtcaaccaatatgctgtcatgggcactagatgtgagaattggtgtatctagctgtaccaaaaaggattttcatgtttagaagcagtctattcgaaaataggaggctgattggataaaagcttgcagcatgccagataagtacgaaccccgaagatagtgacatgcttgattgggcattggaggatatgggagataagagctgtgtagtgaactgttgtgtggaggtccaagagaaggttcccagttcgtgtgatggggtttacacacaaaaagagtaaactgaaagagacgggatatcaatgtgggccctgctgatcatacagtggaaaaagagaaatttaaatggagacttttgatgctgaaaatcaggttgtcgagaagtaagctgagtgttaataagaatgtactagcagctgtgttgtgcattcaagcttttgtctggattgtacactgtggtatattgtaaaaccgtgggcgtttgacaattgtatgggcatgtgtcttgttggaacgatcgtggttgcaacatttgtgtaagaccaaaggaaatgacagataggggagcacgcaagctagtggctgggggaaaaattggggagttggaaagtaaccattttaaaactagggcacaataagatggaccttatttaaaaatattggtttggagcaacgtataaatcttcc

SEQ ID NO: 702841 - DNA, 130 bp, Homo sapiens
cctcttatacaggctaagcgagcgtttgatggagctgctgataagctctgctgtgtggtgtaaggacatatctgcctcttcctccttgctggggattttcacctggagtgtgacgggtgggaggcgggag

SEQ ID NO: 702842 - DNA, 177 bp, Homo sapiens
gttgatcgtcgatcaatgcaacagatacttttttatcctgaaccagtttagcaagagatggtaaatagcttctactttccatgtccatgtcactacctgcttttatggctaattctgctgcttcagatttattttttgcgtaaccgtgattaatcatcaatgaccaacaatttattg

SEQ ID NO: 702843 - DNA, 1541 bp, Homo sapiens
gggcggacgcgtgggtgagagccacgctgctcagatcatgtatacgtcagaccgagtcaggttattttcagggaaggccatggcaggccatcagtgaggttcagtttccatccactcaggcatgtcatcacaggtgcacgcacaccaaacccaaatcacctattctttccatccacttcaactcatcacgtcactttcatctctggtcaccactcagcacatgctagtaggtctatgcagggcacatgttcagccaaggcacaccaccatcagcacagcatttggtgtattccatcaacagcctagtctcagagtgtaggccaggtttatagtgtggtacaccacgtgccatgatttcacccattcacaagccaagggtcccacaggcattccatgcaaccggtggctttcaatggcacacgtcatcacatttagcacactcaagcaatcagcccaacagcacacagtcaggcacagtgcaccaacacatggtccattaaacaacacatccacgcacaggcaataggcaaggcccagaatatacaccagggcatggccaatagcaaccccaacgtgggataaggcaaataaacaaatataccacagacacacataccagccacagccagcacacacccaaacacagacaagcgggatggagcccacacgccacacaattatagccaactatggcccaagagtgaatcgacaaagacgatggctcagaatggagagcaccaatctatggccagtaacccaatgtatcaacagattttcaccacaaagcaagtccagcggcacacacacacacagcacaagtgctgttgggaccacaattcgggggcccgttttcaccccagggcgcacacaccattaggacatgacaagcgggtaaaccgcccactcgacgagtagaacatacagcgagggataaggcaccggcaggacacccccgtaacacacacataacaacacaacagctaccactattacacgctatgagaaccaaggaccacaaagatacgcaacgcatagtgacaacaagccgatatacacacttccgcccaaaggacacacaacgtgggacaacagaacacggacaaggcgacgatcgcgttaacccaccgtacaacgcggcacatataaagacacagattgggaccgcattagggaacagatacatatataagaaacacaagacagagggagcgacccaacgacgtggacacacgagtgagagacaaactagcccccaactgtgcattgacattactggaaggacgcaaccatcatagcagcaacagcaggaggacaacaatagaacaatagaacaacgagccacacacacaacagtgtgaaagaacagaacatgagtacacaacgagaagaaaaacgactgtaacggaccaaaagtgtaataagtaaccagtaagcaacagaaggagtaaacacacaccacagagaggccaacaccccgcacacaaacagtgacgaaacgaaaaaaagccaaaccacggcgacaccacaacaggcgaacgaac

SEQ ID NO: 702844 - DNA, 100 bp, Homo sapiens
cagcagcatagattattaccgagtttccttttacttttgttaacctttccttatgagcatgcctgtgttgggttagacagtgagggtaataatagacttg

SEQ ID NO: 702845 - DNA, 672 bp, Homo sapiens
  misc_feature (245)..(246): n is a, c, g, or t
taaagtaattctgccccgttaaaatggcctgaggtttgcagaaagtgtttttaaaaatagagtatcctaaaggtatagaaagggtccaaaaattagcacagcaactttttcataccttgatccccatttatccagccccattaaaaggtaaaaagctacaccttaggcacttggccaagcttagtccaccaaaattcaggtattagtaaatgattgaatcctcataaagagtaacttagaagacnntgtaagtttttgaaaaagtgactgacaatttaattgcaaaagacacagaatattaaggcataacaaagtaaactgaaatgaagtttagttatcaatattcatctctgagaaagttgtgaatcagttcctttagataacatgtggctcaggttgatttaataatgggtctggggtgtctgcatctctatgctgcttttccagcactgtactgcctgtagtggaaaagactcttgaagtccaccttgcgagatttctgcacagcttcagcaaaaagtttggtcacctgaaaattagtgaggagagggattccactatcaacagctgtcctccgaatcacataattatcatggacaaatttagtgttgttgttgggaaggttaatcactaggtcaatgctgccatctctaatcaattttctgatgaaag

SEQ ID NO: 702846 - DNA, 614 bp, Homo sapiens
  misc_feature (189)..(189): n is a, c, g, or t
ccagagcctgactggcggacctgctgcgggagccgctggaattggcatgcctcctcggggcccgggacagtctctgggcgggatgggtagccttgtgtgccatgggacagccacatgtcatctctcagggcagcacgccatccatgggatcctcggggaatgggccgctcacagtcatggcgtgtcgtngtctagcggcaactccagcagacccagtctgcagctccaggcaggtggcgctgcagacagcaggggagaaacagcaagcagttcgcagcacgcagcagcaggcgggcgcgtacagcaagcagcgaagcagacaggagcaacagcagcagttccaggctcagacagagtgccatgcagcaggcagtccaagcagtagtgcagcatgcagcaagcgaggctccagcaggcagcaagccaggcagcgagcagcattctaaattggagttggcattcatcaaaatcagacaaggaggaatacgaggcaggctagcgaacgcagcaggctgggggcggaaatagccacaagggtgcagcccccaaacaacagaaacagcagcagcagcaggagcagcaggcagcagcagcggctttggaggacccagcca

SEQ ID NO: 702847 - DNA, 744 bp, Homo sapiens
  misc_feature (353)..(353): n is a, c, g, or t
  misc_feature (389)..(389): n is a, c, g, or t
  misc_feature (422)..(422): n is a, c, g, or t
  misc_feature (447)..(447): n is a, c, g, or t
  misc_feature (488)..(488): n is a, c, g, or t
  misc_feature (490)..(491): n is a, c, g, or t
  misc_feature (497)..(497): n is a, c, g, or t
  misc_feature (499)..(499): n is a, c, g, or t
  misc_feature (506)..(506): n is a, c, g, or t
agcgggctgttcgcctgcgtcgctccgggagctgccgacggacggagcgcccccggccccgccgggccggccgaccgccgcgcatgcccttctccaacagccacaacgcactgaagctgcgcttcccggccgaggacgagttccccgacctgagcgcccacaacaaccacatggccaaggtgctgacccccgagctgtacagcggagctgcggcgccaagagcacgccgagcggcttcacgctggacgacagtcaatccagacaggcgtgggacaacccgggccacaccgtacatcaatgaccagtggagctgcgtggcgggcgacagaaggagtcctacgaaagtgttcaanggatctctttcgagaccccatcatcgaggaccggcnacggcggctacaaagcccagcgatgagcacaangacctgacctcaacccccgacaacnctgcagggcgggcgacagacctggaccccgaactacgtgcngnngctcgngnggtgcgncacgggcccgcagacatcacgtgagcattctgcactaccccccagcactgcaagccgacggggaagcgcacgcgcacatcagagaaagctcagcggatggaaagccactgtccaagcctgggacgtgcgaacctgagcgggcctgatactaacgccgctcaagaagcatgacggagcgcggacgcagcagcagcttcatcgacgaaccacttcctctttcgacaagcccgtgtcaccc

SEQ ID NO: 702848 - DNA, 174 bp, Homo sapiens
ggaagattggcgagacgagcacaggagcaactttgctaggacctggtgtaccagatagatgggggcgacatcgcaacagggtacttcggtccttggtggagcatctagctcaggtgtttcggtacttagcctgttttagaaaggtgatgccatgattatggaggacacagggaa

SEQ ID NO: 702849 - DNA, 1101 bp, Homo sapiens
agcgggctgttcgcctgcgtcgctccgggagctgccgacggacggagcgcccccggccccgccgtttgggcctgccgaacggcttctgcttggtgcctttccatggaggcgcgtgcgctgtggcctttgtcctgtcggggcttgggtgccgatggcccgccgccgtgtgggtgctggccagtgcagcatggattcaggccgcgaggcagcacggagctgctattggcgcagcttgcgtcgttttgcgccggggaccgctgaaagggcgatgcccacatcgtcgtgagctcagtctctgaactgaatacagggacagatgtgagactttgccacggaggacacatttgcagatatccctcctttggcacagtcgagtgacttcagggttgtgccgagagagtaaacgtgacgaaagataggtaaaagaacgagtgttccttgacgaaaacggcattcgattcgcaaatctctttacccgggaactgtgcaaaccggcttgagacgcacctacattcgtccaattcgaagagtggaaaggagcctaattagcaccgcttgcctcttgcatgcctacgagacccatatgacgtcgtagcgagagggttggggaacctgatgacgtagttaaacttcgacaaggacctaacaggttggtctcgcaagagtgctcgggtgtgggtttgcaagacttatcccgaggacaagttatcctttatccactgaatttgacgttgaacatagcacggaacaacggtttttagcgcaaatggaaaggaaagggtggggagaaaagcagaattcgatggaaacagctttttacaacggacttcgagggggggggacctaccaagcccctgggaatcatggctccttggaataacggacaattgtgtggccagcgttgtaacaggggaaacagtcctttccagctttccaacaaggcccactttgggctggtagggaccgtaagggaagttttgccaagttggccatgccgggcggttgcaaactttgcaatcttaatcattcccagttcacgaggtttgggactcattgggggccaggtcttcgtggacgaatgacccggttgtaatgtgcctg

SEQ ID NO: 702850 - DNA, 1053 bp, Homo sapiens
  misc_feature (1053)..(1053): n is a, c, g, or t
agcgggctgttcgcctgcgtcgctccgggagctgccgacggacggagcgcccccggccccgccgaggccagcacgcccggcggaggcgatagaccctcggtctacgagcactccaccaaggcccctggacggttggcgctatgctccagggcgagggtagataggtgttcgcgagagacatcggactcgccctactagactagtcagaattggcccaatggctgggtagatgtcacgtacgcctagtcagcgccgcgacgctgttgactctgccaaaggaaacgacaggccgcacgacgaggctgtgaagcgtctcgcgaaccgtaccgattcattacccaaggaccaatgtggccgctagggtaccaagcaccggccgagctggctagttacccatgctaatagtaacacagctggggcgttggtgttgggccgaggtcgaactgaagtcagatctctggcatagggctagatgcttcgagacactcattgctgagtctccagttggctccaaggtgatgccgagactgcaaggcgtactgaccaaagtcacaagaagcactcgcacccaaccaagggacacaggacacattcatgtccacggaatgacacccttgtaagagtgtcgtgctgtacttcaatctttgggtacaaccgggacactaatccgtcggcgcggaacttacggagtggctcgcagacgaagcgcaaacgtagtacgatccggattgacttacacgctttgcgccctcaccgtaacttgcatttacttgctcgtggagaggaaagccaagccaccgatcagagggaattgcatcttgggcgaagtcacagaccaagaaaccggtacccaaaggaggttccggtagtcggtaggggcagcgtcgtggtgacacataacgctgtctctagtgaggccttgggaaccgtgagacgggtttcagccaacattcttagcggcatcaaattttgacccgaaccaagttgtcccaatctaacagtctccctccaccgggggtgttacgttgcattggtttccattgggaccctacn

SEQ ID NO: 702851 - DNA, 780 bp, Homo sapiens
agcgggctgttcgcctgcgtcgctccgggagctgccgacggacggagcgcccccggccccgccgaggcgctacgacgcgcaggaacgcactgtcctagagggtacctgcaagttggtattgatcttggaaccacctactctggtgtgggtgtatttccacgccaaggtagaaacgtcgcagcataattgccaattgatcagggtaaatgcagaaccacatcctagatgctatgtcgctcgtttacggacactgaacggttgatcggtgatcgccgcaaaggaatcatagttgcaagtggatgcgcccaacaagcgagagtttcgtgatgtcaagaagtgctgagttgtgacgtgcgaggatgttgatgagtgcatgtctgatccaggtcgtgactatgaatactattggcacctttatggttgggtgaactgatgactggcaggtcccaaggtccaaggtaggaactacaaggggagagaccaaacagcttctatccagaggacggtgtctactattggttctgacaaagatgaaggacatcttgcaggaagcctaccttgggaagactgtgaccaatgctgtggtcacagtggcagcttacttgaatgactctcagcgtcaggctaccaaagatgctggaatgtacttgcttggtctcgaagtagtacgtgtagagattgattaactgagcgcaacatgcatgcatgcatagttgcgttacggcttagacaaatcaggttggagcagaaagaaatgtgctcatcttgtgatctgggagg

SEQ ID NO: 702852 - DNA, 166 bp, Homo sapiens
  misc_feature (30)..(30): n is a, c, g, or t
  misc_feature (70)..(70): n is a, c, g, or t
  misc_feature (81)..(81): n is a, c, g, or t
  misc_feature (130)..(130): n is a, c, g, or t
  misc_feature (153)..(153): n is a, c, g, or t
ctatagtcccacctactagggaggctgagncaggaggttcacttgagcccaggaagtcaaggctgcagtnagctgtgattncaccactgcactccagcctaggcaagagagcaataaatcttaaataagntttattatcgtacttagcaggangttcattggtaag

SEQ ID NO: 702853 - DNA, 323 bp, Homo sapiens
  misc_feature (45)..(45): n is a, c, g, or t
  misc_feature (68)..(68): n is a, c, g, or t
  misc_feature (97)..(97): n is a, c, g, or t
  misc_feature (192)..(192): n is a, c, g, or t
gtcggtctagaccgcagatgtaggaaaggggacgtcaggccgggnacgccgaggccggcgaagtcgtnggcgtacttgagcttccaggagcgctcgntgggcccgttgaaatccgagtactgctgggagttgtccaggtacacgctgtcgcactgggagcgcgatatcgacctgaaatatgtggtgcagggnggcaaggccaaggacttggccgtgcgcctgcaatgggcgaccaatcgcggcagcaatggctactctgcagtggaccgcgatgtggatgaataccgtatgatcgtggattacccgatcaacgtgttctgagt

SEQ ID NO: 702854 - DNA, 657 bp, Homo sapiens
  misc_feature (507)..(507): n is a, c, g, or t
tatagttagtgagaatgttaataagtacaaccactatggagaaaagtttagaagttcctcaaaaatctaaaaatagaactaccctgtgatccagcaatcctattgctaggtgtatactcaaaagaaaggaattcggtatattgaagagatatctacattcccatgtttcttacagcactattcacaataaccaagatttggaagcaacttcagtgtccatcaacagatgaacagataaagaaaatatggtacagatatacaatggagtactagtcagccataaaaaggaatgagatcctgtcatttgcgacaacgttgatggaactggaagtcattatgctaagtgaaacaagccaggtacagaaagacaaacttcacatattctcacttgtttgtagaaactaaaacttaaaacatttgaatttatacagcctagaatgatggttaccagaggctgagaaagagagtgggagactgtgtagaagtgggcatagttaataggtacanaaatatatttagaatgaatgaataagagctagtatttaacagcacaataggatgactacaatcagtgctaatttatggtacattttaaaataactaagataccagttggatttgtggtaacacacagattcatgcttaagttatggccct

SEQ ID NO: 702855 - DNA, 812 bp, Homo sapiens
  misc_feature (6)..(6): n is a, c, g, or t
  misc_feature (92)..(92): n is a, c, g, or t
  misc_feature (115)..(115): n is a, c, g, or t
  misc_feature (118)..(118): n is a, c, g, or t
  misc_feature (124)..(124): n is a, c, g, or t
  misc_feature (163)..(163): n is a, c, g, or t
  misc_feature (168)..(168): n is a, c, g, or t
  misc_feature (172)..(172): n is a, c, g, or t
  misc_feature (184)..(184): n is a, c, g, or t
  misc_feature (302)..(302): n is a, c, g, or t
  misc_feature (309)..(309): n is a, c, g, or t
  misc_feature (321)..(321): n is a, c, g, or t
  misc_feature (331)..(331): n is a, c, g, or t
  misc_feature (547)..(547): n is a, c, g, or t
  misc_feature (641)..(641): n is a, c, g, or t
ccattnccccccgagttcataattaatcagtatgggggaaagcgcgagagcagcaccatttcaaacaaaggcggcgcattcaacatgggggngtgtgcagggtgtaggcgtgggngtnacgaancaccagcgtttcttccccatggggcccagttcaggcggncccancctngggcgcttcttncccctcccctttagtaaccccattcagcaggcagcataaaacactctaacccttcattttgctgaaagcccctgcagatgacagtttccttcctatcatgtctgcggagctccaaggntgggggngatgttgaggcngaagccagcnacagtgcctcagctgtgcctttcctggagagcgggtggccgcccccagcacatccctggcacacgggcttgcataacagactcttgtaccgccatctctagcacaagaccatggccacatctccccaaccactcagcccgcacagcgtgcaaaggtggggagttcactttaatggcattcctccaacgacttattgtaaaagaaacaaggcatctngtcctgggtgcgcaacacccagcagcatccgtttagaccaccaagggtaggctgcgcggggtgcacagggatcccgctgcggctcggcgaaagnggagatcctgggatccagagcagcccggggagccctggagtctggaaaggacacagcagtgggggcggcggcggcaactccagctctgagcccgttggcaccccgcacggtggccccagccagctggaggcaggctcaggagcggctcctgttcttgtggttcccacgatc

SEQ ID NO: 702856 - DNA, 467 bp, Homo sapiens
cgcggctgcgcggggcagggagcccccgcccctgcccctgcctcccatacgagccccttcccatacgctggcaccatgtgggaccagcggattttgcgaggaggatggggcctgtgttggtgagggctggttgggagagagggacacagagggtatgcctgctctcacctgcccctgtcgctgtgtcccttgcttccggcccctgccgaccgcacctgctccacggctcacttggctccattcagagacccatcagcttcctcttccgttcctcctctcagagtggctcagcgcccttcctcaccatactctgtcctgcagacctctgccggtacccccctgcgttccggatcagaaggactcagtgactcagctgcgcccggtccttgagtcccggctgctgctccccctgcctcaggacctggccgaggctcttgccagtggggtcatcctgtgccagctggccg

SEQ ID NO: 702857 - DNA, 900 bp, Homo sapiens
  misc_feature (594)..(594): n is a, c, g, or t
cgcagtggctcacgcctgcaatcccagcaccccggaaagccgaggggggcggatcacttgaggtcaggagcccgagagccgcctggccaacgtggtaaaaccctgtctctaccaaaaatacaaaaatcagctgggcgttgtggtgggcgcctataatcccagccactcgagaggctgaggcaggagaatcacttgaacccggaaggcagaggttacaatgagccaagattgcaccactgtactccagcccgggcgacagagcaagactccgtctcgaaagaaaaaaaaaatgtctttagctattaaacaaaggaaaggccagagcaatcaggcaagagaaagaacatcaagggtctccaaattgggaaccggaggtcgtcaaattagccttgttaccagataacatgaccttatatttagaaaaacctaaagattccaccaaaaaactgttagaactgataaattgaggaaagattgcaggatagaaaatcaaaatccaaaaatcaatacaatttatatacatcaacagtaaacaatctaaaaaagaaatcccaagtgagtaaatcccaagttaaaatagctacaaagaatatnaaatacctaggaatccagtttagccagagatgttgaacagatctattaaagggaaaacctattaaaattactgatgacacgacacttgcacgaggacacacacacaaaaagggcacaacggttattcctatgctccctggacttgggacctaacttacagtctttgtttccctattctttatatctctgcccttttggacacacccgtctgaaggtcacttttcggacagaccctttcatataacgggacacggggtcttcatatcaactcggtgccacgaccttcgggtcaaaaccccctattat

SEQ ID NO: 702858 - DNA, 589 bp, Homo sapiens
  misc_feature (120)..(120): n is a, c, g, or t
  misc_feature (263)..(263): n is a, c, g, or t
  misc_feature (435)..(435): n is a, c, g, or t
  misc_feature (534)..(534): n is a, c, g, or t
taagcaacgtcgtggttaaatgatgcatatgttgctggagttgatatcacggtggacgacgcgtggctctgcttatcgtcgtggaggaatccagccctcttgcggcgcttacggcgatcntcgacccgctgcatccatgataagactggtcctggctgggatcccttgacaccctttttaccatggagaatatcatgcaaggagcctcttgtcgcatactcataagcaagaacacgggtgctccccacagctcagtacccganaagttggatcatattgtcatgtttgtcctcgtgaaacagccgacacctgcgcaaggaactcttggtcaggctgtttgccagagtcgagcctcttcaccgcgcatttcttgccatctttgagtacaccaaagaaaactctcgcgtacgacccctctcctataagagcatcatngctgaagttcttggttatttccttcagttcttctaagggaatgtctggtacttcaattggctgagttcttacggtacggacggcattagtaggggctgnaccccggttatatccattgttacctcctggggcagggacccaggggatcctctag

SEQ ID NO: 702859 - DNA, 383 bp, Homo sapiens
  misc_feature (367)..(367): n is a, c, g, or t
acccgttttacactacgaagaaaccaataaccaaagcatctgacacaggacaaagttaggagatccaatttcaaaacgtaatacaaagctatagtaatcagaatagcatggtgttggcataaggatagacatataaaccaaatggaatagggtctgtaaatcctaaaataaatctctacctactataaccacattgttttttagacaaggcgtatcaagatccattcaactggggaaggaatcattctcttcaacaacatggtgcttggacaaccaggatatccacatgcaaaagaattaagttgcacccctacttcacaccatatacaaaaaaattaactgacaataaatcaacaatctacatatnagagctaaaaccataa

SEQ ID NO: 702860 - DNA, 196 bp, Homo sapiens
  misc_feature (131)..(131): n is a, c, g, or t
  misc_feature (159)..(159): n is a, c, g, or t
gtccaatagccatctcagtcagggttggttgggacagcctttttccatcaaattccagtccttaaccatgcaaagcagcaggtggtgcatccctcaccagctgactgcatctccaccccaaccaccctcgntttttccagcatacaactggcaggtccncagtggcaggttttggtggcacttcacatcccaggca

SEQ ID NO: 702861 - DNA, 363 bp, Homo sapiens
gatgggagaagcagcaaagtcaggaagcaaaaggacatgaatagaaagaaaagggaagtttgggcacagacacagacaagcacacaggaaagatgaggggaagacacaggaagaagacagccatgtgattggagtgatgcatctacaagccaaggaacaccaagtattgccagcaaacaccaaaagctaggaagaggcaaaaacttcccttacagatttcagagggagcataaccctgatgacaccttcattttagatttctagccaccagaattgtgagacattgaattcctgttgttttaagccatttagttggatgtacttagttacatcagccctaggaaataaatacaaagcccattt

SEQ ID NO: 702862 - DNA, 294 bp, Homo sapiens
  misc_feature (29)..(29): n is a, c, g, or t
  misc_feature (143)..(143): n is a, c, g, or t
cccccccccatttttttttccattttttngaggggggggcgttttccccctttgggccaaaatttgacccccttttttttttttggggagggggggccccccccccccttttttggggtttgtttaaaggggccccccccctnacccccccttaggggtgggggggggggggcccccccccaggccccggcccccggggggttttaaatttttttttttttgcggggggtttcggggggtttttcccctaaagggggtttttttttttttttaaaaaaaaaacccccgttttga

SEQ ID NO: 702863 - DNA, 607 bp, Homo sapiens
  misc_feature (143)..(143): n is a, c, g, or t
tggggtctcccgcggatccctcccccccccacaaaaatattttttttcccccccccccccccaaaagacgaaaaccttcccaaaaaacaacaccccccttctgttgttggggggggaccccacaccaaaaaaaaaaaaggccnaaaaaaaagaacgttttttttttaaaaaaaaaaaaaaagagggcccctccttttttccccgagaagaatgggcccccccccaaaaaaaaaaaaaaaaaaaaagggggggggggggttccccccccccaaaaaaaaaaaaaaagggcgcccctctttttttttcacaaaaaggggggggcttccctcctaaaagacccccccccccaaaaaacctttgttttccccccccaaaaaagaaaaaaaaaggggggggggaaaaccccaaaaaattttggggaagccccacccaatggggaaatccttttccaaaaaaaagccccaggcctttttttatttttaccaaaccaaataccttttcggggggggccccaaaaccaacccaagccccttccaattccctgaccaatcgggttccaaaatccccttctgggtgtgcacccagaatgaccttgtaggataaagcc

SEQ ID NO: 702864 - DNA, 83 bp, Homo sapiens
gggccagcagggatggggttgggggggttgtcccaaccccacctgtttccttccccaggtccactaaattccctcctgcccta

SEQ ID NO: 702865 - DNA, 109 bp, Homo sapiens
aaacagcttcagcatgacaagctaatggtcacttcaccatagtggacaaagcacccagagggtgatgctcttgtcagataggtcatagtcagtgggggtaccgagctcg

SEQ ID NO: 702866 - DNA, 262 bp, Homo sapiens
gggccggtcccgatgagatgcgtttccgatgaagatgcgttttcgccgatgcgttttcatttctctaaaaatgtttctatacaataccaatctttttttctttgctttagtttcagcggcacatatcttagaagggtccatgttgtaaaataagtcaaaagcagctctaaataattagaaccttctgccagatctgttttctggcactgcctcttctacgtgttacatcgcgccatcattggtacgaaaacggcatcttcat

SEQ ID NO: 702867 - DNA, 235 bp, Homo sapiens
catgggatactgtatttctaggagagagggcatgtccagagggtggtttgaagccagtcagaagactataggagagacctgttcttttccgcagaggtcctaggccatctgtggatttggagggttatgggtgatgaggggctgccggagtgatgcggagtccttgtctcagtcgtgactggtggtctcctggcggagggtgggagggattccctgatgtagactcaggtgttag
